United States Patent Application Publication US 2011/0296543 A1 - sequence listing, part 21

SEQ ID NO: 92408 - protein, 1130 aa, Unknown
  Obtained from environmental sample
  DOMAIN (810)...(888): OB-fold nucleic acid binding domain
  misc_feature (1)..(1130): Xaa is any amino acid
LSQKEINEVVIGISKKTGIPLVATNDVHYRDKDDYISHDVLLCIGTGKVRTEEKRKRYYGDQFYFKTGDEMAEIFPDYPQAIENTVKIARRCNADVPKIETKELPQYLPEFKIPENFSEPSEYLKHLTAEGLEKRYAKVKESDLNKWEKIKERAEYELNTIINMGYTGYFLIVWDFIHYAKGQNIPVGPGRGSGAGSIVAYSLRITDIDPLKYGLLFERFLNPERVSMPDFDIDFANEGREEVINYVTQKYGKERVAQIITFGTLGAKAVIKDVARVLGISISESEMITKLISFDPEITLKKAKEEEPRLREMESDPRFTELFTIAHKLEGLNRHSSIHAAGIVIGKKPLIELVPLYQEREEKGGNIATQYSMNFLEGCGLVKMDFLGLKNLDIIKHSKELIRQRGGKYSKFNIEDIPEDDKKTFKMLGEGKSNAIFQFASDGMQDILRQTKPTSIEDLTALNAMYRPGPMQFIPRFVDAKTGKAPITYPDPSLEGILKETYGVIVYQEQVMAVAKIIAGYSMGKADILRRAMGKKKKEDIDKEKIPFLQGAAKQGYSAQKAGEIYDILVPFAGYGFNKSHAAAYSVLAYQTAYLKANFPAEYMAAALIVEIKSADRLLYTIVETRKMGISVDPPNINYSDKLFTVVDGRIVYGFLGIKGVGDIPAEEIVRGRQNGHYKNFMDFLDRVDIKAVSKKVIELLIHTGAFDDFKVSRETLAGNMEKAIEYAQKMKEDRLLGQSNLFGDSNESGMPDFQFTEFPPVSRSERLNIEKKLIGFYFSGHPLDEYRQLWEKAVKVDLAHHETIQPGNHILIGLIKNIKTINSKSGKMAYATLEDYNGEIEVTFFSRAWETCEDKAQDDKVAILKGKIEYQRNKDKYGFITDSWIDVREAKAAIEEEEAMQKKREKFRSTWLYMADLKSGGLAKAEKGSYTVIGQLVSLRESRDRNGEDMAFGTLQDFEGNIDLVFWAKTWKENRELLNTGEFVALKGSLDPERDRDPQKPSLKVSKVDDLAALSRSAARKAEAGERPKVPPLEMQAEKMQNSPNAEQPAPPLNEIHIRLENGAADRDETIRPLRNYLTGNQGPCPVYIHIGEKTIRADKGLSLEAEKEALGVLEGCIGVAQSWKEQCK

SEQ ID NO: 92409 - protein, 335 aa, Unknown
  Obtained from environmental sample
  misc_feature (1)..(335): Xaa is any amino acid
VFKEAVVADDIRANTNYDFETVLVDSHREAYNLLKNGRADAFFGLDTAEGAFDIYDDVVNEEFFPLIFRSSCLSTHIEEFQPIINILDKAMNDNVLVYLTEMQKKGLRQYQENKIYESLTEEEREFLKHNVNTPIPVVAEFSNYPISFYNNNENEWQGIFFEAMKQVSILTDLKFEIVNEPDTPLLELIDMLENGDAYILPELHKTTEYVGRFIWSDIPIINDNFAILTRSEFRNIDVNDVFHLHAAIRRDTIYSEMFKRIFPAHRNFTEYDTMEDTWDALRKGEVDVIFASRRRLVIYTNYYELADFKLNLVFDHVFNSYFAYNTDAVILKSIV

SEQ ID NO: 92410 - protein, 1078 aa, Unknown
  Obtained from environmental sample
  DOMAIN (914)...(989): Hpt domain
  misc_feature (1)..(1078): Xaa is any amino acid
MLEKGDAYILPELHKTTEYIGRFIWSDIPIINDNFAILSRSEFRNIDVNDVFHLHAAIRRDTIYSEMFKRIFPAHRNFTEYDTMEDTWDALRKGEVDVIFASRRRLVIYTNYYELADFKLNLVFDHVFNSYFAYNKDAVILKSIVDKALRLVNVNNMANQWIYRTYDYRVKMAAAQRPWLIGSSVSFFIVLTLVTILLIKSRSSGKELEKLVALRTGALEFETSKLQSVLASIPDLMYTKDKDLRYTQCNHAYEKFMGASEEILLGKANSDGTWFPAEDVDKIQLTDEIVINENRIISHETRIHSPATGKEGFYETVKAPLIREGKVVGIVSIIRDVTKRKEMERDLSLQTSLFKTMLSSLPDAVFCKNLDFKYTLCNNYLADLVGKQIEEMLGKDDIAALGLSAETAKISFENDLKVVNEQERVAYEEPIPCADGVTRLFETVKSPLILDGDVVGIMAIGRDITRRKEMEEEALAANRAKSSFLANMSHELRTPLNVVIGLTDLTLEEDLETSTKENLVKINNAGTTLLSIVNDILDFSKIESGKLTLSPVEYYLSSLINDIITLVLTRLGEKPIKFKLNIKDDLPNKLLGDDLRVKQVLTNLLTNAIKYTREGSIELIMRSTKINDKVWLDAAVCDTGMGIPEEDISSLFLDFYQVSSNATRNIEGTGLGLAITKKLVEMMEGEIGVASEYGKGSTFSFRIKQGFVDDSVLGAEVSEKLRTFNFFDDKRVVSKKLIRVNLSYARVLVVDDMQTNLDVAAGILRKYKMQVDLLTNGPAAIDRMRAGTPVYDLVFMDHMMPGMDGIETADNIRAIGTEYAKKIPIIALTANAIQGTDKMFYAHDFQGFVTKPIDVMEMDSVLRKWLYDPKREGAVLSEPVITEEEEINIKIEIPGVDVKKALSLYNGDKDIYLPLLRSYITNTPETLEKLKNVTAANLPSYVISVHGLKGTSAGIGAEKIREMALELENMSRGGDLQGVLAKNNKLIADAEVIVSNIKAWLEQNDVHEAKPRLKAPDRELLLKLRECCENYDIDGIEEIMSALESSDYEEDGGLVKWIREKIDISKMNEVAKRLEEVA

SEQ ID NO: 92411 - protein, 189 aa, Unknown
  Obtained from environmental sample
  DOMAIN (6)...(187): Methyl-accepting chemotaxis protein (MCP) signaling domain
  misc_feature (1)..(189): Xaa is any amino acid
VNGHVERQSNNISQASSAIEQMVANIGSVTNTLVNNAGNVKTLREASEVGRSGLQDVATDIQEIARESEGLLEINAVMENIASQTNLLSMNAAIEAAHAGEAGKGFAVVADEIRKLAESSGEQSKTIGTVLKKITESIKKLQVPPRTCLLDSRRLTQDSRPFRIRKITSATRWRSKGRGANRYFKAWAI

SEQ ID NO: 92412 - protein, 78 aa, Unknown
  Obtained from environmental sample
  DOMAIN (5)...(43): Ribbon-helix-helix protein, copG family
  misc_feature (1)..(78): Xaa is any amino acid
MAVATVNISFQEDLLDQIDEIAQNEARTRSELIREAARIYIEKKKKWESIFAYGESVSSKYKFTEKDVNEEIQKYRRR

SEQ ID NO: 92413 - protein, 445 aa, Unknown
  Obtained from environmental sample
  misc_feature (1)..(445): Xaa is any amino acid
AIFEGATGKELATIDYWPARGTVNNWGDNYGNRVDRFNAVVAYLDGERPSAVFQRGYYTRMTFLALDWRNGQLTERWRFDSGASGNGKFAGQGNHQLSVADADGDGKHDIITGAAVIGSDGKGMHTTGWGHGDALHVAHMIKGTPTPQIFMPHEDKSTGHGVLLRQAKDGASIFNVPKADTDVGRASAAELDPAVPGFKFWAAGGMGLYDITGKVVGSLPDNGNGSVICNHIIWWDGDLSREVMDGNQIAKWSVANNKGSRLLTAYGASSINGTKSNPVLQADLFGDWREEVILAAGTDAIRIYTTTSPTTHRLVTMMHDPVYRCAVAWQNSSYNQPPHPGYYIASDMTFPPPALNVAVVGDGGGADTSGGATSARVVGAAENGGYSLRVVRGNGGSMGTIDINYSIGNNGRVRVEMFDLKGGRVRTVVNSVREAGSYRERVVIT

SEQ ID NO: 92414 - protein, 490 aa, Unknown
  Obtained from environmental sample
  DOMAIN (257)...(370): Miro-like protein
  misc_feature (1)..(490): Xaa is any amino acid
MTLRNKMTSDSNNASYGDDSPIAAFATTPGNSALTLIRCSGKGSIELASSVFAAAKIKNNSLQEDTSPLMTASGNTVIHGWIISNTKENANDKIDDVLISVFRAPKSYTGQDSLDICCHGGMTAGKAVMTALKSVGFRDALPGEFTFRAFMNGKLDLTKAESVMELVSAKTETSRRHAVSRLSGSLHNEIDGIKKLLVEVLAAVEIYLDYSEDEISADAEEAEGKLPKKDTALEALTRLKKLSASWQLERIFQEGITVVIAGCPNSGKSSLFNALLKEDRSIVTEIPGTTRDWIEAWVSIEGIPIRLIDTAGLRETGDSVEKIGVERSRKLLEESDIILYLIDGSRGLTDEDKAFIANINRHILVWNKCDIAPLPESLRVSGQIPISVSAKTGEGLVELFTAITSEAGIKDLQLHNDSSSVALGTVRQKNLVDAACVSLEEALTLSDNDEPLDIIAPLLKDAVNSLGEITGEVSTADLLEKMFSNFCVGK

SEQ ID NO: 92415 - protein, 299 aa, Unknown
  Obtained from environmental sample
  misc_feature (1)..(299): Xaa is any amino acid
VIFSRRLTDNIFAWLFRAVSFTGAAALGAIVIFIFVQGSQPFIFPGAHTLRLVVERFDRVTVNGQAYENPEGFIDLPWDTKTVLVEFVNRGEEQSLEFRLAPEKKGRTKLLLPIEPGAGEAGFPDAYTCSVTYPGIMAGLTQKIHLILPEPPYNFFKFLGGMEWLPAYQKKYGIFPMILGSIFVCFGALLLGVPVALLCALFMSEFLPQRVTNIFRGAVELLAGIPSVVYGFFGLMVIVPFVKQTFKTPSGNSLLSATLVLTIMILPTVIAISEKCLQAVPRSRREASLALGASKMQTA

SEQ ID NO: 92416 - protein, 365 aa, Unknown
  Obtained from environmental sample
  DOMAIN (10)...(365): tRNA synthetases class I (K)
  misc_feature (1)..(365): Xaa is any amino acid
MRGDAANKAVHWADECARKIVREKGEKDQYTCASGITPSGTVHIGNFREIISVELVVRALRDMGKKVRFIYSWDDYDVFRKVPKNMPKQTELEKYLRFPITMVPDPWERDSSYARHHEVDVESSLPTVGISPEFICQAERYRSSRYAQGIRRALEHRDALKNILDKFRDEDHKIQGEWWPVSVFCAACNKDETEIDGWDGEWGLSYHCAACGHKETVDIRSARDVKLVWRVDWPMRWEYEKVDFEPAGKEHHSQGGSFDTARLVCKEVYDWDAPVSFRYDFISIKGKGGKISSSSGDVVDLGDMLKVYTPQLVRYLFAGTRPNTEFAVSFDLDVIKIYEDYDKTERIAWKLEPAKNDEAYQWERR

SEQ ID NO: 92417 - protein, 278 aa, Unknown
  Obtained from environmental sample
  DOMAIN (255)...(278): 4Fe-4S binding domain
  misc_feature (1)..(278): Xaa is any amino acid
MFTKMKRFLLPIIMFLIFETTAVVLWLVLGKIFYLYNFTYIGFFVSLGIGLLIAKYKNARIFIQFFIGLYMLVYLGLICRENMQIEGFFYYIAIGVFEAAAIHYLVAKIAGPFIFGRGWCGYACWTTMILDLLPYKAPQKQPVRKLGILRIVIFALSLTYFFIVFVRYRANIEKIMYVSFLAGNIIYYGIGILFAFLFKDNRAFCKYFCPITVFLKPASYFALSRRRVNQEKCIACNKCVKICPMGVDMLDKKFSRKNGTECIQCMKCVMECPKQALV

SEQ ID NO: 92418 - protein, 149 aa, Unknown
  Obtained from environmental sample
  misc_feature (1)..(149): Xaa is any amino acid
MPMKRIILKAHEERRILSGHPWVYDNEIARVLDVQAKPAVLEPGELAEVESSRKEYLGRAFVNPNSKITARIYSPSKEGVDKGFFKHRIRKAILARFCYNLRHESARLVFAEVDFLPGLIIDRFVGWPLDALEAAAIKRPISFEDAAAW

SEQ ID NO: 92419 - protein, 157 aa, Unknown
  Obtained from environmental sample
  misc_feature (1)..(157): Xaa is any amino acid
MTIAEFSVKHPVTVIMLFALVIGMAITIVPNLAVDLFPTTQNPVISVSVRYAGAGPTDVEKNVTDRLERALAGSRNLVNMTSYSQFESSSVTLQFAFGTDMDRATSETQTIVSRLANSLPDGADTPVVRRYDMSTSSIMRLSVRGNYPPDQLRIFAE

SEQ ID NO: 92420 - protein, 661 aa, Unknown
  Obtained from environmental sample
  DOMAIN (1)...(659): AcrB/AcrD/AcrF family
  misc_feature (1)..(661): Xaa is any amino acid
MTQEELVSLNQIKRLVVKTINLGAIGPNQANRSQAVRLEDIADVTLSYNENAARVYNNGQSGVYIQVTSEADSNQVQVSNRVKAALSGINNALPTGITLEVLSDNTTMITATLDQVYKNAIQGALLAMLILFIFLRNIKGTMIIGLAIPISILLTLMCMAFFGFTLNLLTLTGLIMGLGMTVDGSIVMLENIHSYRLRGAKPEIAAILGSREMLRAIIASAATTLCVFIPPIIYKNSLEMIGQFASDLIFTVVISLTCSLVVAVTLVPSLCGSIFKLDTRKQKPLKIPPLRAMDNAFEGVFVAIENGYKRALGYCLSHRLLIVTLAVVLLLFSLMQFSSIGMNMFFRTRTDDNVNINVSMPLGTTIEETERVLFELEEIIKDEIDGYKSVILTARRSGGTQGSIQITLPEPTRQIDNPDTIINKLTPYTNSIPGARVSFRAGRFMASSTPMEISLTSRSYDAIIETGNEIVHILERHLPEIENPAVNIEEGAPQLIVNIDRDRAAALGVSMSSIASEIRTAMDGSTAATVSMGDRLLSVRVQLREEDRTGIPNLDAISVVSRNGSRISLSNVAEIVESRAPTSIRREKQERVVRVTGGLPAGIAVSEMQKRLEATVKEYLIPHEGVTVSFLGEAAEIQRYYGHYILIIITAIFLVFSVSGQ

SEQ ID NO: 92421 - protein, 192 aa, Unknown
  Obtained from environmental sample
  misc_feature (1)..(192): Xaa is any amino acid
MEAVQTANSPNFESVWALLQETDRIMKENAEQHERDMKELREIQKETDRKIGKLGSRMGEVIEHMVAPNLREKFRELGYDFPQANQNSDVSDRKNNIFLEIDVKLENGDKVMLVEVKTNLTAKDVQDHMKRLKKMRVYANLHGEKRTFLGSVAGAVVTASVKEYAMEQGLYVIETSGESFNITPPNGQPKEW

SEQ ID NO: 92422 - protein, 164 aa, Unknown
  Obtained from environmental sample
  misc_feature (1)..(164): Xaa is any amino acid
MEVSERALEDSDLVLYVMDAVRAPGSEEDEIAALLTPLAEKTIIAVNKMDAPGADFKRAQGYIARNFPEVKDRCFEVSANDGQGIDALLDALFALAPEGDALYGDEYYTDQETGFRIAEIIREQAINRLRQELPHSLYVDIADMEFKDEKLWVRAFIVVERESQ

SEQ ID NO: 92423 - protein, 218 aa, Unknown
  Obtained from environmental sample
  misc_feature (1)..(218): Xaa is any amino acid
VLFWTTGEINAEYRNPKEETDAKKTGGLWLPNVFSPLYNFVPMSDGINGKPADSSSSKLYNYDIAADSLAVDSSAKFEFIFRLSNTSDMFAARLDIQHGAAIPDDWYTLVRPFAFDIRNIRRQRGGVTVLNNVINSNNRETAFIRYHLTRPGRVTVQIFTLDGTLIKSLRRGEQRDAGEWTDSWDGTNNGGRAVSRGMYFVRVVGPDIDEIRKIMVVK

SEQ ID NO: 92424 - protein, 405 aa, Unknown
  Obtained from environmental sample
  misc_feature (1)..(405): Xaa is any amino acid
VFLGGISERALQSDNTTYLFAGTVISRDEEDVTVLNRATISSANNPESLWSLNASRVWLLPGSDFAILNAVLKVGEIPVMYIPFFHYPADELIFHPVIGSRTREGHFIQTTTYILGRPKAASTSQSSLTKILGNSTDMEKKREGLFLRSTGRKVTDPEKVSLRAMVDHYVNLGTYIGADLALPAYKILGATNLSLGIGLTRTLALRDGSYTPFFPTYDGDTDWNHSNLFSFDVPFRYRFKSSNTISGKYGSFSWSLPYYSDPFVDSDFLKRAEEMDWINMIQQGAASMEAQDSSESQQSHEPWQFSGQLNPKFPNMSPYINSISIGSISSTIAFKTVDTRSINKIASNDIKYYSPSSWFFAPDTSTLYQVSASVSGIPLSLGETASRASAANTDKNETEDPLKGI

SEQ ID NO: 92425 - protein, 268 aa, Unknown
  Obtained from environmental sample
  misc_feature (1)..(268): Xaa is any amino acid
MGLSMQEKKVLTREISKRYQKAGKKEKTEILNELVKTTGYNRKYVLHVLANWGKTAAVRIEGKTVRLTASPCKRRKGGGRKPKYAGDFVIVLRKIRAFFSYRCGKILAPFMREQTGFLERPFRITERDKKLLLSVSSSTIDRVLKPDRKKLILKGKSGTKPGKLLKKQIPVRTYYADADKKPGFFEIDTVHHCGTSDSGEFCLTLTATDVYSGWTELRPTLNKAHKWVFEALLDIKSSIPFPLTGIDSDNGSEFINSALLKWCQDERI

SEQ ID NO: 92426 - protein, 446 aa, Unknown
  Obtained from environmental sample
  DOMAIN (110)...(143): Tetratricopeptide repeat
  misc_feature (1)..(446): Xaa is any amino acid
NKEALSSAGLFESEELAIFSIRPMQGNYGIALLNLRPALSDGGSLFFRCPDLLADLGRAYQYTPSLREEGAKLFRNWAALLNGQNSIDEYRELGVYLGALDSETIKGRKYLVYFYAGRIERAMTQYAESTEYFKRALEFAPDELQSDACHWYILMNILTVSPVAAMRQAITTMNQWNDVNYFFDILDRLSCYFVGRRQWGSVLELFSGLEKVGSGKSLAQYAWILGRAVQEGYIKSERSAESFFRIAFEKGKDSIYYRAMAASALGVSFSFDDGNSSAETQEGSEPDSELEFLLGFFEFGASSFALPYIQAVEKDLSPPELRKVAEALAASDRWKDTLDFVSRYTSRKDFELVRQDFFLLHPQPFKELIEKYASEAELGAETLYGLIRTESYFVSDAVSRSGAVGLVQLMAPTAEDMAGRIARSGGPDYRNPAMNLKDPETSIHIG

SEQ ID NO: 92427 - protein, 316 aa, Unknown
  Obtained from environmental sample
  DOMAIN (74)...(107): Tetratricopeptide repeat
  misc_feature (1)..(316): Xaa is any amino acid
MSPVNVDDILERAKNSFRVGDYETAERLLRNYIAKVPESREAYILLGNTFAREGKLTEAEDQYITLLARNPKDVDALNNAAVISRRLGNYQRALDYLKEAIELDPGKAEFHYNLGNIHKEMGNLKAASQAYSKVIELDPNYVLAYNNLGIIYDQLKDYEKAFVIFRKGLALDQNNPILHFNYGIALETNGRLDDAANEYNAAIRSKPGWLEPMNKLGMVLFAQSQHDKALSTFNRVLHADPSNVEARNNMGIVLSEQGRTQEAIKNFRMAIETDPKYTQAMVNLGQVLEASGDYADAVVEMERIMQISPDNAKIRN

SEQ ID NO: 92428 - protein, 388 aa, Unknown
  Obtained from environmental sample
  DOMAIN (279)...(359): Fibronectin type III domain
  misc_feature (1)..(388): Xaa is any amino acid
MNFWLYPQSLETGEQVLSWYSSKPDGKGGYINQRILGAVTRNRLQWTFSNFFFSPGPSPKGTQDQKTVTLLSPLLLNRSWSHHLIRFDADLGFLEYLVDGRLEALVYVTSSGREGGDVYTPIIGEDCILALGSRFSGLMDEFRIHGNYLEKAEMTRYSGSGGRIETRTLDLGYADSQVLKVEAFGGRTSNYSGKVRNEYAGNSPLSFSDHSEMKFFIRFSNSPYRWNEVPWIPINSGTELHQFRGRYVQLAADFYPGADGETSPYLSELRLIYSAAEPPPPPAYVTAVARDGAVELTWRASVSRDVGGYYVYYGTAKGEYLESKCPIDAGNRTSILIEGLKNGTLYYFAIASYSKSENEERLFIPEPGEFSREVAARPLVQTIARMGE

SEQ ID NO: 92429 - protein, 214 aa, Unknown
  Obtained from environmental sample
  misc_feature (1)..(214): Xaa is any amino acid
VGLEKMTLSMIYGSDRAFLSEANLLVDWVEQHGKPDVVHIATSMLTGIARVIKQRMSTPVVCSLKDEEVWLDKMRAQFIDAAWRGIAANTPFVDRFVTVSDYYRRYIQARVPELMDIEVVYPGLALPERQAPPPAQPTIGYLNRLIYDNGADILCKAFVILKQRNTVPHLKLKMGGGYTRENNRFVKEIKRILKPFRHDVELLEHYDVAQSEHF

SEQ ID NO: 92430 - protein, 293 aa, Unknown
  Obtained from environmental sample
  DOMAIN (1)...(104): Pyruvate flavodoxin/ferredoxin oxidoreductase, thiamine diP-binding domain
  misc_feature (1)..(293): Xaa is any amino acid
SVQEVMDLAAVAHLTAIKGRVPFLHFFDGFRTSHEVQKIEAIDGEDLRSLIDQKALSAFRQRALNPAAPVTRGTAQNGDVYFQTRESSNRFYDAIPDMVAEYMKEISKITGREYKPFNYYGAADAENIIIAMGSICDPIKETIDYMNAKGKKYGAIFVHLYRPFSAKHFLAVMPKNVKRIAVLDRTKEPGANGEPLLLDVKDVFYGKANAPLVVGGRYGLASKDTTPTMIMSVYENLELAAPKDRFTVGIVDDVTKLSLPKKEEISLEKVGTFEAKFYGLGSDGTVGANKNTI

SEQ ID NO: 92431 - protein, 468 aa, Unknown
  Obtained from environmental sample
  DOMAIN (288)...(357): HAMP domain
  misc_feature (1)..(468): Xaa is any amino acid
DLKVSAEENNFEVNRRAAAEAEQTLEKTRLLSLAFSRTAVLVKNADIIQKEADSFFTQNPQIAALFYTTAADASLSNMVFVNERFFLTRGIDTKLADAFRVNSVKERENAEMGQTILVNVSPLFNKTQSSISLAAIFFPILGGSSLPEGSGCVLFSTENLNESFGMGVNSSFLINASGDIIADADIERVKAQVNLSEQEIIKQIFNSPEKNKQMLAELDVQLTKNYSSSSSLFSYLWEKISKDDKRNETKKTRHYLAYTRLNMAGSIVITTIEYDKVFEGINATTRRNLYLTAAVLFLSIMCIWFFAKSISMPLKALAAAARTIEGGVFDVELQPAGRDEIGVLTSSFGKMCSALNIFGKFTNRDIAVQAMRGQIKPGGLPKHATIFFSDIRGFTEKSENFVKAFGDEASDRIVFWLNEYLTRMVECVEKTNGIIDKFIGDAVMAHWGTATTSGSPRKMPSTASRRRC

SEQ ID NO: 92432 - protein, 222 aa, Unknown
  Obtained from environmental sample
  DOMAIN (9)...(217): Type I 3-dehydroquinase
  misc_feature (1)..(222): Xaa is any amino acid
MEKKFIAGLIAPDVLQNAIENGSGMESTSIKKCGILEIRYDLFENMKDWPNLSQKVYELNPKALRLGTIRLEKDGGKWKDARASERIGLFDKSLDWIDFERGMITEKNSHKIICSWHLFDRVPSERELSEFAEECLELGVQGCKVAAMANSKRDAEPLYSFAKKYGEKFELFAAFAMGEQGKESRVRSLKEGANLTYASIGKALAPGQLSVEEINYQTNGSQ

SEQ ID NO: 92433 - protein, 398 aa, Unknown
  Obtained from environmental sample
  DOMAIN (163)...(303): ATPase family associated with various cellular activities (AAA)
  misc_feature (1)..(398): Xaa is any amino acid
MAKILVVDDEEIMRDMVADSLELNGHRCTVAANPQIALEQIAVVNPDLIISDYKMPGMTGLDLLKAVKKDRPSQPFLMMTAFGSIEMAVEALQNGADHFIEKKDFEHAEIIEHAVAMVLEKYKYRMENSVLKKRLCEKDFIGHSEKFVALNKFVETVAPTNASVLITGESGVGKEVLARALHYQSLRAGCPFIKINCAALPESLIESELFGHEKGAFTGALKTRRGKFELADGGTLLLDEIGEMPLAAQSKLLRVLQERTVVRIGGDDEIKVDVRIICTTNRDLKKEVENGNFREDLYYRLSVVPVHIPPLRERTDDIPDLLNYFIGKFNEENGRAVEEASEETVSMLQEQMWPGNIRQLENAVARAMVFCKGTVLTPEFFEIEGGKNVSAGKTKKKA

SEQ ID NO: 92434 - protein, 129 aa, Unknown
  Obtained from environmental sample
  misc_feature (1)..(129): Xaa is any amino acid
MLGILVFVIAIIKFVLPLILTGIIGTAIYVSAKSEQQQENKQQQSKEYKTIKIGNLVLMSENLNFNAKSSKCYKNNPNNCAKCGRLYDWNTAKNACPQGWRLPTSNEWKVLASNAGFSALTCGYGTADG

SEQ ID NO: 92435 - protein, 401 aa, Unknown
  Obtained from environmental sample
  DOMAIN (189)...(254): His Kinase A (phosphoacceptor) domain
  misc_feature (1)..(401): Xaa is any amino acid
MSDNAQQPDIAALQKENKTLARKLKETEYLVSSYEQYAVFQKSIYESIKKQKSEQDTYLRLIFGNTPSVILVLDVNLMYIMGTKNSMRDLGINSDALTGQDVSAVFLQIMPVDWVSALTSDLRGVLSSGISKRFGNFVTTVRGTEYYFEITVIPIKDDSTGGVTGVILTMHDETALHEAVRNAERSNMAKTNFLAKISHEIRTPMNAIAGMAELILREHISGLVREHALSIRQASGNLMAIINDILDFSKIESGKLEIVETEYQFASLINDVISIIRMRVIDKQIFFTTNIDSDIPGRMIGDEIRLRQILLNLLSNAFKYCDRGFISIHASCENTGNGAVTMVFDISDSGVGIKPEDHARLFSDFVQLDKVAHREVEGTGLGLVITKSLCEAMGGGISVYS

SEQ ID NO: 92436 - protein, 478 aa, Unknown
  Obtained from environmental sample
  DOMAIN (279)...(420): GAF domain
  misc_feature (1)..(478): Xaa is any amino acid
MNGNNRRKIVPTVFLVVGVMLMFIDAGAARALGGIFAGSGLTLVLRLFNNRPTTQQRHTEIRKAADNPPKTKIGVAAANEESVAMHGQRLGSEYQKKQWQVTEIAVDEMLDMFIKLTAAHLPHHNTIAVFFPASDGEYAIRRYISKTGFVSKNAMIIPNRGLLGSLLTKGLQPFYEPGFTNNNATLFYYDESHDFEPTENIRSILLSPIATGNETRGILLADSAKANAYTQDDLTFLTNTAKLLGQAIYYTYMNTMNSLDHQRLTAMNSIEKDFWKDLDFDTVMNKLCETISDAVPCDRLTISLKDEDNMYAKVVRTYGDSAGYFKDLEFAIGDGSPKTLVSLAYSTDIGFFRNFNEERYEFRYTENEPQNHGFGSFMVLPIGIDKRIGMILIESKVKNAFARFNLDLLSRLSQSAGIALEKIFIIRKTNDLASHDVLTGLFNRQHFQKILTTKIAASKRYEHPISFVMCDIDFLKSQ

SEQ ID NO: 92437 - protein, 251 aa, Unknown
  Obtained from environmental sample
  misc_feature (1)..(251): Xaa is any amino acid
MDNNFNKAYEHFKKVKKEQIDIISWEMNQYRLAECAYNTGDFDKAVEYFFNYVEACDRNEYTKKEFREMALEYMAISFSDMPNGVDEAIKFFKKNSGKSYEPQVIYMVGSKNRDHGQWDAAIEALSGALKKYPMYKEAPLARQKLIECFVVKKEHEKANKERESLVDDYGEGSKWYTANSKERKVIDVARGQVRRALGDIAIFYHGEGQKKKDKASFDKAMKRYNEFFTKFPDDKWRVFEYKYNVAEIYSS

SEQ ID NO: 92438 - protein, 674 aa, Unknown
  Obtained from environmental sample
  DOMAIN (536)...(569): Tetratricopeptide repeat
  misc_feature (1)..(674): Xaa is any amino acid
MYKDAPLARQRLIECYVVKKDHEKANKERERLVDDYGEGSKWYTANSKERKVIDLAKGQVRRALGDIALFYHGEGQKKKDKASYDKAMKRYNEFFAKFPDDKWRVFEYKYNVAEIYSSMGDCEKAAENYKFVAEEDVSRYPAYVNDVDTLGMDAEDLEKLKATKGDKTNPIAISQEDAGYNVIVALDMCRKKEMAKEGISEDKSYGLASTKKLLDYSMAFQRRFPQGQNAPDALYLAGNIHYEGKNFSEAVTAFKMVVDQYPNAKIAPKAARMLGNSYSSNNQFDLAMQTFKALLARTQRDSKDYEEINELAAGAMYRNADNLKKSGNLAGAAAAFQAIAGEFQQGKVAEKGWFEAGVCFEEMKEFDRAAGIFEQLPERFPKGTLRESAYIRAAENYKKKNDFGRAAQIYLTAANQIPKAEFAIPSLSSASECYQKMNQYDMAGKMFELIYERYANDPKTPQALYNAGLIFEKGKHYHNAINVYEQLASRYPSSEFAAEAFFSIGLCYEKLEEFGKMANSFSDYAAKYTADRYKQVQALVKAGNAYFSMQNYSESQSNYDKAVKIYEQHSKTSDIDVANVAEAYFRVGEIYYKKFEDIKLVAKNEKEMSGVVKQKTKALEDPAKYFAKAIELGVEEWTMRATYMIGKGFYDMAEAVANQTLFGNEIERLAGKIK

SEQ ID NO: 92439 - protein, 538 aa, Unknown
  Obtained from environmental sample
  DOMAIN (259)...(469): SecA Wing and Scaffold domain
  misc_feature (1)..(538): Xaa is any amino acid
SNFFRLYTKISGGTGTADTEASEFGKIYNLDVVVIPTNLPVTRSDEDDVIYLSEKEKFNALCDEIEEAHKKGQPILVGTVSIEKSEIMAKKLTQRGIRHEVLNAKNHAREAVIIAEAGAKGSVTIATNMAGRGTDIKLGGNPEHRARRRAGTEAAQGDSASSATADAAAKKYAAIFREEYEKWKNDYAEVKAAGGLYVIGTERHESRRIDNQLRGRSGRQGDPGKSKFFISLDDDLMRLFGGESIKSFMTKVGMSDGEPINHPWLNKSIENAQKKVEERNFEIRKHLLDYDDVLNQQRKFIYEQRDAILLDNDLKNRVNDATAGLVGAMIDEFNREQKQDMTAALKNLNEQLRSKFGYQLTFEQNEVKNVELLEKKIVTDLEKDINDKEALIGPDYLNMIIRDSYLHAIDNKWLDHLENMEALREAVYLRHYAQKNPLTEYKVEGFQIFDSMVDDIRQEIASRLHLVRINIAPSDGARRPGRTITSQSASHSSMASFSSAAGAASGGAKGSPIDGASRPDGATVVRNQPKVGRNDPCP

SEQ ID NO: 92440 - protein, 262 aa, Unknown
  Obtained from environmental sample
  DOMAIN (51)...(118): His Kinase A (phosphoacceptor) domain
  misc_feature (1)..(262): Xaa is any amino acid
MGAFLGREVLFTGSAMVVLSFSITIFTTGIIAKACAKDRELLVATERASEAKSAFLASMSHEMRTNLNAIIGLTELELENNGGLRKTTEMSLEKVHSAGMSMLEIANDILDISRIESGRLELVPVEYSLPSLISDAVALNTVRIGSKPVKFVLDVKENLPAMLYGDEMRIKQMLNNLLSNAIKYTHSGFITLSIRCEKDETNGQSEWLVCKVTDTGIGIEKKDLKKLFMDYSQIDRRNNRKIEGTGLGLAITKQLSVIMGGF

SEQ ID NO: 92441 - protein, 313 aa, Unknown
  Obtained from environmental sample
  misc_feature (1)..(313): Xaa is any amino acid
VLTSRKILFSLLITIVLFTAFTVFAFIGMFDLIETHFYNPSVTAHMTSENNRNAKIVEEFFKTIENSLSDTLKTDAVRRGLMYDQNQEDFSALYSAFSLLDNSFGKIQWVRLIDSSGTRLYFSTYGLDIINHDYENPVYYNYNDLDLPYNLIAVQNGGAPKYTIDGKSGRIFFSFALYDSFDIYCGTALFSLALDTVLEKLLIEGRMISGYEIMLIQNPSGMVFRVMTAGEKITPSQISSAWETTGLKLARITSSDSDIPFILISTKTSQDLYVGSLIKEELYLFPWSLKLILLISFFLTMFLSIFLLFSLNK

SEQ ID NO: 92442 - protein, 375 aa, Unknown
  Obtained from environmental sample
  DOMAIN (206)...(327): Miro-like protein
  misc_feature (1)..(375): Xaa is any amino acid
MERTVDTGEKRRRALLVGIRDEKMRVSEADSLVKELAHLADTLGLEIASTETVHLRENHAKYGMGTGKAEELAQKAASLEVDCMVFDREISPSQQRNWESLAGIPVIDRQELIIQIFASRARTREAELQVRLAELIYSLPRLQHKHIDLSRQRGGRYGSRDSGETKLETDRRQVERKIHRLEEELEQLARQRQVQRKKRERSGIHVCALVGYTNAGKSSILNALTGAAVYAEDKLFATLDSTSRRLHLPLGTEILLVDTVGFIRRLPHSLIKAFRSTLEEARCADLILNVLDASDPDAEVQYETTLSVLRELGAGEIPMITILNKVDKVESAQVLLNRYPGSIAVSALTGSGLSGLCAKIESSLTSQNKYQQKGA

SEQ ID NO: 92443 - protein, 200 aa, Unknown
  Obtained from environmental sample
  misc_feature (1)..(200): Xaa is any amino acid
MPMSLLFAAAYTLGDLYARNELTSIFATGIPLWRFSMSFVAVGLAASIFSFYLDDRIVIPTLKEKNELSRSALKQYVTKSNSDIVIKSRNGRVIYSVDYFDSEKNILNGVNVVEMNEKGLFVSQIRAPSADWADGYWEFKNAVIYRYDEEGVLRIYPFVSNETYNENPDIFRRKAVNVEELNAKNAGLLIKDLRSAGLPY

SEQ ID NO: 92444 - protein, 333 aa, Unknown
  Obtained from environmental sample
  misc_feature (1)..(333): Xaa is any amino acid
VSGAILPADSARTANYGVLNAGTYQVTVRAFNRYWEGTKTTTLTVLPRDISVTSNNVAPTATTSGTLIYSGTSQKGNVAVLVKDGNTVLTEGVDWEGTYTGASPIKDGTNAGVDTVKVKGIGNYTGTRATTYTINKLRIYVDTSSMTKYTKKYDGTAAFDTAKIAPAVAFSSSASETAALVGQMSKGNSGVTLAHRDQYLITAGSFVSASGSPATDSATANRVKLTVKLVDSLNYTLATAATASSGGSLDFYKFAEIERVDPDTLHFKYTRPDSLFHGYTGKARGIGDVTVKQGLSGISKFRVLYGADTTKPVNVGSYPVSISVDSAVANLKR

SEQ ID NO: 92445 - protein, 342 aa, Unknown
  Obtained from environmental sample
  DOMAIN (4)...(222): Flagellar assembly protein FliH
  misc_feature (1)..(342): Xaa is any amino acid
ISDSKAQAEKIIQDAQDAAQNEINSKNNEAQILKQQAEADAKNIIEDANKKSRDMETEVRKTLDDELKAARDKGREEGKQSGYADGKAEVERLISRTQTMLERAQDKRGQILAETEKEIVDLVLMISRKVIKVLSENQEGVIISNVIQALRKVKTKGTCIIRVNMDDLQLATEHKQEFIKLVEGVKDIQIHEDTTVDKGGCIIETDFGEIDARISSQLAELETKILELSPIKSSNPPINRTPNLENELAASTSLIDKIKKNDETSKNEDEVRNKYEDIKQKEEKKEKEKKEKEEKEKDKEKEDEPDISPAVNAALTASAALAALATMGTKGRRETDKKLQIT

SEQ ID NO: 92446 - protein, 354 aa, Unknown
  Obtained from environmental sample
  misc_feature (1)..(354): Xaa is any amino acid
MTKTKFLSTAIGSMPFEDPDYAVGVSLKSMDAPIWPQLPRLGLLEQMEVQYSENIPCAVIDNEKNRMYFQTDCDYSEKFAEFYEAYMTASDADGGTKDFSPMAISEKYSKGIYALLRTLKAKGAKHPWLKVQSTGPITFALSITDENKRAMYYNEEFRDVIVKSIAMKSRWQIQQFKPFAENIICFLDEPILSAFGSSTYVSVKREDVVSILAEEIEALHAEGAIAGIHCCGNTEWSILVDAGVDIVNFDAFEYGDTIAIYADSVKKHLERGGVLAWGVVPTSEKIREQTVESLEKQLEKVMDNLASKGIDKKLITEQAMITPSCGTGSLAAGDAEKVFSLLCGLTKRMKEKWS

SEQ ID NO: 92447 - protein, 285 aa, Unknown
  Obtained from environmental sample
  DOMAIN (260)...(283): 4Fe-4S binding domain
  misc_feature (1)..(285): Xaa is any amino acid
MPLVFVKGPADFDKYLDQSLNRLKTSYIDYYLMHMITDSDMWAKLKLWGIEDWILRKKKERKIRQIGFSYHGSRNEFLKVLDDFDWEMCLIQYNYSDENFQAGVTGLKKAAERMPVMIMEPLLGGKLATGLPKEAVEVFKKANPDLSPAAWGLNWVWNQEEVTLLLSGMSDMAQLEENLRLADKVKAGMLGEAEFDTYRRALEAINRTCKIRCTGCNYCMPCPKGVNIPGCFTAYNIVYSLGYVAGMHQYVTSTGLVSERSASPSLCVKCGLCESHCPQKLPIIE

SEQ ID NO: 92448 - protein, 108 aa, Unknown
  Obtained from environmental sample
  misc_feature (1)..(108): Xaa is any amino acid
VPPSLLLGKAISYSLGQWDKLVRYLESPYLTPDNNACENAIRPFVMGRRSWLFCQSPDGAKSSCGMYTLIETAKQNGLKPFEYLTALFEKTPLASPPQDWEKLLPWNI

SEQ ID NO: 92449 - protein, 263 aa, Unknown
  Obtained from environmental sample
  DOMAIN (1)...(188): Transposase IS66 family
  misc_feature (1)..(263): Xaa is any amino acid
VEQTIRPKYACRQCEGTEDEDKPTVRIAAVEPAIIPKSIASPSLLSMIITQKFETHLPYYRQEKQFAQIDAIISRQDMANWQQQVYAFLKLLFDLLKVMIKTGPVMRMDETPVQVISDIKPEGEGQKERQTSYMWLALGGPPDKKVAWYEYHPTHAAYNAREFLQGYSGYLQTDGYEAYDCAVKDMPGIIHAGCFAHVRRKFFEAEKIGGQGKTAGEALEYIRKLYRIERELREEKNNCKQSDEEFLIKRKKQAEPVLNDFKT

SEQ ID NO: 92450 - protein, 264 aa, Unknown
  Obtained from environmental sample
  misc_feature (1)..(264): Xaa is any amino acid
MNFIGIDLHTNRFTCCYRDGKPSADNPAKGRVIKTFELNASGLTDFYQTLTPDTYVLVEATITTFSFVRLFKDMVKEAIIANTYELKQVSLARCNTDKIDADKLCRILKAQILSGEQLVSPVVLPPENIQELRSLFTTYRLYKKQNTQLKNRIHSLLKERLHGFTEEEIFGGKHREHIRNISPGTAMHFQVNQLLDRLERDEADIEELEKKVLLQAEVFMPQIEILTSMKGVSVFIAIAIIADVIDVSRFRNSKAFTSYLRSAP

SEQ ID NO: 92451 - protein, 296 aa, Unknown
  Obtained from environmental sample
  misc_feature (1)..(296): Xaa is any amino acid
ASGAGVNKSLAYKLLVTMVQSGMFAEIDDPGSFQDELAKGGKNDITTISQAAKRRGADYVCAVNMVEAFGAYSITARLVKISGSLVLKTGSTDRSLQSLDDLTIVSNELARQLLPAAVAPPPVAIAPPPVVAPPPPVIAPPPPDAVYAPPIAAFAPTTAALVPEVAAVQNQCARTYNINELLFKIKDGFPTKLKDCSSTLAKDMLNPFGKKLEPKSFMTQCPIDGIKSELPEGFPGVDKVLGSLTNFVQGIMNTAMAGGAVDPKKLVSAVASMNVSELLNEVKRQASGPCVVNEPY

SEQ ID NO: 92452 - protein, 60 aa, Unknown
  Obtained from environmental sample
  DOMAIN (1)...(60): PspC domain
  misc_feature (1)..(60): Xaa is any amino acid
MKPLRLSKKNKKIAGVCGAFAESFGLDATLVRVVWVCCAIFAGTGFLAYIICWLVIPNEE

SEQ ID NO: 92453 - protein, 615 aa, Unknown
  Obtained from environmental sample
  DOMAIN (24)...(178): Histidine kinase-, DNA gyrase B-, and HSP90-like ATPase
  misc_feature (1)..(615): Xaa is any amino acid
MEKMEFQTEVRELLHLMIHSLYSNKEIFLRELVSNAADALDKLRFLSIANPELLPAGTELRIDISANDETKILTIEDNGIGMNKEDLIQNLGTIARSGTKSFMQSITGDEKRDVNLIGQFGVGFYSAFMVASKVEVHSKKAGQEQGYQWVSEGTGEFSVNELPKEKNGTKITIYLKDDDDCKNFAQEWQIKSIVRKYSEFVTHPIYIHSLDKDKKENVERLNEKPALWRQSAKTIEEKQYKEFYELVSHEGGEPLAWSHNHVEGTQEYWSLLYIPSRAPFGVRYASEHSHGLKLYVKRVFIMDDCKELLPNWLRFARGVIDTEDLPLNVSREILQSNKIVGNLKKHATKKILDTLQSVANDRKEDYAKFWTEMGAVLKEGFYMNWEFLDELKNLLSFKSTKTSEKEFVGLEEYVARMPESQKEIYYIIGESLSAVQGSPHLEACKAKGYEVLFLTDAVDEFMMQSLKEFKDKKFHDLALGDLEFEKSKEEENAENENKKTYEKLCEALQKVLSEDVSEVRVTSRLKDSPCMLVRAAGGMGAHMEKLMSLQGMEVPKTKRILEINPEHEICKNLLKKAEANEDLGPYPAVLYGQSLLAEGSVLPDPAAFVSAMNKI

SEQ ID NO: 92454 - protein, 378 aa, Unknown
  Obtained from environmental sample
  misc_feature (1)..(378): Xaa is any amino acid
MGLVKPITNSNPAASTGEYLVTAGSFVNTSGTATVDVVAAARAKVTVKLVDSLNYTLSATASATNGGSLEFFKTAKIDRATPAAEHFKFTHPDSLKHGYTGKARGIGDVTLKTTLSGMGKFRVLYGADTAKPVNVGSYPVTVVVDSLGANFRQGTVALGTYTISAPGVPVIDDVEWQTGITAREGVALALTVPATAPATGGTLSYQWFRDDVAVANNGRAATLNVNGLIMGNTYTFKVIVTNTKSAGAAGSEVGTVERVVTVNVIEPPINLSGATFSVKGSYTYTGSPIEPPTDSIVVTVPSKTPGGEPITLTRGTDYTVSFARNTNVGSATISITGVDEYIGLRTTTFQIRAKTPDANDLTYRGTTVYTERRRPSPY

SEQ ID NO: 92455 - protein, 338 aa, Unknown
  Obtained from environmental sample
  misc_feature (1)..(338): Xaa is any amino acid
MECYIVKNGEEVKAGLEDILPLLDDRLIQDIFRNAWKTIRLSSALAFMPDEIKNIAYRNLPLRFRGEIKEAVDEIEAVKETVENTDDVYARNDNYYEEQRTELISFIGENIIEWESPDCLIWKEIKPKEEPRITPVEDLIKEIEHACSSEELYIPSYKTNKMSKEDLRNAFAAFHDRKNELQSIRKLSISAKVLPAAAPLFENAPLEILHIDGKLTEEWPEFMVNCGKIKSISLSIYGLTEFPSWIRNAVSLKKLEISCLQEKILIPDWIGDLQSITEIGIYDSNLKTFPDGIGSLRNLSKLILNYTAIEEMPDCVGNLSSLKELFLYHNNSLSSLPD

SEQ ID NO: 92456 - protein, 196 aa, Unknown
  Obtained from environmental sample
  misc_feature (1)..(196): Xaa is any amino acid
MSNFGITGLYGIMEAMSKEKKPRRKSMPKAALARLCFIDEQIASRSYPNTARLAKDCGNASLSTIGRDISFMKNVLNAPIKYDMIKRGFYYSKPKYRVPLGFYGGDELLALGMVKSLLVMYKDTPIFDTAYNHLKSITTPVDSKGNSDWYENRIAVLQPPLAHVKPEVWEAIITALRENRILTFDYKDNGDRTYIN

SEQ ID NO: 92457 - protein, 327 aa, Unknown
  Obtained from environmental sample
  DOMAIN (9)...(316): Uncharacterised protein family (UPF0164)
  misc_feature (1)..(327): Xaa is any amino acid
MIRRKNTAFLAACLIFCLHIPLWAADFHDFYGDFADYLNGIYGTDDNAGLTAFPILNIPMGGRSEGMASAFAAVSDDVSFIEFNPAGSSMLTKSEIALFHNNWIADSKMEGLVFATRFGDFGLAAGAKWLYTPFTEYNIYAQRVSNGYFSEGAAILNISYNLFSGYYFGGLSFGINLKGAFRIMPDYTMDDDIIAGGSGMSQSAVMGMADAGLLTRFNFLKAYSSKEKNTSFALVIKNIGPPALGEPLPAAAGAALSYKPFKPLTLAFDFYMPLNIMEFELSEKPYFAFGTAVNITKFLSMRAGAMVKAGRQPRYSRQRSKSGQDCG

SEQ ID NO: 92458 - protein, 291 aa, Unknown
  Obtained from environmental sample
  misc_feature (1)..(291): Xaa is any amino acid
TRDEEPYHREPFAADVSEGKNDPIYNAHSYHTKVPHKAIMRYILHYTNPGDIVFDGFCGTGMTGVAAQMCGNRVEVESLGYRVEDDRTILQEETDEKGKKHWKAFSKLGARKAVLNDLSPAATFIAYNYNTPVDVTAFEREAKRILEEVEDECGWMYETMHTDGKTKGKINYTVWSDVYSCPQCTTEIVYYNEVFKSPGNKTVFTPEFKCPHCHCILSKNPSKDSHAIKPIRIFESFFDPITNEVLKKQKVVPILLNYRIGTHRYEKILCEDDYKKALLFEMNKEIIGSIP

SEQ ID NO: 92459 - protein, 576 aa, Unknown
  Obtained from environmental sample
  DOMAIN (8)...(312): Radical SAM N-terminal
  misc_feature (1)..(576): Xaa is any amino acid
NDSNKSSFLPAYRRDMDERGWEECDFIFVSGDAYVDHPSFAAALLCRALEAAGFRAGIIPQPDWKNPSSYTVLGRPRLAFLVGAGNMDSMVAHYTAAKRKRSDDAYSPTGKSGMRPDRATLVYVEGIRRAYKDVPVIAGGIEASLRRFAHYDYWSDTVRRSILLDSKADILVFGMGEKPLLNIARRLASGEAIGSIRDERGTCVRVHGKAAVEQWKDVCFLPKYETIKEKDEVSLRAYAEHFMVQKQNADPLSAKPLAEENDGDRWVIQNPPAVPLSTKELDNLYELPFTRKAHPMYDAQGGINALKEVSFSLVSSRGCFGGCSFCAITAIQGRAVIGRSKESLLREARALAAHPDFKGYIHDVGGPTANFFRPVCEKQERGGFCANRECMYPQVCLKLKADHSQYLKTLKALREIPGIKKVFIRSGLRFDFIQYDQKHGKEFLETLCQFHVSGQLKAAPEHICANVLEAMGKCPHSNYEQFREDFTAVNKRLGLKQYLLPYFITSHPGAGMKEAEELSRYLKKTRFAPEQTQDFYPTPGTMSTVMYHTGLDPRTMKPIYVAKGSKEKRKQKDLLH

SEQ ID NO: 92460 - protein, 260 aa, Unknown
  Obtained from environmental sample
  DOMAIN (52)...(232): Glycosyl hydrolases family 2, sugar binding domain
  misc_feature (1)..(260): Xaa is any amino acid
MRTYLVPPVWENPEIQEMNRLPMRSPLLPFSSAKDALANAIAGPEFRALERNEYYQCLDGVWRFKLLNNPMDDFGAATAGLNVPEWAAPSYDAGDWAEINVPGTWTRQGFDKPHYTNVQMPFQAEPPHAPEHNPTGLFRRSFTLPRKWENRRVVFHLGSAESCFIIYVNGLLAGAGKDTRLPSEYDITPFLNEGENIICIKVIRYSDASYIEDQDQWWYGGIHRSVFMYATEACYIKDIKALPGLIETKDADACDACGVL

SEQ ID NO: 92461 - protein, 276 aa, Unknown
  Obtained from environmental sample
  DOMAIN (1)...(259): HlyD family secretion protein
  misc_feature (1)..(276): Xaa is any amino acid
VGTSVMGEIKEIFVIDGQNVKAGDPLVTIDFVRIQQEYERTRALLDAAKSDAERAKTNSARVQESFDRMESLSKQGLISEEDYSQARQNRDAAALAAQSAEANVHQTFASMKAMEDSLSKTKLLAPISGRVTGLKAEKGETAIPGQSNLPGATLMVISDMSEIIAEVKVSENEVVRTKVGQIAQVTAESLPGRVFPGKVVEVATASEKSGQDANMYRVKVALDMDAPEVGELRPGMSARAIILTAESKDVLRVPLQSVLEKDGSMEEAQKKGLFAP

SEQ ID NO: 92462 - protein, 730 aa, Unknown
  Obtained from environmental sample
  DOMAIN (32)...(343): TolA protein
  misc_feature (1)..(730): Xaa is any amino acid
LSKGLLNSAEEKKKESLLNAAEEKKEDLPNPAEEKNKHERRVIIMGYVGLVLILLLGVAVIYLLWERNAKGDVHSDTAAVGRQLEYMQILRDLLTNGDYQQALDILDRLLAADPNSPELLILREQLLARGQNPGSVLSMDSDAIARQIEALRLAQQRAEAERMQREAEAARQWSAEAAANRNALQRIENERQQLDAEARRAAQQREAEAARQKSADASAAAQQRAENERLQREAEAARQKAEAEELARVSRELQEKRQAVNDLISRGKSLLEKNDFAGAEKAFAEARSHMPANDTKFEAQKVAEIAEAWYDASARNPNSPAGRDAVSKATVLASEAIQLDQSLALPHSTLGKINRDQQDWDKAIAEFREAARLDSSNYVYFYELGRSCFSAQRYVDARGGFENTVRLNPRFEAGWYNLGGTLRILNRYDDALTAYRRAISIKTDYAAAHRELGRILVLKKDYKGAIESFNNALKYNPNDLASLRELGAAQNEAGYYSSAEESFARALQAAPSDGQTNYNMSVVKLALKKNNEALSYARHAVESNPSSAVYTYTLGLALEATGNNDAAIAAYQKSASLDKKYLRPRINLGNLYLSHNNVNEGIRFLSEAYAIEPSNFEVNNNLGAVYAKMENWLKSVEHYERALTMDSRNPTVHLNLARAYTSAGDFAKAQNSYQAVLRLTPDNWDALYELGKTYVSMGRPDEAKKHLRDLLQRNATYGARADAERILAGL

SEQ ID NO: 92463 - protein, 213 aa, Unknown
  Obtained from environmental sample
  misc_feature (1)..(213): Xaa is any amino acid
MGTMAVIFIPLSLMASIFLRQIMDIGRYARDLLNQRPEYLHELFEKISVFIFDVSAGQIKITAEDINSQLKAIISNELLGNKQMVFLSGNIVRIIGALAINTLVMVFSLFFFYADGPYLARLFMRAIPIRTEYISALTRKFMEITRNLFLGYIIVALLQAVVAFIIFTIFDIKGSLVLAVLTFIFVFIPRAWSHGGIHTPDYPESRKREYSGR

SEQ ID NO: 92464 - protein, 167 aa, Unknown
  Obtained from environmental sample
  misc_feature (1)..(167): Xaa is any amino acid
VNTSGQASVTPSGSAGATTTYTLTATSALGLEATASVTVHTDAVPNVSQFTANRTVIAPAAADTGNKNATLSWNVSNAASVSIVSNPAGQGGGTSLALTGNTNVSPTSQTVYTLQAVTSHGAVYTYPTTITISVEALLDITSFTASPNPIASGGSSTLSWTVTGGNP

SEQ ID NO: 92465 - protein, 470 aa, Unknown
  Obtained from environmental sample
  DOMAIN (23)...(157): Histidine kinase-, DNA gyrase B-, and HSP90-like ATPase
  misc_feature (1)..(470): Xaa is any amino acid
MTENNSRIYVLPPEEARRIAAGEVVDRPAALVREFLDNAIDANADNIEISVEEGGCKKVEVSDDGDGMIREDLELCTLTHATSKIRKLDDLDTAVTLGFRGEALSAAAAVSRVEIISSTDGRTAWLFETGPGESRPSKVEQTRRTKGTTVRALNIFESIPARKRFLKREGSEAALCRQVFIDKALAFPSINFRFIQDGKLKDFFPAVSSKKERFAAALLQAREINFVHEINVTGSGFSATVVIGGAELYRNDRRQLYVFANGRRVQDFSLIQAMEYGCQGWFPNGVHPVGAVYIEIDPSLADFNIHPAKREVRFRDPGAIHHAVSGGVKNFFHSYFLRTSRKKPQPEEDASQREKEFLFPNNNFEKNRNSEEYENISNKNFAPLRLGENSSPNNSPSRITDNFIAESNEPEVRRRRENSFANDSAAIIYGDMRYIGRVFGLFILIEWGDKLYLIDQHAAHERILYNRFLK

SEQ ID NO: 92466 - protein, 288 aa, Unknown
  Obtained from environmental sample
  DOMAIN (143)...(288): Exonuclease VII, large subunit
  misc_feature (1)..(288): Xaa is any amino acid
AKIDAVMFKNKLRSLTFEPKDGMLLRVRGSLSVYAPRGTYSIVCEEMEIAGAGEIFAMIEKRKQKLAALGLFDEERKKPLPRFPAVVGVVSSPTGAAVRDIINILARRAGGIKVIILPAPVQGDEAAALIAARIKQANQWKIADVLIVGRGGGSPEDLLPFSDEEVVRAVAASEIPVVSAVGHEIDWALSDFAADKRAPTPSAAAELVSESRAAIMDTIHAMIESFKSVIYARIERARLLLKPFDLRDLEYRFRAILQPRLIRLDDAKDALINAISERKENLRGRIAL

SEQ ID NO: 92467 - protein, 204 aa, Unknown
  Obtained from environmental sample
  misc_feature (1)..(204): Xaa is any amino acid
MSVMAYAPYGAGGIIIRVEADIRRGIPGIDITGLAEGAVREARERVRAAFRNSGFRFPLDRILINLAPAGLKKDGAALDLPIALAVMAAAELAPVPPNLLVMGELELSGRIRPVRGVLAAMAAGREEGISEFIVPAENGREAAILPDMRFTAASTLKEAVDALFIREETGALPLISPPPCDAPDAAETAGDFADVRGQTVYKRA

SEQ ID NO: 92468 - protein, 58 aa, Unknown
  Obtained from environmental sample
  misc_feature (1)..(58): Xaa is any amino acid
LSAYKVVVHCGACMLNEREMHYRRRHSEEQNIPFTNYGTSIAHMNGILNRCIAMLDIN

SEQ ID NO: 92469 - protein, 59 aa, Unknown
  Obtained from environmental sample
  misc_feature (1)..(59): Xaa is any amino acid
MSKPYLRLNVQDLYIEFGGLKVVSGFSCELYQGELVGLIGPNGAGKTTVFNMLSGIYTP

SEQ ID NO: 92470 - protein, 309 aa, Unknown
  Obtained from environmental sample
  DOMAIN (73)...(225): Thiamine pyrophosphate enzyme, central domain
  misc_feature (1)..(309): Xaa is any amino acid
FAIASSGRPGPVLIDIPKDITALSAEWNPHASANASASGAIKKNKGELKDEALSARAKRLDERTTRVRFTDEEIETAAKMIRKARRPLLYAGGGVISSGAEEELIALAEKLNAPVALSLMGIGAIPKDHRLCTGLIGMHGTVASNKATQKTDLLIAIGARFSDRVTSKTDMFAKTAKVIHFDIDPAEVGKNIETHAWVIGNIKDTLKNLLSKLPERLKTEWDGEIDKWKTHLPQTYTHEVTFAKNALHPRFIIEETAKALGPETIAVTDVGQHQIWAAQFFPAEKPRSFISSGGLGTMGFGLGAACGAK

SEQ ID NO: 92471 - protein, 281 aa, Unknown
  Obtained from environmental sample
  DOMAIN (65)...(278): Divergent polysaccharide deacetylase
  misc_feature (1)..(281): Xaa is any amino acid
AIRDLDTTGAGAANDTGRANASGTDAAGASGNTAAAQPSDAKPAASAAATPGSQPPAARKGILVLVIDDAGNNLRDLDSFLKFPGPITISVLPGLAYSAETARRVRAAGKELFLHQPMEPLNGQDPGPRAIKTGMSPAEIKDALVKNLNEIGPVSGFNNHEGSRATGDPAIMRPVLEISRDSGLFFLDSRTTADTVAPQIANEIGITIVQRDVFLDNEQDRGSILAALENGCKRAEQNGIAIFIGHTWTPNLASILTEMYPQLIKRGFIFASVGTVLNRGK

SEQ ID NO: 92472 - protein, 77 aa, Unknown
  Obtained from environmental sample
  misc_feature (1)..(77): Xaa is any amino acid
VAGGGVAANSYLRARLAEYTTGERTGQLRVIFPPPELCGDNAAMVAGLGEQYLLRGDRSPLNVTASARVQVFKKRYP

SEQ ID NO: 92473 - protein, 169 aa, Unknown
  Obtained from environmental sample
  misc_feature (1)..(169): Xaa is any amino acid
MKTILCYGDSNTWGYMPQKGSRYSHKIRWPMVLKEILNDGYAGDDPPYWVDEEGLNGRTTCREDPVEGDKNGLRQLIPILESHKPIDIVVVMLGTNDLKIRYSPCAYDIARGVGRVVTAIKDSRMGPDNASPAVILVCPPPTVHSPVFEANVWRLRGIVKETAFLLRAV

SEQ ID NO: 92474 - protein, 70 aa, Unknown
  Obtained from environmental sample
  misc_feature (1)..(70): Xaa is any amino acid
MTFWITGKGGMLGQDLCALARQGFKVFESDKEVDITNENAVMDYIHANKPDVIINCAAYTAVDEAETQTE

SEQ ID NO: 92475 - protein, 514 aa, Unknown
  Obtained from environmental sample
  DOMAIN (202)...(237): UvrB/uvrC motif
  misc_feature (1)..(514): Xaa is any amino acid
RFSENYSQLKACAREAPVEPGVYLWRDGENRIIYVGKALNLKNRLNSYFSGSKDVKTAALISHSKTIETIIVSNEYEALLLENTLIKQHSPRYNINLKDGKTYPVVRITSGEFPRVFRTRHIVEDGSQYFGPFPNVQVLDETLAVIEKLFPLRKCRTMKKRENPCMYYHINRCLAPCCGRVEEPAYQAQVERVRKLLAGETSALIGDLNAQMQAAAVALKFEEAAGFRNAIRAIESLSGNNSVADMDPESRDYIAWAEEGIFTTFSVLSMRGGRMTGRELFNSRSAAKEDESLITFLTAYYSPDRPPPPRIFLTGLFVQADALDRYFREQFGYTPNLVWQEGLEKRHIAALSMARQNAQEELKRRLRERGAGPALDELKRVLSLKARPETIEGFDIAQLEGKHPVASLISFKNGVPDRKNYRYFKLKTVIGIVDDFASVREAVQRRYTRLVRENKELPDLVLIDGGIGQVNAARGVIDELGIDCDVIGLAKREEEIWLPHAAAPVKLSQRSEAL

SEQ ID NO: 92476 - protein, 224 aa, Unknown
  Obtained from environmental sample
  DOMAIN (1)...(138): SPFH domain / Band 7 family
  misc_feature (1)..(224): Xaa is any amino acid
YGLRLYETLTNDKINIILQTYIVWRITDIQKFHTSIGNYGAAQRHLNDLAATAKNSVLGNYRLSSLVSTNIEEIRIDEICRAIEEKTAQSALANYGIEVQALKIKRLALPEANIKSVFNQMIADRQKYVSQYIAEGERDAAIIVGEADARAAEIFAQGKLEASQIDAETERMVARIYGEAYDRNSRLFVFLKRLLALENSVNADTTIIMRANESPFDIITTGSN

SEQ ID NO: 92477 - protein, 309 aa, Unknown
  Obtained from environmental sample
  DOMAIN (105)...(309): E1-E2 ATPase
  misc_feature (1)..(309): Xaa is any amino acid
MKNSIDITDVHLSDTEKLNFRNSILSLSGALVCLAAAFIYGKLFPQQDVIQALIYLVGIAIIGLPMLITAVRGLVSKNMKYAMEILVSIAMIISTLSGQFLLAILIPVILTFVHFLEEKSIMGGRDAIEGLKTMQAEKAIAEKDGKEIEVSAKELKTGDIIIVKPGMSLPVDGEVIFGASSIDQKSLTGESIPKTAEIEDQVFAGTVNIDGTIKVKVTREYADTSFQKIVKLLEDSGNIQIPDAKIVDKFVFYYIPLTLVTALLVWLFTQDINRAIAILVASCPCGHLLINSAPMIAVLAAAAKKGILI

SEQ ID NO: 92478 - protein, 476 aa, Unknown
  Obtained from environmental sample
  misc_feature (1)..(476): Xaa is any amino acid
MVPFLSAVFVFEAWQAGIEYNSILVALSVLLALVIIVTTIKGTQEYSLLGFFVPFVLFLFYTALMMIGGWRFSQYFLVCFTICGISCLYSNFSRTIGYIITQNIVILALILTGNPVAGRGISMIMIFVYWAVCLFGSLILLILTRLATIVLDKALKQQNSFMNLLSNTENYVAIVDQENKIVYASKTLSQLGMVEEQTLVQGRPLIDLFPGRSLKLYAGKMLNQKEDYAEDWEFSLNGQKRYFKAASHALPGGHDSGTLINLYDMTYLAERDEIAAMKDSMKIGLFFMNSNYVIQDHYSRYLEELLSETDLFGRTFTDVIGDSVTENELQTIKDYFGMVVEQKYDQEILDDINPLNELHYINKNNGSRKVFQCGFAIVERGRGEIFILVTVYDITARVELQKRLEEEQNKRQEEMQSVFELIQVDPAVFSDFMEDIGQEFDAIDKVLKNKELSTHDALVKIYQSIHAIKSNAGILG

SEQ ID NO: 92479 - protein, 224 aa, Unknown
  Obtained from environmental sample
  misc_feature (1)..(224): Xaa is any amino acid
MTGKSKDNIYQYLLTCEVKDMATLENDLKYEFVTLREEKSKEIYFFNTHWFNEYVKYIKSHPLFVKETYIKTEESKKQIVKIVKKTTPTLEERGVTRKELLQKAQKINNDEFYTRLEDVEKELNMYPISTWKNKTIFCNCDDAVDNNEKNTSAFPLYFLHNFKKFELKKLICTHYVGGTNGQYDLFNQGAKGYIFTKEGFSEIKDYDKLKVYPECYNGSLIIHI

SEQ ID NO: 92480 - protein, 459 aa, Unknown
  Obtained from environmental sample
  DOMAIN (1)...(254): DNA methylase
  misc_feature (1)..(459): Xaa is any amino acid
SVFVQISDENVHLVRCLCDEIFSKDNQVATICYKKPGQRSSNTLSILTDFIIWYCKDKEKVKYNQLYLEKSLSGLGGSHYNQVELKDGSIRTIKQEEIINPKLLPDGAKVFETTALTSAGSQSGDDCFNFNKKDYYPPPHKHWSCSIEGLKNVAKAGRIVPTNTTIRYKRYFNDLNVMELDNRWNDVGLYGESIYVVQTGILSIQRCLLMTTDPGDLVLDITCGSGTTAYVAEQWGRRWITCDTSRIAITLAKKRLMTATFDYYKLAHPEQGVSSGFVYKTVPHITLKSIANNEPPEQETLYDQPEIEKRKVRISGPFTVEALPAPVVKPLDDEESPAPFFHENAAKKQSDWMQELKASGILGRKGEKIKFSRIEPLENTKFLHADAETEETKDHTARKRAVICFAGETRPLDTRMVNQALYEAQHIIPQPSYLIFAAFQFDPAAAKVIDETNWPGVVL

SEQ ID NO: 92481 - protein, 486 aa, Unknown
  Obtained from environmental sample
  DOMAIN (210)...(275): His Kinase A (phosphoacceptor) domain
  misc_feature (1)..(486): Xaa is any amino acid
FPEREELFIWPKTAILADHYTFISKLDYPHLRINDVLNVSVGLIKETAYASLFKGWFPDHKNVVEYENSNAAFDALERGEVDLVMANLSQLLMLTNYYERAGYKANIVFDFVSESTFGFNKNEAVLCSIVDKALALVDTKEISEQWMRKTYNYNAKLARLHRFWLIIAAVLLFSILVLLFIFFQNSRRSAKQLEILVQKRTAELVSANRAKSSFLSNMSHEMRTPMNAIIGMTAIGKNAKDIERKDYALDKISDASTHLLGVINDVLDMSKIEANMLELSPVEFNFEKMLQKVVTVITFRTDEKQQKLTIHIDKKIPQTLIGDDQRLAQVITNLLGNAVKFTPEKGSITLDAFFVEEENGLCTIQVSVKDTGIGISGEQQKRLFTSFQQAETSTTRKYGGTGLGLAISKTIVEMMGGKIWIDSEIGKGSTFAFTIQAQRGAADKQGLLAADVNWSNVRVMVVDDDPDILTYFREMTQDFGLLCETA

SEQ ID NO: 92482 - protein, 300 aa, Unknown
  Obtained from environmental sample
  misc_feature (1)..(300): Xaa is any amino acid
KDRFPAKLKDCSSTLAKDMLNPFGKKLERKSFLTQCTIDGIKKELPDGFPNTDKIIGSLTNFLQGIMNAALAGGSLDPKKLLSAVASMDIMGLVSDVKKLAADECIVDEPYEPPAAPAGGDDEEEGKKEKSSVSFGIRAGVNSSYTYAKYEVSTNEKGDGDYGDIFGMQVGFVVDFPISDWFHIQPGLMYIQKGMEDRDGSSITAHYLELPLLLSFKLSVLRLNAGPYFSYLLIGPWAYENDDFDCGLSTGIGFDIGMFYIGAFYDYGFVGIINGNGDGRTSISTHIYNRTLGFNVGINL

SEQ ID NO: 92483 - protein, 253 aa, Unknown
  Obtained from environmental sample
  misc_feature (1)..(253): Xaa is any amino acid
GLYKTVGNHDEQLLFKRYNSYPYPLYTVVKIETGTVPAYVFHGHQLSNIYSNFNKLIGICIRYILKPFGIKNIIDARSPYKRFLIESKAYAFSINSHCLSIIGHTHRPLFESLGRFDYIKFEIERLCRDYPSSPCEDKLRIENEVTALRKELGKLKRKERQDVLRQSLYGDELPVPCLFNSGCTLGKKGINAIEITHEDIALVYWFIEGKSKKFIKRGGYEINELANTPYRRAVLNQNKLDYILAKIKLLGNK

SEQ ID NO: 92484 - protein, 277 aa, Unknown
  Obtained from environmental sample
  DOMAIN (93)...(277): Phosphomethylpyrimidine kinase
  misc_feature (1)..(277): Xaa is any amino acid
MAKGKIVVFGSFVTDLTSRQEGLPVPGQTLLGTSFKTGPGGKGSNQAIAAHRCGADVTMVTKVGKDVFAEMVRDFYKREGMDTSWFFVDEVNSTGSALIMVDEKSGQNMIVVVTGACQNITKEEVEKARPLIESASILLLQHEINFDAQFEAIRAAKKAGVTVVLNPAPANKIPSDIIRLIDIITPNETEAEAITGIKVTDKESAKKAADVFFKQGVKKVVITMGKLGAYANDGERDELLPCLQVKTIDTTGAGDAFNGGFVTALAEGKDLVEALRF

SEQ ID NO: 92485 - protein, 321 aa, Unknown
  Obtained from environmental sample
  DOMAIN (173)...(284): PilZ domain
  misc_feature (1)..(321): Xaa is any amino acid
MKDMEQLRQLASNCQIKDPVSIFKSQKQFEIIIRSMVKTLHLSGEYNDPVVQLFLSRVFEYYKKIEMQSSENKTKITTSRQISEGQPLRVLVPGTGVYKSEVVKNSGNNLVISRPVNDSSSPSMEWYGLRISIYFWREEDAGYVFDTEVVDEVFSKGISSLKINHNDSLFRTQKRKSIRAKFRKAAFLYLLNDLENPHKLEKAAGLKVMMDDISSSGCAFKVMGQVSTGMRFKTQFLLNKIPVCVPGTVRSVDYNRESNISIVHMEADTLPIGTRNFILCEVFHLMPEDDEDELPFRVMEDGTTPASKQPEEQFKEEEKNE

SEQ ID NO: 92486 - protein, 285 aa, Unknown
  Obtained from environmental sample
  DOMAIN (6)...(190): D-ala D-ala ligase C-terminus
  misc_feature (1)..(285): Xaa is any amino acid
ALDASDKGRMRKRFSEAGLPSPAFMVFTRENCTVTKPEGNSGGRLPVDAPFPYPVVVKPVDNMGARGCRMAVNDAELREAVETALGFSRTGQVIVEEYMEGPEFSVDAVVYRGKITICGLADRHIFFPPYFIEMGHTMPAAVPSKEAEAIINVFIRGIQVLGIDNGAAKGDIKLTSKGPMIGEIAARLSGGYMSGWTYPYASGTNPAKGAICAALGREPEGLSPVRSWTSAERAFISIPGLVRSVEGIDEARNIPDIKDLFLRSSPGSRVCFPENNVSKAGNVIL

SEQ ID NO: 92487 - protein, 116 aa, Unknown
  Obtained from environmental sample
  DOMAIN (2)...(88): ABC transporter
  misc_feature (1)..(116): Xaa is any amino acid
SIGRIRSQYGYTLSGGERRRTEIARALATEPKFLLLDEPFAGIDPIAVFEIKQIIRRLANKGIGVLITDHNVRDTLEITNEAFIIADGNIFARGGRETILNNEMVRKVYLGAEFRM

SEQ ID NO: 92488 - protein, 635 aa, Unknown
  Obtained from environmental sample
  misc_feature (1)..(635): Xaa is any amino acid
YDCIAVDISPVFQDDLAEAVDELPLISALIAYCQEIYGGLGNAYGSVGIDVDKEDDEDDDLPFCYYIPIDPCDAMIEGVRQARQRRVPFRCVGTPTLRPPIPMLSMPDEYSVEKIGFDAYSLLCRKAVKDMFQGGEVGVVNNDNDQLRSQLKSIFTLCGETINADMNIVADNLHKLCRQFDNILAIVHISRFDAVMKRFNDESIRRDDTDAASVEQPYAIIRRYINPDHLYFALSELPFVAAKSQLERQNPFATPMDPTDAVKDLFIDTRENYYDNKEQTIHLSPVRIQAALTYLRNLTVMSGRLVPTLFDIVEAAKGVGGNAYALRVLKNAKYYPFLPMVNDDAIVNVGIDRISLKEGTYPDEEREVYGASNLFRDTELFWRKLDIKPDPTMMQKKRYRYSWDPRGVCSHVPEDTRIEGFNEHVRNKAARILTESMARSEKFTSSVKDGIDIRETLRNWHTGSVYVKELPPAKNKVDTVVIVFDDDHDDLYPNRTTWYAEHEYESTLSFYSTNPFDDLIGPGIARSVYGGIALLFPPRSVPNIFRCAEAAGITGCAAQLTAGSLMFAKERNAAFLAAKPPSLQMRTLAARFKKHLVWIPLSTFSNETLSRMRRFHVLNGKRVRAWASRFIGDEL

SEQ ID NO: 92489 - protein, 276 aa, Unknown
  Obtained from environmental sample
  misc_feature (1)..(276): Xaa is any amino acid
MNTKLDIIISFLTSGKYKGIKDEKDMDAIIRLIVLNITYSISSIIIAGIGISDMRTGFVDQGLLELITGFLIFLNLMLLRTELPFMVGGFILTGVFGFFCGYSIFSHDGALSFPSLWIYSYPLISIFTLGLPFGLVPALILFFAAILGTFSQGFANISYNLGEALLICGVYFFILTLTAVYEYVRSIKDNWLSRQDSYMNMVFQNSPDIILLLDSNGGLVYCADEFLKKTRIRYFASIREVHYAKVFSQFCEKDQLDEIEHFFNLAREERKPVVLE

SEQ ID NO: 92490 - protein, 235 aa, Unknown
  Obtained from environmental sample
  misc_feature (1)..(235): Xaa is any amino acid
MLPISYGAMLVETLVAILALIAVGSLAKGGVLPGETPPVVFATAVSGFLFELGLPEQVSFTIVSLAVSSFVLTTLDTVARLGRLSFQELFSIEEGGKDTGNLIFSALKSKISSSVFTLIPAFLLAIMGYQTIWALFGAANQLLAALTLIACTMFFKKTKRKSILLLIPTIIMLVVTFTSLVLSIKDRVVLIQNGSQNISVLGMQIGIAALLLVLGILVAISCTAKLLEKSPTVKQ

SEQ ID NO: 92491 - protein, 288 aa, Unknown
  Obtained from environmental sample
  misc_feature (1)..(288): Xaa is any amino acid
MRSIIGHLDDTGNWLASVGESQEVFTKMMNDPKIESLVENRKDRVQQMYGSITDTGNAMVDGACREHLTFNLLYKLNTILLNAIPYGIALCEIVWERKGGLYAPVDFIPIPRTAINFPQNGRRGVPYLSALNRPLDEPYKFIIHRNDKGDGNVWGVSVLRSCYWPWKFKQLGFRFWIQAAERLGVPSILAIFETRNSEDAKKKADELTSLLRDMRSGSSGAFANIKEIKVVDGAIKDFETIVKVCNEEISYGITAQSLMTSQAEYGTKSQGELHAETYKFTTTHDAYL

SEQ ID NO: 92492 - protein, 414 aa, Unknown
  Obtained from environmental sample
  DOMAIN (35)...(225): ABC transporter
  misc_feature (1)..(414): Xaa is any amino acid
VAGQTPVLLFEDFSFRYRAQSEPTLIDINLKINRGEKILILGPSGSGKSTLLHCINGVIPHAFKGDISGDLFLTDRDIRSFSLNDISKIAGTVLQDTDGQFVGLSAAEDIAFALENDCVPTEEMRRRVVETAKLVDMSAHLEKSPQDLSGGQKQRISLAGVLIDDVDILLFDEPLANLDPAAGKDAIELIDELHKKTGKTILIVEHRLEDALHRPVDRIVVLEKGQIISDSKPAELLAKDILKKTGIREPLYISALSYAGVKVDADTASRLLDSLQINSRPLEEWDKNLAARQTNPRLQYINAVECSGLEVNDLQFRYTEQGEPALKGISFSVEPGECIGLVGKNGSGKSTTAKCICGFVRPDSGTISFNGQDLAELSIMERAEKIGYVMQNPNQMISFPMIYDETAFGLRQEA

SEQ ID NO: 92493 - protein, 80 aa, Unknown
  Obtained from environmental sample
  misc_feature (1)..(80): Xaa is any amino acid
MLAKEPDKYTVGQILRITEGGLNPVSCLEDVPNRCERREYCKTLTVWRGLENAINKYLDGITIQDIIDNYNDTHTDEYYI

SEQ ID NO: 92494 - protein, 345 aa, Unknown
  Obtained from environmental sample
  DOMAIN (4)...(127): NusA N-terminal domain
  misc_feature (1)..(345): Xaa is any amino acid
VATDMSEAIRQLMQDSHMSEELILQTIQETLKAAYKRRFGNADNAIVRFNDDNNEVSIYAKKRIVDSDNFYDPISEIELEEAKELNPDAEINDELLIEVDPKEFDRGSVQSAKQTAHQSIREIQKDSFYAEFKDKIGEIIIGYYQRERNGTIYVDLGKIEGKLLKKYQSPREEFHVNDRIKSLIVEVNKNQNGPLEVILSRTHTDFVRAIFELEVPEIYDKIVEIHKIVREPGYRTKLAVYSNRDDVDPVGACVGLKGVRILAVIKELEGEKIDILKYDPDPRKFIKNALSPAEVQDVIILDEAKHQALAVVSESQLSLAIGKQGLNVRLANRLVDWNIDVKTDA

SEQ ID NO: 92495 - protein, 583 aa, Unknown
  Obtained from environmental sample
  misc_feature (1)..(583): Xaa is any amino acid
MELTEEFIKGLAVDEKRLVMGIAQNMSVGEAQVLAVIELFAEDCTVPFIARYRKEKTGGLDEIQVRDIEHKYNSGKNLESRRIDIIRLIFEQGKLTEALYSNLKTAATLGELEDIYAPYKRKKKTRGMIAVEKGLLPLADAMRELETAPLLAKAAEFVTPTGADIAPEMVVATVEDALQGAMDIIAEAVSQDTENRARIKSFYFKDGKIIVKGSGKEGKGDEEAKKTSVYQMYWDYTESLSGIKAHRVLAINRGEREEVLDVTIDVDGDTATRMLQQKYELHNDYHKTAIEDGLKRLLSPALIREIRGDQSDAADDHGIGVFSENLKNLLLQQPIKGTRVLGIDPGIRTGTKCAFLDDTGKYLASIVIYNHKVEEAKKALLEGIRLYDIQLIAVGNGTGTREVQEIVTSLIADNNLEVLYTIVDEDGASVYSASDIAREEFPDLDLTIRGAISIGRRLQDPLAELVKIDPKSIGVGLYQHDVNQKKLSDTLDEVVSSVVNNVGVNLNTASASLLKYVSGINSSLARKIVKYRDEKGRICSRAELTSVPGMGPKSYEQCAGFLKIPESAEPLDNTGFTRKITRS

SEQ ID NO: 92496 - protein, 459 aa, Unknown
  Obtained from environmental sample
  DOMAIN (1)...(294): RecF/RecN/SMC N terminal domain
  misc_feature (1)..(459): Xaa is any amino acid
MLEELTIRNFALVDSISLSFRPGFNVLTGETGAGKSIIVGSLGFLMGAKTEVDVIRSGCEEASVSAIVSIGKGNNGAFEWLKSREISSEEDTVIVRRNIKTSGKGSIYIQETPVTRTDLAGFMTQLFDLHGQHDHGSLLRKENHRRFLDAFAGIEEEALAYNRLFTELAEKRKTLEASFSSQKDREARMEILRYAVEEISAAALRGGELRDLENEAQILSGFEKLAAHVNNASNSFFDGEGSLVSLARRCRSALDSAAAIDSTLSVLQKRIEDLYYEAEDIAGELRSYRDGLSYDPRRQQAVDERLALLYKLKRKYCEAAHSAATPPDNAVSVEDAMLAYRAAAEAEIEALSNIEENRENLKAAIDTLEKDIACRAASLRQKRTAAAGVLGQRITGILKRLGMPNARFSPSITARTQQGKDGRPIVVCGPWGAEEVEFFISANTGEPLKELSRIASGGE

SEQ ID NO: 92497 - protein, 450 aa, Unknown
  Obtained from environmental sample
  misc_feature (1)..(450): Xaa is any amino acid
MIGGKIWMAENLNYKTKSGSWCYDDKTGENNTNCDIYGRLYDWATAMGLDTFYNSTEWNFNDVTQQGVCPSGWHLPSRREWGDLAIAAGGTGDYGTNGTAGTTLKSTSWSSWSGANGTDTYGFSAMPGGNYDPDGGSYGYGEFYNVNIIGYWWTTTEFDSGQAYIRDIYYDYKNVLERDFPKKIGISVRCVKDDETPSVTTYLVKVSSAGTGAAGTGSYAVGATVTITAGTPPTGQLFKNWKTTSNGVTIANATGETTTFTMPSNAVTVRAVFETVSTPTYAVTVSSAGTGATGGGSYAVGTTVSINAGTAPSGQTFKNWTTSSSGVTFANANSATTSFTMPSNAVTVRAVFETVSTPTYAVTVSSAGTGATGSGSYAQGATVGISAGTAPSGKKFKNWTSSSNGVTFVDSNSATTTFTMPGNAVSVTAVFETLSYLVTVSSEGTGATGN

SEQ ID NO: 92498 - protein, 502 aa, Unknown
  Obtained from environmental sample
  DOMAIN (233)...(300): Transglutaminase-like superfamily
  misc_feature (1)..(502): Xaa is any amino acid
GGLLEPKLFSFDFSQVLRLDTEISMNDDLVLIVKKDPADNHILMRRSVMSGYSKKQGFYRMEEIDEKIHPLRLPSRPVQFQREGFKMAGQVRQEYFIVNFDAAAFIGMKDPLEIIPYENWDASSFKTAYLVESLTSDADYEHYSQSTYNEDGDLFWPEAAELGLSEKEYALYTAYGNDERIRALAEEITADYDSYGDKAEVIYEWLKYGDFRYSLKPGIAPDGDQLAWFLFQSKKGYCSYYAFAMTLLLRSIGIPARIAAGFFLDPENGAFDYYQVRSNMAHAWVEVPFPGCGWIEFDPTSINLAEGEEFRFSSGDPNLFERLMREILENRSRLRAKTGNDLRDTLGDARSLADLSAMLLKKVLLPLLIVSLIIIFMLIRCGFWFLYVMRHNKRGRAVCLWKHARRRLRLAALGYPGLKSRLSESEWASRTDAAVKGAYSLYLGAAAARFAPEYNDEHFAAMKNDYRLFSESYRKTIPLWRRLLAWLLPPLALMPKKIGNRD

SEQ ID NO: 92499 - protein, 64 aa, Unknown
  Obtained from environmental sample
  misc_feature (1)..(64): Xaa is any amino acid
MKARIILHGEFSIGETDKRLFGSFIEHLGRAVYTGIYEPGHPNADSNGFRDDVAELIKEMDVSV

SEQ ID NO: 92500 - protein, 249 aa, Unknown
  Obtained from environmental sample
  DOMAIN (25)...(235): Class II Aldolase and Adducin N-terminal domain
  misc_feature (1)..(249): Xaa is any amino acid
MTLIGRVSLLCENGLDMDAYKTLREESFEANLEIKRKNLAIYTWGNVSAFDPDKGVFAIKPSGVEYDELTPEKIVLVDLEGKVIDGKLKPSSDTKTHLVLYRDFKGIRGVTHTHSPYAAAWAQAGKPVPVFGTTHADNCAYEIPCTAFINPQEVNNNYELETGNLIVNTFKNSNLDCSQITMTLVAGHGPFTWGNSAAQSVYHSVILEEICKMALFTLMIDSNAKPLPEHIIKKHWERKHGTNAYYGQK

SEQ ID NO: 92501 - protein, 477 aa, Unknown
  Obtained from environmental sample
  DOMAIN (1)...(477): L-arabinose isomerase
  misc_feature (1)..(477): Xaa is any amino acid
MKRLNKSRITHKNMTDEFNKDTLLSGTVVLKPTAITPQAIRGLFEEANASNKCAGIITWMHTFSPSKMWIQGLMLNRKPILHLHTQFNRDIPWSSIDMDFMNLNQSAHGDREHGYIHTRMRLPRKVVAGFWQDKELRRRIDVWMRAAAARKDGMDSTVIRLGDNMREVAVTEGDKVEAQIKFGWQVNTWGIGDLAARYAKINDDRAGKLAEEYAAGYELAPELKQDGKARTAMLEQAKIEIALKEMLEAEHAGAFTTTFQDLHGLPQLPGLACQRLMEQGYGFGAEGDWKQSMLTRAAKVMASGLPGGVSFMEDYTYHFEPGKEAALGAHMLEVCPSIAGAKPRLEVHPLGIGGKGDPARLVFDAAPGPAVLATLIDLGDRFRMIVNEIETIKIEKEMPKLPVARALWKPYPSLSSAAEAWILAGGTHHSVYTALTAEYFRDWAEICGIEFVLIGRDTKPDRLRDELRWSEAYWSGR

SEQ ID NO: 92502 - protein, 101 aa, Unknown
  Obtained from environmental sample
  misc_feature (1)..(101): Xaa is any amino acid
MGQGLYEGTIPSAGGSGINVSMELFKDQSFEMSYDYIDKGTEPFICKGKFKWDDTGNIIILDTKDAPNYYKVERTKLIQLDMKGKPITGKLADDYVLNRVL

SEQ ID NO: 92503 - protein, 497 aa, Unknown
  Obtained from environmental sample
  DOMAIN (56)...(122): PEGA domain
  misc_feature (1)..(497): Xaa is any amino acid
MRPKIQADKTYEPDDQVRLKPILGLKPGVYLALIYGIVILLALYFILLHPGITKPGAVVVFTSEPWGAALRVDGLYTGTSPCKVFVPKGRHEIEVVLPGFTSERIEAGIPGRVFASLLFPRRFPLYTKLAASEPLKPLEIASREFAAWSFGGEPTASWQIPMALSEGVYRAGSASVNAGGILKAAARFAVTRAGLRDLVRAQALSANGGNAASPLSLIRSVSDIASFLDSNPNTAMWLADTLPQEPAALLVSSSWYQNQLAGHAGMIDQEELPVPQAEPVMEPPFPQIRVAGLMFTGINGGSLAQGEPFLHLVPIEPFMICSTVIPSPAFADFLDANPQWSPDQKETLESRGLVTDEYLADFEQGTGRVITGVSAVSWYAARAYCEWLGTKLPDSLSGYTVRLPTEAEWEYAVKSREKDRLVRGSAWEWCGDPYSHLPFISAPPEAIIAVGSPEYPLRGGSLLNAVTPGNPETRASLPPESCSPFVSFRPVIARKGR

SEQ ID NO: 92504 - protein, 208 aa, Unknown
  Obtained from environmental sample
  DOMAIN (54)...(168): Acetyltransferase (GNAT) family
  misc_feature (1)..(208): Xaa is any amino acid
MEIKRAIEFGDDIRERLSEVYVNAFYDDVLKYFSKDKVKLKKVFACGFLLEYFYVAIINNEVAGMVACMGKGKICFKFNVKTLIKYLGIFRGLLTNFGLNQFIKGFPKLDEQTALIEYLATDTKHLRKGIASTLLKSLFTLTEYENYLLEVMGTNTKAIKLYTKLGFKIAYIIPYFPRIYLGMKYTKEENNIIRANFAHLQNVKGHLP

SEQ ID NO: 92505 - protein, 313 aa, Unknown
  Obtained from environmental sample
  DOMAIN (224)...(293): Oligopeptide/dipeptide transporter, C-terminal region
  misc_feature (1)..(313): Xaa is any amino acid
MLEVRDIKKYFELSDGRRIRAVDGVSFQVQENEVLGVVGESGCGKSTLGRLILRLIEPDAGNVFFGGEEITCLSRNALRLKRRSMQMVFQNPFSSFNAKISIGGALMEVCRFYGMSVPESREKIERLLSDIGLSDDMLNRWPRELSGGQLQRLAIARAIIGEPSLLIADEPLSALDVSVQAQLLNLLDDIRASRSMAMIFISHDMTVVEYFCDRVAVMYLGKIMELIPASELSNNAMHPYTRSLRASAPRLDVFKDSVKEMEVPQISGETPNPQAIIKGCPFAPRCPQATPQCAEALPELREVSDGHWVRCHL

SEQ ID NO: 92506 - protein, 269 aa, Unknown
  Obtained from environmental sample
  DOMAIN (7)...(265): Indole-3-glycerol phosphate synthase
  misc_feature (1)..(269): Xaa is any amino acid
VKSPPDILGKIASQTVLRAEKAKESLSLEQARTQALALAAKDTRVSPLPFESAIAAPGLSFICEVKKASPSKGIIATDFPWLKIAQDYEEAGAAAISVLTEPEFFLGSDQYLREISAAVKIPTLRKDFIIDQYQIYEAKLLGAKAILLICALLEQQTLAEFIAVARELALDCLVEIHSEEEAKEALAAGVKIIGINNRDLTTFNVDTGLTSRLKKQLSSGILTVAESGIKTADDIRELRKTGVDAVLIGESLIRATDRKAFLKELRNGA

SEQ ID NO: 92507 - protein, 219 aa, Unknown
  Obtained from environmental sample
  misc_feature (1)..(219): Xaa is any amino acid
MSISRRNNRALNRVLRGSLRAHEPPPQEAAPAEPAYTLCSDIPENYNDSYVRAIPKDPQSTFVYWELPATGQEDQSLFADKGTAHVGNDEAVRIGQQLNEKQKHRQAEICRHTDDSGGYQQDYSQYDYNKFNRPMNWDNGNNYDFDGGNQQQYHHGVDNYQDGNHGYHQINWDNGNHYNFDHNNQQQYLHGADNYQEGGHGYHQINWDNGNHYSFDDIY

SEQ ID NO: 92508 - protein, 270 aa, Unknown
  Obtained from environmental sample
  DOMAIN (185)...(256): TOBE domain
  misc_feature (1)..(270): Xaa is any amino acid
VGLRIKKVPKDEIDRRVKDAAKILDIEKFLDRKPKALSGGQRQRVAVGRAIVRNPKVFLFDEPLSNLDAKLRVQMRAELSGLHLRLNATIIYVTHDQVEAMTMASKIVVMKDGRVQQIGTPLYLYNNPNNKFVAGFIGSPPMNFLTVRVLEEGGSIVLDEGSFKVKPDSNHATHLKKYVGKEVFFGIRPEDMNYVESSGDNSFPTKITVVEPLGADIHLWLTTGTQPLVARTEPHHMFKVGETANFIPKMEKARYFDKETEFAILPGPAK

SEQ ID NO: 92509 - protein, 302 aa, Unknown
  Obtained from environmental sample
  DOMAIN (1)...(301): CobN/Magnesium Chelatase
  misc_feature (1)..(302): Xaa is any amino acid
VGSSPQDDLLTEYLLALTRLENGEIPSLPQVIAAIYGFDYYELLEKSAQLLPDGSKTYGKLLDDIRQRCRQVIERLAGCGFNIEQADFTAKLDWVAAAEKNPQEKLKQIENYICQTLFPNLQKTEQEITNLIAALAGEYIEPGPAGAPTSGMADILPTGRNFYGADPRTLPTKAAWEIGKTLGESAIERYIAEEGRYPETVGIILWCSSNLRSRGQCLAEFYYLLGVRPVWQQGSQRVMDLEVIPLAELKRPRIDVTARISGMCRDAFPMIIELLDRAVGMVAELDETPETNYVRKHVLADA

SEQ ID NO: 92510 - protein, 433 aa, Unknown
  Obtained from environmental sample
  DOMAIN (1)...(42): Clp amino terminal domain
  misc_feature (1)..(433): Xaa is any amino acid
EFVSTEHILIAISAGEGKAAELLKKAGVTKKAILDALKQVRGNQRVTDQNPENKYQVLERFCRDLTALARQEKIDPVIGRDEEIRRCMQVLSRRTKNNPILIGEPGVGKTAIVEGLARRIVAGDVPEGLKDKKLLALDLGQLVAGTKFRGEFEERLKALIHEVQAAEGKIILFIDELHTLVGAGAAEGATDASNLLKPALARGELRCIGATTLDEYRKHIEKDAALERRFQQVYTAEPSVEDTIAILRGLKERYEVHHGVRIKDEALVAAATLSSRYITSRFMPDKAIDLVDEAASRLKMELDSRPTELDKLERKLLQFSIEKQALSREEDTASKERLAKLEKEIADITSERDAMKARWEAEKVDIQGIRELKQRIEELKIEETRYEREGNLSKAAEVKHGRIPEAQKQLAALASLMEKKRNEAGGSGGAALL

SEQ ID NO: 92511 - protein, 159 aa, Unknown
  Obtained from environmental sample
  misc_feature (1)..(159): Xaa is any amino acid
MKETIDTEEKLARVFLAGIWDNKTSKSESESLLRELGSLAETLGVEVIGQEIVHVRENHSQYGMGTGKAAEVAEKAASLGAECLIFDREMTPSQQRNWEELSGLSVMDRQELIIQIFRGRAQTREAALQSEMAELSYSLPRLQHKYIDLNRQRGGRYGT

SEQ ID NO: 92512 - protein, 164 aa, Unknown
  Obtained from environmental sample
  misc_feature (1)..(164): Xaa is any amino acid
MDQIRFDSAGHKLTQTIEIERLKLEASINSEIAIALRMADSPLIKWYFLNPDDENMKQIALGEIAGYRRAFTGKNVFWVGDVDKKYYFNDEYIYTIDSSAESSWWYNSIMKSQSPYSLNVNFDVGLKKTMVWVNAPVLDEDHKPVGIVGTGINVPDFINAINYN

SEQ ID NO: 92513 - protein, 490 aa, Unknown
  Obtained from environmental sample
  DOMAIN (321)...(486): GGDEF domain
  misc_feature (1)..(490): Xaa is any amino acid
MGRIQYNNAGQKLTQTIEIEKLKLEASINSEIAIVLRMADSPLIRRYLLNPADGEVQKIAFEEIAGYRRAFKGESVFWCSDIDKEFYFNGDNHYTVDAENPDNYWYKMTLYETEKYNFNINYNAELQRTMLWINAPVFDNNQKPAGIVGTGINLSDFINAIYNNYSEDEELYFFNAAGEITGARNINLVAEKINITGELGQTGKKIFENVKHIKNGEIKYIKTADRKGIAAYSSIPALDWYIAVLHPFTLRESLQTNMAVLFGVMMMVIFSIFIFFNIFIIVMLEPLNQVVKTINQTFADWGLKPHEGEQLKDEVGTFNDFFHLTIIDQVTGIYNRRYLDGSLKNIIKLHSRAGSKLSVLLLDIDHFKKYNDTYGHDAGDECLKEVSSALSQCVIRDEDFVARYGGEEFAVVLPNTDENGARLVAERILEKMRERNIPHKTNEAAAYVTVSIGGTTNVIDHLQHGSDYIKVADKALYESKKNGRNRYTAS

SEQ ID NO: 92514 - protein, 280 aa, Unknown
  Obtained from environmental sample
  DOMAIN (59)...(280): Phage terminase large subunit
  misc_feature (1)..(280): Xaa is any amino acid
MRIDFSTLPAWINDSFLPLWTDSNRFIICKGGAGSGKSVDAHRRALYRLIAEPGHNYAIVRKVGRTLGISCIPLIRQCVSEWGMWRLITENKSNQTMTCNINGNQIKFLGIDDIEKIKSITFENGPLTDILVEEATEITEKDFNQLNLRLRGKAKVPFQITMLLNPISDMHWIKRRFFDNPGAHKEKITIHESTYHDNRFLDDEYKDELEGLKYQDRVYYDIYTLGKWGSVGNLVFRNVVYQECPYKPEDFDQIIAGQDFGFNHYNAIELIGLKDGNKYS

SEQ ID NO: 92515 - protein, 292 aa, Unknown
  Obtained from environmental sample
  misc_feature (1)..(292): Xaa is any amino acid
MNVSIQAAARVFNYSVISKILKETLIFILIGFTLAFFTMLLQLLLGNTEEPEEAPILKHEFSPVDIRVSEPVSVRVNEPVNVHIHETVHTPPVSEPVNVRVNEPVNVHIHETVHTPPASESANVRVNEPVTVHIHEAVHTPPASEPVNVRVNEPVNVHIHEAVHTPINEHVSKPITFSAEDLIDDESGPKGLYSPRTHIGWEERVLDRLNSELHRCASTEKDLTLLMLEFKEKITNYQFKDAAREAASLFTSRDLLFEKGEQGITVIMPGIDLESGLDKAQKSSFVSKKNFS

SEQ ID NO: 92516 - protein, 180 aa, Unknown
  Obtained from environmental sample
  DOMAIN (18)...(165): DUF218 domain
  misc_feature (1)..(180): Xaa is any amino acid
MPLENAYPPLSSEFKKDWPQAVVILGGGIIIGSPEAGTGKDTLSADAMKRVVYAFSLRDTFNVPFVFSGGKVFEYGQEPEAFAASRLLVSLGFPFNRLILESRSRNTWENAKETAIYGFDHPVLVTSAYHVKRSVYCFNRQGISVIAAPTDYKCDRGYKYDFFSFMPTIISLKNSWSAHA

SEQ ID NO: 92517 - protein, 371 aa, Unknown
  Obtained from environmental sample
  DOMAIN (193)...(361): Putative RNA methylase family UPF0020
  misc_feature (1)..(371): Xaa is any amino acid
MVARETSIVLSMLAVFRKTWFYLLMNEFYAAFIPGLQNLIADVIKERLSDIKIHKLLDGAVLFETVTDYDKLNFFCFNNIFAVISVMEHVNNDVNPKTALEKHIKAVVKTNAASEVVSNNNKKFHTFRIVASAENIPAAIDEKARAEAESFISRFSGLKVNRSLPDTEFWFLYRSEKEQNKFSVFMKRLTLRPSWEKTLHKGELPPPLAWTLCRLALLVHSDTVLDPFCGYGSIPDAALKHFHINKFIACDNNREAALYTKTRFNKRKKEDFVFYESDFSLLPSLVAEKSIDAIVTDPPWGEYREINKTSFYKEMFDVFQKLLKDDGRIVLLCANNNDFLNNVPVSYKLESKIPILLSGKKAAILQFFKKE

SEQ ID NO: 92518 - protein, 487 aa, Unknown
  Obtained from environmental sample
  misc_feature (1)..(487): Xaa is any amino acid
MDEGMKESRLPLNPVLAPVLAPYTDDISSLLPAAQNITPDKTDKQNLSLFDDRIMAALLSFVSQNETFYIKGVRIRQKVLNSSAALFPGLQLESVIGGLRVLGLFFANGDMLFPDFNRFAAFGKLDRLERTEYCAAGILCYYEAPDNELSPWLFRSKIRKYASFIHNFYISLDPEQQYPLVTIRRIVFILERNNNEINCDMLIKAMRQTGLLVSDSKHNWRKAPSASEPAGTGATIAMDSPFSLLMYPEIAYNDAIEIASISRVTGTGLNVSFEINKDTAVSAFNRGISAAAAIDLLQRLSGNRIDENTAFTLLDWEKRHKEVSLRKGLVLSLSPERSYLAETRPLSKYISAKLAPGIYMIPENMEEKVYTALKKAGVTIFARPDNTGAPNRASRADDGNILNSTTDSRIYFPHINTEAPHAEKIRQFETGKNEDGINTSTSQSDAPSASALIDRFHSIINKMHLGPEQRDELTARINRRLVLCESQ

SEQ ID NO: 92519 - protein, 719 aa, Unknown
  Obtained from environmental sample
  DOMAIN (7)...(539): UvrD/REP helicase
  misc_feature (1)..(719): Xaa is any amino acid
LDCNKDLSAQKEEIIRAWQEKVREITNITGLITDALRTLAELKKSIALTKSLGEILLESPPPSLPEISPFLETGVVANSDWETELPPSETRLAIKKYFDYYSAVVAARIPGRYGDAYTPLVENFKILKGKDGDGLYYELEAIANYAFNFGLCAGVFELIKKFQDEFNAKKRETGFLSFNDIARLAVDALKDHPDIRKAYKDSLSMIMIDEFQDNNALQRDLIYLLAENPGRTEKGIAQAEELENNRMFFVGDEKQSIYRFRGADVAVFRSLRPAMGMENGIELIHNYRSQPGLIAAFNHIFRDVFLPPGPGVPDYEAAYSSMRPRESANESDNSPLAHFCFLNGEALPKDDTSGLKSQDLEAVFIAARIRDMVRNEEEIPRRDGTKTGWVKCTWSDFAVLERSYTHQGTLEKHFREFGIPYRTDRPTGLFNDAPVLDTRAFLRLLVYPEDRIAYAALIRSPFMRLSDLSLAVCMLAINANAKTPGKSPEPFAEENEALIPEDELVLYRRARTCYQSLREASRTLPVTELLTKLWFEEGYRCETLWTESAQVYESLFDLFFSLAAECDAKGKSLADFIEYLEDVMNREEKPDDRDIPGEGEGGVRIMSIHKSKGLEFPVVFIYDCSHAGIKKRSTELISYHEQYGLILGIPQAEELPLGGNYFRRIMEEEEKAKDIAELRRLLYVAMTRAECKVFLTFTLPKQTAKEKGDWDMAAEEFTT

SEQ ID NO: 92520 - protein, 498 aa, Unknown
  Obtained from environmental sample
  DOMAIN (198)...(360): Type III restriction enzyme, res subunit
  misc_feature (1)..(498): Xaa is any amino acid
GVSARSTQGQALRLYHLSQGSAVKEVLVGHITEGFWCNDNSFAILSDHLIFNRFAHLTKRKQKSSSLHNAAFADSLISGDFVVHEDCGIGKYLGLSRIEALGALIDCVVIEYADKARLTFPVSDLHKLEKLIRNEDDASPILNKLGTKVWEHAKERAKKRIAQIAKTLVDLYAKRELIKGFAFPPDSNLQDEFENDFPFSPTPDQVRSSKEIKDDMEKEKPMDRLLCGDVGFGKTEVAMRAIFKCINAKKQAAVLVPTTVLAAQHFQSFTERFADWPIKIALVNRYKSIIEKKAIYRELEAGTIDLVVGTHALLADHVKFKDIGLLIIDEEQKFGVKQKEMLREMRLSLDTLVMSATPIPRTLQLSMTGVRDISFINTPPLNRLPVETKIMERDDNVLATAVKEEIERGGQAFVVNDRVQNIEKLAAEVENWVPNLRVAIAHAQMSDSSLEKTMSAFINREFDVLVCTVLIESGLDVPNANTIIIMNAQQFGVGQLYQ

SEQ ID NO: 92521 - protein, 63 aa, Unknown
  Obtained from environmental sample
  misc_feature (1)..(63): Xaa is any amino acid
LAVCIALPLSAQSRGIVIPNLNGYVTLKCDFHIHTVFSDGNVWPTVRVDEAYREGLDAIAITD

SEQ ID NO: 92522 - protein, 374 aa, Unknown
  Obtained from environmental sample
  DOMAIN (7)...(322): Polysaccharide biosynthesis protein
  misc_feature (1)..(374): Xaa is any amino acid
LRKLTNILVTGGAGFIGCNFIRYLLEKAESFSGKIINLDTLTYAGNRMSLADIEAKYGSSASARYFFEKGDICDRSFVESLFAKYEIDTVVHFAAESHVDRSILGPEAFVKTNVMGTFTLLDVARNAWKNEEDSPSKEGALFHHISTDEVYGSLGETGYFTEYTPYDPRSPYSASKAASDHLAMAYSHTYGLPVTLSNCSNNYGPYQFPEKLIPLMILNMLEGKPLPVYGDGKNIRDWLYVEDHNSAVWAIMRNGVSGETYNIGGENEWENIKLLNVLIDIVCAKARLDPAKVRGTVTYVKDRPGHDRRYAIDCSKLKHELGWKQAVNFEEGLSRTVDWYLANPQWIESIRSGEYQHWVEKNYGDRGQEKQAHI

SEQ ID NO: 92523 - protein, 164 aa, Unknown
  Obtained from environmental sample
  DOMAIN (73)...(150): Bacterial Ig-like domain (group 2)
  misc_feature (1)..(164): Xaa is any amino acid
MKKIFKVLATQSRWLCAIALVAVIGFSFVTCDDSGGGGGGGTGGGGGTGGGGGTGETGGTGETGGTGGLTTVPVTGVSLNKTSLSLAVGGSETLTATFAPTNATNQTVTWSSSNTTKATVVNGTVTAVAAGSATITVTTTDGNKTANCTVTVRTPVAPTITTAS

SEQ ID NO: 92524 - protein, 784 aa, Unknown
  Obtained from environmental sample
  misc_feature (1)..(784): Xaa is any amino acid
MSLDRRVSTGMPGLDQAIDMLRLGDNVVWQVNSIEDYLQVARPYINQAKKDKRRLVYFRFGNHEPIMKDDEPSVVYKLDTSEGFELFAAKIHNFIDQEGLEAFYVFDCLSDLLKSWRSDMMVGNFFRITCPFLFQLDTLAYFALIRGTHTYDTISRIRETTQLLMDIYIVDNKIYIHPLKVWERYSPTMFFPHLIEGDGAISITSSADTATLFSQVSGSGQPSDYWNITLDHARTLLNGDKEAQEEMKKKLISVVIGKELRITELALKYFTLRDVLDIARREIGTGFVGGKSVGMLLARKILETDAQDAMRGHWEPHDSYYLGSDIFYTYIVQNGWWDLRMRQKTTEGYFTLSKELHEKMLQGKFPENIREQFKQMLEHFGQSPIIVRSSSLREDNFGNAFAGKYESVFCANQGTPERRYAAFEQAVRTVYASTMNEDALAYRLNRGLTNLDEQMAILVQRVSGNHYGDLFFPHLAGVGNSSNLYVWDKTMNPDAGMLRIVFGLGTRAVDRVSGDYAKIIPLDCPNRGPPVSYGDEKKFSQHKADVLDLFNNKLAEVPLEKLADGDLKTDKNIFFTTDNAAINRMRELRINYTYTPRIPDFKKLLTETGFPEFVRTVLSTLSTAYNYPVDIEFTANFDPNGEFRFNLLQCRPLQTKGLGRVIEAPQPKSERIFFSSAGDFMGGNIRLHFDYVVFVRATEYLELTDQDKYQAARTVGVINQKLKDKTVLLMGPGRWGTTTPSLGVPVHFSELCNMAALCEVSYLKAGIVPELSFGSHFFQDMCGV

SEQ ID NO: 92525 - protein, 478 aa, Unknown
  Obtained from environmental sample
  DOMAIN (434)...(478): DNA gyrase C-terminal domain, beta-propeller
  misc_feature (1)..(478): Xaa is any amino acid
MRYTEAKISKIGDEMLQDLQKETVNFIPNYDESFNEPSVLPSAIPNLLVNGSSGIAVGMATNMAPHNIGEICDAICALIDNPEATNEDLMRLVQGPDFPTGGTIFGRQGIKEAYKTGRGKLLVRGKFNVETTKQGKEKIIFTEIPYNVNKALLLEKIGQLMRDKIIDGISNANDESDRDGIRIVIELKKGAIVKVILNQLFSNTQLQTTFGIINLALVGGKPQLLTLRELVHYFVEHRVDVVTRRTRFELRKAEERAHILEGLIIALANIDEVIAVIKASRDVAAARLKLQERFLLSEAQSEAIVEMRLGRLTSLEVEKIEQELAELKTRIAYYKSLLADEKKLRGVIKDETREVAEKYGDKRRTEIVAGEVENINIEDLIKKEEMMILISNMGYVKRVPVSAYKNQGRGGKGMQSAQLVEDDFVQQIFVASTHEYIMFITSAGKAYWMKVHELPEGSRTSKGSHIKSLLTVSPNEDI

SEQ ID NO: 92526 - protein, 307 aa, Unknown
  Obtained from environmental sample
  DOMAIN (79)...(302): Binding-protein-dependent transport system inner membrane component
  misc_feature (1)..(307): Xaa is any amino acid
MKKKTESTVLKFTQIKSITDVFFNLIMLALLVMCLVPLLLVISISFSAEESIRIYGYQLIPRIPSFEGYAFLFQQRLTMLRTLWMSVLVTVLGTSLGVVLNSLMGYVLSRREYKLNKFFVWYVFIPMIFSGGLVSSYFVTSQFLGLKDTAWALILPIAVSSFNVILCKTFFRTTIPDSIVESAVIDGAGQLTVYFRIILPLSLPVLATVGLFLSFGYWNDWFLAMLYIDSPRLYTLQAYLNRLLGDINFLAQNAQSMGVSVANIIASMPKEAARMAMVVIAVLPIACAYPFFQRYFISGLTVGAVKG

SEQ ID NO: 92527 - protein, 147 aa, Unknown
  Obtained from environmental sample
  misc_feature (1)..(147): Xaa is any amino acid
LFSAAQWFLPPEDRRGLTSVPTLTWWFYGSQPNNLSDALRVISDYTQSKIGVRLDIKVVGWADSQQRMRTIVNSGEYYDIMFIDLTDYNNFVNLGAFADITNLLGTTAPQLQRFIPAGLWDGVKVNGKIYAVPTYKDSSKTRFFVWD

SEQ ID NO: 92528 - protein, 291 aa, Unknown
  Obtained from environmental sample
  DOMAIN (173)...(287): Response regulator receiver domain
  misc_feature (1)..(291): Xaa is any amino acid
TRKDASKVVSVVNFRVDEKQQKLAVHIDKDIPKTLIADDQRLAQVVANLLSNAVKFTPEKGAITLEARFKGEDRGLCTIQISVADTGIGISGEQQKRLFNSFQQAESSTTRKYGGTGLGLAISKSIVELMGGKIWVKSESHKGSNFAFTIKARRGTTKEKGALLVPGIKLENIRILVIDDDPDILAYFSDILHEYGVNCDTAISGEEALQLVEKNGPYHIYFTDWKMPVMDGIQLTRELKTREPHNSVVIMISAVEWNVISEESKKAGVDKFLSKPLFPSTIFEAIHECTG

SEQ ID NO: 92529 - protein, 91 aa, Unknown
  Obtained from environmental sample
  DOMAIN (7)...(32): Bacterial regulatory proteins, lacI family
  misc_feature (1)..(91): Xaa is any amino acid
VVNVKPVTLYDVAEYAGVSYQTVSRVVNQASHVSAKTREKVEAAMAELNYIPNRVAQQLAGKQSLLIGVATSSLALHAPSQIVAAIKSRAD

SEQ ID NO: 92530 - protein, 403 aa, Unknown
  Obtained from environmental sample
  DOMAIN (1)...(227): tRNA synthetases class I (E and Q), catalytic domain
  misc_feature (1)..(403): Xaa is any amino acid
AYYCFCTAERIEKVRQEREQAHSADDADAKASASGYDRHCRDIPVEEALARVSAGEAHTIRLKIPLGETTRFNDYLLGEIEWKNDDVNPDPVLLKSDGFPTYHLANVVDDHLMEISHVMRAQEWLASTPLHVIMYKSFDWDPPEYCHLPMVMGQDGKKLSKRHGATSIDEFRKQGYLPEALINYVALLGASYEEGRDILSLRELEQLFSIDKLNKAPAIFDYKKLEWFNGQYIRMKSDEELAILCLPSAVEAGLFGTKGADPSPDQKKTFISAMPLIRERLVFTHEAPEKLAYLFAPPALPAQEEFIPKKANLTEAIRLLRLARDMVNQLSNAVNDAAAEAYIKEQAEKAAVKLGDLMMPLRVAITGSRVSPPLFGSLRILGAQESLARVDKALEQLTVSSEQ

SEQ ID NO: 92531 - protein, 396 aa, Unknown
  Obtained from environmental sample
  DOMAIN (130)...(318): Met-10+ like-protein
  misc_feature (1)..(396): Xaa is any amino acid
LSISLLPSREKSLLRFHPWVFSGAVDKINGNPKLGETVKILSSNGNFLAWGAYSPNSQIRARVWSFDENENIDRDFFARKLRRCLESRKAMGFEPNGTNAFRLANAENDFLPGCIIDYYAGYLGVQLLSAGWEIFRETLVECLKEIFPNCKGIIERSDSSVRIKEGLETQVKILAGEIPQNAIEIEENGLKILVDLHSGHKTGYYLDQRNARKRIGELAKDKRVLNCFCYTGGFGLFAAKGGAKYVRQVDVSASALELAKQNAALNDLKNSEIEYAEADVFTYLRKCRDKGETFDLIILDPPKFAESASQVEKAAKGYKDINLLAIKLLAPGGMLATFSCSGHISAELFQKIAADAAVDAKRQVQILESFKQAQDHPVLGSFPEGMYLKGLLLFCF

SEQ ID NO: 92532 - protein, 249 aa, Unknown
  Obtained from environmental sample
  DOMAIN (5)...(243): Triosephosphate isomerase
  misc_feature (1)..(249): Xaa is any amino acid
MKAPKAVVANWKMNHLRADAEAFCQAFLKDYAKKESIEVGIAPPYPYLDLVGSRTRDKGVLLFAQNALDKPKGAYTGEVSMAQLKDVGCHGVILGHSERRQYYGETETTLTPKIAAAMEHGLLPLFCIGETLAQREANETLEVVSRQLAILSQVGNSPIWIAYEPVWAIGTGRVATPAQVEEVHVFIRKELVRLKGEPGREIPILYGGSVTPDNFPELLQTKEVAGGLVGGASLDPAKFSKLVGQAQGQ

SEQ ID NO: 92533 - protein, 382 aa, Unknown
  Obtained from environmental sample
  DOMAIN (3)...(381): Glycine cleavage system P-protein
  misc_feature (1)..(382): Xaa is any amino acid
MAPVEDRAMLDAIGIQSPEDLLGGIPDALRLKKPLTLPPEESELGVLRQFEAMAGQNAKFASCFLGAGAYAHFIPAAIDMITSRQEWFTAYTPYQPEISQGTLQHIFEYQTLVCDLTGLDVSNASMYDGGTSCVEAALMAVRVQKKRNTILVSRGLHPHYEEVLRTNITTRDGLKLVQVELKDGVTDMGDLAAKLNPDVACFIVGYPNFLGCIEDLGTISAAVKPSGVLLISVTQEAMSFGWLEAPGKLGADMACGEAMSFGSPTSFGGPFLGFLATKDGNKREMPGRIVGQTQDVNGKRGFVLTLASREQHIRRDKATSNICSNQGLVALRANIFLQLAGPEGLKGLAMQNASKAQYLDTKLVGTGKFEKVFPAHYFNEFV

SEQ ID NO: 92534 - protein, 203 aa, Unknown
  Obtained from environmental sample
  DOMAIN (3)...(203): Endonuclease/Exonuclease/phosphatase family
  misc_feature (1)..(203): Xaa is any amino acid
DEVCWFPSSSKKGYAGCATLTKRGDGWKHGKGMDAEEFDAEGRMVVSRLGDLTLFGGYFPNASQGLVRLPYKRAFAKKIARLVSDEHSADRQVILVGDMNVAPQEIDLARPKDNVGNPGFTLEEREDFQGYLRAGLVDVLRERNQGVPSLYTWWTQRGGARARNVGWRIDLFLASAALVERIKNAAIHSDVFGSDHCPISIEL

SEQ ID NO: 92535 - protein, 156 aa, Unknown
  Obtained from environmental sample
  misc_feature (1)..(156): Xaa is any amino acid
WEFKNAVIYRYDDEGILRVYPFSIDESYNEHPDIFRRKAVNVEELSAKNAGLLVKDLRSAGLPYQHTQANYYHRYSFAATSLIVMILSISMGGRFRKNILLMSLFTSLSVAVVYYITEMLSMTMAGLNIIHPFVGAWFPVLIFIVLGVLLLRSAKT

SEQ ID NO: 92536 - protein, 193 aa, Unknown
  Obtained from environmental sample
  misc_feature (1)..(193): Xaa is any amino acid
MISVYDREYDLLVIGETMAELTCEGDVVSSGSFKMDVGGADVVVAAAAARLGSKVRLISAIAHDQFHGFIRERLTAQKIDISLVTTCQQSYNGIYFTSEKYPEYREYLIHHPGTASRHIIPTLVTPEYVENTKIVYASSELQSVSPQTRRTIFNAFLFAHTNKIMVAYDPNLRLQRWSLDDAREGLWSVLSLI

SEQ ID NO: 92537 - protein, 137 aa, Unknown
  Obtained from environmental sample
  misc_feature (1)..(137): Xaa is any amino acid
MRVFYDYSSVMDPETKKLLPDPVFTQLPAALTLYARQKDLTFGDNIYRYDYVNNESAVFFIQENITSISYGIVPVIGKGSLRSVMAVIDCGDSILIYAASMAKAASVSGLSERISASFSNRAMAIIRWFSENINVNL

SEQ ID NO: 92538 - protein, 413 aa, Unknown
  Obtained from environmental sample
  DOMAIN (215)...(343): Polysaccharide deacetylase
  misc_feature (1)..(413): Xaa is any amino acid
GSPARSGNITSGNLTVVYTVHGETYVLRFEVKGSTINLLPNKSFPLASNCALSPDGTKAVFWGENGLELWDYANWRLIQRLNNSPVFSCAWINDRQLLAGNTRYIEEINISSSSYPRRRICLSSADEFGFEQGSGSLSRIAIKIGNDWFTSDGKSAWAVAANTQLRQPILYSDHYRVFLEPQSSGHYVNIPMIRNMQATGTISLVSAYTVNKSYTLGHTMPIAVCFDLYDDDTGLSQVLAALSRLKIKATFFLNGEFIRRSPQAAAAIVKGGHETASLFYTPIDLSDTRYRITNDFIARGLARNEDEFNKATGKELSILWHPPFYRTSDAVNAAAAAAGYITINRNIDPGDWMSREDALRLNLRQIPPSEIIEQIIQKRESGAIIPIRLGLLPGGRDEYLFQRIETLLDALLR

SEQ ID NO: 92539 - protein, 247 aa, Unknown
  Obtained from environmental sample
  DOMAIN (1)...(231): EAL domain
  misc_feature (1)..(247): Xaa is any amino acid
MNLTSDNIIAYFQPIFSADSNDVYAYEVLGRYIDDDGEVKSLGPFFNDPDVSHDEALRVDRIVRRFAMKKYIEEKRSEYLFINIRLAWLLPFAINPEDMVTLQLAKEFGIPNDRLVIEITEEEYNASEEYLRAIIHYKRAGCRIALDDYGKNASNIDRLAKLQPDIIKINMDYIHNCEKSFHYREYLRALALFADSVGIEVLYEGIETPRQFEFCDSLKGDYYQGFFFALPQPSMIDPVINKGTVET

SEQ ID NO: 92540 - protein, 506 aa, Unknown
  Obtained from environmental sample
  DOMAIN (17)...(169): Peptidase C26
  misc_feature (1)..(506): Xaa is any amino acid
MSEMALVLDFGGQYKELIAGTVRNLSVYSQIMPGNTPLDEIKRLNPIGIILTGGPNSVYLPDSPRCDPEIFSLGIPILGICYGMHLMCYTLGGKVESGDVGEYGRVPVTPVRKSKLLSDVKKPFTALMSHRDSVTRMPEGFYITAKTSSCIAACENAARKLYNTQFHPETKHTKGGKKIISRFLFDICGAKGDYRLDNYIDTQAKKVRKKVGEKKVLLALSGGVDSSVCASLLSKAIPGQLTCIFVDHGLMRLNEGDEIEKVFSKRNLRFIRVNAKERFLSKLKGVSEPEAKRKIIGEEFIRVFEDESAKLGDIPFLAQGTIYPDVVESGGKHGAVIKSHHNVGGLPQGLNFIDVVEPLSGLFKDEVRVLGKKLGLPSSLVNRQPFPGPGLAIRVMGEITEEKLDVLRKADAILREELDKLKRRPDQYFCVLTNTHSVGVKGDDRTYDYVIALRAVKTDDFMTCEYAPLPHKLLSRISSRITAEIPSASRVVYDITSKPPATVEWE

SEQ ID NO: 92541 - protein, 329 aa, Unknown
  Obtained from environmental sample
  DOMAIN (46)...(329): Sodium:alanine symporter family
  misc_feature (1)..(329): Xaa is any amino acid
METFGQIIKMINGWLWGPPLLILLVGTHLYLTFRTGFIQRKLGLGLKLSVTRDKGSTGDITQFGALATALSSTIGTGNIIGVGTAIAAGGPGALLWMWLTGVFGIATKYSESLLAVKYRVLNNKKMMIGGAMFALERGLKMKWLAALFAAFTSLAAFGIGSGVQSNAVATRLFDDFGIAHWVSGLIISIMTALVIIGGLKWIARAAQALVPFMTIFYILGCIVILVINHHFIIPAIQLVCTNAFNIKSLGGGFLGFAAVQMMTAARYGVARGLFSNESGMGSAPIVAAAAQTKNPVRQALVSSTGTFWDTVVICLLTGLVIISSVLAHP

SEQ ID NO: 92542 - protein, 96 aa, Unknown
  Obtained from environmental sample
  misc_feature (1)..(96): Xaa is any amino acid
MEDQAEKLREIMRQKKSSSGKLYEQAEGALQSNAMSGRMSQLRAEGAEGRKTRIISVTSGKGGVGKTNLSVNMALAFARLGKKVIIMDADLGLANV

SEQ ID NO: 92543 - protein, 257 aa, Unknown
  Obtained from environmental sample
  misc_feature (1)..(257): Xaa is any amino acid
MLIERLKADPNLRLLCGFGKVPGQASFSRAYSFLAAADIQSGMLERFAKETFKGKIVYHVNRDSTAINARETVKKEKRKSDVKRLKKRGRPPKSEGKREKQPCEMELQIEADPYASLKKLDTACSFGCKKNSQGNVSFWRGYKLHLDVSDSGFPVTACVTAANVHDSRLAIPMEKITEQRVTFCYSLMDPAYDAQTIADFIRSRGRVPIIDPNKRSDKNRPPLDPAKQERYKIRTTAERANSHLKDNLIPKTLYVKG

SEQ ID NO: 92544 - protein, 388 aa, Unknown
  Obtained from environmental sample
  DOMAIN (19)...(123): D-ala D-ala ligase N-terminus
  misc_feature (1)..(388): Xaa is any amino acid
VPYILTSEKKEYCVYEIPYAIALNHTTEEIYAQIKNSGFSENMLTLKKKITAALNADNIARCKPVNSKCVNFVDFLDMTKQQDADIFICLHGGFGENGTLQTLLEQHGIHFNGSGSIASRLCMNKYGTGQRVDSLKIKKMRSCKKKKVSAKQIKENAVSNKKQWKKLCGYLGGDKIVVKPNNDGCSTGIVVLQSQEDLQTYCELCVSGANFIPENTFTNQPNKIQLPEEYGDFLLEEYIETKKMEVQSYEVVPSTNADWVELTVGVLEKRGEYHSMNPSVTVADNDVLSLEEKFQGGTGINFTPPPKHIISAELVGIIKKNMEVAAKECGVEDYCRIDIFANNDTNEIIVIEINSLPGLSPSTVLFQQGAKEKPPLYPTELLEFIISK

SEQ ID NO: 92545 - protein, 80 aa, Unknown
  Obtained from environmental sample
  DOMAIN (26)...(78): Mur ligase family, catalytic domain
  misc_feature (1)..(80): Xaa is any amino acid
MKELLLSEIITGMNAVAANYWQHDVVVKGVSTDTRSLKKGELYIALKGNNFDGHDFISIAQTKGACAVVCSKNVDSSLPV

SEQ ID NO: 92546 - protein, 229 aa, Unknown
  Obtained from environmental sample
  misc_feature (1)..(229): Xaa is any amino acid
KGVISRLESEATEKNRFATEIVIRNYFKRSAAGQNAGSRYNETPAERELRSKVFQWQKENTTALLENGKTDKKAAELVINILGDHIKNAENGKRPGLFKQVVWVLKHKIKFNRKHKTTPDRGNIEAIIVSNTQHALEKLNSIKNEENKAAVEKFSAQLELMSAVSRNHTRRGIREEMEDSAVYAIAVRGFSIERELIQEMFEANRISRETAKRMRSDIATLETQLKNEA

SEQ ID NO: 92547 - protein, 577 aa, Unknown
  Obtained from environmental sample
  DOMAIN (17)...(577): tRNA synthetases class I (I, L, M and V)
  misc_feature (1)..(577): Xaa is any amino acid
VYKPVDARVNFPKMEEGILEFWKKNNIFEKSVSQRGNGSAAGEFLFYDGPPFANGLPHFGHFVPNTIKDIIPRYQAMKGKKVVRRFGWDCHGLPVENLIEKKLKLNSKTEIEKYGIAKFNEECRESVLRYVKEWRRTITRLGRWVDFDNDYKTMEPAYMETIWWVMKSLHEKGLLYEGHYILPYCPRCSTVLSNHELNLGGYKDVHDPAITIKFKVKEGAGGQGSGIRGDVYFLAWTTTPWTLPSNLALVLGPDIDYVLIEARTPNPDPLPDPSYYILAKERLQAYFKETSEYKIIYTKKGSELLGVEYEPLFPYFKDAAAQNAFRTYPGDFVSTEDGTGIVHTAPGFGEDDARVLKNTGIPVICPIDAECKFTDEVKDFAGQFVKDADKAIMEKLKAEGKLFKREQILHAYPHCWKCEHPLIYRAIGSWFVNVEKIKKDMLKANSEIRWVPDHIRDGRFGKWLEGARDWAISRNRFWGNPLPIWRCEECGKVICVGSRKELKELSGVYPEDLHKHFVDDITIPCEDCLGTMRRIPEVLDCWFESRSMPYAQSHYPFENRDYFESRFPADFINEGLD

SEQ ID NO: 92548 - protein, 119 aa, Unknown
  Obtained from environmental sample
  misc_feature (1)..(119): Xaa is any amino acid
MENNVNLIIEMELKLLGKNIRNNKKELKKYISKEFIEYGASGRIYTYDDTLNFFPIEEKQIEYKIIKMDSKILSKNIILLLYIIEIKNGDKNNITNRSSIWKKDNNNWKIIFHQGTKVI

SEQ ID NO: 92549 - protein, 112 aa, Unknown
  Obtained from environmental sample
  misc_feature (1)..(112): Xaa is any amino acid
MSAYWNSRIKNLSPYIPGEQPKDRQFIKLNTNENPYPPSPKVIKEIQKAVNDSLRLYPDPECTVFREAIAAHCRVRTEQVFAGNGSDEILAFAFCRVFLKVPDTAETNFFFP

SEQ ID NO: 92550 - protein, 429 aa, Unknown
  Obtained from environmental sample
  DOMAIN (346)...(428): Phosphoribosyl-ATP pyrophosphohydrolase
  misc_feature (1)..(429): Xaa is any amino acid
MVIASIDIQNGKVVQLRQGAELVLQRENSLELAAEFDRYGEVAVIDLDAAMGKGSNLEMIKPLLRKAECRVGGGVKTPQQARELVSLGARKIIVGSGAFRDPAKKGAGIAGGEFAVNIPFLEAMSKKIGRERLIVAVDARGGEIVVDGWKTPTGLDLIEAAKQVEPFAGELLFTCVEREGTMTGIDLAPARRLREAVNCQITVAGGVSTLGEIEEIAAFGCDVQLGMALYTGKISLADAFVTSLNWKKGESLLPIIVQSPDGQILMTGFTDKEALAETFKRGNVCFHSRTRNKLWMKGETSGNTLKLLRLRADCDRDAILAVAEPAGPVCHTGAWSCFATNRDYTLQFLQDIIKERFRNPAPGSYTATLDDELVREKIMEEAKELCEAKTHDEIVWEAADLIYFATVLMTKAGVTIDEILDELDRRHKK

SEQ ID NO: 92551 - protein, 313 aa, Unknown
  Obtained from environmental sample
  misc_feature (1)..(313): Xaa is any amino acid
MRRDILHPGAGKLKYEIREIVGFAKSLAKWNIPIHWENIGDPVQKGEPVSDWIKNIVREKAGENLSYAYSETEGVRSTREFLSDLANKRPVIELPGSNMQTPPQIKAEDILFFNGLGDAVAKVFGFLRREARVLGPSPAYSTLSSAEAAHSGYEHLTYRLDPQRDWMPDMNDVELKVKYNDSIAGILLINPDNPTGAVYPVEILLEFVRIARNYGLFIVCDETYANIIYGGAKTAALSQIIGDVPGLAMRSISKEVPWPGARCGWTEVYNRRADPRFDAYIKSLVDSKRLEVCSTSLPQLCIPAILGNTRYPK

SEQ ID NO: 92552 - protein, 534 aa, Unknown
  Obtained from environmental sample
  DOMAIN (140)...(342): Transposase IS66 family
  misc_feature (1)..(534): Xaa is any amino acid
MQLITAVSTNANELEIYKQRYRQLETINQELQKKVIEIETNHKQLYNEHLILQDKYDLLVYKRFARSAEQLLADEKQPLLFTEEAGQPQAKEETPPELETVTFTRKKGGGRKPLSANLERRPRIIDIAESEKTCACGAVLTRIGEETSEKLVITPPEIYVEQTVRPKYACRQCEGTEDEGNPVVRIAPVEPAVIPKSIASPVLLAVIFTQKFEMRLPYYRQEKQFEQIGAVISRQDMANWQQQVFAFLKLLFDLLKAAIKSGPVLRMDETVVQVIGEEGREDAQKSYMWLALGGPPDKKAAWYEYHPTRAAYNAREFLQGYSGYLQTDGYEGYDCAVKDLPGIIHAGCFAHARRKFFEAAKINKKPQSAEEGIKYIRRLYQLEDALRDKWKDDLEKFQEERKKEAVPLLDEFKAWLIKRVDEVPPKALLGEAISYTLNQWDKLIRYIESPYLTPDNNACENAIRPFVIGRKNWLFCQSVGGAKSSCGMYTLIETAKQNGLVPRKYLTALFERAPYASTLEDWEKLLPWNIKLSV

SEQ ID NO: 92553 - protein, 465 aa, Unknown
  Obtained from environmental sample
  DOMAIN (200)...(344): GAF domain
  misc_feature (1)..(465): Xaa is any amino acid
GWYMGVVTPRANYYQSTKHLAIILSALGVIFAVLLGWMLLTISAGKAASDERIQLMSDSNPIGMSFWDGNLHIIDCNKTTLEMFGLSSKKEYFEMFEELSPECQPDGSISKIKCYELLREAMETGFLRFEWVHQKPDGEPIPCEMTLIRAKYKKDYTIMAYVRDLREQKRIMKMMEWRTHLLDMVNSAATVLLSSNNAGSFESSMMRSFELVGHCLDVDRVQIWRNEMIDNEMHYVLRYEWLSEYGKKCKSVPMGLHFPYSMKKEWEELFLCGDHINMPLKDMSPEDQAFLGYYEMKSIVIIPMFLEKEFWGFFSIDDCRNERVFSSEEISILTSAGLMMSSAVNRNLQMNKTHEADERMQLMIDAAPLCALFWDKDLKIIDCNQEAIKMFELSNKQEFIEKFGLLSPDYQPDGRLSGEKGPALVKKALDDGYSNFEWLHQKLDGEQIPSEITCVRVKFKDEYTV

SEQ ID NO: 92554 - protein, 393 aa, Unknown
  Obtained from environmental sample
  misc_feature (1)..(393): Xaa is any amino acid
MRQTLLYAAYALSVFCLSALPASAQDKGPSSAKEPAAPDSIYKHNYAAVEQINAYINDSLAASIRESMIIAQITQSDSISGKTLKAQLAKQHVADSVKLALRKRAIDSVKQRAMPVAAMLGGDTIMTIYAPTPTLSPQERAALYYDRVLRAAKEFSPKFDSLSIVDNGLSIDVTYGEKPLINITALDAYLAGTDRNTLAQIEKEKVLAAIAAYKKSLGLWNIFKMVGLSIAVVAILIALFVLVNRTFRGVIDRKISDNREKWFKGVRFRNIELLTSDKLTAAAFFISKAVRYAIYAVLLYAALPMIFAIFPATRHLAALLFSWIASPVVSMFEGLIAYLPNLLRIAVIIVVMRYVLKFMRYVAAEIETGRLAIPGFYPDWARATFNILRIFTY

SEQ ID NO: 92555 - protein, 318 aa, Unknown
  Obtained from environmental sample
  DOMAIN (1)...(266): Phosphofructokinase
  misc_feature (1)..(318): Xaa is any amino acid
MNLTTRFVQLKPETVMNIQRLGGTVLGSSRGNGERTVEIVDRIEMEGINQLYTIGGDGTQRGTLRIAEEVERRGLNVAVVGVPKTIDNDLSFIEKSFGFETAVSEAVQAVADAHIEAENAVNGIGLVKLMGREAGFITASTAISSGDVNFVLVPEVRFDLEGENGFLAHLEKRLAKRGHALIIVAEGAGQEHLSSGGGFDASGNKKFGDIGMFLRDCITKYFKEKKIETNLKYIDPSYTIRARVSNPIDSIYCARLGTNAVHAAMSGRTKMLVSNVNDTFVHIPTELAVAKRNCIDPESDLWRDVIEATGMPHLMINR

SEQ ID NO: 92556 - protein, 221 aa, Unknown
  Obtained from environmental sample
  DOMAIN (1)...(221): Glycosyl hydrolase family 20, catalytic domain
  misc_feature (1)..(221): Xaa is any amino acid
MDALSLHHINIFHWHLSDDQGWRLPVGKYPLLTEIGSKRRDHRLHDKFVGGFYTEAEIKDIVNYAACRHIEVVPEIDLPGHTSAVLAAYPGLGCTGGPYRVEDRYSIFEDVLCAGNDDIFTLAEALFDTLLEFFPSKYVHIGGDEVRFNRWTECPKCKKRLRELGLEKPAQLQSWITARLAAMLQLRGKTAIGWDEVLENTEKFPLPDDFIVMSWRGQKGG

SEQ ID NO: 92557 - protein, 169 aa, Unknown
  Obtained from environmental sample
  misc_feature (1)..(169): Xaa is any amino acid
MDKLANTSILSKTTAPTDDKEAKKLEAERKRLSDWLVNYQNSKRTEHDILQDSLNQELQTLAEAGAEGLIDAKNYRHEKFMIEQKYEDKEKELMQKYQEEKLKAAEEAKNKEWDLRRIAAKDYQTIADIELEQINAKYEKEIELAKNAKKDIAMIEQAHQAEIEGCEQS

SEQ ID NO: 92558 - protein, 259 aa, Unknown
  Obtained from environmental sample
  misc_feature (1)..(259): Xaa is any amino acid
MRINLNKLFLSLDNPAFVIDEEILLNLASEKKEHQFETEDINFAAAYFSNKFNASLLEGAAQSLFEISSNAFDNIMLAWLSELPVEREITAYGRGVLAAARDFNSFDDKRRAAAKAANNRTDADTLTTLTTAYKVQIEIHRMMGLLRFTKNEDGEFIAKCEPDHFILPCLGDFFTARFGDTPWAIIDEKRRLVLSKKHGERAKINILEDAAEGISAAKSDEWEDLWKHYHKTINNEDRNNPDLQRQLMPKRYWKHLPEV

SEQ ID NO: 92559 - protein, 429 aa, Unknown
  Obtained from environmental sample
  DOMAIN (340)...(369): Helix-hairpin-helix motif
  misc_feature (1)..(429): Xaa is any amino acid
MGQDLHEKISVLSGAAKYDASCATSGSDGFKGKGGKKFGTSLPMGVCHSWTQDGRCVSLLKVLYSNVCKYDCAYCVNRASADIKRASFTVKELADLTCEFYKRNYIEGLFLSSGIFADPDIVMEKLTETAKTLRTEMGFGGYIHLKVIPGTGDKMIREAGKWADRLSVNIELPTEKSLQCLAPQKSKKAIIGAMNDFSCLSREMEETKNKSRFLPQGKTAAVQFAPAGQSTQLIVGATNEDDRQIINLTSSLYNKFSLKRVYYSAFIHPGSIADKGNILDPRLPETSGPPLVREHRLYQADWLLRFYHFEAGEILTEDQPFLDAHIDPKTAWALKNLDFFPIEVNSADYETLLRIPGIGAKTARRIIESRRSRNLTIENLHRMGATLKRARYFLSAGGAYIERPDDPVRIRRLLSDADGAGLQLPLFEF

SEQ ID NO: 92560 - protein, 131 aa, Unknown
  Obtained from environmental sample
  misc_feature (1)..(131): Xaa is any amino acid
VPDSVTYIGNYAFEKNKLTSVTLSKNLIFIGEGAFMDNQLTRVIIPNGVENIGDAAFMDNQLTRVIIPDSVTYIGWYAFSGNKLHEITIGENVSLERYSAKFPFEFDLYYVDNGKKAGTYIYNNGSWTYSR

SEQ ID NO: 92561 - protein, 560 aa, Unknown
  Obtained from environmental sample
  DOMAIN (345)...(511): ABC transporter
  misc_feature (1)..(560): Xaa is any amino acid
MITVTELSLSYGERTLFKDVNLKFTPGNCYGIIGANGAGKSTFLKILSGEIEHDKGDVSIGKGERIAVLKQDHFAYEEFPALETVVMGFQKLHAIQKEREAIYAKEEFSEEDGLRASELEADFAEFGGWEAEAQAGQLLSGLGLDEEDHGKLMAELDESKKVRVLLAQALFGNPDILLLDEPTNGLDLESISWLEEFLIDFPNTVIVVSHDRHFLNSVCTHVCDIDYGRITPYSGNYDFWYQMSQILQRQARDQLKKREDKAKELKEFIQRFASNASKSRQATSRKKVLEKLDLDNVPVTSRKFPYVGFKPDREIGNNVLKAEKLNCSFEGTKLLSDFSFQVNKGDKIAFVGLEHASKSALFDIICGEKKPESGVFSWGQTTAFSYFPKENSAFFNSKLSITDWLRQYSSDEDETYIRSFLGRMLFSGDEALKPVNVLSGGEKVRCMLSKMMLSGANVLILDEPTNHLDLEAITALNDGLVAFPGVILFNSHDHEFINSIANRIIEILPQGESPVAPQPSPKGEGSPLDSNSSYIDRMMPFDDYLMDNAVKQIRNAAYHQ

SEQ ID NO: 92562 - protein, 532 aa, Unknown
  Obtained from environmental sample
  DOMAIN (466)...(532): ATP synthase alpha/beta chain, C terminal domain
  misc_feature (1)..(532): Xaa is any amino acid
VTSSHTISGRIKRISGPIVRIAGLSGAGLFDVVEVGEKKLVGEIVRLEQHEAVVQVYEDETGLMIGSEAVSTGRPLSVLLGPGLIGTIYDGIQRPLEKLFEKNGAFMESGSRGEPLDAEKKWPFVPDPALAAKVAAGEKVSAVPGLVLGTVKETESVTCKIMVPTPNTRSAHVDKITELSPQGEHTVSSVVARTDEGREITLAQWWPVRIPRPSAERLSPDTPLITGQRVIDVFFPISKGGTAAIPGGFGTGKTMTQHAVAKWCDADVIIYIGCGERGNEMTDVLTEFPELQDPRSGRSLMERTLLIANTSNMPVAAREVSIYTGVTLAEYYRDMGYHVAIMADSTSRWAEALRELSGRMEEMPAEEGFPAYLPTRLAEFYERAGRVRTLCGIEGSVSIIGAVSPPGGDFSEPVTQHTKRFIRCFWALDKDLANARHYPAISWIDSYSEYAEEVQHWWENVNPLWAQVRKKCMDLLKQEQKLAEIVRLIGQDTLPDEQKLILFTAQIIKDGFLQQNSFDQVDMYCVPEKQVR

SEQ ID NO: 92563 - protein, 103 aa, Unknown
  Obtained from environmental sample
  misc_feature (1)..(103): Xaa is any amino acid
MADKLEQIQTMIYQIRGQKVMLDLDLAVLYQMETKNLNKTVKRNLKRFPADFMFQLNDKEWANSPNYCQPLNSALFQITVNRDENSLPLLSVTYYLLSVFPHS

SEQ ID NO: 92564 - protein, 70 aa, Unknown
  Obtained from environmental sample
  misc_feature (1)..(70): Xaa is any amino acid
LSHTIAKLADAKEKPEQQSLMQRSGEIFSELIANDMPVSGTETTLEINFAVMKFKHTVKKEQKTKSKEQS

SEQ ID NO: 92565 - protein, 161 aa, Unknown
  Obtained from environmental sample
  misc_feature (1)..(161): Xaa is any amino acid
MENILLISNEPERWDSFERGLRGSYKFIISNPSEKTNFSNATLIAIDKTEYIQKIPAAEKRKFPIVFFGNSDDFSTEISARKSGVAEFFSPPFNKELFLIRLRGVRANSENVRWMQMIRREMIYVQDCMAEILAQTVESRDKNTGGHILRTATFIGILGEE

SEQ ID NO: 92566 - protein, 423 aa, Unknown
  Obtained from environmental sample
  DOMAIN (232)...(375): GAF domain
  misc_feature (1)..(423): Xaa is any amino acid
MNKKSRSFSFLFRRKKSKKVGLSERRAAIVEALNKSIEIFSNRNEDTFEETMTNGIRPFADALGLDRVVFYTLAEKDGARHFGQTHRWDKSEGGLMYLAEELRVLPDVPILKHWISVLTNGSQIRLRKSEYSEDEAAILDAYGIKSILLIPIITHGELWGSVAFQDHSNDRYFDEDCADLLHSAARIFTNAIIRTGISDRVEEAVITLERRGEMLAALNRAAVRFISQSEVSFEDTMTMGVNEIADVFNLDRMSLLRNYYVNNDLFGGQIYRWDRKSSGTTEPIKGLESFPISHYVPEWEKILASGGTINSPVRLLPEARILQSFGLVSICVVPVFINNIFWGVTFFEDLHAERVFDEDSVEMMRSAAFLCANTFIQAEMEHKLTAAHEFTRATLDASPICFTIFDENARVIDCNDAMLNILG

SEQ ID NO: 92567 - protein, 137 aa, Unknown
  Obtained from environmental sample
  misc_feature (1)..(137): Xaa is any amino acid
INYFHLGRPSNILLNVGIEDKPLKLYGNKLLSKMKKHNFKATDLKDLPNSIADPIAIFKGSRPDTFAILTEIKINGNNALVSLEVGKDEDASFNIITSTYGKANKSISNWINEGRLLYGNKEKAPAIYVFPLQLRAQ

SEQ ID NO: 92568 - protein, 195 aa, Unknown
  Obtained from environmental sample
  misc_feature (1)..(195): Xaa is any amino acid
QKGESHTVKISLDARSFAYYNVPKGTWAIEGGVYEILVGASSRDIVLRGEIQVTGDGYETLLKDQRKNSPEYFNLDVKGLKVSDGSFEALYGQKLLPNKYEAGLIDVNSTLGDIKNTEVGKKLIAIIIQQISAAFGGEGSSDLRVMFEKMLMEMPLRSLAMFSGGRLTPSMVEALVDMLNGKPCSDPGLAAFYKG

SEQ ID NO: 92569 - protein, 406 aa, Unknown
  Obtained from environmental sample
  DOMAIN (44)...(392): Glycosyl hydrolases family 18
  misc_feature (1)..(406): Xaa is any amino acid
MVKRCIILLFFSIFSACAATGGKNGIVMKTNIASYIRTWPVPQSAREGKSPYWNAGMIKGEYLTDLIISFALLEKDDVSKPYIPELKPLPDSPMFSNIWDEIAALKEKHPRLKVNISAGGYGADGFSDMANDPKLRAAFIVNVCKWLEDHNLDGMDVDWEYPVGPEWGQEIKSRPQDKQNYITLLQELRNAMDQLGEKTGKRYGLSTAVPASNWFPKANDVKAAAKIVDSLKLMAYDYYGGWSKTTGHHANLSNNPHDPAWGGWSTKQALDEYLWAGVPPGKITLGIGFYGKAWQGVGKGDYEDTPGLYQPYKSVPNYPPFDQGTISWTSIKEFLKPGSGYKRYWDDMGQAPYIYNGDIWISYTDPEQIKILTKFVKENKLGGVFVWEYGHDMNAELMKALAESSQ

SEQ ID NO: 92570 - protein, 201 aa, Unknown
  Obtained from environmental sample
  misc_feature (1)..(201): Xaa is any amino acid
MGADYIPEDNILGRVNAKRTRKLLEQCREANFNSIRVWGGGYYPDDYFYDICDELGLVVWQDFMFACAVYDLNDEFDLNVRAELADNIKRIRHHACLGLWCGNNEMEWFVDQMRWVGNLKQKPITLKCTSIFSRRCLKNMIQMPSIGPRVLRPAAILTFRMIQTGGTFTIGRYGMATSLFPIIGIIFSVMCRNLVFSLFPP

SEQ ID NO: 92571 - protein, 76 aa, Unknown
  Obtained from environmental sample
  misc_feature (1)..(76): Xaa is any amino acid
MAQVSLYLDKEMFKKVETAAQSCGESISKYVATIIQDHFNHEWPPGYAELFGSVSDDTSFPDGAEKILEDTSREPL

SEQ ID NO: 92572 - protein, 318 aa, Unknown
  Obtained from environmental sample
  DOMAIN (136)...(218): YbbR-like protein
  misc_feature (1)..(318): Xaa is any amino acid
VSLREFVARVVENWPAKVLSLALAIFLLIYHRMSLLETRIFFTPIVIEQLNAMMPSSPYPRIVKISLKGEGQNLNSILEEDIEAYVNFKDIKTSGTYKVPVLWRKKGTAQGVEPLQISVDPMEITFSLDHKISKFVPIAVNFTGQVESGYNMNSYSIEPNQIVVEGPATLMGGLSELQTEVIDLSGRRSDFSVTASILHNDPLIVIRGEGTVIFSASVSQIILVRNISNVPITVTGLDEQFIMEPEAITANVHIEGNDSNAVETFRPSSGFLRIDCSQISESGEYVLSVLVQAATGLSIRVEPREVKIQVSPVSTEEE

SEQ ID NO: 92573 - protein, 283 aa, Unknown
  Obtained from environmental sample
  misc_feature (1)..(283): Xaa is any amino acid
MNGLINFFIRRPVTVVMILAAIISAAILSLFSMPVNRLPDFSVPRVMVETIYSGMAADEVRSFVTIPLEDGLSPIKGLEKMRSVSRDNRSIISLDFRWGTDPMAASVLVREAVDAVYPALPEGVRKPSVTSADAASEPHAVIAIMSHNGNAQFERNLAEYELRARLRRIDGAGSVVLVGGEAAEERLTLDVPKLSALGLAPQEFADLLARETVDIPAGNARDGSMELVITASGRPDSTSALSKIILPVNNGSIRVEDAGRLSSAAAKKESVFVCNGQEAAALE

SEQ ID NO: 92574 - protein, 357 aa, Unknown
  Obtained from environmental sample
  misc_feature (1)..(357): Xaa is any amino acid
MYRLLSKIKSKNAIIRDGSLEKKYSQFLLHLLRYPVKVFAAAVLLIIAGFLLVFTRPVVFISPDEAEEVWISVNFPSGTLLETAGIIGKEISRVISGLPCVKTVYGRAGAEEEDTSGRADIDYRKEELTLRCVLKKRVKPEKALDEIKAVMEDINQQPFSVYFPKDETEVLLGLSSLRTYVINGKDREELLERVEIARDAFKAARIAVNFRPSGERPELRLYPDRETSAYLAISAAQMAETLYILNEGIVASRLEIEGRPLDVRVTGENTATGDILDRLEQIPLKTAQGKTVYLGSLGRIERREAEASLARLDRSDVIYTDVASGKKIPVTAKETAARFSWFKGADSSVFVRYRNSL

SEQ ID NO: 92575 - protein, 75 aa, Unknown
  Obtained from environmental sample
  misc_feature (1)..(75): Xaa is any amino acid
LKHSQEEVLDYERLVAPFVGAWIETVYRVPARALRSVAPFVGAWIETVGAPGQTQAGSVAPFVGAWIETTLLKVC

SEQ ID NO: 92576 - protein, 89 aa, Unknown
  Obtained from environmental sample
  DOMAIN (1)...(84): GGDEF domain
  misc_feature (1)..(89): Xaa is any amino acid
ARFGGEELGVLLYGTNSYQASVIAERIRKSVEEEVIITTTGVKTKFTVSIGVCSMIPNGSEEHDCIIEAADKALYKAKQNGRNRIWISD

SEQ ID NO: 92577 - protein, 201 aa, Unknown
  Obtained from environmental sample
  DOMAIN (31)...(150): Peptidase family M23
  misc_feature (1)..(201): Xaa is any amino acid
VAFWAEAASPYLPLGKTAYLTSSFGESRGTRYHAGIDLSTNMEEGWPVLAPSDGAVEFAARGAFGYGRHIKFKAKDEHIWLFAHLSEFSPKIDSLIHREMLKKEKANVHLSLKLRFKKGDTLAYSGSTGIGNPHLHVERRTSNGKVALNPCKMMQCTDTIAPYILDAAPFDSGFAIKIVDYSREPLENPMSIYSLDVFQGK

SEQ ID NO: 92578 - protein, 93 aa, Unknown
  Obtained from environmental sample
  misc_feature (1)..(93): Xaa is any amino acid
SLPRYGICDGNFKTVAEGIRIPAGEFYDSSEAANGELGFTLISDGTGKPWRIKVRPPCFTQFAAFHELVEGGQIADSIAVLSSINIIAGELDR

SEQ ID NO: 92579 - protein, 414 aa, Unknown
  Obtained from environmental sample
  DOMAIN (144)...(233): Pyridine nucleotide-disulphide oxidoreductase
  misc_feature (1)..(414): Xaa is any amino acid
MKYVIIGNSAAGIGAVEGIRQIDKSGEITIITNEPYHTYSRPLISYLLLGKTTEEKMKYRGENFYKDNNCTLLSNVSVTKIDSGAKKVVLSDNKQIDYDKLLVATGSSAFVPPFEGLDSVKDKCTFMSLDDAKKLETMLGKDKRVLIVGAGLIGLKCAEGIHENVKHITVLDLAPRILSSILDDDGARLVQNHLESKGVEFRLSANIKRFKNNSAVLESGETIDFDILVLAVGVRPNTAILNGIAKIDRGVIVNDKSETAAPNIYAAGDCTQTVDVSSGQSKIMALLPNAYMQGECAGINMAGGDARFSKAIPMNAIGFFGLHIITAGNYTGDVYAESTNAENSKDNYKRLFYSDNRLNGYILIGNVEKAGIYTSLIRERTPLDAIDFTLVCERPGLMAFTKEDRMVKLGGMAS

SEQ ID NO: 92580 - protein, 607 aa, Unknown
  Obtained from environmental sample
  DOMAIN (2)...(193): Glutamine amidotransferases class-II
  misc_feature (1)..(607): Xaa is any amino acid
MCGIFGYVGDQDAVPIIVEGLKKLEYRGYDSAGIAVYGKDGLGVVKQKGRLAALEARLSEQPLAGRIGIGHTRWATHGEPSDVNSHPHVGSRNKIAVVHNGIIENYKQLKERLEHWGVNFASQTDSEVIAQLAEHYYNGDLLETVIHVSNALEGSYALGVMCADDPDILIAIKKDNPLIIGESDHGNFIASDVPAVLKHTNRVYYLNDKEIAVLRKDSVEFFNIDKEPLEKHAEIITWNLDSAEKGGYPHFMLKEIMEQPKILRETINSVVKSGNYKNIFDNLDITRFTKIVISACGSAYNAGVVARYVFEKLCRFPSVETELASEFRYKDAVIDEKTLVILISQSGETADTIAAMREAKRKGAATLSIVNVVGSTIAKESDYCLFTAAGPEIAVATTKAFSAQLVLLYILAIWFAAGSKKISPQEEQRLLAEIDALPGKTEHLLKQIDAIQMYASTCVGYKSIFFIGRNIDYAIALEGSLKLKEISYIHSEAYAGGELKHGTISLVEKDTLVVAISNCAQLYGKIMSNVEQVKSRGAKVLLIGNCPSDHLPADDDNFSVIALPETSELFSSSLSVIVLQLFSYYVAANKGLDIDKPRNLAKSVTVE

SEQ ID NO: 92581 - protein, 238 aa, Unknown
  Obtained from environmental sample
  DOMAIN (1)...(208): GXGXG motif
  misc_feature (1)..(238): Xaa is any amino acid
MNISAQNLDHKELNNLIRTASESVHVEHCYGQRFIGSGMSGKDITINGTPGNALGAYFNGGTITVNGNAQDAVGDTMNDGRIIIHGNAGDALGYAMRGGSIFVKGDAGYRTGIHMKEYKEKKPVIVIGGKAGSFLGEYLAGGLIIVLGIDCKEIPVWYFTGTGMHGGKIFVRTDRELSGLPAQVTEKVADNDDLKEITPYVTEFAGNFGMDAQKLLKDRFYVLKPNAKNPYKQLYTAN

SEQ ID NO: 92582 - protein, 365 aa, Unknown
  Obtained from environmental sample
  DOMAIN (2)...(232): Pyridine nucleotide-disulphide oxidoreductase
  misc_feature (1)..(365): Xaa is any amino acid
DFLSPAWQVTEEGMKYRSGTFYSDNKCTLLANTVVTEIDAAAKKVVLSDGKKVAYDKLLVGAGSSPFVPPFEGLDTVKEKFTFMSFDDARKLDASLDQNKRVLIIGAGLIGLKCAEGIHDRVKHITVVDLAPRILSSILDDEGARLVQNHIESKGVEFKLSAAVKKFEKKTAIFENGETADFDILVLAVGVRPNTALLNGIAKIERGIVVDDKSETTAQNIYAAGDCTQTFDISSGQNKIMALLPNAYMQGECAGINMAGGDKSFDKAIPMNAIGFFGLHMITAGSYAGNVHAENGKGNYRRLFYSDNKLNGYILVGNVEKAGIYTSLIRERTPLDTIDFGLVCEKPGLMAFRKEERMVKLGGAS

SEQ ID NO: 92583 - protein, 222 aa, Unknown
  Obtained from environmental sample
  DOMAIN (4)...(222): SAICAR synthetase
  misc_feature (1)..(222): Xaa is any amino acid
VEGNVKKIISGKVREVYEISNEISDKVSDDKLVIVTTDRISAFDVILPKPVTNKGKVLNAVSLFWFNFTKGIIPNHIISSDLKDMPEFFQKSEFEGRTVLVKKLKMLPFEFIVRGYMFGNMWASYSRGEKFCGQKIEGDYKLAEKLTSPLFTPSTKAQTGHDEYISVQYVADKIGAELANKIEKVSFELYNTCYNYAYNKNIIIADTKFEFGLDADNNLLVA

SEQ ID NO: 92584 - protein, 415 aa, Unknown
  Obtained from environmental sample
  DOMAIN (1)...(308): Glycosyl hydrolase family 57
  misc_feature (1)..(415): Xaa is any amino acid
AQHYYNTIVDRRIAYTERYEKNLLKAFDSYRRKGKLEILASCATHAFLPFLSRNGESLQAQMEIPTSAYRRYFAGVPQGFWLPELGWSSALEPYLRDYNFSYTIVDSHGLLFGSPQPEKGTFYPVKTPNGTYILARDLYAVREIEKSAGDEIYRNNDRDVGYELPPETVKPFLSAEGERHRTGYKYWQRSNGNYNPQAAVGKAAEYAKTFMDNTIARLEEASKHMEEAPLSVYANNAGFFGNRWHEGFQFIETLFRLANEYNDVKFICPSEYIFKQDFSKIQVVSPEFSSSGINGYGEMWLDVSNDWIYPHLTRSMERMTELAERFPDDTGLKERALNQAAREILLAQSSDWPSLLFRQDSTEYAADRVQNALRNFTTIYEALGSNYISTEWLTTLERKHNIFPNINYRVFRRKK

SEQ ID NO: 92585 - protein, 326 aa, Unknown
  Obtained from environmental sample
  DOMAIN (69)...(134): His Kinase A (phosphoacceptor) domain
  misc_feature (1)..(326): Xaa is any amino acid
RGQDCKVISEGHTFVIEEYIPSADGTKQLCETSKVPMMQNGQIIGMLGISHNITERKAMEERALSANRAKSAFLANMSHEIRTPMNAIIGMIAIGKSASDTARKDYCFAKIENASQHLLGVINDILDMSKIEANKFELSPEEFNFEKMIQSAINVVIFRVEEKRQQLAVHIDNTIPKTLIADDQRLTQVVTNLLGNAVKFTPEHGTISLDALFFGEKDGLCTIEIAVSDTGIGISPEQQGHLFNSFAQAEISTARRFGGTGLGLAISKSIVEMMGGTIGVQSESGKGSTFSFTVQVKKGTQAQDVTDDPSGMKRGYYRAFAGRRIL

SEQ ID NO: 92586 - protein, 425 aa, Unknown
  Obtained from environmental sample
  DOMAIN (48)...(253): Bacterial extracellular solute-binding proteins, family 3
  misc_feature (1)..(425): Xaa is any amino acid
MLSACHKPPVQRTDETPAFTSYRDIPGVTENEIKAIEALKEKTPFFIYGMSESTETFIGENGEIEGYSVLFCEWLSQLFGIPFKPAIYEWGDLVEGINAQKIDFTGEMTPTDERRKTYFMTDAIVERSIKIFRLADGKPIMEIIHSRPLHCCFLDGTTTVSDVTSRLPGEYTIIEVNDYTSAYNELKSGRADVFFDENSAEAAFNIYDDVLIENFFPVIYSPISLTTKNLALLPIISIVQKSLYNGSQYYLTGLYKQGENQHRRHKLFMRLSEEEKAYIRNHPVISLAAEYDNYPISFYNKYEKQWQGIVYDVLSELEALTGLIFKVTNDRYTEWPELLRLLENGKVSMITELLRSPERIGLFLWPDTVIMTDNYALISRADYPDIHINDILHLRVGLIKETAYTSLFQRWFPDNKNTEFYENTD

SEQ ID NO: 92587 - protein, 360 aa, Unknown
  Obtained from environmental sample
  DOMAIN (154)...(355): Nicotinate phosphoribosyltransferase (NAPRTase) family
  misc_feature (1)..(360): Xaa is any amino acid
MILQNTNSDSALFTDFYSLTMAQGYWKKGMKHSAVFEMFFRSNPFSGGFSIFAGLETMLKKIQNFSFSSDDIGYLRSLGFFEEAFLEYLGGFKFSGSIWAMDEGTVVFPNEPLIRVSGGLLECQLIEGMLLNTVNFQSLIATKTARVALAAGKASVVEFGLRRAQGPDGAMSASRAAFIGGAFGTSNVLAGKEFGIPVFGTMAHSWIMAWPTEEEAFRAFAEIYPDMAVFLIDTYDTLKSGTISAIAAGKTLAAKGKNFGVRLDSGDIYYLSVEVRKMLDAAGLPEATISVSNDLDEYVIKTLTDANAPVNTWGVGTQMVTGGTEAAFTGVYKLAASDDGKGNFTARIKFSDNPAKPPTP

SEQ ID NO: 92588 - protein, 236 aa, Unknown
  Obtained from environmental sample
  misc_feature (1)..(236): Xaa is any amino acid
SPKVNLTEEGKMLVEQFDAELDEVGEADEATAAKIKWAKLEAIVGNESRIKILANDIVTHFEERQKVFEGKALIVAMSRRIAAALYEAIIKLRPEWHNDDLDKGVIKVVMTSSSSDGAAIQKHHTTKAQRKALSIRLKDENDPLKIVIVRDMWLTGFDAPCLNTMYIDKPMKNHSLMQAIARVNRVFKDKPGGLIVDYIGIATNLKKAPRLLCGKRRQRRPRRNAPESRRYYAEKM

SEQ ID NO: 92589 - protein, 423 aa, Unknown
  Obtained from environmental sample
  misc_feature (1)..(423): Xaa is any amino acid
LSGVARKATSKLPPPKKYLLRFALLHPTFLAADTREFFSKVIDDNKLDQPILYLDEWVGSIGTGKMRPSSTDEVRIARGNNQSKIQALLEKAQGKFDGARVLLKAKEKERDEIERILRDRMNSIFERTPLQEMTDVSDCMSEAQKSAVNEIQNLLKQMLKNDHELELSIKDYVTAHADVEHLTDKLESEGGSVTIDTGAVDAELDTIRQMAKMTIGRQGNHFPVLTAEYYHSMPSEVATRENIIAMLARIESIDAEAFCRIYKNRLNRIVPYVLLIPTYGDMGFCWEPFDRYNRATSRGRIIIPMYPKNLYLAVLTAVADLRWQVAKEKASFYWMEEGLTGHYYQWFQAAKLKGDIKEYFIRDYIMWMTKEAEGIQKLDKDVRGTFWRYMPFTKAVKEKLKNRNLIYQELYQRDQNRLMSDGY

SEQ ID NO: 92590 - protein, 205 aa, Unknown
  Obtained from environmental sample
  DOMAIN (1)...(202): Domain of unknown function (DUF323)
  misc_feature (1)..(205): Xaa is any amino acid
MWKYEITQKEYREVMKKNPSYKLGNKRPVEQVTWYEAVEFCNKLSSKERLTPAYTISGEGVTWNRSANGYRLPTEAEWEYACRAGTGTAFNTGADITLKQANFYNRDLDRSAQVTKPVGSYKPNAWGLYDMHGNVDEWCWDWYDDNLPSGKQTDPIGHLTGSRRVIRGGSYSSNNEHDLFSGTRKSTVPNHRLSNIGFRVVRNAQ

SEQ ID NO: 92591 - protein, 307 aa, Unknown
  Obtained from environmental sample
  DOMAIN (40)...(209): Transglycosylase
  misc_feature (1)..(307): Xaa is any amino acid
VRILKYVTRKRLIIGGALLVLLLAFIFSFPRPLFNVPYSPVLFDREGNLLGAQVASDDQWRFPGTDKVNEKFALALIETEDRRFRRHLGVDPLAIARAAYQNIRGKRIISGGSTITMQTIRLARGARKRSFFEKFIEAYLAIRLEAGNSKNKILALYSANAPFGANVVGLEAAAWRWFGRSSNDLSWAEAAVLAALPNSPALIHPGRNRDILKAKRDLLLNKLFKKGYFDEETLALSIAEPLPDEPLPLPRLAPHLLERYILDAGKNSSLKKPAAFVTTVDRNIQMRVTDVLTGHRTVSRLTEYLTL

SEQ ID NO: 92592 - protein, 213 aa, Unknown
  Obtained from environmental sample
  DOMAIN (12)...(101): Cyclic nucleotide-binding domain
  misc_feature (1)..(213): Xaa is any amino acid
MAMDLAAFGRFSRTFQAGDIIFSEYELGDTFYLIQSGRVQLVKLVGDIERTLDVLQPSEMFGEMAILENSPRSASAVALDEVKVLEFNSQNFEILLLGNPQIALKLLKMFCKRIYDSKRRFMILTLEEPQAKIADVFLMLDESQSDIDKTSERREFKTTVDDVAHWAGMTVADTRDILGHFATQHRIEIYPDRIAVKNINDFSRFVNSRRRKT

SEQ ID NO: 92593 - protein, 136 aa, Unknown
  Obtained from environmental sample
  misc_feature (1)..(136): Xaa is any amino acid
GIFLFEYTINPYHILPGIILEMDITSIKRKKKTLDAMANVLNEFLHGVSKGFSDAAFASFSRRRSTVREDINQSFGGPGSEPAKAAPKPESNAGSAYLDLINTSPSEIEAPPKTRGRGAKADAGLAKRRGRTAKKK

SEQ ID NO: 92594 - protein, 380 aa, Unknown
  Obtained from environmental sample
  DOMAIN (112)...(300): Adenylate and Guanylate cyclase catalytic domain
  misc_feature (1)..(380): Xaa is any amino acid
GIQLQIIVTLVFVFLFFFASGNFAPVVRAITGFLAVVLAVAGSALLFRFTGFYFNPLLTAFSMISAVIAREIISYAASEREKQFIRKAFSTYVSDDVVKEIIADPSRLQLGGTKRHMSAIFTDVQGFSSISEQLDPEHLVSLLNRYLTFMSDAILEEKGTIDKYEGDAIIAFFGAPIPIKDHALRACASAIAIKQIEKGLNKKIMEENLSPKPLLTRIGINTGSMVAGNMGTGNKMNYTIMGNAVNLASRLEGVNKQYRTWILASEDTLRETDGRYLTRKLDRVRVVGIQEPIRIYELLDTLETADPQKKKLAAIFQEALDCYEKWDWKAAGQGFRESLALETGGQKGHNPSALYLERCMRFLTRPPREDWDGVNNLTEK

SEQ ID NO: 92595 - protein, 160 aa, Unknown
  Obtained from environmental sample
  misc_feature (1)..(160): Xaa is any amino acid
LAACQSHQIQKPRETGSEGEFAEMRPDVRNLDELTATFSSQEMELDFRKSYFASEAQVFTAIYEGLFSYHPLSLEPIPALAERWQLSENKMQWTFTLRRNARFSNGDPIRAEDFRAAWISLLAPGLESPYSGFFDVIEGARDYRNGILKDPNKIGIQAVD

SEQ ID NO: 92596 - protein, 84 aa, Unknown
  Obtained from environmental sample
  DOMAIN (2)...(83): YgbB family
  misc_feature (1)..(84): Xaa is any amino acid
MIKTGLGYDIHRLKKGRRFLLGGVEIPFSKGEDGHSDGDALAHAVCDALLGAAAIGDIGELFPPSDPVYKDADSMELLRNVIMR

SEQ ID NO: 92597 - protein, 138 aa, Unknown
  Obtained from environmental sample
  misc_feature (1)..(138): Xaa is any amino acid
VLIRVKDAIIGLFVIVTFGALIVMVYHFEMEKGHRDLAKRIVGVSSKGGPPEGIDGLKNAIALYEKQIELNVKTGAQTGVYWKILAIRLADRGMHKDALDAFERALYYKADDPTIFYLTGESASIAAASTLGFNSGSM

SEQ ID NO: 92598 - protein, 324 aa, Unknown
  Obtained from environmental sample
  DOMAIN (12)...(93): Phage integrase, N-terminal SAM-like domain
  misc_feature (1)..(324): Xaa is any amino acid
MSSAPELKMPILDRFCAWLAAVERRSALTVAAYKQELRRFLEFTSESEIKNVNVDKLAAYLDWRKQCGGLDSRSLAKAVSCLRSFFRFAMGEGIRPDNPASLLDSPRRRLKLPETMDRETVERLLGTMDAGTPLGLRDRALFELIYSSGLRISEAVGLNLRDIDFKESVAQVKGKGNKQRLAVFGGEAAAWLKRYLEESRPALAKGKTLSGCATVGCQALFVTRNGKRLSRKGIWKNYSKYATLAGTGTKVHTLRHSFATGLLKGGADLRTVQALLGHADLGTTQVYTHVDAGLLKESHRKYLPKLEKPGMQKIRLDKARSGQC

SEQ ID NO: 92599 - protein, 316 aa, Unknown
  Obtained from environmental sample
  DOMAIN (219)...(316): Tubulin/FtsZ family, C-terminal domain
  misc_feature (1)..(316): Xaa is any amino acid
MEIYAVKEFERVTPEDHDDQPPAKIKVIGVGGGGCNAVNRMIVSGLSGVEFIAVNTDKQDLLNKSMAETKLQIGAKLTGGRGAGSKPSVGEDAAKEDQEEINDVSRGADMVFVTAGMGGGTGTGAAPVIAKIARDHESLVVGVVTKPFEFEGEAKMRKAEEGIKKLREFVDTLIIIPNENLFKLVDSKTTSVQAYSLADDVLRQAVQSIVELIIKTGLINIDFADVQSTMKDQGDAHMGIGIGRGDNRAKAAADAAIDNPLLEDTGIEGATRLLVNISGPETVSMLEVKDIMAAIKAKASPNVEIIFGQYIEPELG

SEQ ID NO: 92600 - protein, 139 aa, Unknown
  Obtained from environmental sample
  misc_feature (1)..(139): Xaa is any amino acid
MIRIDGLAASLKQLLCALCVIIATPLFSLSFNDPGSPEGLAAAIESAMTDEQALAQVFMLGWVGEEPSPLIMDWIKLRNIGGVKIFGWNTADTQKLAKTVGELQKASLDGAFNLPLLIATDQEGGWIRHVKGSTRETPG

SEQ ID NO: 92601 - protein, 251 aa, Unknown
  Obtained from environmental sample
  misc_feature (1)..(251): Xaa is any amino acid
MHKNILKSYSLYQTKMDTLFSNGSYNCVSSAVLYVILCTYAGIDVSGVVTKDHALAMVHINGEDIDVETTNRYGFDPGNRKEFHDQFGKTTGFAYVPARNYRDRQIISKIELISLVFANRISDFERQNRYSDAVPLALDMAALLTGKTSEAAVKTNSSNSLFEDPNSFLMDRIFNYASWLLKAGREDDCLKWAAAASPAFPDEERWQEFVMAAVNNRISKLLRENKITDARNFLETRKSVLTRENYIQLTI

SEQ ID NO: 92602 - protein, 172 aa, Unknown
  Obtained from environmental sample
  misc_feature (1)..(172): Xaa is any amino acid
MNKIITLLALLNIAVFAQQKGTFTDPRDKKKYNTVKIGNITWFAQNLDYRGSDGYMGLCYGDKPKQNIKKPENCKKYGRLYDWEEAMTACPDGWHLPSDKEWQTLVNFAGGDEVAGKKLKAKTGWEGKCKWKDEKTDERGRVTVTEFNNCGSDEYGFSALPGGYSCGDEYAC

SEQ ID NO: 92603 - protein, 269 aa, Unknown
  Obtained from environmental sample
  DOMAIN (217)...(240): 4Fe-4S binding domain
  misc_feature (1)..(269): Xaa is any amino acid
MPIIMFLIFETTAIVLWLVLDNIFYLFNFTYIGFFVSLGIGLLIAKHKNARIFIHFFIGLYMLVYLGLMRRENMQIEGFFYYIAIGVFEAAAIHYLVAKIAGPFIFGRGWCGYACWTTMILDLLPYKIPQKQPVKKLGLLRILVFVLSLTYFLIVFFRYRTHINKIMYVSFIAGNVIYYGIGILFACLFKDNRAFCKYFCPITVFLKPTSYFAVSRRRVNQEKCIVCNKCVKICPMGVDMLDKKFSRKNGTECIQCMKCVMECPKQALV

SEQ ID NO: 92604 - protein, 347 aa, Unknown
  Obtained from environmental sample
  misc_feature (1)..(347): Xaa is any amino acid
MLKRPLNLFSNKTSREPAKLMKERWIADFSKPERSCFDIKSEFSYNAYLDKGSLFLGLKKKNCMAWLETANRVYVNQIINASFRFISPGGYCAAGIMFRIADSGNYYLALISSKGYFRLDVINNKVPTPLTGWTEAPGLDEQGANLCIIARGDHFIFMLNGRWIAEAQDASVPGGHLGFALVSYDSRDSEELDAQPSVLKEDCVCQSWLDFISVDSNPAAVEAEYLKWSGNVEISAESRLRLAESFAALERFDAAYDQILKAWKQRENAARSVTATFSEMRTRPELIFAARMAHMIGQYQVAEECINESLALGEDGPEGLEALAEKAKILSSLGRHRELAAFLPGYI

SEQ ID NO: 92605 - protein, 415 aa, Unknown
  Obtained from environmental sample
  misc_feature (1)..(415): Xaa is any amino acid
MDAMDFIESCITVNKETVTAQMRASIKESLERTREIPHNRRTITTFLQYANYLDPDTNRPVLKDMLGDYTIGGKYGKIFDAEASGLSLDTRFLAIEMESLMNRGENCVVPALVYLFNYIEKKFDGRFTLLVLDEAWLFLKNETFADKIAEWLKVLRKKNVYVIFATQDVADVANSPLKTTIIQQCLTKIYLADKSAVTPGMTDVYRQFGLTEAEIDLIASATMKRDYFYTSPMGRRLFQLDLGRLTLALIGSPNHALLDELAARYEPGSPLCAEILAAKNINYKRYLGEDSPIDPAPVLRQAQILSYSAPALPEEQTEAVLEEVITVDKSDKNADFLDAVAALPERKKNDGQGRAATAIAEKFGVSTSTVYQARTVLKYGLPELVDALRRGDIPVKTAYKKMLKERGREPEKVAG

SEQ ID NO: 92606 - protein, 178 aa, Unknown
  Obtained from environmental sample
  misc_feature (1)..(178): Xaa is any amino acid
VRGEAEGIQPILAEDIEAYIDLGRYVNEGAYRVPVQIRKKGTALGVEPLEVSVVPVDIQLLLEQKITRNISVFPVLRGSVAEGYELTGQSLTPASVIVEGPRSMIDNHLEFNTEAIDLDGRNVDFSVMVNIKNDNPLLFIHGSNILEFRGSIRRISRGVHENITHQAVEEEHLPGEEQ

SEQ ID NO: 92607 - protein, 686 aa, Unknown
  Obtained from environmental sample
  misc_feature (1)..(686): Xaa is any amino acid
VLFILVLALVANTFAQGYDTAYVPVKVNAAATLTIELPDAAPSGAKIVEPRNGTVAVQANTPTTLTLILGNSGSTPIRHNLQIQSDATITIYSINGERILNDQNVASGAYLLFVKDANGKSFTRNIAHRGGKLNVSAYNASVLAKDATAPNDWKITAVSKGFVYQSTEHIFNPVKGQNSEILITLPPTAYLADWTPTIAAFAVVEKPSTSIANSDVQNMNVKNVALSWSLRPNVTKYEVYRDGELLGETSGNLMEDYDLTIGQTYEYIVAGYAGTNKILSTPVQATPFAAAAAPGTWRYMNRNSEGGSSEATVTAATGGGSPGGVAGADNKRYEFQVTGDGTLRTFQYRTSTNGTSWSNWTNLPSSPGGSSALTVGSWAGDLNGTKTTINPAAFVSSGTTWNGASGQTGIKLEGVHWYRVQDKGLRIGEFQEGKYVLGCHREPSDNYNLAHIMLVSCYPNNGKPYGEITYSGRPFGFESRDQRIFVDNDGTPYAMCSALGDSHFFKLDPNWKEPIEHTNHVFKGAYKETPDILRYGDWYFYFGSRQNGWYPSQVQYAMSRNIGGTWSELKDFGNVVTFGAQFNGIRTDSYGDGKTAYGFYSYRWSNQWDGISKESNGNPRRFSILNINGDYVSSYWFNNIVYYPAHGYVGIRPGRNLSLGKKVTAPSSQKQANLQAVTDGMETSAA

SEQ ID NO: 92608 - protein, 215 aa, Unknown
  Obtained from environmental sample
  misc_feature (1)..(215): Xaa is any amino acid
MPKIRMEKNLKNPNAKILIICAVYFLISILFFYSYRHHTLYELTPNSDTYDYVNIANNMLKIGLFSQDGVNPDYIRTPGYPVFLALIFMLGGNVETAAIVQILLLTLGVFLVYKTLLLLKVRVNPALAGAAVFLFDIGSYRYASTILSETLFKVSLICSLYFLMKYFVSGEKFRHFLMFAVFINYALLIRPILIYFNILLAVAVIVLFAVKKIRL

SEQ ID NO: 92609 - protein, 576 aa, Unknown
  Obtained from environmental sample
  DOMAIN (65)...(501): AMP-binding enzyme
  misc_feature (1)..(576): Xaa is any amino acid
MSEILSRYCPRTEFDSYEDFYANYRCNTPDDFNFARDVVDEWARLHPEKPALLWTDDSGAMKSFTFSDIKRLSDKAANALIALGIKKGDVAMLILKQHPEVWVMMCALEKIGAVCIPGTYQLTAKDLEYRCNIAEVKLLVTIDDPGLLADIAAARPKCSGLEHIAVVYDREKRNDTSAFIDLQAEIEKASDKFKYIATKTEEPMLIYFSSGTTGMPKMVLHNHSLPLGHIVTAKYWQCVEDGKVHLTQTDSGWAKFAWGKIYGQWICGAAIGAYDTEKFTPKGMLDALQRLKPATFCAPATVFRYLIKEDLSGYDFSFIRHTSVAGEPLSPEVYNKLKSLTGLEIREGFGQSETSVMAAVFKWLPVKPGSMGKPAPLFGFKLLDENGNECDEGIVGNMSITLAGKNMYETEGSAADNIPPVIGNSDFPGLFRGYWKDREITLNNWNNGTYQTGDMAWKDDDGYLWFVGRNDDVIKCSGYRIGPFEVESALMEHPSVLECAVTAAPDTMRGQVVKATIVLARGYAASDELIRELQNHVKRVTAPYKYPRIIEFTPELPKTISGKIQRNMIRKKDFND

SEQ ID NO: 92610 - protein, 218 aa, Unknown
  Obtained from environmental sample
  DOMAIN (10)...(170): Shikimate kinase
  misc_feature (1)..(218): Xaa is any amino acid
MNNIYFTGFMASGKTRVGKMLAKRLRLNYVDSDSFIVERTGKSISEIFEQDGEAKFRELEKEAIKEISKKERMVVSLGGGAVARPENVQVIKNSGVLICIKAEPEILSERIGRNDKRPLMAGLEPKARLAKIKTMLAEREKFYANADFSIDSDEIGPEERILPLLLENLKLWKHLEVRVEPASTGGYPIFIGKNILEHSEILLRTLNLLPQNEMLVAQ

SEQ ID NO: 92611 - protein, 284 aa, Unknown
  Obtained from environmental sample
  DOMAIN (8)...(166): DHH family
  misc_feature (1)..(284): Xaa is any amino acid
AIDFVLDVRERKKKVWIYGDYDLDGISSSAILAGALEDWGLMANWMLPNRFDGGYGLSAGTLQKLRDAGAEVLILVDTGITAKEEIKAAKEFGMQVLVIDHHRPSGEGLPEADAILDPFLEDCEYPNKCLCAAGVAYKFLYALYQKTGKPLSDLERYLPLVSLGTLADIVPLNAENLFLVRKGMGIFPHSDCLAIQILYEKLGPTEKNFVSSNDIHYRMAPLLNAPGRMEGPDISLKFLLCKDRKEIESLYERLVECNTKRRTIELDIHQQAIKRLEEIYGNNL

SEQ ID NO: 92612 - protein, 194 aa, Unknown
  Obtained from environmental sample
  DOMAIN (14)...(190): Phage integrase family
  misc_feature (1)..(194): Xaa is any amino acid
YNIDERNPFTGIVIQKPKSEPRKFWTLEECEKIIEVTSDEEYKLWFAFMAFAGLRKEEARQLKMENIEGGKISLIGKGGKAATIPISSRLKEHLNKYLALRGDAAGLLFPKLGIKTDYNNNFGMLITKWAKIAGVSNADTAHLHRFRHSFASNLLRAGKSIKAVQMLMRHENVTLTLNIYGHLLPSDLEKEIEI

SEQ ID NO: 92613 - protein, 130 aa, Unknown
  Obtained from environmental sample
  DOMAIN (1)...(90): N-terminal ig-like domain of cellulase
  misc_feature (1)..(130): Xaa is any amino acid
MENIRLNQIGYYPESRKVATVIMGDDKSAPSEFLVVGVPDGKTVFCGKLSAELFLWEESGERGFRADFSAVSAPGQYKLVILGDVPYKSESYPFAISGRAFKDVAVASMRAYYFQRCSYALSKRTPASGR

SEQ ID NO: 92614 - protein, 285 aa, Unknown
  Obtained from environmental sample
  DOMAIN (1)...(284): Glycosyl hydrolase family 9
  misc_feature (1)..(285): Xaa is any amino acid
GSEVRHRQEHDVVAYFAAAMAMAGRVYAPFDSVYAKNCVERALSAWDWAVKNPGAVFKNPADVKTGEYKDATFDDEFIWAAAELFITTKERRFADFLKGKDITYAGEPSWQNVHSLAALSLSTVKNGLDQNRLEAVRKSITKTADKWLAEMDKHLYRVPNMKFIWGSNSNFANMGVGMIYAHIISGDDKYLLGAVEIADYLLGKNAVGISFVSAFGTKAMSNPHHRQSVAGKVGAIPGFLAGGPNAGQQDGNNGVTYSSKLPAKSYEDVYKSYASNEVAINGTLR

SEQ ID NO: 92615 - protein, 245 aa, Unknown
  Obtained from environmental sample
  DOMAIN (148)...(211): MazG nucleotide pyrophosphohydrolase domain
  misc_feature (1)..(245): Xaa is any amino acid
MQRLRSADGCPWDREQNFNSLLPYLLEESYEYIDAVQSENLKDMVEELGDVLLQVVFHSQIAKEEGKFTIDDVIEGICEKMVRRHPHVFGSETLGTSKEVLKKWEEIKNEEKKEKPASAMDKVPRSMVALSRAQELSRRAAKVGFDWSNPEPVLEKVKEEIAEFESEKNGSLEAEEEFGDILFALVNLARHKGINAETALARANAKFEKRFRQVEILAGGKPQDFTLEELDKFWNEAKAIEKNSN

SEQ ID NO: 92616 - protein, 440 aa, Unknown
  Obtained from environmental sample
  DOMAIN (1)...(268): tRNA synthetases class I (E and Q), catalytic domain
  misc_feature (1)..(440): Xaa is any amino acid
VQNLYDTFEWLGLKYDEGPDIGGPFAPYVQSERFALYQKHAQELLDKGQAYYCFCSAERIEKVRQEREAAHSSETGYDRLCRTLDPKEAAKRAAAGEPCTIRLRIPLGEITSFYDHLLGEVKWKNDDINPDPVLLKTDGFPTYHLANVVDDHFMEISHVLRAQEWLSSTPLHVSMYKCFGWTPPEYCHLPMVMGQDGKKLSKRHGATSVDEFRKQGYLPEALLNYVALLGASYEEGKEIYTPDELAQRFSLEKLNKAPAVFDYKKLEWYNGQYIRMKSDEELARLCLPCAKEAGLFGEPGKEPDARQSSVFTAAMPLVKERLVFLNEVPEKIAYLFKEPQMPAKDEFIPKKSDLSATIELLKHGLEIVKPMAEALCDEHAENFIKAEAEKRVVKLGDLMMPLRVAITGSRVSPPLFGSLRILGAEASLQRVHKALEFLEI

SEQ ID NO: 92617 - protein, 168 aa, Unknown
  Obtained from environmental sample
  misc_feature (1)..(168): Xaa is any amino acid
MGLYAYLQPQAAQLMKENPLFRSRYLHSMTVLNQAADKNLPGEALGALINDYLEDIADWEQGTPENYRACYTAVRRFLRPMNPPRFELDYAVRRFFAAHGVTIKRSHLADRMSHSKPVAQETENNAQGAATDATTGAATDTAAGASQRKRRRRRKKPAQGTNASVPTK

SEQ ID NO: 92618 - protein, 259 aa, Unknown
  Obtained from environmental sample
  misc_feature (1)..(259): Xaa is any amino acid
MYAGGISGFGKLDYFWKGKIAIEMKSRGENLSTAYQQLQQYVMNLQEEDKPDLCLVCDFENMRIYRRLAKKHVEIKTSNLYKHIKLFVEIAGYEDTKRVAHQKEADVKAAEKMAVLHDALKNYGYGGHDLELYLVRLLFCLFADSTGIFPKGCFLQYIEDSKPNGADLSERLAKLFEVLNMPEETRTARKLLSDDLKQFRYINGNLFKDSISIAEFDAKMRQSLIDCANLDWSGISPAIFGAMFQGVMDKDVRRELGSC

SEQ ID NO: 92619 - protein, 81 aa, Unknown
  Obtained from environmental sample
  misc_feature (1)..(81): Xaa is any amino acid
APGLNEAIDKLNYSRLSLEERRNYDNYVDMCRSNKSSIYTAKLDGKAEGKIEVAKNMKTKGFDIALISEMTGLSAEEIAGL

SEQ ID NO: 92620 - protein, 353 aa, Unknown
  Obtained from environmental sample
  DOMAIN (48)...(353): Cellulase (glycosyl hydrolase family 5)
  misc_feature (1)..(353): Xaa is any amino acid
MKIFFILFAAAVLAGCSTSETAAVDISEGEVNAAVRSTPFSKGVNFSGWFESGRAEAIPFTKYNERDFANVKSMGADVIRLPIRMHSMTGGSPDYTIDPLLFKFLDMAVNWAEKYEIYIIIDNHSFDPVKNTENNIDKILIPVWEQIARRYKDRSNYIIYEILNEPHGISDSRWGEVQGLAIDAIRRHDTKHFIIVGGTEYNSIGKLSSIPAYKDDKIICTFHFYDPYLFTHQGASWGGPPLLTTLAGVPFPYDSKRMPKVSSQLSGTWIESSLKNDYKRASDPKTLYSTLDKAVSFSRERNVPVFCGEFGVYMINSLNEDRVRWYEIVTTAIARRNISRTSWDYYGGFGVFN

SEQ ID NO: 92621 - protein, 367 aa, Unknown
  Obtained from environmental sample
  misc_feature (1)..(367): Xaa is any amino acid
VLVRGSVLDGPMSDKLFLKLLADGELKNDWIIDISNGGKVLIISDIHMGSGVRDDLSENNGEMLIRTLEDYYFKNGWILVLNGDIEELQRYSLDLIREKWAGLYKVFNLFAREKRLYKTVGNHDEQLLFKRYSSYPYPLSTVVKIETGTVPAYVFHGHQLSNIYSNFNKLIGICIRYILKPFGIKNIIDARSPYKRFLIESKAYAFSINNHCLSIIGHTHRPLFESLGRFDYIKFEIERLCRDYPSCKNEDKLRIENEVTALRKELGKLKRKERQDVLRQSLYGDELPVPCLFNSGCTLGKKGINAIEITHEDIALVYWFIEGKSKKFIKRGGYEINELPNTPYRRAVLNQNKLDYILAKIKLLGNN

SEQ ID NO: 92622 - protein, 461 aa, Unknown
  Obtained from environmental sample
  DOMAIN (368)...(451): Hpt domain
  misc_feature (1)..(461): Xaa is any amino acid
ERKSYLRLIIENSKGLLQIINDILDVSKIEAGKLTLETIAFDIHEVFALCRSATIPKAMEKGLLLHFYAEPVINKRLLGDPTRLRQIFINLISNAVKFTNSGVVKVLATILSTTADTITIRFEVKDSGIGMTADELKRVMEPFTQADHSTTRKYGGTGLGLSIVNSLVDMMGGKLEVESTPGIGSRFRFDLTFGMINAASNAPKSKPETGDDDLEKPDLDGEVLVCEDNHMNQEVIRKHLERVGLRIMIAANGKEGVDIVKERGERGEKPFDLIFMDINMPVMDGLEASAQMMAMGVETPVVAMTANVLSTDRELYERSNMRDCIGKPFTSQELWHCLLKYIKPIDKQQEKQQNKSDEPAYGDDILLEMRTIFVNDNQNTFADFKEAIYNSDIQKANRIAHTLKSNAGIIGKTALQAAALDAETRLANGENMLTPECLRTLELEFNAVLAELEPLRGNNEG

SEQ ID NO: 92623 - protein, 310 aa, Unknown
  Obtained from environmental sample
  misc_feature (1)..(310): Xaa is any amino acid
VSKEPLSPKNDFVFKLLFGEWTRLDILRAFLQAVLDLPAEEYARLSIVDPHLQRESPDDKLGVLDVKIHTTTGKVIDVEIQVEPQGHIWERVLFYAARLTTEQMKIGQPYKEIKKAVSIIIVDWDITPKDSKHYHHCFRLFDEKTGYRFPDLFEINTLELPKLPGEPDGTMLFNWLWMFTAKSKEELDMVAKTSPEIAKAVGVIMELSEDEQTRLLAEAREKYRRDEEARWEDAFEDGKEEGRQEGELKGRLEGRQEGQLEGRREGERNKATDIARSLLLEKIPFETVAKTTGLSLEEVKILASELPLNH

SEQ ID NO: 92624 - protein, 116 aa, Unknown
  Obtained from environmental sample
  misc_feature (1)..(116): Xaa is any amino acid
GTEGTLKVPDPNTFGGPVLVRRLREEEWTTVPLINEFSDNSRGLGITEMAEAIEENRPHRANGELAFHVLDIMQGIYDASASGKYYKRGTALFPGLFIQQRRKLFQNNIHLGFKSL

SEQ ID NO: 92625 - protein, 642 aa, Unknown
  Obtained from environmental sample
  misc_feature (1)..(642): Xaa is any amino acid
KPVANLAPFGLCKSLANPTVAAATAAASGKLQKMPCVPCVTSPWVNGKLDVFVKGQPALTDGSKCVCMWLGVIKVKTAGQGSVISAAAPPLVAVEQETQAPIAATAAPKAKDKEAKAAKTPTLRVPKKGFAASVAAAVTAAVGGIFGRLGKGDNAEAAVSPEGAAVAAGTGTTETTKTTETAKTVKTTETPPSAATKAKTEITAKLIRNHFSDKRTFGTFEVFRGNESIFKCYTCEDTVRGGGDPDTVDKWKVAKESAIPYGIYTCDFTYSNRFKRKMWAVENVPGFSGIRIHRGKNEIWTEGCLLLGDSIAKNYTQLDNSEETVIKFEKCMSDCGNQKFVLEITNESRIVAAKSEEPKPNRAQSKESKPKESQPKELKSNVTKPEKCFCNRDIGVGEFEEIVRCLRSSTNVRNNLFRHKNCPLTNEDKTIERLTEEFNKTCKNYKINLCIQKIHFLAQMYVESAHFTTTLEIYNGYKYNPGQREDAIANGNTMDGDGPRYRGRGLMQLTWQKTQMAYLKNARNKFEMLARLTDAEIEDRGNSFEKIISDTLSGSVDSAGWYWSVYKKAFYSKEYQERFKEIKGMPLNEIALYADKYQEGISIAINGGEGALLERRKHYDNLKKIMNVSQCANKSNYKGELS

SEQ ID NO: 92626 - protein, 308 aa, Unknown
  Obtained from environmental sample
  DOMAIN (2)...(278): PHP domain
  misc_feature (1)..(308): Xaa is any amino acid
MVDFHTHSNVSDGELSPAMLVKEAAKQGLTALALTDHDTINGLESAKTAAKEENFCFIPGIEVNINWTRGQSGQNIPGLGPGGEFHLLGLGINSPTSAFISTIEGLARRREVRNREILERMVEFSMIAPDGRESAWEELLTIAGGKSASYRGSGNSLGRPHFAALLIKLKIVKNANQAFARYLGVGKPLYVPKDGLIFEEAAALIRESGGIPILAHPISLFVAWGRLPDLIKTLKDMGLMGLEAWHPTAKPGSCRRLEALANSLSLYVTEGSDYHGSIRPDRKLGYSSRGRKIDDSLLDAIPELRQFK

SEQ ID NO: 92627 - protein, 141 aa, Unknown
  Obtained from environmental sample
  DOMAIN (53)...(110): Bacterial regulatory proteins, luxR family
  misc_feature (1)..(141): Xaa is any amino acid
GAFYFSGANSYLDLNYGIDKFKEGLKIIKAGKIYYSPGVERQISDLDEKPDYKREITKREWNVLLLICNGHKNDGITANLGIKKRTVETHIHNLNKLFYADSRVDLSNKAVCMGWVRKEDLGIQDADINTPQFFSKRKRKK

SEQ ID NO: 92628 - protein, 335 aa, Unknown
  Obtained from environmental sample
  DOMAIN (3)...(238): NAD dependent epimerase/dehydratase family
  misc_feature (1)..(335): Xaa is any amino acid
RYNRSDGGYLAKFLLGKGYRVLGLYRRGSTDTFSKLREHGIFDRIELLDFDLLEFSNICRILRRHTPDEFYNLAAQSFVAASWEEPLYTAQADGMGVLYILEAIREFSPKTRLYQASTSEMFGKVQEIPQTETTPFYPRSPYGISKLMAHWACVNYSESFGIFASSGILFNHESPMRGKEFVTRKITSHFARLFTGETEEPLELGNMNAKRDWGFSGDYVEMMWKMLQSDKPGTYVIATGETHTIKEFVEEVSKRCGFELRWEGSGVDEVGINAKTGKTIVKVNPKFYRPAEVDKLIGNPEKAIRELSWKVKVAFKELCAMMMDADIERAKKGTL

SEQ ID NO: 92629 - protein, 331 aa, Unknown
  Obtained from environmental sample
  DOMAIN (1)...(185): Pyridoxal-dependent decarboxylase, pyridoxal binding domain
  misc_feature (1)..(331): Xaa is any amino acid
MFSSNETPAKEYELARQLGAVINLDDISHIEFLEKTAGFPQLISLRYNPGPLKDGNAIIGKPEEAKYGFTREQIICGFALLKEKGVRRFALHTMVASNELSIPYHVETGRMLFELAVEIQDKAGVKIEFINLGGGVGIPYRPDQEAVDYEVLAKGIQKEYDNILKPAGLDAVGIRTEWGRTITGPYGWLVSRAIHKKEIYRKYIGLDACMADLMRPALYGAYHHITIPGKETAPLTEVYDVVGSLCENNDKFAVQLILPKIDVTSENGIGHFVVIHDAGAHGRAMGFNYNGKLRCGELLLRRDGSVVQIRRPETVEDYFATLDIAGVNDFK

SEQ ID NO: 92630 - protein, 356 aa, Unknown
  Obtained from environmental sample
  DOMAIN (25)...(186): MatE
  misc_feature (1)..(356): Xaa is any amino acid
MPSQKELTILTTGNPAKRIVVFALPLLIGDFLYVFYTMTDAFIVGRWLGINGLAAVGASYSIIGFVFGFIYGLTDGFAVITAQRVGAGDAEGIRRSVAAGLSLCLFTSIIITVLLLPFCRVFLSLMHTPIEIMNDAYGYVFITLAGSFIGIFSNMLAGIIRAGGDSFTPTVFFLVGIVSNIFLDILCVVVFHWGVRGAAIASVFSQFISCVLFLLFRIRRFSRFFPQRQDWLAGRRDFGVHLSLGISMGLLHSIVEAGNILVQAAVNGLGAVTIAAVSAAQRVRGLNMMPLFALSRAMTTYTAQNYGAGKMDRVNKGIFQACLISLGLGIFMATVNQFTGAPIAALFLKDSPEAVA

SEQ ID NO: 92631 - protein, 50 aa, Unknown
  Obtained from environmental sample
  misc_feature (1)..(50): Xaa is any amino acid
MLKLFAKSQLWGTFKGFSEKGFEFAADIICPYNSSMQDRPQLGQFLLIQP

SEQ ID NO: 92632 - protein, 528 aa, Unknown
  Obtained from environmental sample
  DOMAIN (156)...(314): DEAD/DEAH box helicase
  misc_feature (1)..(528): Xaa is any amino acid
DTYRITPLSLWNAASAGLAAADIVKILAEYSRYQIPSGIIESFSDTISRYGKIKMIAAADFAATGGDAAADSGYELSLKIEDPAVSAEIAAIKSLEKYVIKTAQGFALRLVDRGSVKRELIKQGWPVQDQAPLVKGDDLDIILRNESLSGRPFAPRDYQIEAARSVLGDGRPGTGYGVVALPCGSGKTIVGMVIMSLLKTNTLILTTNVAAVHQWIEELVDKTEISREQIAEYSGDTKSVAPVTIATYQIITWRPGRDADFPHFRLFREQHWGLIIYDEVHLLPAPVFRVTAELQAVRRLGLTATLIREDGAEDAVFSLVGPKRYDVPWKELEGKGWIAEAVCTEIRIDLPENLKIPYAVASQREKYRVASENPLKEEIVTQLIENHGEDQILVIGQYLSQLDSLAKLLKVPLITGKTPNAERERIYNEFKRGEIRIIVVSKVANFAIDLPDASMAIQVSGSFGSRQEEAQRLGRILRPKDKDAKHHNALFFTLVSRYTVEEDFAANRHKFLAEQGYKYSIQHWNTTK

SEQ ID NO: 92633 - protein, 282 aa, Unknown
  Obtained from environmental sample
  misc_feature (1)..(282): Xaa is any amino acid
RFTGEELDGVKLEGLQGYKSLTRDEMWERIMSALKGNEEVNLKKLPTEYEWDGTKLPDRWDYDRFFSENLKKDNEGYYFEIKISEKTLNHEAEETKNVNAPAAPNAAPLTQETPSLNEWLKDSVVKDIVYHGSTNAFEQFDYKKIGLHGSDEGRGFNFTDKKELAEHYAKGTGNVKEVYLNIRKPLSLDEKNITKAELERYIRALDPKGDGYLSNWGENYDAALKKAVNVEYMSNSNDVDLVSSIIAANGSGDIEHGYRTLIKTLGYDGIVTSWEGGEKIYV

SEQ ID NO: 92634 - protein, 85 aa, Unknown
  Obtained from environmental sample
  misc_feature (1)..(85): Xaa is any amino acid
MANKKIWLIMLVIALALGLTVVGCLSPIDYDDINNDTEADTDSDTVLEADLGADDTETDSDSETDPDTDADPDSEDEPEEEDGGI

SEQ ID NO: 92635 - protein, 105 aa, Unknown
  Obtained from environmental sample
  misc_feature (1)..(105): Xaa is any amino acid
RGEKIDFRDFLSGKSYNAQLIPTITGSGQNVKSQFYINLEVSSPNGQFRTYKVGTPTFVRQGIVQYNIKRVLIDSNGNSVIFVIETMYASDNGYNVRYMVEALRL

SEQ ID NO: 92636 - protein, 489 aa, Unknown
  Obtained from environmental sample
  DOMAIN (32)...(216): Peptidase M16 inactive domain
  misc_feature (1)..(489): Xaa is any amino acid
WERLRQKWLPILFRGSPYANRMTIGLPEIIEGAPAERLEGFYKKWYKADNMALILVGDFNGAALEVSLVDHFMIEKPSQPTNRPLYDLPLPQKGNVEILSLTDSELTAAYINLYFKRSPQARRGDLAYYRSEIIDYLIDTMLELRFEEALLKPETPHVSVNAGTASYATTSRFYVLMSQAKTGSAEACLEDLLKIKETMLRYGFTDSEMATAAEMLVSDLQKLVQEKDKQQSQKYINSLTDYYLKGGNYADVEWELNAVLRMLPHIKAKDINAVIKDYFASDDIQVFIFAPDSEQDSLPDEARIKQMIAESKGMKIAAPRSKIVEGGLLSSVPERGKVVSESIDAETGAVIWDLSNGSRVILKSTKNKNDEIVMHAMALGGTSSAALEDDVSASLAIEMTQVSGLGPWSRPELTIKLAGKQVSISQFVYSYYRGFRGSSNTVDLKTFFEMIYLGFTDQRIDNEAVQAMLDQYRTSLALTSEDPHAVFSY

SEQ ID NO: 92637 - protein, 407 aa, Unknown
  Obtained from environmental sample
  DOMAIN (27)...(167): Bacterial flagellin N-terminus
  misc_feature (1)..(407): Xaa is any amino acid
MRISHNIAALNTHRQMGISELDGSKSMEKLSSGYRINRAGDDAAGLAISEKMRAQVRGLNMASKNSSDTISMIQTAEGALGETHSILQRMRELAVQSANDTNTDSDRTELQNEVRLLIAEVDRIGNTTEFNTKKLLEGSAKGVADEIIGTSRINNNSSLLLDAGKMKTMSEEIGKDKSWAFDGAYMLVRTNKEAGGEYKASNFMLVGPDGTQYKFAEAGYATPIGVSDLTAGTILAEGGDRAKVADGTEALNNAANFDAAGDTVTIGAALTEKGVTQVGTGSELVAGSSVTLGNNKFITVAGGDTDILATIKNVGGVIQLIDGDGTPRLMATIEVGKSVTLDDGTVLKNNGGGNVSIESGSLVLDDVLKVGSGTGDDATAITIAAQSTLDSTGGAGEETSCRSCRSC

SEQ ID NO: 92638 - protein, 47 aa, Unknown
  Obtained from environmental sample
  misc_feature (1)..(47): Xaa is any amino acid
MTVLEVVRPGLFTTVQDLGRFGYQMQGVPVAGAMDGPGVRLGNILLG

SEQ ID NO: 92639 - protein, 86 aa, Unknown
  Obtained from environmental sample
  misc_feature (1)..(86): Xaa is any amino acid
MAAMSDYAGHSPADVRQMIREGKWDRPTSGMCAGHAQGNLVILPKDLAYDFLVFAQRNPKPCPILDVTEPGDTEPKIVAPGANLAT

SEQ ID NO: 92640 - protein, 111 aa, Unknown
  Obtained from environmental sample
  DOMAIN (10)...(106): GTPase of unknown function
  misc_feature (1)..(111): Xaa is any amino acid
MQSTPTSSRVHIGIFGKVNSGKSTLLNALTSQEVSLVSEQKGTTADPVYKAMEIYGIGPVVFIDTAGFEDDSSIGILRIEKSKEVIKKTNMAIVLFSDMDIEEGMQWVAAL

SEQ ID NO: 92641 - protein, 481 aa, Unknown
  Obtained from environmental sample
  DOMAIN (197)...(477): Phosphomannose isomerase type I
  misc_feature (1)..(481): Xaa is any amino acid
FDEPPDMFDESQDVFNEPADVINEHGGGVERDSQGEMSTQLLMKIADELSSIRTELTTLKKEFTGIRAESGYSGTEKPRSGFFAEDDEEKVALTGDEMENILSSADLSSEESLPFDPLREEDEAALKRLSEQNEAINNLSEQEEAASPEEDAVAEEIEFDFEDLGIQLDSDDDTDAQSIEAEGMSDDFPTLDDTDELQELREEGVSPLTEDDPFSLSDAGSGDISLNEDNTDVRLAPQPSLQGVEPEVRGSPLEPQPSPQGVEPKVRGSPLEPAPVVLREGFAPLTRALSSRNPAVALRDFLAGLFGLSEAVREALTEYVLSICGHDCGASYNDGASLNDAIELMRDLARLYPGDPAIIAPLYLNVFRLEPGEAVFLEAGVLHAYIHGFGVELMANSDNVLRGGLTPKHVDVPELIKILDFKPYKPRIITPKAGLFNYPMPCGEFLLTRICGRDGSAGGMDIWLLAPGGFTGQDGPSICIV

SEQ ID NO: 92642 - protein, 128 aa, Unknown
  Obtained from environmental sample
  misc_feature (1)..(128): Xaa is any amino acid
MEKTIETEKASKRSFLVGIRDEKMRVSESDSLVKELSHLADTLGLEIASTETVHLRENHAKYGMGTGKAEELAQKAKELGVDCIIFDKEISPSQQRNWEELSGIPAIDRQELIIQIFASRASTREAEL

SEQ ID NO: 92643 - protein, 379 aa, Unknown
  Obtained from environmental sample
  misc_feature (1)..(379): Xaa is any amino acid
MRLFDLIEARFYNPSVTAHMISVNNRNAKIIEELFKDIEDRLSETLKTDAVRSSLMSEKTEEDYFTLSKIFSPPRDSPDKTQSKTQFEIQWVRFIEYDGTSLYFSTYSPDIIDYTYQIPFYGNYNDPDFPYELIAVQNGGVPKHTLDNKSGSILFSFPLYDSFDIYCGTALFSLSIDAILEKLFNEGRILSSHEIILIQKPPGMVFGTMAADEWVMPSQISSVWETTGIKTARVSSSDSGVPYILISTKTSQNLFIGSLIKEELYVFPWNMKLVLLVSFFLTVYLTVFLLFSLKQEPVTIIQNRLKRLQVSLLEQFYETKDEEDWNRWVRELKHRREEISALLKQGIQPVSRNLNEEIDTLINKSWGEFLTLLGSRREP

SEQ ID NO: 92644 - protein, 221 aa, Unknown
  Obtained from environmental sample
  misc_feature (1)..(221): Xaa is any amino acid
MKRKKHELEELLPKTEEQRAEEYYQQLLNEKKHATTKEEFGELGVKFHEIECYRDAKALGKECIGMAVKKGFEEMVRQKKALDSNPSATDEEYKIIAEKVKVLIPFNVEEITQQCIELVSECDEQYIKLKERREEQEKQEQERRRQEEERVRQEEERRRQEQYDKLVQTMKTASAEEDFRWLAKDFRAMNGYKDTAVLANDCDEQYKKHREQREEQEIKKR

SEQ ID NO: 92645 - protein, 560 aa, Unknown
  Obtained from environmental sample
  DOMAIN (399)...(527): Metalloenzyme superfamily
  misc_feature (1)..(560): Xaa is any amino acid
MESLKKNPSWKGRRGPVVLVIMDGVGYGKYKEGDAVADSKMDHLTAIKAKSPNTKLKAHGKAVGLPSDEDMGNSEVGHNAMGCGRVFNQGAALVSKSIETGAMFEGTAWKEVIANLKNGKPVAGREPTLHFLGLFSDGNVHSHMDHLKAMIAHAKKEGVKRVRVHILFDGRDVGETSALEYVDPFEAFLKDLNKDGFDAKIGSGGGRMWITMDRYGADWEMVHRGWQTHVFGNARQFATTREAVETYRKEIPGVIDQDLKEFVIAENGKPIGTIEDGDSLIYFNFRGDRALEITAAFEDDNFTHFDRGRRPKICYSGMMEYDGDLHVPKRYLVSPPSIDRTMGEYLAATGVRTLAISETQKYGHVTYFFNGNRTGKFDDKLEDYVEIKSDVLPFEQRPWMKCAEITDQVMAAVGSGKYDFIRLNYPNGDMVGHTGVYQAVVCSMEAMDIQLGRLLKAADEAGAVMVITADHGNSDDMFEHDKKTGAVSLKPDGSPKSKTSHSLNPVPCIIYDPEYKGEYQNDPKESSLNEGLGISSVAAACIHLLGLTPPQDYDRSILKM

SEQ ID NO: 92646 - protein, 745 aa, Unknown
  Obtained from environmental sample
  DOMAIN (357)...(500): ATPase family associated with various cellular activities (AAA)
  misc_feature (1)..(745): Xaa is any amino acid
MSDQSVIPIEQLLPHKLPLVALMGRPIFPGIFTPIMIGNPTDVKVVEDAAAGDAMVGLVLMQNETETPAITDLYTVGTAAKIVKKINLPDGGLNIFISTLKRFRVKKTLHPSNPIVAVVEYLEDEEDNTSEVKALTRALISEMKQISENNPLFSEEMRLNMINIDHPGKIADFIASILNIEKAEQQKILEIMNVRKRMEQVLVFIKKEQELLRIQKKIQREINEKIEKSQRDYFLKEELKAIKTELGMTTDAKSSDYQRFREKFDAFKFEGEIKEVVEQELEKFNLMEPNSPEYTVTRNYLDVIVSLPWGEPSPEIFDLKNAQAILEEDHYGLKDVKTRIVEYLAVRKLRKDTKGSIVCLVGPPGVGKTSVGRSIARALGKQFFRFSVGGMRDEAEIKGHRRTYIGAMPGKIIQGLKIVKTRDPVFMIDEIDKMGSSFQGDPASALLEVLDPEQNYAFRDHYLDLPFDISHVFFIVTANTLDTIPVPLMDRMEIIQLPGYIDIEKLEIARRYLLPKSLEKNGLKKNQVKYTKDSLLHIANAYAREAGVRNFEKNLDKIHRKLAKQIVEAQETAPPPVENSSPSSADNKPATPAKSAKPEIFHVDKKFVEKQLGKPIFPEGDIKKADKPGMSVGLAWTSMGGDTLVIEATSLPGKEGFTLTGKMGDTMKESATIAMTVARKLAVERYGIDSEWFDNNHIHLHIPEGATPKDGPSAGITMATALISLLREKIITDKLVMTGELSLTG

SEQ ID NO: 92647 - protein, 258 aa, Unknown
  Obtained from environmental sample
  misc_feature (1)..(258): Xaa is any amino acid
VNFNSPKQLARLFDGERVPYRCKIRIKGYEGEPMFEGSELWEQRKRLKETFNGVRVQKGQLVLYVPKQYAGRTGDDLVRMGYAVTCNPNIDKKALDVSKKGHEVAKAIVDLKQVTSIMDKFLGPKFDRFIVKHGENDWRIHADFSIVGARQTGRFSSANPNLQQVPSKTVLFAKTSDEIKLYTLCREIIIPDEGYVMGKCDYAGQENRLMAHFAVGEGAEDIRRKYCENPDLDFHKYIGEISGLYEEYGAEVGRKYAK

SEQ ID NO: 92648 - protein, 607 aa, Unknown
  Obtained from environmental sample
  DOMAIN (497)...(586): Transglutaminase-like superfamily
  misc_feature (1)..(607): Xaa is any amino acid
MKKSSTFLFCLRLFFYFSVITLILIHPGVTVSFDNIGIIQWFLIIPLMAVLAFIPEQKIKHRTRIILSFSLLFLLSIMAGGFNVNALTPLVAGFISFALTYLLFNRKPIFSNLAKIAAIEPFFLVWVCLRLLSLSRSGEDIAGQSIALTQFMLVWTAVVFLFHNVIIYLCLYPNSRIKAWKEGLIFSLSAGAVLIVTLFVLPADFVRNTVITNLTSERIPQKISESDRGIPQRGKGRRTRPRGEGKGELRGMSEYDWPGRGDGSGERRQYMVMIVASDREPVYMGNVFKGQLDPDKGFLANQKEPLNELANQRFFVTWFSNEQEHDIGREKQEVFSLSTLRQKYLPYRPIVIDPVILSDDTGPLRYIHQVVSNTHLGDPLMLVHENSRSFTAFEKSSLSAYLEVPLADDDKKLFEEYLRNARLKWRIDRSDIIKSDPYLNFIFSNQIENNQSLKSEGGNEQLENILALLTSFSKYQYNLNPDDDHSIDTLKYFITDSKEGDCVEFSNTLALLGRLAGIPSRVVTGYLVSESLQTEAHLRGLAALRKKLPVLQQFPFDNLFMVTNLHAHSWTQFFIPDYGWLDFEATAFSIPPQGMGDFNNWDVVIPL

SEQ ID NO: 92649 - protein, 292 aa, Unknown
  Obtained from environmental sample
  misc_feature (1)..(292): Xaa is any amino acid
HLELKDLSNSDNWRELYKTICAFLNTNGGIIIIGAKEDNKTKQLKFIGYNSNNEAKIKELPFQFTDRKKNKIDLSNYIRPDLMEIHPLCNGQVCVLYIENLPEDKKYIYYNDTAYERHLTGDHIISQEKIRKHVELCEELQYSKEIEVITEASFDDLDVDKLNDYIIRLNADKKIETLKSDIQNAVQFLEWKRMLHENKPTILGMLVCGKRHPLEYFLGERCELDAYFEMGGKNILAEDRKVYKENIIDLMESAWSFTFSKIGTGISVAGGGSDVFEYPEEIIRETINNALA

SEQ ID NO: 92650 - protein, 53 aa, Unknown
  Obtained from environmental sample
  misc_feature (1)..(53): Xaa is any amino acid
MFGKVLIANRGAIAVRVERTLKKMGITSVAVYALPDRDSLHIENADESVCLGD

SEQ ID NO: 92651 - protein, 295 aa, Unknown
  Obtained from environmental sample
  misc_feature (1)..(295): Xaa is any amino acid
GIEKIIAFADEYGNSSFDFKKDGVSTHFIIASVIINCDEIDTINQELETIRKKFFQTGEMKSKNIGSKHKRREAVLRELIKLNYSIYAVVVDKRKLWGEGFKYKQSFYKYLNGLLYKELYRTYSRLELKVDEHGTNDFMRSFKKYVETNYVRTLFSDSDFNIKRSQNELGIQLADIIAGTLGYIYDDTKKGNHSASLSNLLNNKIVSIDHFPRNNELIDFNESDIYKQSDYDENIANLSLKRIFDYLDTANGDNQDKIDSINFLKLLIRYHESNHQKKYTTASEFKNHLNVNRAH

SEQ ID NO: 92652 - protein, 131 aa, Unknown
  Obtained from environmental sample
  misc_feature (1)..(131): Xaa is any amino acid
METQDFKVKFRGTRGSYPTPRANCLHYGGNTSCVEVNAGGHLIILDAGTGIIDLGRELTQEHILSREPIRATLILSHIHQDHIQGLPFFNPLYIPTTDLRVFGLGPSGESLKQTLSEVLFDKVFPLGLEDI

SEQ ID NO: 92653 - protein, 269 aa, Unknown
  Obtained from environmental sample
  misc_feature (1)..(269): Xaa is any amino acid
MLIPLAAAFILCMQKNKNIILIPLFLCIFSLLSISCININKINTSFKELKTSYVKEQEETRDNVSPIFSLSRTGKNVVVIMLDRAISVFIPYIFEESPEIKEIYSGFTYFPNTVSFSGYTRIGAPPVFGGYEYTPEEINKRPDIKLVEKHNQALIMLPRIFSENEFSVCVTDPPYANYNLKSDLNIFNDYPHIKAYITDSQYTDLWLKEHNLKLPKTGEVIKRNMLWYSLFKGMPLLLRQPLYMDGNWCSPITHRAIRLTLTDMPYLII

SEQ ID NO: 92654 - protein, 171 aa, Unknown
  Obtained from environmental sample
  DOMAIN (6)...(169): Elongation factor Tu GTP binding domain
  misc_feature (1)..(171): Xaa is any amino acid
MGIDITKMRNIGISAHIDSGKTTLSERILFYSKKIHAIHEVRGKDGVGATMDHMELERERGITIQSAATQVTWKDHTINVIDTPGHVDFTIEVERSLRVLDGAILVLCSVGGVQSQSITVDRQLKRYHVPRIAFVNKCDRTGANPFKVCLQLREKLGLNAVMVQIPIGLED

SEQ ID NO: 92655 - protein, 215 aa, Unknown
  Obtained from environmental sample
  DOMAIN (10)...(203): haloacid dehalogenase-like hydrolase
  misc_feature (1)..(215): Xaa is any amino acid
MKVYNLPVNCEAILFDIDSTLYTNPEYARSQIDLPIEKLARMRGISFKQMNDEMNQYRDNWAKTHNGQGISHGNTFKAFGVSIGESVKWREELCVPEQYLSKDTRLRSTLERLAERFALSVVTNNPVSIAERTLRALGVEDMFRALIGLDTCGVSKPHREPLTRAAALCGAPFDSCVSVGDRYDIDIALPLELGMGGILVDGVEDVYKLPELLIK

SEQ ID NO: 92656 - protein, 373 aa, Unknown
  Obtained from environmental sample
  DOMAIN (32)...(190): Diacylglycerol kinase catalytic domain (presumed)
  misc_feature (1)..(373): Xaa is any amino acid
MKMESFAEALAEICRRSLVAQGKIGVPRPPLRWAIIANPVAGGFTMRSRLKNCRAALEQCLTEARNCPPRTDCAPAGVMAELAGNPVLASHGLAQTKGHGCAAKYAETLIGEAKTHNEPFYLVISAGGDGTSREILTAMYHAPDDVRSNMAILRLPMGTGNDGADSANLADALMLLIKPSRIEFSPCLRLVTATGGPAASGPAHLAFNILSVGLDAFVTHMTNKMKGKLPGDSYKLWVDIASLLYDRLYTVGLLDVKADGGKITLREKLLLLAVGASGHRTYGSQKKILPDDRNVCAVRQMPLLRKLALKGLFTTGKHIDKPEAILFNARRVEFSGSSPILAQMDGETVLLRPEDFPAAIELTEPVIPALKRR

SEQ ID NO: 92657 - protein, 285 aa, Unknown
  Obtained from environmental sample
  misc_feature (1)..(285): Xaa is any amino acid
RQHFPGKNEEAIKRPWDGYPPALHPKQRIFLSVDAIGSTKLKSTLAAKGHSPDKWAEVFAEFLPDVAVVFWNELVKAISNNCRHTCRKPCVPQSPELELKEEKAFKHTVNVWKYIGDETVLMAELSCKAYHAPLHVLALAETIKALNHNISEKFSRKDRDPKIKMNFKGTAWIAGFPVANIELDFPGPTKGQMIKDFLGPSMDLGFRLSKYASDNKLIISASLAYLIVSESALKKPIKKLSHLPLCYGGNVEVKGVKNDRYPLIWYPIADTEENKLSLTTHEKLI

SEQ ID NO: 92658 - protein, 98 aa, Unknown
  Obtained from environmental sample
  misc_feature (1)..(98): Xaa is any amino acid
MSFEVDIVLQNSNLLVLVEVKTKLTNERIDGHIRRLEKVRKYYTEMLNGDKRRILGAVAGVIVSDDTRAYALNQGFFLIEPAGQDISITPPIGKPREW

SEQ ID NO: 92659 - protein, 497 aa, Unknown
  Obtained from environmental sample
  misc_feature (1)..(497): Xaa is any amino acid
YYRFAHDLEWRLNAFFGSDGVGAEYKTDYDDEGIKGRMEMKADYDNYQGFLISGLTASPTPKLALRFSGGIGFTETKTKDIVDNNVTVKYNQNFLDKFPSIASAFNLTADDFYTAPNVNAAVDMGSSVFTAQVRADADYDLGKGFITALGVQELYSIWKQTGDISLNFIEVNIQSLIKNYSGPLPPYLDLFKDIPEATIITPRGYQLDVNNQGFTTSAYGLVEYKSPNQKIGAELGLRLDHLYFLGKNFNIQTIPALNPRLNVDINIFKNKGVFDSLDITLGTGLFSSADKLLSFISPNFGDGDLTVKFNRAWTSLIGVKTDIAGAYSFNIEGYYKRVFDRAYITADTVSGDNITPDFNFDGVGNVWGFDLQLQKLESRYWDGWISYSFNWTKYNNPKSGNRSLGSSSNAENMEDFWFWPSFHRFHNCNVVLNIKPLQWFHIGVRFGFASGTPRNKVSDEIKPYPALLLKDDGSLPTIIQKYGRESWYDENERSAWS

SEQ ID NO: 92660 - protein, 325 aa, Unknown
  Obtained from environmental sample
  DOMAIN (1)...(320): Protein of unknown function (DUF1432)
  misc_feature (1)..(325): Xaa is any amino acid
MAQITLIGMLVLGVVALVLIYFLASFFSLWLQALFSKASVGIFQLLGMRLRKVNPRMIVESRILSVKAGIPVETNLLEAHYLSGGNVLRVVQAVIAANKANINLSFAESAAIDLAGRNVLEAVQMSVNPKVITTPKVSAVALDGIQLQAVTRITVRASIRKLVGGAGEETVIARVGEGIVSSIGSAKNHKEVLENPNMISKKVLASGLDAGTAFEILSIDIADVDVGHNIGAILETDRAEADKKIAQAKAEERRAMAAAAEQEMKARVVEMQAKVVEAEAQIPLAMADALKNGRMGVMDYYNLQNIKADTQMRAQISGQSEKDLK

SEQ ID NO: 92661 - protein, 263 aa, Unknown
  Obtained from environmental sample
  DOMAIN (167)...(255): HD domain
  misc_feature (1)..(263): Xaa is any amino acid
MKTIFVVDDNPANLATAEQALSGSYQVLTMPSAEKMFSLFSKIMPDLILLDIEMPEMDGFTALSKLMANEITARIPVMFLTASIDSEMEAKGLALGAMDYISKPFSTPVLLNRIKNHLHIGELVKKRTERIERLQNGIVFTFANIVESRDKVTGGHITRTSQYIKALINAMIAKGVYLEELMDWNLDIAITSARLHDVGKIVVSDLILNKQGKLTYEEFSEIKRHTTEGERVIDQMIVQTGEAQFLHHAKIYAGAHHEKWNGK

SEQ ID NO: 92662 - protein, 360 aa, Unknown
  Obtained from environmental sample
  DOMAIN (14)...(306): Beta-eliminating lyase
  misc_feature (1)..(360): Xaa is any amino acid
MSDQDIAYLDNNATTRVAPEVLEAMMPFFGDRYGNPSSIYRFGGTVRRQVEEAREKAAALIGASPGEIVFTSCGSEGDNMALKGFFQEHGERTHIITTTVEHPAVRNTTRFLGGRGARVTELPVDGDGLLRDGAVESTEINPDTLVSIMWANNETGTVFPIDDLAQAVKARGGFFHTDAVQAAGKVAIDVKKVPVDMLAFSGHKIHAPKGVGASYFRKGTPVRAIIHGGHQEGGVRAGTENVPYIVGLGRACELAAERIADENTRVRALRDRLEKALLEKCAGAKLNGHPTERLPNTANISFENIEGEAILLHLDEVGIAASSGSACTTGSLEPSHVMMAMGIPYNYAHSSIRFSLSVYS

SEQ ID NO: 92663 - protein, 495 aa, Unknown
  Obtained from environmental sample
  DOMAIN (401)...(495): Helicase conserved C-terminal domain
  misc_feature (1)..(495): Xaa is any amino acid
MVPFGRRDCLGYIIEERDNPPEGVDEKTVRKIRRVVDSEPLFDTNDVKLAGWMAGYYLCSTGQALAAMIPSGRRVVRPSLPDSGEENESTLSISDEQAAALSAITSADIKTENETANSTLPKMFYLYGITGSGKTEVFLRVMQFMLNAGKSVIYLVPEISLTNQTAKMIGNRFGSQSATLHSGMTPSQRLAEWMRIRRGDAPIVVGPRSAVFAPVQNLGLIIIDEEHDGSYKSGNTPRYHARQVALRRCSLEGARLVMGSATPSAEAWKLISEGEIKRLDLSRRLSGGKMPEIKLVSLSKTEGCLTKELKDEIRITAHMGRQTILFLNRRGFAYFYQCPDCGWEQTCRRCSVSLTWHKSRNRCVCHYCGYSEPPPVSCPKCGSVEAGYRGFGTEMIEDEVNRAFPDLRVRRVDTDTIKKSGGRSVNNLEETLTLFKTGMIDILLGTQMVAKGLNFPGVRLVGVVFADTGLHLPDFRAAERTFSLVVQVAGRAGRY

SEQ ID NO: 92664 - protein, 326 aa, Unknown
  Obtained from environmental sample
  DOMAIN (191)...(326): GGDEF domain
  misc_feature (1)..(326): Xaa is any amino acid
MNKLFINNLYNLRQSNMIVAIFAGIYSLVPLLIDNDKVSFIACIVTALIALLLGLYTNYKMQVAIVDDKFVYIFTSLFYLNIMAFAIFMSVRSGILWDSDKQVALFLFFLACSLLMFINPFIFNLCLTFGAISVFIPLTFIYNKYITNAVYNTIDAFLAGVIGLYFTWQITKLRLGLELSTSMLEEERNKYLNQSTIDELTQLNNRRDFMQTFQRYLHNYRAYDDWLCVAIADIDFFKNFNDHYGHPKGDECLRGVGSIFAKVKENMGVYTARVGGEEFAMLWFEKDVTHVDAVISYFSGLIRDMNMPHEKSKVSDHVTMSVGVYV

SEQ ID NO: 92665 - protein, 502 aa, Unknown
  Obtained from environmental sample
  misc_feature (1)..(502): Xaa is any amino acid
DTFTGKAQTFNAASGVYDVDVSADGEVMLLSGYSYIEERAIAVVNEHRTDNGLKTGRTFNGLYKARYFRDGVIGIRSSLHNNCIAYENFNGESEVLFMGNENLMFSGPQVLDNERIVFIASREGKRELWLYNYVLQELFKIENTTYDNKYWEYMRGLNVSEGKLFFSYNSDDRMYKLGMIDLEKMQAVLNGRDFSGGVFNPVSADGYIYYLATFVSRNSLMRFPETADSLSGNRINLQLTKLDNQNYKTASEPPYTGPSKPYIGLRYMNPFKFWYPLILPTMDEDYSWKIYCILISLMQDPLDMNSIIFLTNVNFYQNMAEIYQFQWQNTALGFPLTLNLTDYLTGSKDDMRRHTNAALTAGISWTGDQWSNQISFGGGYYHTADYEKDKGAYEWGNNESGFFAKTGFLLSYRRASLQFSGASPVNSFDPRLDMVFRASTKTRFPLSLTLFGAYDENGMNTHGESNFFGKTIIDQFVLKEYKKTDGLELSWLGGGEISLGLF

SEQ ID NO: 92666 - protein, 448 aa, Unknown
  Obtained from environmental sample
  DOMAIN (44)...(374): AICARFT/IMPCHase bienzyme
  misc_feature (1)..(448): Xaa is any amino acid
MNLGYIDLVCVNLYPFFEKVQAGLSLQETIEFIDIGGPSMLRSAAKNFRDVIVLTDPADYPQVIEGLKAGNVPGEFRKQLAGKVFDLTSAYDAAIARYLLDDEYPKYLPFSLEKGQSLRYGENGHQSAALYLHTDTTGVLKGMEQLHGKELGYNNIRDFDLAWKAACAFGFAADGTPPAGKDDVNRLIPQVNDTQKACCTAIKHNTPCGIALGDTLIEAYEKTFACDPVSIFGGIIACNTIVDAKVAEKLGELFLEIVAAPDFAPDALEILKKKKNLRILKLKNAPKETHEYIAVDGGFLAQQSDRRLFEKWEVVTKAAPDANDIPDMIFGMRAVTFAKSNAIMIVKEQSATGIGCGQVNRIWPTMQSLERSAAALKSENRPWKDGDPARVLASDAFFPFPDIVEAAAAAGIKSIIQPGGSMNDKLSVETCDKHGIAMVFTGTRHFKH

SEQ ID NO: 92667 - protein, 288 aa, Unknown
  Obtained from environmental sample
  DOMAIN (23)...(287): Domain of unknown function (DUF323)
  misc_feature (1)..(288): Xaa is any amino acid
MKKIVVLFFLIAVGGVYAQQDAAPDGFVWIQGGTFMMGSPAKEPERENNEIQHRVTLSSFYMGKYEVTQKEYQEIMGTNPSRFKGDNLPVEMVSWYNAVEYCNKRSEKEGLSPAYTIDKENIDIYNIYNSSGIDRFKWTVTWNRNANGYRLPTEAEWEYACRAGKKTPFNTGNNLTTSQANYNGSLPYNNNAEGENRQKTTPVGSFAPNAWGLYDMHGNVTELCWDRYGRYASGPQIDPAGTGSKFDFERVSRGGGWNGTAGGARSAARFCENPSHTWGSIGFRVVRQ

SEQ ID NO: 92668 - protein, 395 aa, Unknown
  Obtained from environmental sample
  DOMAIN (99)...(203): Shikimate / quinate 5-dehydrogenase
  misc_feature (1)..(395): Xaa is any amino acid
MKKTFGLLGERLGHSFSPLIHGYLGEYNYLLYEVSAGNLDSFMSDRRFDGINITIPYKQQVAPYCVTLSQEAQMTGSVNTIIKDSDGALHGYNTDYHGFCVMLEKGGIDPKGKKVLVLGDGGSAQTVMAALDGLGARKIVTISRRGEDHYGNIERHYDADVIVNTTPVGMYPDNGNSPLSLAGFKQLTGVADLIYNPTRTKLLLEAEGLGISRVNGLAMLVAQAEAASRLFLDVPSRPELVNKIHDAILKKTRNIALIGMPGCGKSTVGRILAQKMERPFTDIDAQIETAAGKKIPRIFSEDGEEIFRRLETRVLAEEAKKSGAVLATGGGVVTRPENLDLLRQNCVIVYMKRELTDLITDGRPLSQNLGIQALAEKRLPLYEAWSDYAVQGKRS

SEQ ID NO: 92669 - protein, 297 aa, Unknown
  Obtained from environmental sample
  DOMAIN (99)...(203): Shikimate / quinate 5-dehydrogenase
  misc_feature (1)..(297): Xaa is any amino acid
MKKTFGLLGEKLGHSFSPLIHGYLGEYNYMLYEVSAGNLDSFMTDRRFDGINITIPYKQQVVPYCVTLSQEAQTIGSVNTIIKDSDGALHGHNTDYHGFRVMLEQGGIDPKGKKTLVLGDGGSARTVRAALDGLGAREIVTISRRGENHYGNIERHYDADVIVNTTPVGMYPDNGDSPLRLTGFKQLTGVADLIYNPTKTKLLLEADRLGIPRVNGLAMLVAQAEAASRLFLDIPSRPELVNKIHDAILKQTRNIALIGMPGCGKSTVGRILAQKMERPFTDIDAQIEAAAGKKIPQ

SEQ ID NO: 92670 - protein, 359 aa, Unknown
  Obtained from environmental sample
  DOMAIN (9)...(357): Chorismate synthase
  misc_feature (1)..(359): Xaa is any amino acid
MSSQYGKKLRISIFGQSHSPAIGVSIDGLPAGIKIDIDELKTFLKRRAPGQNDISTARAEEDAPEILSGLVDGITCGAPLAIIIRNKDARSVDYRELRDIPRPSHADFAAHIKYGGFQDVAGGGHFSGRLTAPLCAAGGICIQILRGLGVGIGAHILRIGNAQDDPFDPVAVSSADFELIQKNPLPVLKPEAGEAMRQQILEAKEKGDSVGGIVECAAIGLPIGLGDPMFDGIENRIAGIVFGIPGVKGVEFGSGFAVAGRRGSENNDSFYMDGEKVKTRTNNSGGILGGITNGMPVLFRAAFKPTPSIGMEQDSVSLSKAENAVLQVKGRHDPCIVPRALPCVEAAAAIALYDAFLDC

SEQ ID NO: 92671 - protein, 300 aa, Unknown
  Obtained from environmental sample
  DOMAIN (19)...(127): Miro-like protein
  misc_feature (1)..(300): Xaa is any amino acid
YLTPTETDAPDLLKFRPPVVTIMGHVDHGKTSLLDAIRKSSVATGEAGGITQHIGAYHVKTKRGDIVFLDTPGHEAFTAMRARGAQVTDIVVLVVAADDGVMEQTREAINHSRAANVPIMVAVNKIDKPAADPDRVLRELADLGLQAESWGGDTVTAHVSAKTRQGLDELLELIALQAEIMELKANPDKAARGRIVEAKLDKGRGPVATVLIQEGALRQGDNFVCGVFSGRVRALFNDQGKKVKEAGPSIPVEVQGFEGVPEAGEEFVCVADEKLARRIADARAVKQRERDLAKESKVTL

SEQ ID NO: 92672 - protein, 412 aa, Unknown
  Obtained from environmental sample
  DOMAIN (163)...(384): Bacterial type II and III secretion system protein
  misc_feature (1)..(412): Xaa is any amino acid
LEQGGGEYKEIGGMFYIFPLQQSEIITSLKNEGKTWQTFEVLYRRTAEILPLILNRFVGLQTVSLSGGNTFLALVSEETAEDIRGYIAAIDLPKRREAIRLKFIKTEDLYKSLPPTAQPEDIVDAGDGNTFFFLGSDERRELFLKDLEIIDRPQPRIRYDLFIIQVQESSSLNWNAQAEARFVRPGDRTMVTGQLGNLLNLNFDIITVFGYQFAAKLNLAISDNQANVFADTTLFGLSGQEIKFQNTSTYRYQDSNIDPETGKPIYSGVTREIVSGLVLEIKGWVSGDGMITTTVTASVSKRGAELPSAVGNPPPTSERVLTTQVRARSGETVVLSGLRQNDSNIIEQRLPLLSKLPLLGWFFKSKNNSTEDSQMIIYLVPHVDFANDEYTVSGLKTASIYTRLVEPYLEGK

SEQ ID NO: 92673 - protein, 395 aa, Unknown
  Obtained from environmental sample
  misc_feature (1)..(395): Xaa is any amino acid
RDKVKEVKTEKELSCLYSEITDFEGLDVEYISVSSEETEKIKEYIENNTNEFAVIDESNSQVSHVDISIKEIDDRMRILEEENIIVQYIDDNKSKYTIDENNTLVINAAEIFGENNTLINSINKEINGKRVTIKLKNKKELNVAEKTYEEWLTAFRRRKVLNSPEQRFMGILLSSPKQECELILLEDVPEEHKTAELCLVAVETYGYELQFVPEEHKTAELCLTAVQTHDKELRDEQEEQGLTAETHGQALQYVSEERKTAELCLAAVMQDGFALAYVPEKLRSALIYFAALMCSGAALQLVPEEHKTMELCLAAVMNNYEALEYVPEKFKTAELCFAAVDQKSRALEYVPEKLKTAKLCFKAIEQNGIALQFVPEELKTSELCFKAVKERGQAL

SEQ ID NO: 92674 - protein, 553 aa, Unknown
  Obtained from environmental sample
  DOMAIN (39)...(471): AMP-binding enzyme
  misc_feature (1)..(553): Xaa is any amino acid
KGFSGEWPTLPETFKITVSRYPQKGMPLPLFEPKRVSLNYTEALAFIEAIARWLHNEGIRRGDRVAVTGKNSPEWAIAYLGILFAGAVVVPIDYQLKLEESDLLIRTSEAKILFVDEEKHEYYTKNPGKLTKIISLKKGVGKYIYELDGPQAEIEQAAEHDLAAILFTSGTMGNPKGVMLTHYNLVSDSFLAQGTPLLIYHTDVFYAILPLHHAYTMLAVFIETISVGSELVFGKRMVTSQILKELKEGRITMLLGVPMLFNKVLTGIIRGLKAKGPIVYGLMLFLMGVSGLIKKIFKVNPGKKMFGFVLEKASLTSIRICICGGGPLAPSIFKKYNQLGIDFVQGYGLTETSPIITINPLEHYKETSVGRPCPGADIKILDPDDRGVGEIIVKGPMVMKGYYNKPEDTSEVFTPDGYLKTGDLGYMDSENYLYLTGRAKNMIVTEGGKNVYPEEIENEFQLFDEIEQVLIRGYLLDAKMKTEGIEALIYPNPDFKNEAGNKPSEEETKNRINAIINEVNSRLLPYQKIGRIEILDMPLEMTTTKKIKRGENR

SEQ ID NO: 92675 - protein, 943 aa, Unknown
  Obtained from environmental sample
  DOMAIN (4)...(166): Alpha-2-macroglobulin family N-terminal region
  misc_feature (1)..(943): Xaa is any amino acid
NMSNPSELRLTPDQEMYNPGDTAKVLLQSTLPEGRYLITVEREGIFTEEVRHFTEPVSVIDIPIARNYVPVVYVAVSSYSVRSGPPTHEYGSPDLDKPKGYFGVTPLHVNPRARAFSVKVESNKKTYRPGEEVIMTLTASKDGKPLPNAELTLMAVDRGVLDLINYHVPDPISYFYNESLFRLMVAGGDSRSWLMDPVTYSVKNLAGGDAEGGSKIEERKDFNPTAVFEPMLITDDSGKVTCKFKLPDNLTTYRVTVFGVRGDIFALKESEIAARNKINVREVLPRRTRERDTAEAGVLITNLDSTSHTLSVRLDIGPPLPNDDSSGMKKITGQAFVDGVFERRITVKSGENAVVYFDVAAVKEGNVTLNFTFNSDILNEKLIRELVIEHPYVMETVTTTGSVDKDSESEGIVIPSFADNGVGSLSVTLDATRLSLLDSAVTYLFRYPYGCMEQRSAAIMPLVIFGEYLDSLGLRSEVSNPRQVVENELKSWAKVQLSDGGFPYWPSGTKADFYVSLRIAHIIAIAKSKKMNVPSSLNIAELNSYLSHGYQEAQGWRNDSSSYYYQSYLQSYMLYVQSLLGEKIDPSRLAEILSRDNVDPSVLAFVGMTYRALNQNTDAANTAQRLRNFVRMSARGADITDPLDKYRNSYYGGMVEQLALTLQFFVDQYPGDDINTRLLFSLLESKRSGSGYWESTAVTIRVLSAVDALIRAENLTNLDVNGSVTLAGTELLKGAFKGLGAKPVTETLDFTGPVLSGLPRDSQQSLNFTRRGRGNIYYTVSLRYAIPFELQTFRDEGIGVFMSIYDINTNEEIRGTSLQNGKTYRARVRVSTNRDRTYLALRVPVPSGAEILDATFVTTASYGDKGGTSGNEQIRSSSWLSHQFIMDNEVQYFWDHFNKGESTVSFLFRTARRGVYPTPPVQAECMYEAEIFGRGSGLLYTIE

SEQ ID NO: 92676 - protein, 108 aa, Unknown
  Obtained from environmental sample
  misc_feature (1)..(108): Xaa is any amino acid
MRSVDVNASKNYSVWIDSGGAGLLSQAGERIAAVCKGEAAALVTDDTVNELYGDTVEQSLKAAGYATTRFVFPHGEQSKNMATYTSLLCALTEANLTRSDVVVALGGG

SEQ ID NO: 92677 - protein, 277 aa, Unknown
  Obtained from environmental sample
  DOMAIN (1)...(142): NAD binding domain of 6-phosphogluconate dehydrogenase
  misc_feature (1)..(277): Xaa is any amino acid
MNIGIIGLGLIGGSFAKAYKAAGHTVYANETDKSILDFAILSGAADAPLDDDALRHCDLVLIAIYPQAAIKFLEETAHHIPPETMVIDCCGTKKNICDAGFKAAAQYGFTFVGGHPMAGTEQSGFKHSKANMFKGASMIVVPPVYDDILFLEKIKRLLAPAEFGRLTVTTAEKHDAMIAFTSQMAHLVSNAFIKSPTVFEHKGFSAGSYKDLTRVAWLNEQLWAELFLENRDHLLHELDLLIASLAQYRDALQNEDFDYLKNLLYDGRCLKEKVDRQ

SEQ ID NO: 92678 - protein, 473 aa, Unknown
  Obtained from environmental sample
  DOMAIN (4)...(290): Glutamine synthetase, catalytic domain
  misc_feature (1)..(473): Xaa is any amino acid
MEAINKQAIRILRLFGDTESQRVLTTVGPEQEYFLIDKEMYLKRPDIIYTGRTLFGARPPKGQELEDHYFGAIKPRVSAFMKELDAELWKLGVYAKTKHNEVAPAQHELAPIFSTTNIAADHNQLTMELMKSIANKHGLACLLHEKPFAGVNGSGKHNNWSISTDTGVNLLEPGDTPNDNAQFLLFLVAVIKAIDEYQDLLRVSVASAGNDHRLGANEAPPAIVSMFLGEELTNILEAIDAGVNYRDKKKRQMEIGVTVLPHFPKDTTDRNRTSPFAFTGNKFEFRMVGSAFSIAGPNTILNTVVAEILRQFADKLEASKNFKGDLAALVKKTFSEHKRIVFNGNNYSEEWVAEAARRGLSNLKTTVAALPVFIAPKSVALFTKHHVFSESELHSRYEIYMENYCKTLHIEALTMTDMVKGLIIPACITYQNEIAQLLERKKACGDYDVSLDEHLLGRIAKLSGSLLKKLTPP

SEQ ID NO: 92679 - protein, 236 aa, Unknown
  Obtained from environmental sample
  misc_feature (1)..(236): Xaa is any amino acid
MRLPPIIFIALAFTVMFWSIPSTRVRPSSAAIGGLISCTLFELERWGFGYYVNLSIQTQTIYGTFGLIVFFLISLYFGALLLLIGAQVVYVHQNFRPLLRSSQRWDRRVGDYRSYITLRIIIDCVSSFRKKEPPPTVERFCETYELTEQQASGILNWLIHEKFIHQIQDGDKGFVPARDFSGDTVSTVFSAIEDQYRRITIHPQDATKEYLTKFFGEYGSRKFEGDITFYELIDII

SEQ ID NO: 92680 - protein, 159 aa, Unknown
  Obtained from environmental sample
  misc_feature (1)..(159): Xaa is any amino acid
MIINRITLNNFRQYKGKQSIEFATGEKNVTCILGMNTSGKTTLIQAFIWCLYGNSQIKFKTKTLLNSDVFSAMTLYSTKEVYVEIELVHDSVKYTIRRATTYEKASDKPKAKDETILSVSYMEANGQTQEAESSAKAKTMIEKILPEGLSDYFFSRRRY

SEQ ID NO: 92681 - protein, 433 aa, Unknown
  Obtained from environmental sample
  DOMAIN (3)...(134): Enolase, N-terminal domain
  misc_feature (1)..(433): Xaa is any amino acid
MSIIEYVEAREILDSRGNPTVEVDVVLEDGSMGRAAVPSGASTGDYEAVELRDNDKARYLGKGVLKAVDNVNNIIAAEIQGLDALEQVDIDRTMIELDGTENKGKLGANAMLGVSMATARAAANYLDIPLYRYLGSFHASLLPVPMANIINGGKHSDNLIDFQEFMVMPVGAESLREAVRWTAEVFHNLQKILHAAGKNTAVGDEGGFAPDISNDDALDYIMKAIEKAGYKPGEQMAIAMDCASSELYGEGGKKGYKFWKSNPDKLFSADEMIEMYTKWVNKYPIISIEDPLDQDDWEGYVKMTKSLGSKIQIVGDDFFVTNTKRLEKGIGMGACNSILIKVNQIGTLTETYEAVEMAKKAGYTAIVSHRSGETEDSFIADLVVALETGQIKTGSMSRTDRICKYNQLMRIEDELEGISEYAGRKAFYSIGKK

SEQ ID NO: 92682 - protein, 223 aa, Unknown
  Obtained from environmental sample
  misc_feature (1)..(223): Xaa is any amino acid
YLCNKYGKEKYGTINYHIILGDGGFLWPGNEKVDAYNYRVFAARPFPVLSVIGNHEPMLGMELTEADIGIGEAVYLINKKPFVAYLKRGRIYRIDSFKFLVMGGALSIDQEYRIPGRSWWKEEYWSAREEAELFEILANDSDFDYVLTHTGPDSVNMRLFGGLFHGSAKFTDKVAALNDTVDSRIQCKGWFCGHWHRDLIYNDDEKKRFYQYLYRDVELLDQQ

SEQ ID NO: 92683 - protein, 245 aa, Unknown
  Obtained from environmental sample
  misc_feature (1)..(245): Xaa is any amino acid
YDIENVKWSNGNAYFGSIKIAGSVDVPVDTGSGYVFFTRSNDGLNVHTEYVTVKQGERRKYIVADTTIVVEVGYGENKKTLGAIKTANPNPSSSSAVPSSSSAVVALPSSSSKLSSGSNTLLSSSSVAPSSNSAIPSSSSIIQSSSSNGYPSSNSSVHENVVEVGGMCKKNGESLFCQYDTGCFELNNVYFNGVECEVGKCTCIQVLDYCIKYGGLYTGVIALDPNNYGVGENCANQGGKFIAGK

SEQ ID NO: 92684 - protein, 182 aa, Unknown
  Obtained from environmental sample
  DOMAIN (1)...(156): Secretory protein of YscJ/FliF family
  misc_feature (1)..(182): Xaa is any amino acid
AIAEVAAYCQKNKYEYKLEKDKLTLLVPKETIYETRMALAQKGLPKINGKYFAHIDPPPISITEFSQNTKYRGAVEGYLALSIETFREIEKATVSLNKDTTATVEVKLHQYKELEGEQIKAIQLLVASAENELKAEQVSILDDKGNDLIAKYEAKYKAEYETYNPTRKNVRSCGSSCGDGGY

SEQ ID NO: 92685 - protein, 150 aa, Unknown
  Obtained from environmental sample
  DOMAIN (31)...(145): Response regulator receiver domain
  misc_feature (1)..(150): Xaa is any amino acid
QLRYEHGKPRNFESLKHETGKFIVTSGNEKQKVLFVDDDEIDLDMVESVLKEEYEVSTAKSGKEAMGLFYQGLIPHLILLDLIMPDMDGWDTYNRIKALSSLHDIPIAFITSSSDPKDIKHAHEIGAVDFIKKPYDKDDLRKRVAKIIKK

SEQ ID NO: 92686 - protein, 487 aa, Unknown
  Obtained from environmental sample
  misc_feature (1)..(487): Xaa is any amino acid
ALTWKGYPAFIGKIVSLKKLSLGHYSYGHKEQDNIILPAELANLRNLRNLSLGYDIPEIPSWVWTLDKLEALSIYNDSIESIPAEISDIKRLRKLRIYCENITTLPEEIGEKLSLTVLDLQCPRLKALPDSLANLKAMKGFFIDTCNLTALPGYICNWTDLQEFKISDEKYFQRSHTKLNNISRNIGNLKKLKYLDLNGVSIEEIPASLGSCPLEYLELAGNFGIVPEPLGNCTKLKVLHLNSDKPVSLPKSFGGLSALKNLWLDSPEMHGIPHSIGNCRNLKSIFIRSDKLAVLPESFCKLKKLQGLHLNTFALKALPAAFGSLVSLKSLDIFSGALIAFPESIGDLKKLVRLNLDAYNVKKLPDSFNKLSYIKYSKIQIGQNEQVLPWKKDTAKKSGSVSFEELLTMSGQYRKKIFKPYSIKQLEALICSLPKDTASIKSGKELFKDIMLERNCKLKGKFTLTDENKKRIAKVSDEFIKACEDGF

SEQ ID NO: 92687 - protein, 419 aa, Unknown
  Obtained from environmental sample
  DOMAIN (189)...(222): Tetratricopeptide repeat
  misc_feature (1)..(419): Xaa is any amino acid
DSYTSGKLGLALASYESSDVKSADVKSADVKSKNEDDKYACKAFLDYLSIDTRVKSIEEKYKKWTDNININAESRLRLAETFAVMGESLKALDQIHKAWERRDKAIREVSSGEESVRTKKELLLAARMSLRLGQYNEAESYLDGILEQWADSAEGKEAVKEKIKILGELKKYVELKEFILKYINNKKDINYHTLLARCYFELKEYKKSAAAWDKAFEMNKKNGVYAANAANALELSGKKEEALLRFIKAGKIFLNQDNQAELGAIMPKILSFGGGNWEARVLAGKWAYSIEDYNRCIVEFTAANKLRCSIKPRPEADPAHYYLWGLALNVQRKNSEAVRLIEKAVRLAPDYGLFRFKLAEIKLASGAKDLSLAEEFKLALNNMDDPDGKMAEHAGNLLRKAGNTKGAKYFLGKAGKDAG

SEQ ID NO: 92688 - protein, 294 aa, Unknown
  Obtained from environmental sample
  misc_feature (1)..(294): Xaa is any amino acid
MGLKKPKYIAWTEIPDREYNDHIIEARIRLDSMGGYAAAGLTFHVMDEEAYYIVLFSSKGYFRLDVVRNGAPKPLIAWTDIFEFNGKNIDLGIITYGTFIIFFVNGKWIGETSDDSINSGKVGFALASYETSDIKSVDIKSVDIKSVDIKSVDIKSVDIKSVDIKSVDVKSANDTPAADDVSSKNNEYVCKAFLEYISIDTRIKNIEEKYKKWTDPLNINAESRLRLAETFAVMGESLKALEQINKAWERRDKAIRAVSAGEEGVRTKKELLLAARMSLRLGQYNEAESFIDAI

SEQ ID NO: 92689 - protein, 318 aa, Unknown
  Obtained from environmental sample
  misc_feature (1)..(318): Xaa is any amino acid
MYSENSKKSIYFHNRTDIFIIILVFILTVCPVVISVLSRLNAKSKQKDIYLSASCEEFFGSKTMETLMREFNEQNPDLRIEVLNVPGEKIKEPDILFFDESEFNDLIAGETLLPLSFLTEDETGGIRPAIPLVSFMDMLFFNIELLQAAGFDRPPKTTEDFLLYAKTITSANNGILADAAGAAMALSPANKQSLSRDIFSWIWAAGWNFWPEEDASAPLINTKPVINELNFLSKLYRGGALSPESGSAASSVPQNRALSLNSFELTEEQALEGFAQGQIAMIIASTRDIPALREKMGDGVFGISTIPSGGAAGKYSVS

SEQ ID NO: 92690 - protein, 666 aa, Unknown
  Obtained from environmental sample
  DOMAIN (478)...(645): RNA polymerase Rpb1, domain 3
  misc_feature (1)..(666): Xaa is any amino acid
MRDIQDFDSIMIRLASPEMIRNWSYGEVKKPETINYRTLRPEKDGLFCERIFGTTKEWECYCGKFKSIRYKGVICDRCGVEVTHFKVRSERMGHIELAAPVSHIWYYRSVPSRMGLLLGMSMTALRSVLYYEKYVVIDKADTELEKGQMLSEDEYNEEMERYGGGFTAAMGAEAIRTLLENLDLDKLAAELREKMIEKGAKSDKKLLKRIEIVENFRNSQNKPEWMILDVIPVIPPELRPMVQLDGGRFATSDLNDLYRRVINRNNRLKRLQTLTAPEIIIRNEKRMLQEAVDALFDNSKKKKIVKGSSNRPLKSISDMLKGKQGRFRQNLLGKRVDYSGRSVITVGPDLKMWQCGIPTKMALELFKPFIMKKLVDKDVVFNIKKAKMLVEQETPEVFAILDEVVKEHPVLLNRAPTLHRLGIQAFEPVLVEGKAIKLHPLVCHAFNADFDGDQMAVHVPLTQAAQMECWTLMLSARNLLNPANGKTIVFPSQDMVLGINFLTRIKPNAKRPGSSKPETKDKIPYYSSAEEVLMAVDRKALDWEAAIRIKPTKFPVWGDRAGNEVETLPDGTVITSAGRLVFNEELPESIPFINYELKDKELRALIEYIFKVKGSWITVQMLDAIKSTGYRYSTVFGATIGVDDIVVPKEKPEMIDKANKEVESIK

SEQ ID NO: 92691 - protein, 282 aa, Unknown
  Obtained from environmental sample
  DOMAIN (1)...(64): Histidine kinase-, DNA gyrase B-, and HSP90-like ATPase
  misc_feature (1)..(282): Xaa is any amino acid
VSPEQQKHLFQSFQQADGSTVRKFGGTGLGLAISKNIVEMMGGKIWIESEIGKGSKFIFTVRMKRGTEKKRTPAAPGVDLNNIRILAVDDDPDILEYFDETAQIFGVNCDTAANAEEALSLLGQRGDYHICFVDWKMPGMNGIQLAHELKIRKTSVNTFVIMISAAEWSVIEEEAKKAGVDKFMSKPLFQSSIADIIQDYIGDDKTRTETAQEEDSRTPDNQFAERCVLLAEDVEINREIVLALLEPTKLQIDCAENGAEAVRLFTLAPDKYDLIFMDVQMP

SEQ ID NO: 92692 - protein, 284 aa, Unknown
  Obtained from environmental sample
  DOMAIN (56)...(199): GAF domain
  misc_feature (1)..(284): Xaa is any amino acid
GADLLYSAARVFANAIVREGYERNAQKTLKALERREKMSDTLNKVSVMFLSQREDTFEETMTAGVREIADLFKLDRLSIWRNLRKNNVLHASQIYRWDRDAGGTTVPTPGLEDVAYSKLAPRWETVFANNEIINSPINLLPEAAMLRAFGVVSAFIAPIFINNELWGFALLEDRHTERFFEKDSAEMMLSAILLCANTVMRAEMEREITNANEFTRAVIDASPLGFNVFDENANITDCSDVLLKLLETTKEYYFEHFYEFSPEYQGDGLKSRDKAVDIIKRALN

SEQ ID NO: 92693 - protein, 441 aa, Unknown
  Obtained from environmental sample
  DOMAIN (347)...(390): LysM domain
  misc_feature (1)..(441): Xaa is any amino acid
AEGLLHDRDYPQVVYEKIPNGDRTGKKLGELIDQRRKIYVNAIAAVRDSAPAKWGATEKRVAELFKLAPEGAIVGAEERIRHQGGQRERFRLGLIRSTMYLDTISAILKKNGVPDELKYLPHVESSFDAEAYSKVGAAGLWQFMRSTGRLYMKVDYMFDERRDPIISTNAAAKFLKANYDMLGAWPLAITAYNHGPNGIRGAVEKLGTRDIAVILQKHESASFRFASKNFYSCFVAVLQIMEKPDKYFKDVKYYPKFSATGIKLPFAMRPDALCKALGINEDDFKALNPSLRPVVFSQKKPIPAGYNVNVPSNISAETAVAALNRTPLPMRTTPKEAAEAVETEGYYTIVSGDNLAGIAKRLGVQMSDLAAVNNITNSSKIQVGQVLLIPSGEFGAGWGATITASKHTPKAGAADTTKTFAVDTAKASAVASASKPDQRRS

SEQ ID NO: 92694 - protein, 168 aa, Unknown
  Obtained from environmental sample
  DOMAIN (14)...(47): Tetratricopeptide repeat
  misc_feature (1)..(168): Xaa is any amino acid
AEYDRAIRLNPDYADAYYGRGYVYNMKSDYDRAIADYTESIRIKPNYADTFNNRGIAYRNKGDYDRAIADYTEAIRINPNFANAYNNRGIVYYNKKDYDRAIADYNEAIRIDPNYADAYYNRGIAYYMKKDYDKAIADNEAALRINPNHANAKKWLENAREEAKTGSR

SEQ ID NO: 92695 - protein, 230 aa, Unknown
  Obtained from environmental sample
  DOMAIN (13)...(216): Binding-protein-dependent transport system inner membrane component
  misc_feature (1)..(230): Xaa is any amino acid
MFNYDVIFRTGAIPHAFFISVARTVINLGTSVFFTAMIAYALSRKEFVLLKPFTLVLILSMYINAGLIPTFLLIKNLGMYGSFWVYIVPGVVNAFNFVVMRTYMRTIPESIIESARIDGYGDFYIFIRIVFPLCLPVLATIGLFVAVGSWNAWFDTMIYNAGKVNLHTLQYKLMEYLQSSQSQSKTSGDAGAMAMAAAAGSGSGMVTPMSIRAAITVIAAAPILMIYPFM

SEQ ID NO: 92696 - protein, 280 aa, Unknown
  Obtained from environmental sample
  DOMAIN (119)...(234): CBS domain pair
  misc_feature (1)..(280): Xaa is any amino acid
AAVALLVMTTVNVVLTEMVPRSFAIRNSTVWALRTAKPLLLWSRLARPLTFALSLLSSWVERLFGLPPAEDLHEDPLPSEEEFKRLLVHSQEKGELDLNKADLIENVFSFSKRTTMEIAIPRGKVVTMDLGKSFRENMDALRTLKHSRIPLIDGDLDNVKGVIHLKDVLWKLQEGGEPDLRALARPAFFVPEMRLIQDLLLDFQRKRQHMALVVNEHGGVDGIVTLEDVIEELVGEIHDEFDQETLQITRVNQGSWLAKGNVTLDELKDEFGLARKKRPI

SEQ ID NO: 92697 - protein, 550 aa, Unknown
  Obtained from environmental sample
  DOMAIN (181)...(374): Calcineurin-like phosphoesterase
  misc_feature (1)..(550): Xaa is any amino acid
MRIEIPEMAVVALVGVSGSGKSTFAKTHFKPTEVLSSDYFRGLVSDDENNQQVTPQAFDALYYVANKRLDLGLLTVIDATNVQREARASVLRLAKEQNCLAVAIVLDMPERICRERNEKRPDRKDMAASVVTRQAGNLRRSIKLLQKEGFRYVYIISDEEEAANAEIVRTPLWNNKKHETGPFDIIGDIHGCYDELCDLLIKLGYETDAENCTAGPPQGRKAVFLGDLCDRGPKNIEVVRLVTGMVKSGTAWCVAGNHDVKLLKKLKGADVKLTHGLDKTVKQLETQDEAFIAEVKNFIDGLISHYVFDDGRLVVAHAGLKEKYHGRGSGRVREFCLYGDTTGEVDEYGLPVRLPWANEYRGKALVVYGHTPVPEAQMVNKTICIDTGCVFGGKLTAYRYPEGEIVQVSAKQEYYPPVKPFLNAQTGNYDDMLSIDDVLGQNYLNTRLRHSIKINAENSAAALELMSRFAADPHWLIYLPPTMSPCETSKLPAYLEYPSEAFDYYKSRGIGKVVCEQKHMGSRAVIVLCRDAETAAKRFGVADNSFGIIY

SEQ ID NO: 92698 - protein, 511 aa, Unknown
  Obtained from environmental sample
  misc_feature (1)..(511): Xaa is any amino acid
MGTDQTSRRRIFASRNSDIANAVNKAEREKKIKKLLDPNGGDFDKPLYDNFIKARRNAEAASAYAHLKQDENGRFPLTGIGDVNTYALFAETILQIKHEKGRAGFIVPTGIATDDSTKYFFAEISASNLVSLYDFENREKIFPDIDSRMKFSLVSLGKSEFANLCFFLTNTDQLADIRRHFRLARDEFILLNPNTQTCPVFRCEKDAELTKKIYRNVPVLICEKNMNTAEHGNSDSSNPWGIQFMRMFDMSNDSDLFENEPTTNGLPLYEAKMMHQFDHRWATYTDSGDTVDVTANQKQDVNFTVKPRYWIDKNEVLERIEGDEYNKRPIPKWLMGWRDITNATNERTVIVSILPITAVNHKLPLFVFNDKNTTVFSCCFYGNLNSLTLDYIARQKVGGTDLTYHYLKQFPVLPPNAYSQDDIDFIVPRVLELTYTAVDLIPFAEDLWDCADSKMRRYFLEQLHGTQAAKFEEFTKYDTAHLPEKTEGQGKQTGLADFLPPFVLTPKDGHC

SEQ ID NO: 92699 - protein, 293 aa, Unknown
  Obtained from environmental sample
  DOMAIN (2)...(172): CTP synthase N-terminus
  misc_feature (1)..(293): Xaa is any amino acid
AHITDYIRDFIYAGAHKTKADVMLVEIGGTVGDIESQPFIEAIRQISLKHRSDCLFIHVCLIPYLKASEEHKSKPAQHSVHEMQSMGITPNIIVARSDDPIDHKLKKKLALHCNVKEDCVIDNWTLSSLYDAPLMLHGEEWYGRKADNPVGLDTVVCRELGLPETLVDLTEWSELANKVKNLDKTVHIALVGKYTKLHDAYLSVVESLNHAGFTFNAKVKIDWVDSEALEALSEEDRAHKLKNAHGILVPGGFGERGIEGMIWACKYARENNIPYLGLCLGMQIASIEFARNV

SEQ ID NO: 92700 - protein, 280 aa, Unknown
  Obtained from environmental sample
  DOMAIN (2)...(118): Glutamine amidotransferase class-I
  misc_feature (1)..(280): Xaa is any amino acid
IFELGIPVLGICYGMHLICHVLGGKVASGTVGEYGRVSVSADAKSKLFPHIRSDFMALMSHRDAVREIPKGFVITAKTANCPAAVESPARNIYGVQFHPETTHTDNGKEVIKNFLFGVCGAKGDYLLDDYIERETKRIRELVGTDRVLLGLSGGVDSSVCAALLSRAIPNQLTCVFVDHGFMRKDEGDEIEAVFSKRALNFVRVNAGARFLDKLKGVSDPERKRKIIGTEFIRVFESEAARLFGKVKFLAQGTIYPDVVESGGKAGATIKSHHNVGGLPH

SEQ ID NO: 92701 - protein, 360 aa, Unknown
  Obtained from environmental sample
  DOMAIN (318)...(341): 4Fe-4S binding domain
  misc_feature (1)..(360): Xaa is any amino acid
MKTNVYVVKCESYEKADEKINELINLMGGISQFVKKGEKITLKANLLGAVPPERAVSTHPSIIAAVGKLAKKEGAIPLIADSPGSGYLYNETTLKKLYKTCGMYEAAEQAGIDVNMDTRYDKVSFPQGKLMKQIDVIKPITQADAVFNLCKMKTHLFMHVTGAVKNHFGIIPGLSKVGFHAKLFDKERFADMLLDLSLFVAPRLSIMDAVLAMEGEGPGASGTPRQVGLLLASTNDLAIDVVAGEIMGLPYEHNPVLMAAKRRELLHNIEDVNLIGEDLSNLKIPDYKFPTTGRGFSRTVEKNTVIRNLLLSTLSKYPVVSKEKCIGCGMCATACPEKMITIITQNEKKKAVISLKNCIR

SEQ ID NO: 92702 - protein, 239 aa, Unknown
  Obtained from environmental sample
  misc_feature (1)..(239): Xaa is any amino acid
MKRNNSASFLIAVSFSILFTACVAQQQKKVIFRPDTENNPQKLSRPFDSWEIIESQAGIPEWARLYFNNAVNEIEVMDGFSGKYIFIGENGGDNFSALQQWANGFTVEQDLPRLVALRVEHRLVAPASLYPDDEYGEYYEFFIRAVSNGEFLKAEKEQSFWLKRKITADGAETDGITGPRPNPDAAKERYEFLVLVSVDRETLQKQIQGIMANIKTKIPPTKDQAAAIVKIKNNIFEGF

SEQ ID NO: 92703 - protein, 526 aa, Unknown
  Obtained from environmental sample
  DOMAIN (13)...(176): Type III restriction enzyme, res subunit
  misc_feature (1)..(526): Xaa is any amino acid
MDKLTILREKFGYSSFRPGQEEVIDAILEGTDALAVMPTGAGKSLCYQIPALLLEGMTIVISPLISLMKDQVSALKEAGCGAAFLNSSLSGREYAQTMDEITNGEIKLLYIAPERLQRTELPELAVNSVPLVVVDEAHCVSQWGHDFRTSYLQIADFIRGVKPRPAVAAFTATATVNVREDIRKLLALRDPLCVNTGFDRPNLYFEVQKPEDKKTALLECLSERKETSGIIYCATRKTVDETCRFLLSRGFNAARYHAGLSDEERRKNQDDFIYDRRTVMVATNAFGMGIDKSNVSYVIHYNMPKNIESYYQEAGRAGRDGSPADCILLYNGQDVQINKYLITHDEEEETADSALQAHNLELLKQMTFYASGSDCLRRRLLAYFGEKTAVNCGNCSNCLTEVEETDVTVEAKKIVSCVFRLKQRGRSFGKTMIIDILRGSKNEKILRFGFDTLSTFAIMSGVSAHRIRLIFDHLIDKGILLVEEGEYPVVTLGRAESLLRDEERVLMKLPEEREKSPEKTTKRKSE

SEQ ID NO: 92704 - protein, 427 aa, Unknown
  Obtained from environmental sample
  DOMAIN (159)...(248): PPIC-type PPIASE domain
  misc_feature (1)..(427): Xaa is any amino acid
VRYRQNQNQNTENRGYMDYQNWREAYEGAAIHTAVLQEMKNAGYTAPVKKVDREVAALPEYQENGRFSPTLYKRKDNNSRLSQWRQVQEEIAEKHFRADVTGLLKPSAEAEFIGKMEARQRSFKMTFFNVNEYPDEEYEAYARDNSNLFRSIHLSRVTLSSSEREARQVLDSIKNGETTFEDAARAHSKDVEYADKGGDMGMKMYYELNKKDEIPEEETRDIVFSLAKGDYSNVIKTDAGWFFFRCEEPMLEADLTDPAVMEKVRSYLRNFERGRMENRAIDKANGFIALVNEHGFDKALSLQGLESKSFGPVPINFGNEELFTTLQSQSMPELAGAAENENFWRSAFSTPVGKPSPWIVQGSNVLVLLPVEEIEVEASRQETVTSNYSEYWLNYMIGQSMQQFFLNSPKMEDKFMDVYFRYFVGDN

SEQ ID NO: 92705 - protein, 771 aa, Unknown
  Obtained from environmental sample
  DOMAIN (730)...(770): His Kinase A (phosphoacceptor) domain
  misc_feature (1)..(771): Xaa is any amino acid
WSDLLEGLEAGDIDFTGELMFTHERRKTYFMTSPTVERLMKVYRIRDRAPLHLYPQREVRYAFLQGSVLNADVIENIGYEFKTVFVDNYNTAYRMLKSGEVDAFFGMDTSDVAFKAFDDVVAEDFYPLIFKSACLSTQKAELEPIITALDKVLDEKTLSYLADLYKEGNWKYLENKLYNQLTAEEKVYIQKNPVIPVTAETDNYPICFLDTNTNQWQGIYFDTLDEITKMTGLKFKPANDQNTQNHDLIEMLEKGEALIVPELFRLKEYEDRFLWSETPLIQDTYAFLSKSNFRNIEISQIHYLTVGVRKNSIYSEFFKKMFPNHKHLIEYDTQEEVWNALKHDEVEIIFACNRRLLTYTNFYEEAGYKLNLIIDYTFDSSFGYNKDAVILKSIVDKALRIININNISNQWMLKNYDYRYKLAKAQRPLLIGVIVLFFFVLVLVIILLIRSRNSGRHLQQLVNHRTNALEFETSKLKAVLDSIPDFMFCKDINYRYTQCNNFFEEFLGVHEADILGKTDEEGNFLHPEHMEMIHKTEQAVINEDKIYSVEEKIQSPVTGKERFFESVKAPIKQNGAVVGIIAIIRDITKRKEMEKELAIQTSLFKTMLSSLPDAVFCKDLNFKYTLCNNYMTDILNKKAEDIIGKDEIEALGLPVETAAIAKETDKKVMIGQQRVSYEEKILCGDGVTRLFETVKSPLIINNEVVGVMAIARDITRRKEMEEDAQAASRAKSSFLANMSHELRTPLNVVIGLTELILEDDMSDHVRKNLIK

SEQ ID NO: 92706 - protein, 226 aa, Unknown
  Obtained from environmental sample
  DOMAIN (46)...(226): Binding-protein-dependent transport system inner membrane component
  misc_feature (1)..(226): Xaa is any amino acid
DNLTNNTVIFVNDGQRVKKYETLARLVVPPNVVYNWRVLTGRGFQIWQGFGNSAFVSICATVLSIYFSAMTAYGLQVYRFKGRALLWTVILIVIMLPATLSIIGFFQFISKIRLRDSYIPLIIPGIAAAGTVLFLRQYMMSVLSTDLIDAARIDGANEYRIFNIIILPIMLPALAAQSIFTFVGSWNSFITPSILLSSEKKYTLPLLVQTCAVIFTVPSTAQFIWE

SEQ ID NO: 92707 - protein, 225 aa, Unknown
  Obtained from environmental sample
  misc_feature (1)..(225): Xaa is any amino acid
MIAVVSCSSTKNQKTDSIAPEAPESVAPPPPAEPIPEIPEEVVEADVFIEETEEVIVEDTIEEPVLAEEEPPVEVIEPEPPVVAVVPEPEPPPPPPPPPVISVPKPEPPSAPPQVPPQTPPQVTTPPPVAARPVPPPSPPPPPVEEEKPPVEEPPPPPPPPRNIPELPNPTPGISGRQDVAPMVFSRVVRATVGQLVEIPFRGTGWVYLGEAGAQRGIAYDSRRL

SEQ ID NO: 92708 - protein, 306 aa, Unknown
  Obtained from environmental sample
  DOMAIN (5)...(306): Acyl transferase domain
  misc_feature (1)..(306): Xaa is any amino acid
MSKTILLFPGQGAQYVGMGKVLSETFEPAKQLLKKADEVLGFELSKIMQEGPEDTLKSTDNTQPALYVCSCMAMELLKSKNFSFDYVAGHSLGEYSAIYAAGGFSFEDGLRLVRVRGELMAKAGELKPGAMAAVLKLSEADLNAALAEAQDAGVVVAANFNSPGQIVISGSKEGVAKASEIAKAKGAKRVVPLPVSGAFHSPLMEYALTGLKEAIEKTTFSDSKVPVIANVTSQPVSKGAEFKDLLAKQLISPVRWQQSMETAVSLGIERGIEVGAGKVLAGLMGVINSNVKVYSVETEEQLNSIA

SEQ ID NO: 92709 - protein, 288 aa, Unknown
  Obtained from environmental sample
  misc_feature (1)..(288): Xaa is any amino acid
SGGGGGSDGGGGQDGGGSNSGGGNSGGGGTGGGAGGGSGAGGGGAASSGGGAGGASTSSDSANSDSQDSKKEEKPNILNKMADKASNIAKSVAKAGSNVLTGITSNLKLDTLMKGSTDTFSFLTQAGNSFLNQIKDKLGDVLLSKIHLPELAFLAGLMPLWAIKSNPRYAGDYIRRLCIRQDLACVLSWLDTICKIKYTNTNRSDVSLATNAANNGCIRVARYIMRQLHKEEKELMSVRTPPSSGNPVGFPQNQKLADNVDRLLLLARGNIHLIAKHIIMGAYTNLMA

SEQ ID NO: 92710 - protein, 291 aa, Unknown
  Obtained from environmental sample
  DOMAIN (121)...(282): Prolyl oligopeptidase family
  misc_feature (1)..(291): Xaa is any amino acid
MTTDSYIRDIVNHPAFIGFGERMLSCDDNSAYYNTRISDAASLMPYHQNVNPAVVVKALNYMINEVRDGKTIFYDFYTERQKKADPAKENTGLFFFRGKPGAPFAIVCPGGGFAYVGSLHEGFPLALEISKKGYNAFVIRYQIGGERFACKDLAAAIAYIITNSRTLELNTEDYSLWGGSAGGRMAARLSSNGTAFYGEKDYPKPAAAVILYTSHSDFTVNNPPTFAVLGEMDNIANPVIMIQRINDMKAAGIDVEFYLYPSVGHGFGLGVGTFAEGWLNNAVRFWEKHIK

SEQ ID NO: 92711 - protein, 391 aa, Unknown
  Obtained from environmental sample
  DOMAIN (352)...(375): 4Fe-4S binding domain
  misc_feature (1)..(391): Xaa is any amino acid
MIYKQFKDKKLSYLGMGNMRLPKIEGQGEKIEEAKAREIIEYAYQNGVNYFDTAYRYHGGESETFVGEVLQQFPRDTFYLATKMPGHMMEYKDGVYKFTGLLANREPRSPQEVFEEQLERCRVDYFDFYLLHNVSEASWDFYTSEEIGVVEYLLKQKQAGRIRHLGLSSHGRADTIDKFLSKYDCFEFVQIQLNYLDWTLQNAGKKYEVITKHGLPVISMESCRGGRLVSLSPEANALLKAARPNDTVVSWAFRFLQSLPNIPVILSGMTTLEQLKENIELFSKEDPTTDQEKELLQKAVKTMADMVQCTACAYCIEACPQELDIPKLISASNEMRFAAASSKSFNYKARTKKEQPSACIACGACSKLCPQGIDIPSVLKQFSEALVNQLS

SEQ ID NO: 92712 - protein, 461 aa, Unknown
  Obtained from environmental sample
  DOMAIN (85)...(426): Glycosyl hydrolase family 20, catalytic domain
  misc_feature (1)..(461): Xaa is any amino acid
ESPSAENSSHSKESYRAIESYSAVESYRAIESYSLEISSEGITLSAGAEAGAYRGLQVLRQLFLSGFSEGRLSLPCGKIEDHPRFPWRGLMLDCSRYFYSIEFIKKVLDALSLQHINIFHWHLSDDQGWRLPVASYPLLTEIGSRRRQHRLSGRFTGGFYTEAEIRDIVSFAAERHIEVVPEIDLPGHASAILAAYPGLGCTGGPYMVEDRFGIFEDVLCAGNDNIFPLAEAVFETLADLFPSRYVHIGGDEVLFNRWAECPKCRRRMAELGLGEAAQLQSWITSRLAQMLHKHGKTAIGWDEVLENTEKFPLPQDMIVQSWRGEEGGNKATSLGHCVIMSPVTNGCYLDSKAINQPEEMGRLSVGTIAQGFSFDPVTEKMDEAAASLVLGGQGNLWSEVIYAGKIAEYMIFPRICAIAEALWSRRKSKTAPDLAEFAGRLAIHQSRLDKLGLLQYRGPLG

SEQ ID NO: 92713 - protein, 296 aa, Unknown
  Obtained from environmental sample
  DOMAIN (115)...(274): alpha/beta hydrolase fold
  misc_feature (1)..(296): Xaa is any amino acid
MIASSITANSYIRDIVNHPAFMGFGERMLPCDDNSAYYDTRITDVASLMPYHQNVNPAVVVNALNYMIKEVRDGKTIFYDFYTEQQKKADPAKTHTGLFFFRGKPGAPFAIVCPGGGFAYVGSLHEGFPLALAISKKGYNAFVIRYEIGGESYACKDLAAAIAYIFTNSRTLEVNTKNYSLWGGSSGGRMVALLSAYGTAFYGEKDYPKPAAVVLFYTGHSDFTVINPPTFAVLGERDNIANPVLTEQRVSDMNAAGIDVEFHLYPNVGHGFGLGVGTTAEGWLNKAVRFWEKYLN

SEQ ID NO: 92714 - protein, 360 aa, Unknown
  Obtained from environmental sample
  DOMAIN (199)...(321): GTPase of unknown function
  misc_feature (1)..(360): Xaa is any amino acid
MPQKLYDTAEQPKRAMLVSLGKEGDGGKELRGLAETLELAVASHEIINVRERQPKFGMGSGKAAELAEKAAALKADCIVFDWDVSPSQQRNWEELAGISVLDRQELIIQIFSSRAATREAELQVQLAELNYRLPRLAHKYIDLSRQRGGHYGTKGSGETRLETDRRKIEQRIHKLEKETEEVSKQRQLQRRQRERQGLPVCAIVGYTNAGKSSLLNALTGADVPVEDKLFATLDATTRRFEPSPGKPVLLTDTVGFIKRLPHSLIKAFRSTLEEAALSNLLIHVLDASDPAIEECYKTTIGVLSELGAGEIPVITALNKTDKLDDVTQISEKFPGSIAISVKSGFGLGELKRRIADSLQR

SEQ ID NO: 92715 - protein, 1055 aa, Unknown
  Obtained from environmental sample
  DOMAIN (4)...(196): RNA polymerase Rpb1, domain 1
  misc_feature (1)..(1055): Xaa is any amino acid
VIDPGDTNLRKDQLLTEEQYSELMEQGKKFDAKMGGQAVLELLGKVEVEKLVIELRHLVKRETSEQRRLEHLKRLRVAEAFNRSKNDPQNMVLKVLPVLPPDLRPLVPLEGGRFATSDLNDLYRRVINRNNRLKKLLEIKAPEVILRNEKRMLQEAVDTLFDNGRRTFSVKGEGKRPLKSLSDLLKGKQGRFRQNLLGKRVDYSGRSVIVVGPELKIHQCGLPKLMALELFKPFVIQKLEEKGLVQTVKSAKKFVEKERPEVWDILEEVIKDHPVLLNRAPTLHRLGIQAFFPVLVEGKAIRLHPLVCSAFNADFDGDQMAVHVPLSVESQLECRFLMLSANNLLSPASGHPVMTPTQDIVLGIYYLTKMSPDRLGQGRAFSDTDEVLLAMADKQVDIHAKIKVRHNGKMIETTPGRVVFNTVVPKEIEFVNELLNKKRVQQLVERVYNAAGTKTACKFLDEIKALGYEYATRAGITFGAEDLVIPDEKKEIIDKSQEEVTRIRKQYDRGIITEGERYNKLIDLWTHTTSQIADKMHERLAGDKNGFNPVYIMMDSQARGSKDQIKQLAGMRGLMQKPQKKITGAVGEIIENPIISNFKDGLTVLEYFISTHGARKGLADTALKTADAGYLTRRLVDVVQDVVVYEEDCGTPKGIYIEALKEGDEVMESLSARLLGRVTQEDVYHPVTEELICPVNTLIDGELAEKIESSGIESVFIRSVFTCDADFGVCQYCYGRNLATGKLVDIGEAVGIMAAQSIGEPGTQLTLRTFHIGGTASRLIAQSKEVAKIAGVVRLKDVETVEHSTGKVVMNRIGEVMVLDDAERERYRYNIPYGSFVKVSDGEKVAKGQDLFTWDPYNNVILAPKGGVVSYSDLIDGETFQELYDERSGVTNIVVTEHRRDRKLQPHIQVYDGETRVANMAMPTGCYIQVKEGDKVVAGDILAKMPRESAKSRDITGGLPRVAELFEARRPKDPAVVSEIDGSVSFGDNERGNRKVKISNEHGDVREYPIPMGKHLRVHEGDRVKAGDRLCEGAIDPHDILRIMGENRRSGVYAE

SEQ ID NO: 92716 - protein, 339 aa, Unknown
  Obtained from environmental sample
  DOMAIN (171)...(308): HD domain
  misc_feature (1)..(339): Xaa is any amino acid
MDSEKKIILLVDDNPANLRIGKNVLVEKYAVATAPSAEKMFSLLETNNPSLILLDVDMPEMNGYEAIKILKSKPQTKDIPVIFLTARTESDDELAGLSLGAIDYIVKPFQPPLLLKRIEVHLLVEAQRKELQYFNENLLKMVEEKTESILELQNAMLKTIAELVECRDDITGGHIERTQRGIKILLEELEKSGVYRDETEGWDMSLLLQSCQLHDVGKISIDDRILKKPGRLSDEEFEEMKKHAIFGEQIIEKIEALAKESDFLNYAKIFAASHHEKWDGSGYPRGLKEIKYPCWAALWRLPTYTTRLPRFAPTKRPLATRKRCGLSLKAAEPSLTPNW

SEQ ID NO: 92717 - protein, 104 aa, Unknown
  Obtained from environmental sample
  DOMAIN (1)...(104): Seryl-tRNA synthetase N-terminal domain
  misc_feature (1)..(104): Xaa is any amino acid
MLDYKFIAENLHAVSANIADRFMKADAQEVARLYAKRTELTTHLQSLQQIRNSNADAMKGKHDQEERDALIREGKKLKEDITATEAELAAVELNLLTEAREIPN

SEQ ID NO: 92718 - protein, 180 aa, Unknown
  Obtained from environmental sample
  DOMAIN (63)...(96): Tetratricopeptide repeat
  misc_feature (1)..(180): Xaa is any amino acid
AAGNGTGRIGTYASDRDVPELMSNNKDQLLLSALNAHNEKDFPLAIRIYTKILEQGCPTNIKALVLIHRGKAYFSQSNYGDARSDFKAAAECEPSNNRAFYHLGVVDRVLGDNNSALSALQSCIEINPFHVDALFAISGVYFDTGDYPGALEYCEKALLVEPEAATVKEFRKLVISRMNM

SEQ ID NO: 92719 - protein, 440 aa, Unknown
  Obtained from environmental sample
  DOMAIN (64)...(113): Secretin and TonB N terminus short domain
  misc_feature (1)..(440): Xaa is any amino acid
DTICAAYALFLAQSAFGTPPAGWGDDSPIVSGNVNPSLKTPVTLTAREASLTEVLKVLADRSGMNFVVGEGVTREKITIILNSTPLDEAVNLLVRAAGLSYEIIGNSILIAEPDKLKEDVGLSSYVVELKYAKADEIAEALGDLAKNVKVDKGGNRLVCYASPRVIMEVERIVKALDKPHILVLLETRLIEVSMDKLNQLGLKWDQFNPELPWDLGSVIRIPEAPLKNGLAFKGTTRGEINLNLALDLMVQNGDARLLMDSKLTTTNNREASLHIGEVVPYTIQSYNLSSSGGVNQQIEKENVGVLLKMTPHINDKNQITLTLAPEVSNITGWKGANSDIPVVRVRRTNTTVRVEDGQTVILAGLLSEEKATTVSKFPILGDIPVLGLLFQNKREEVKKTNLIIEVVPRIIQNPADISKYMSIMGHGKPPVGKAKNNGKQ

SEQ ID NO: 92720 - protein, 256 aa, Unknown
  Obtained from environmental sample
  DOMAIN (32)...(219): ABC transporter
  misc_feature (1)..(256): Xaa is any amino acid
MLEVKDLSAGYSGANRECDDVIRNISFKAEKGESLCILGPNGSGKSTLLKSIARIIDYRGSVLINGEDIRVVSRKELAKKIALLSQNAQVFFPYTVYETVSLGRYAYSQGFLKNLSTADRAVIEDILKKLDIWDSKDCMIDELSGGELQRVFLARTLAQSPDLILLDEPSNHLDLKHQIELLKFLKAWVKENDKTLISVFHDLNLARLFGDTAVVLNNGTLAASGKIEDVLKSGILSGVYGVDICGFMQESLEKWK

SEQ ID NO: 92721 - protein, 84 aa, Unknown
  Obtained from environmental sample
  misc_feature (1)..(84): Xaa is any amino acid
GRYWLVTPGAEAVISRNPDVILTNVNYIDDPIGEIKSRPGFNHISAVINNRIYQIDTDSSVRPSSRIILALRQMSRAVYPELYE

SEQ ID NO: 92722 - protein, 182 aa, Unknown
  Obtained from environmental sample
  misc_feature (1)..(182): Xaa is any amino acid
AAACKKTDVKVNLTTNGTFPNGGLKKWLPLLLPVLSDIKFSAMHGKIPQSIFEFIDECKINKPKITIQATLDKNDKLDEIPKGVDRIKINEPWILNKPLATIPTDDCPFLTKEAWVWVDGTFQVCPNPDARFGMQTKFPFGDFGNFLAQDPLSIWNGEAYRSFCKNYKENAICKNCKMRCLS

SEQ ID NO: 92723 - protein, 352 aa, Unknown
  Obtained from environmental sample
  DOMAIN (61)...(272): Binding-protein-dependent transport system inner membrane component
  misc_feature (1)..(352): Xaa is any amino acid
MSVGVNAISSYVFRSGHLRRSDLVKLLIGIFLVITVICPLVKMLFNMTGSDISGVLRLPRFREALLNSIYAAATSTVISIVFAWGFAYCVVRSNLRFREVFSVFVTLPMLIPSISHGMGLILLLGANGIITRLFGLNSTIYGFQGIVLGSVFYAFPVAFLMLADILKYEDGSPYEAAEVLGIPRANQFFSVTFPYLRKPLISVVFAVFTLIFTDYGVPLMIGGRYITLPVMMYQEVIGLLNFSRGSVIGSFLLIPAIVAFVFDLLNRDRANQNFIINEKAKAENKLRDAAAACYVILICVIIALPVLVFAFLTFINSYPVDMSLSFRNIAKTMNMGAGRYLGNSLVIAVCVS

SEQ ID NO: 92724 - protein, 267 aa, Unknown
  Obtained from environmental sample
  misc_feature (1)..(267): Xaa is any amino acid
FSGCTGLKEIKLPEGLTSIGEYAFSDCTGLKEIKLPKSLKSMNPWVFDGCTELAGISVDKNNPIFCLVDGVMFDKAMTTLMLFPQGKNGRYSVPEGIISIRKNAFDNCKLTSISFLQSLLFIDSDGFNGEQLTDITVSELNPYYYSIDGVMFNKESKENIVLREYPKNKEKTDYTVPEGVMGIDSCAFDRCKRLANIILPESLKIIRDYTFAKCEGLKAITLSMSLQYIGERAFEDCPNLETVTLSRKTKIGHKAFEGYKGRLVYRD

SEQ ID NO: 92725 - protein, 303 aa, Unknown
  Obtained from environmental sample
  DOMAIN (33)...(259): Glutamine amidotransferases class-II
  misc_feature (1)..(303): Xaa is any amino acid
KECEDFLDLHFDIINLSKIPTRKMKSITDEPLIWRYFVTPLPTKLASSLARRSGEFTAKCVFRVNTRIDGAYVFSSGKNMGVFKAVGFPEDVGRFYKLEEYEGWCFTAHGRYPTNTPGWWGGAHPFALLDYTVVHNGEISSYDANRRSIEMYGYKCSLQTDTEVITYIIDYLHRKQKLSYKEIASVIAAPFWSTIGRMKPDDLETHEYLRIMFSGQLITGPFSILVGFDGGLMALNDRLKLRSMVVGEKDELVYIASEEAAIRVIEPNLDTIWAPRGGQPVIIFMNGRVPDSGPAIYRGEEWH

SEQ ID NO: 92726 - protein, 439 aa, Unknown
  Obtained from environmental sample
  DOMAIN (252)...(438): Methyl-accepting chemotaxis protein (MCP) signaling domain
  misc_feature (1)..(439): Xaa is any amino acid
MVPIVNKSHEVVGVVGCQLNIDVIQPRIEATIKDFDEVDAISVYSSNGFIMASYRDERIGKMMVEAEVQFGDRINDAFEAVKNGKEFSCFSYAPTMQTNLQISVVPIPLGQAENTWAIMLGTKEAYIMKDVYAMIIFAIIIAVIAIIASAGILFIVLDRTTKPIITVAETLKIVAEGDLTKQVNVNTNDEIGGLAKDFNYTMKKIKDLMLLIKKQASILKDIGNDLSSNMTETAAAINQITANIQSVKGRVINQSASVTETNATMENVITNINKLNDHIEKMAENVHSVTNTLLNNAANVKTLQEASESGKTGLHEVVTDIQEISHESEGLLEINAVMENIASQTNLLSMNAAIEAAHAGEAGKGFAVVAAEIRKLAESSSEQSKTISSILKKVKESIDKINKSTETVLTRFDSIDTGVKTVAEQEENILNAMKNREKD

SEQ ID NO: 92727 - protein, 525 aa, Unknown
  Obtained from environmental sample
  DOMAIN (70)...(206): ATPase family associated with various cellular activities (AAA)
  misc_feature (1)..(525): Xaa is any amino acid
DLEWINDLPWSEYSADTSDLSEAEKILNEDHYEMKKAKERIIEFIAVRQLNTQASTQAEQIPLGIKGPILCFVGPPGTGKTSLGKSVARALGRKFVRISLGGVRDEAEIRGHRKTYVGALPGKIIQSMRKAGTMNPVFLLDEIDKLSSDFRGDPASALLEVLDPEQNSTFTDHYMEVPYDLSKVLFITTANSLHSIPYPLLDRMEIIEIPGYGENEKLAIAKKFLVPKELAENGLARAKITFKDEAILEIIRHWTMESGVRSLEREIARCVRRVAKAAVNKEYGKSAEKPIENYKKAIGKEDLEKLLGRRKYKNDVVFKEARIGVSYGLAWTETGGTMLPVETIRFEGSGENIITGNLGDVMKESARIAISFLRSVQDRYNFLVKNMAKTDFHIHVPEGAIPKDGPSAGITLAASLLSTLCQVPPKPGFAMTGELTLTGRILPIGGLKEKLLAAIRNGMEEVLLPADNREEWEELNADIKKSLIVHFVDNAWEAFDILFPKGILRTKKKPVDKVKASKSTSGKKK

SEQ ID NO: 92728 - protein, 475 aa, Unknown
  Obtained from environmental sample
  DOMAIN (13)...(217): ATP-dependent protease La (LON) domain
  misc_feature (1)..(475): Xaa is any amino acid
MKPFSSSKTKVEEYPLLPLRELVIFPQTIISVFITYKSGIAAIEEALKTEMRLFAVCLKSTEAAASGQKPDETWDAGTVVRILQNLRLPDNTFRVVLQGEYRALLLSLNQKNDSTLAKVDPIKAENPNPLAQEKSENKAQEIAGLMRAVQKSFAQYAEFTKKVSTEILSAVDKTENSEKLINIIANAMTIKAERKISLIRIADPASRLEKLLEILEMENEIFGIQKNISGKVKSRMDKNHREYILHEQLKEINKELGKDTAEDEFAELERVIIERNPGEEVLAKARKEIAKLRKLQPFTPEAGVLRGYIEWIMDLPWSEYSVDSSDLGEAEKILNEDHYGMKKAKERIVEFIAVRQLCAIENSNPPVPANTLSPESAVKDTAVMPETAEPVSPRANPELISVKGPILCFVGPPGTGKTSLGKSVARALGRKFVRISLGGVRDEAEIRGHRKTYVGALPGKIIQSMRKAGTMNPVF

SEQ ID NO: 92729 - protein, 189 aa, Unknown
  Obtained from environmental sample
  DOMAIN (11)...(75): 2Fe-2S iron-sulfur cluster binding domain
  misc_feature (1)..(189): Xaa is any amino acid
MSDQTTNMINILIDGEHLKVPPKTTILQAAEKLGIHIPRLCYHPLLSLEGSCRVCVVQVKGFSFFHTACSTEVWEGMEVETNSPAIRQARRDIVELLLDNHPKDCQTCERDGVCELQKQAYRLGVRERVFEGKRKHVPIDATSLSVVRSGEKCILCNRCVRVCKEIQGVHNLSQQGRGFDTVVGPAFLA

SEQ ID NO: 92730 - protein, 294 aa, Unknown
  Obtained from environmental sample
  DOMAIN (171)...(294): Respiratory-chain NADH dehydrogenase 51 Kd subunit
  misc_feature (1)..(294): Xaa is any amino acid
FLAALKKKSEQALAAVNDGSKITIQIGSATCEHAAGSMAVMGEFKKHIASSGRSDILLHTTGCTGRCSKEPIVSVLVPGQPPAKYERVNREQAHKIFVSHVQGQTPLPEIALDDSMSEEAAAGKLTTEDPVSKHFLDLYGDVPFFKAQKRIAMRNSGVLDPDSLEEYVRLDGFKALATCLGKGDPQWIINEILKSKIRGRGGGGFPTGKKWQMMAEQPEKLRYIVCNGDEGDPGAFMDRGMLESDPFNVVEGMIIGAYAVGAKKGFYYIRAEYPLAIKRIQNAIDQCRANGLLG

SEQ ID NO: 92731 - protein, 838 aa, Unknown
  Obtained from environmental sample
  DOMAIN (588)...(772): Radical SAM superfamily
  misc_feature (1)..(838): Xaa is any amino acid
MDIASSSLTEEGTVFGGEANLIKGLRNMIDLYAPEVIGVCTTCLAETIGEDVGAIVKKFYEENPDVDVKIINVASPGYGGTQNEGWFAAVRAVLEQTEQDDTPIDMINIITPMISPADVRYLKNTLKSFFPGKGATQCLILPDISENMDGVTEERYNRLKTGGTPIGRIATMAGARMTIEFSEFTDSHNSPAEYLAETFGIPFVKLPLPVGVRGMDTLVSALIEAGGRVNPGITKSRGRCLDAMADAHKHCAEARAAIYGDPDFIVAIVRLCCENGILPVVAATGSVSPKLREKLTLETAECAEYHFEENIDILDDSDFAAIEDACRKRGANLLIGSSDGRRIARSMNIPLIRCAFPIHDYIGGQRVRILGFDGTLNILDQAANAMIEKTESTFRSSLYGQLYAPADVAAKANVINTDTVSTNVIGNDTVSTNIVNTDDTTVSTNIIKADIVDTDGIVSADVISIDTVDTEDAVGTNIVNTDIVDTDDKAISDVISTDTVNTDTVVNTDESVGTNTSDTDAVDTGDTVNPNIIIIDTFDTDKDTDKVNTDGAVITNSANTEAAAVNAEKTASHPCFGERACQNARVHLPVAPECNIQCNYCLRNYDCMNESRPGVASKILSPAEAFERYVQLKKATPNLTVAGIAGPGDALANFELTRETFRLIRDYDKNVTFCIATNGLLLPQYVSQLRELGVSHVTVTINAVDPVIGAKIYHRVSYMGKTYEGIEGATILLANQLAGIKMLTDAGIICKVNCVTLKGINDNHIRDVVKTVSELGVFMANIMPHIPVKGSAFEGLDRVTNIEISALRKDCGAYVKQMTHCRQCRSDATGTLDDDRSV

SEQ ID NO: 92732 - protein, 368 aa, Unknown
  Obtained from environmental sample
  DOMAIN (27)...(296): Rad51
  misc_feature (1)..(368): Xaa is any amino acid
MAKTNDSEKTRVNPNATSEEKAKALEAARLQIEKQFGAGSLIKLGAHNAASGIEVVPSGSILLDEALGIGGYPRGRIIEIFGPESSGKTTLALHAIAEAQKLGGSAAFIDAEHALDPVYAKNLGVNIDELWVSQPDNGEQAMEITESLVRSGAVDVIVVDSVAALTPQSEIEGEMGDAQMGAQARLMSQALRKLTATIGKSRTILIFINQIRMKIGVFFGNPETTTGGNALKFYSSLRLEVRKTETIEVSKDADAIGNRVRVKVVKNKVAPPFRKTEIELMFGKGISATGSLLDCAVKYEIIKKSGAWYSYNDEKIGQGRDNTRDYLEQHHDFMKELDTRLRAQIFPGREPPKAAVPQKSGKSKKGDG

SEQ ID NO: 92733 - protein, 95 aa, Unknown
  Obtained from environmental sample
  misc_feature (1)..(95): Xaa is any amino acid
MQFLSVQEFSKSPQVTLSSLATSDKVVLTNNGKPSALMIYADETNLEDILTDLKRLRAKRDLQDLQMQSMENGKNNMTMDEINAEIKLARQECVK

SEQ ID NO: 92734 - protein, 61 aa, Unknown
  Obtained from environmental sample
  misc_feature (1)..(61): Xaa is any amino acid
DAEKFPLVILCDDAEFTNKNLENLLWTAFTRSNPASDISFNENKQVVIDARKKPQHSEALL

SEQ ID NO: 92735 - protein, 365 aa, Unknown
  Obtained from environmental sample
  DOMAIN (1)...(364): Bacterial protein of unknown function (DUF853)
  misc_feature (1)..(365): Xaa is any amino acid
DETQSGILQIIFKIADDNGLLLIDLKDLRAMMQFAYDNAKELSAEYGNISTQSVGTIQRNLLTLASNGGDIFFGEPALDMRDWLDCDESGRGFINILDCVKLFQSPQLYSTFLLWMLSALYEMMPEVGDLEKPRMVFFFDEAHILFNEAPKALLQKIEQVARLIRSKGVGIYFITQSPSDIPDTVLSQLGNKIQHALRAYTPKDQKAVKAAAASFRSNPDFSSEQVLGELSTGEALISLLDEKGAPQIVQRAFMLPPRSFIGPAEPDRISGLIKSCPLYPKYKDAIDRESAYEVLQEQKKQTDAQKQKPAAAQQTAAQQTRPANAPNAKKTSSPAKQVISSAMTQVGREAGRALVRGLLGNIKKW

SEQ ID NO: 92736 - protein, 89 aa, Unknown
  Obtained from environmental sample
  misc_feature (1)..(89): Xaa is any amino acid
MIRVEIIANHSVEENILEALKKEDAGKFYTKYPSIFGVGSAGSRMGDAVWPEENFAMVIWCEEEEARAIERAVASVKERFPDEGVKLFR

SEQ ID NO: 92737 - protein, 425 aa, Unknown
  Obtained from environmental sample
  DOMAIN (222)...(418): Predicted permease
  misc_feature (1)..(425): Xaa is any amino acid
LKAGPGKIRPAFFIALRYLLGRAREGGRYLRGAAAGIALSLIPIIVTLIVADGMIRGITDRYLELGTGHLQIYNYFNGQEPEAALPQIKGLPGLRGAWPERHGLGVVFHGSSSKGVTIRAVEKSFWEDPGSMKYLKVLSGEANTDNIRDVLLGEDLANSIGASTGSTVRIMTIRSSTGSRYIPRVTPFTVRGIISSGYRELDSLWCIMSLEAGKQIMPDSGTAFLILKIEDPYREADSMVSMLYNILDPDYGVYTWKMLQSSQYSSYESTRQLLLFIMALIVLVASVNVSSATSMLVIERQRDIAVLKASGAGPSFTSAIFLWGAFLTGIAGSAFGIAAGLAIGCSVNSLIRALEKALTFFSGIFHGGPVLILDSGYYLETIPIIVNWKVVFIIALSTIFAAVLASWLPARRAGKLRPIEILRKY

SEQ ID NO: 92738 - protein, 493 aa, Unknown
  Obtained from environmental sample
  DOMAIN (146)...(493): Family of unknown function (DUF490)
  misc_feature (1)..(493): Xaa is any amino acid
EPQAFDIAFTRGGGANSGANGKSLVVSGGPRNMLRLQVDNNGNFYAGLSSPSPVRGTAIGNISGNTINASCNDLYVDMGRLFELLPERDDIYLTGGYVNASVDIRGSISDPEFFGSARGTSLRFVVPSYIPVELRPIPFSVAIEGNEIRFGPISAAVGKGAGSVSGKFLIDRWIPNIFDIDITVPRETPVPYSFGISGFAANGDASGKMNLSMESKTLDVSGDLYVNNTVLGMNSDEITRSQGRSYDTDANSVVDITISTGPVVEFFYPDSKFPILRANPDMGTKLHVTADTLTKQFSLTSDVKIRGGEMFYFERSFYIRSGLLVFRENENRFAPRLTARAETRDRNEDGPVTISMMVDNAPLMDFTARFESTPPLTQMEILALMGQNITGGQTDENPGSYQKELAVLNSTADILAQFTVGRLVERAVRNFFQLDMFSFRTQFVQNVILRGTGLMQQPVDRTGWVNYFDNTTLLGGKYIGPDLYVQGMLSMRY

SEQ ID NO: 92739 - protein, 369 aa, Unknown
  Obtained from environmental sample
  DOMAIN (62)...(160): HD domain
  misc_feature (1)..(369): Xaa is any amino acid
MASILSVLSEGFSCPVRDVLWGHVYFTPELAALAESPAFMRLHRILQLGPVHQIYPGATHTRASHSIGVYHLGRRLLQNLVERGGEGWVSREGVMAFLCACLLHDLGHFPYTHSLKELPLRSHESLTGEIILSEPVKSLVGKCGADPALTAAIIDRELSGNSGNSELFFYRKLLSGCFDPDKLDYLNRDARYCGVPYGVQDVDFILSRLIPCPERGIDIDSRLIPNVEAILFAKYLMYRTVYWHRQVRAATSMIKKALLEGLESKVIAREELYDLDDQGLFTLLREKTGSDKTRNALAEAVWKGNFYSVAAEIPFIEADHACLRDINRRSHYEEQVAEILRRAGIPLGSGDLIIDVPEPISFETRTLCV

SEQ ID NO: 92740 - protein, 144 aa, Unknown
  Obtained from environmental sample
  DOMAIN (8)...(126): HEPN domain
  misc_feature (1)..(144): Xaa is any amino acid
MSTDSLDVKKWIRFAQIDFDSAVALAKRFRPPIEVVSYLCQQSAEKILKAYTIANTNTLIKTHILKDLLKASIQYCSDFDKLKVVCERLTPYITLARYPSNIELTEHDMKQAIKDAQDVLEFTKSKLTEMGFGFAEINKLVSPR

SEQ ID NO: 92741 - protein, 134 aa, Unknown
  Obtained from environmental sample
  DOMAIN (8)...(127): HEPN domain
  misc_feature (1)..(134): Xaa is any amino acid
MNTNNTIVGEWIYLAQMDYDHALKSANTFHPAPVEIICFHCQQAAEKILKAYIAANGDTPVKTHDLPILIKYCNRYSSDFDNYADFCYTLTTYISDTRYPPKLSLNESDMKQALNHARKIMEFTKSKLTEMGFG

SEQ ID NO: 92742 - protein, 282 aa, Unknown
  Obtained from environmental sample
  DOMAIN (1)...(136): BPG-independent PGAM N-terminus (iPGM_N)
  misc_feature (1)..(282): Xaa is any amino acid
AYARGETDEFVSPTATKDLCTIKDGDGIIYFNFRSDRARQLSHALVDPAFDGFKPKFRPKVKLVTFTHYDAGLDPYVSVAYPPQNLAKIFGEVISEKGLKQFRTAETEKYAHVTFFFNGGREEPFPGESRRLVDSPKVATYDLMPEMSCHQVVRGLIESIESGEYKVVICNLANGDMVGHTGVLDAAVSACTVVDDSVRKVADAVLRMEGALLVTADHGNSDIMLDEHGHPHTAHTLSLVPCAIVAKGFEHRPLRSGGALCDVAPTLLKLLGIDKPNEMEGT

SEQ ID NO: 92743 - protein, 329 aa, Unknown
  Obtained from environmental sample
  DOMAIN (269)...(302): Tetratricopeptide repeat
  misc_feature (1)..(329): Xaa is any amino acid
MSGLIPILLAVLLLGLVVIGVNFILGRSKGGVKRLKGRDTIIREANKKLVQNPRDHEALLAIGDVYYQEENWDLAFKTYETLSELMASHPAMDEFLINQRSGVAAIKLNLPEEAYKALNTALAINPSDFEANYHMGSLEFQRKNYEKAVQHFQKARIRDPEHAPTLRGLGHALFKIKKYKEALAFIRKAIDLAPDDKESLYTLGECYFEANQTEQALKIFAHLRADPAMGPSACLFSGSISMNQHQYPKAIEDFEIGLKHENIKPEVLIELQYRLGTAYLKENEIGKAIALFREIQAVNPSFKDVNTLIGRYQELNANKNLQIYLMAPQ

SEQ ID NO: 92744 - protein, 466 aa, Unknown
  Obtained from environmental sample
  misc_feature (1)..(466): Xaa is any amino acid
MKNKLIACLILILMFLSVTSVFAQEVPKAPAAIEKTLKGMNIVIGLWWRYYDTSQYPPSNQWVGSDYQEKQLEYRKKLLQKYKFTMTEKEIASWERMGQITATSIMAGKPAASIFVLQPDWALALYRQNLIYPVGKSKAVDWKATTPIEWNRAVTSAFTFKNGRTQDAYAFAEGYGGSYHAACVFFNKRLFREAGFPDNYLYDLQKSGQWTWDKFLEVAKKLTRDINNDGIPDTYAMPADLSTEILDAFVSGNGAMYVDKNKNTGMLELATKRPEFIQAVQFYMEVRDAKVMKPKPPGENTPWNWHIPEFNDGKVAMRIDQQYLATNDLRNMKDDWGMVLPPKGRNPKVKNYVVFNDENVRVIPAKGYTDAEIDAIIWAYQAWVTPPDDRWQQSEYPNYRDRRAVDETVAMIRDQKLWQWKYHLHVPGLNRGGIAWEIWWHDGQPAQLVEKVTNNWNALIADANGL

SEQ ID NO: 92745 - protein, 56 aa, Unknown
  Obtained from environmental sample
  misc_feature (1)..(56): Xaa is any amino acid
ELENEIDLNRDKLRKLGRKRLESGKNVKTELLFIDIVRRIEKLGDYCLEIAEILAV

SEQ ID NO: 92746 - protein, 400 aa, Unknown
  Obtained from environmental sample
  DOMAIN (117)...(397): Phage capsid family
  misc_feature (1)..(400): Xaa is any amino acid
EKELILEGIVKTLETITVQETSEVESLKSTIKSLREEIKGQAASPKELSRREMLYNLGKGIAAAWAGDYKTLSELAFTPNMGSETWTNPKDVTKSEKGWTVGKATIGEPMGNMGTGDKFLINPIYETTIMTDAEKKSVMMPLVSHRPMLGPSIYLPTRDRGGVQLKWNTSYGQKIEGSKPQGAGRVELKAHTLAGFIPWFDEFEEDVFTDLGAMFVDEFLETYGQEFDRQCLLADNDPFTGAMSCADVTKVTIAGNSIDDLAWKDFRDAVYRVPAEERKDCCWFLNETVLNHVANIEDTTGRPIWRRPTEAMPGRLDLYPYHEVSILPQIADIEEDQAFAIFCNPKRIQHGNRRGIELKKFDATTESLEYGELFLRFRKRDGFLVTRPKGNMVILKTKAS

SEQ ID NO: 92747 - protein, 837 aa, Unknown
  Obtained from environmental sample
  misc_feature (1)..(837): Xaa is any amino acid
ADAPADNAVSALDDFLKEIDSSPPPPEPDTGSDDLSSFLSGMQDQGAADTPADTPADDDLSSLLGGGQDETPPDFSPDDDLSSLLGGGQDETPPDFSADDDLASFPSGGQDEGLPDFSTDDLSSLMGGDQEEAAADTPADVPGDEGGIPDDLLSGFSDEVESAPDDTGLPDFSQEDFGAEESGADEIQEEPESDDLDGIDLGGESRDSVPDTPAEADAGLGDLGDLGDFNVDSIDSGASDESPESSESADSGSETDTSLPDFPDFDGIDLGGESQDSPKAAEEPEADNQDLGSIDLGGESIDFTPEAASDDFSSDSLADFNLSSGDDLGAPADSFDTSGADDSALDTNFDIPASDTDFSGAGDTAPDTGADAGAVHEFGDLGADFASDSIELDTGTGAGAEVEGMDSDSGFSGGDVFGGDDFSLTGLDDILNKTKVSAPKPVEKKGLFGKKKQKEEEVIKAEDNVDEISLSQEDVDNLLKTLSNYPLNLRITCEELIAEQVILPEQLSKLIRLLVNGAPVRETAAHVEVITGKPVIIPRSFEKSSGAAFEAEQASFAYIFVHNLLPVIRLFTFIALMAGSIMYLSYKFIYIPLKAESLYKRGYERIPEGEYQRANELFHDAFTLHRKKKWFYAYAEAFRDQRRYMLAENKYDELLRYYPRDKKGVLDYAALNTYYLMNYEKANKLLQRELLDYAPNDYDGLLAAGDNFLDWADSNPQKFYDHYEDARFSYARLIEQYGWQPQILERMLKYFIRTDNLKETLQLRVWFENDPKRRKLSTPTLAELGGYLLDKQLEKTPGTVPDPYIESIESVRDMLIKAVMQDQYLPESHYHLARYYQ

SEQ ID NO: 92748 - protein, 164 aa, Unknown
  Obtained from environmental sample
  misc_feature (1)..(164): Xaa is any amino acid
MPAKQYIVTLTKEERITLKEMLNKGKHSAEKRKRAQALLLAEKDYTDDMIAERTGLSRRGLEQLRQRFVEEGFEVTLTGKPRGHRQKALGGADEARLIALVCGPKPDGRTRWTLRLLADKWSALAHTETKTISRETVRRALKKTKLNPGAARNGVSRLKGSLSL

SEQ ID NO: 92749 - protein, 403 aa, Unknown
  Obtained from environmental sample
  DOMAIN (2)...(382): Transposase, Mutator family
  misc_feature (1)..(403): Xaa is any amino acid
MAITKEVLDELLKGCKGADDFYGPDGLVKQLSKALIERMMEAELTEQIGYEKSESGEKTTTNRRNGKSVKTLRTDQGPMEIDIPRDRDGEFTPKIVPKHQREWRGFDNKILSMYALGLSTKAIQENLKEIYNVEVSPELISRVTDEVKGLVEEWRSRPLEAMYPVIFLDALRVNIRDEGQVSKKSVYIALAVRLDGQKEVLGMWIERQEGSKFWMGILNELKNRGVQEILIAAVDGLTGFPDAINAVFPKTEVQLCIVHMVRNSVKYISYKDRKAVTSDLKEIYLAPSEEAACNALDRFGEKWDGKYPTISRSWRSRWNEVIPFMKFSPEIRKAIYTTNAIESVNYNLQRNLKTRQSFPNDEAAMKLIFMILRRISKKWTMPIRNWAAALNQFALIYGDRVPL

SEQ ID NO: 92750 - protein, 173 aa, Unknown
  Obtained from environmental sample
  misc_feature (1)..(173): Xaa is any amino acid
VFTTGKKITRDHKELKLSDAFKDVDGLKKAGNKKIPLELIVQVFNVNHGHNPVILKKSETLNNYSMFIGKIRECQKEEDSLEKAVRSAIIYCIKNNILKEYLEAHASEVLNMLLTEWNQDEAVEVAREEGREEGREEGREEGREEGREEGREEILNLFEQGLSIDEIKGRLKR

SEQ ID NO: 92751 - protein, 195 aa, Unknown
  Obtained from environmental sample
  DOMAIN (11)...(44): Tetratricopeptide repeat
  misc_feature (1)..(195): Xaa is any amino acid
RAEQGNEHGIAITYHELGIVAQKREDLDAAEDWYKQALAIVQKHGNEHGMAITYHELGSVAEERGDLDAAEDWYKHSLAIVQKQGDEQGMASTYHQLGTVAQERGDLDTAEDWYKRSLAIKQKQGNEYGMALTYHQLGMVAEKRGDLDAAEDWYKQSLVIFERFNDQHNANIAKKSISRLQILKSDRPDGSETKA

SEQ ID NO: 92752 - protein, 266 aa, Unknown
  Obtained from environmental sample
  DOMAIN (29)...(256): DEAD/DEAH box helicase
  misc_feature (1)..(266): Xaa is any amino acid
MPSLDPEKIIASLQEGGAVASRLNSYEPRQAQLDLLELIIRAFNEDAHVMAEAGTGVGKSFAYLLPAMHFALENKEKVVISTATITLQQQLYEKDIPLVASAIGADIKSVLMKGRGNYLCLRRLDEAIQEPPLDDFDFDEFKHITEWSKSTKTGARSELSFMPSDITWSSVCSESDLCLGNHCSWRESCFIFKLRREANNAHIVVVNHHLLFADLAARFQGAGYENAVVLPPFNRLVIDEAHTMENSATSFFSTEFGRTGIFRQLS

SEQ ID NO: 92753 - protein, 128 aa, Unknown
  Obtained from environmental sample
  misc_feature (1)..(128): Xaa is any amino acid
VKEKLFSWIDNSTSLAVELETELTKRPAISPDSGGEGELDKCLFLENWLKAHGIAHIERYDSPDSRAKGGVRPNLIATIPGTEDREHLWIMSHIDVVPPGEAKLWNSDPWTVRYDAAGKRLYGRGTED

SEQ ID NO: 92754 - protein, 185 aa, Unknown
  Obtained from environmental sample
  DOMAIN (10)...(168): GrpE
  misc_feature (1)..(185): Xaa is any amino acid
MAFFDFFWEKVKYYTDTSAQNAVSGINEYLAETSERLRRIETRQKETNIQLEEIDELLQSGGNETALIDALIALADTIGDFYFFAAADQNSPLFEQAQMMWNRAKSALEAVGLDVIEAENEPFDFRLHSAESAEQNMEIPNGYVIKTLKFGYIYQDKVIRRAAVVINKIERTERLDNEPPNIIYL

SEQ ID NO: 92755 - protein, 433 aa, Unknown
  Obtained from environmental sample
  DOMAIN (414)...(433): SEC-C motif
  misc_feature (1)..(433): Xaa is any amino acid
VNYYELLNIERGADANEIKRAYFSAVKLHSPDSDPEGFKAIRIAYETLYDPKKRTEYDAYFVTSGDVQNDLLAARELIRENKYKQASEFLTELSGKNPDSTDVKRLLAEVLWYMKKSGTADKMCAEIIEKNPSDGETWLLRAKIAESRGHMDKAGGYYDDAVNADPSNPRAWIEYMHYALNEAKRKVPNIFYRAMQQDINMFRDKYIFYIVGAHNNNLFNIEDNLKYYDKFAEFFINDKNPDEEIYTHIMTLIPKFLEKAELVPFVEKILPSLEKSKQYRDEDEKIFMYIRMTIQLFKLQSDKRIHDVLNDLTVFLFYDEKDKNEKLGMEIYIVYNLSLLRPAIKILMNEYPELFKLNQAFYLDALNEKKEDYLLDKYIAIHKKIKPGFNFYYDGDEDTEDVAPFKRESPKIGRNAPCPCGSGKKYKKCCGAK

SEQ ID NO: 92756 - protein, 549 aa, Unknown
  Obtained from environmental sample
  DOMAIN (289)...(507): Bacterial extracellular solute-binding proteins, family 3
  misc_feature (1)..(549): Xaa is any amino acid
MTFSSCGKPAVNQAGKHTEDASHLSFRDVPGITEDEIKAIENLQKNVDHLVYGSTLSTEVYISDDGKIGGFVAMFCDWLTTLFGIRFQPVVMEWGDIFAQLETGEVDFSCFTPTEERLNMYFMTDPVAVHSLKIIRIKGSPPLDRIALTRPIRYVFLENPVTIKVAADTFQTGTYEIILAKDNDKVYQLLKSGGADAFINYNVGEAAFDVYDDVAIEEFFPLTFNTMCMAAKNPELAPVISVVTKALRNGGIQHVNKLYNEGQNNYIRNKFLKSLNAEEKAYLQNTSVVSVTAAPWFYPLDYYNKFERRWEGIAFDVLDEVTELTGLSFELVNSPDASWAEVFQIFNDGAAICLDLIASPERLNRYLWSKYIYLSENYALVSRYNFPNIGISEIQYSKIGLIKSTAWANMFQEWFPEAANTTMYDSQDEAFLALDRGEVDLVMAGTNALFALTHYYEFSNYKANYVFNSTIDYVIAYNKSEQVLLSVIDKALAYIDIKTISKRWESKTFDYQSKAMREQRPWLIGAICLSFGALILILVFYRKNHLMKN

SEQ ID NO: 92757 - protein, 698 aa, Unknown
  Obtained from environmental sample
  DOMAIN (513)...(595): Helicase conserved C-terminal domain
  misc_feature (1)..(698): Xaa is any amino acid
MSILDKMLYKMFGTPHARKVKRLQPTLDAISAKHLEFQKLNDSDLVAKSEEFKEKLKNGQTLEDIKVDAFAACQEACDRRLGIFNVFDPQYEFDFSKLSEPRQREAEAAKELLANGTFEWEVHLSAEFYAEIREMYPESVKPFRMMPFPVQIIGGLILHEGAIAEMATGEGKTLAAACPVYLNALSGDGVHIVTVNDYLAGRDAKNMGRVYKFLGLKVGLIIHGLDNDQRRESYNSDVIYGTNNEFGFDYLRDNMAVHKEDLVQRVLNYCIVDEVDSILIDEARTPLIISGAAEDATDKYRKANDLVNRLKRDDDYTIDEKHKNVQLTEKGVTHIESIMGIKGLYGEHSDWVHYILQAVKAHNVFVKDVDYIVRDGEIVIVDENTGRLMEGRRYSEGIHQSIEAKENVQIRRENQTLATITFQNLFRMYKKLSGMTGTAETEATEFLKIYNMPTWVIPTHKPCIRNDMQDQIYKTADAKWKSIIADITERHAKGQPILVGTISVEKSEKLSKMLRIANIPHDVLNAKNHGREAEIIQYAGHKGKVTVATNMAGRGTDIALGPGVVELGGLHVLGTERHESRRIDNQLRGRSGRQGDPGSSQYYLSLDDDLMRIFGGENVKKIMDRFGFKDDDVIEHPWVTKSVRNAQRRIEGQNFDARKHLLDYDNVMNEQRRVIYSLRRSILMGEDIKPKFKSQEDQ

SEQ ID NO: 92758 - protein, 313 aa, Unknown
  Obtained from environmental sample
  misc_feature (1)..(313): Xaa is any amino acid
QRLGFIIENGLYQGKKDSIGYDGIWTFKDNYSFIVEVKTTDAYRINLDTIAEYRKKLIESNKILKEKSSILIIVGRQDTGDLEAQIRGSKHAWDIRLLSSDSVLKLLVLKESLNDTKTIQQINEILKPNEYTRIDKLIELIFLTSQDIQINNDQENNIEENTDLQKNENIKQEKVNFNDKCVIKIQKHLNKKLIKESRTAFSDKDKEIGVISIVSKKYIRNNDERYWYGFYPYYVDFLKNYKNAFISFGCGSEDIIFLIPLDIFEPLLSNMNTTVRENGMYWHVEIKNIDNNYYILQPLLKNNIKMEITKYKI

SEQ ID NO: 92759 - protein, 281 aa, Unknown
  Obtained from environmental sample
  DOMAIN (2)...(239): PHP domain
  misc_feature (1)..(281): Xaa is any amino acid
FFCDGKDDIETFCRAAYEKGLDSIGFSAHAPIYKKTGIRTKWHLKDERLEEYLDSVRSAKKHWEGKLPVYLGMEADFIPGMTGPADKEYREMGLDYVIASVHYVVPPKGELFTVDGPTEEVEQGIKEGFGGDPMGMVESYFNSEEAMIRAGSFDVLGHPDLVKLHNKENKLFNPQSDFYLKRIAALAALLAETGVPSELNTGGINRDKISECYPSVDFLKCFRKHNIPIVINADAHNAKDLDGNHEEARKAMLEAGYTETVLFSGRTGDKAVWKNDKLRIP

SEQ ID NO: 92760 - protein, 508 aa, Unknown
  Obtained from environmental sample
  misc_feature (1)..(508): Xaa is any amino acid
AQGAKWIEISGGLEKLETTDNPDEVSDIAVALDSTGSVAIYASQSFRPRLYKLDWASKSWNLLWSSGAVFGPVDSLQAGRNYLTFVRDSGVFALQLNMGNGAVYYRQDLTEAIDILPGKASCAVFSGSETICLSELWLMSERSSVVRSSTESRQASFNMVSQGANDKEGLYLPVNHAMDPGSLRPYLQTIESRKLNMVVIDMKDDYGRLRFTPNDPSMLNLGRVFRPVDIDAFLKTMKERGIYTVARIVVFKDPEAARKEGEKYAVWDGVTNKAWEGYYDTRRKKTNGAEEPDSAHVTAILPSNDPDYEILRTWYDEKWVDPYSEVIWDYNVSVAQELCRRGFDEIQFDYIRFPTDGINLDNARYRWRDSGMDMDSAIESFLRYARSRITKPISLDIYGANGWYRTGARTGQEVEILNKYVDVICPMYYPSHFEQTFLAQSPPEDRPYRIYYFGTQRTHIIARGQVIVRPWAQAFYLNVSYDRKYYNIDYVRRQLEGVRGAGKGGLTY

SEQ ID NO: 92761 - protein, 244 aa, Unknown
  Obtained from environmental sample
  DOMAIN (116)...(243): AIR synthase related protein, C-terminal domain
  misc_feature (1)..(244): Xaa is any amino acid
THNHPTEIEPFGGAATCLGGAIRDPLSGRAYVHQAMRVTGGGDPRSGLRNTLPGKLPQIKIALESAAGYSSYGNQIGLATGQVAEFYHSGFLAKRMELGAVIGAVPEAWVRREEPVAGDLVILVGGRTGRDGIAGATGSSKVHTGESVESAGAEVQKGNAVEERKLQRLFRNPDVSRLIKRCNDFGAGGVSVAVGELAEGIDINLDAVPKKYAGLNGMELSISESQERMAVLCSSGDAEAFIKA

SEQ ID NO: 92762 - protein, 241 aa, Unknown
  Obtained from environmental sample
  misc_feature (1)..(241): Xaa is any amino acid
VIGVIEKIRKAAEDLDEAALGLCGSEGVFRLTIKKDETIRAVLNTPLLTLKKHIRTVVGLVRDLLEKIPEESQNQKDSRNPKDSSEEGLIWEIKAILRNLENTETVCASFLEYSENPDKVIWIERYSGSRNNTDWARFSVTPLEVASNLKESLFDPHKTVVCVSATLTVGQGDHGFDYWNARSGLNLVEDKAILTGIFPSPFPYDSSVLLGVPSDAPMPTENGFSAFVDNAKKASQKLPEV

SEQ ID NO: 92763 - protein, 364 aa, Unknown
  Obtained from environmental sample
  DOMAIN (44)...(364): Glycosyl Hydrolase Family 88
  misc_feature (1)..(364): Xaa is any amino acid
MDFQLKGSDREWAETIFVKLNGKLKAECIRLGDTIPYIARDGHYSDIDTGESIYWWTNGFWPGMLWQMYHATNDAAYRESAEAVEKRFDKALEGFDGLHHDVGFMWLHTAAANYRLSASADSRRRALHAANILAGRYNPAGKFIRAWNGEGRAGWIIIDTLMNIPLLYWASKETGDPRYSQIAQCHADTALSVIARPDGSCNHIVVLSPETGECLEIPGGQGYAPGSSWSRGQSWAVYGFALSFRHTGYAKYLDAAKRTAHYMISNLAVNNWLPLVDFRSPPEPLKYDSTAAMISACGLLEIAEHTGEHERALYVNSALNILKTCEKTFASWDNETDGVIGGGTAAYHGGSKDTDVPIIYGDYF

SEQ ID NO: 92764 - protein, 351 aa, Unknown
  Obtained from environmental sample
  DOMAIN (26)...(197): Sigma-54 interaction domain
  misc_feature (1)..(351): Xaa is any amino acid
MNTDAIPLAERMRPTSMADVVGQPHLLGQDGILSRLTMSGRLPSMVMWGPPGTGKTTIARLLAIASGRGFLEFSGITGSAADLKKFLLENGSSPLFRGLAPVLFLDEIHRYNRSQQDLLLPFLEKGEVVVIGATTENPAFYLNPALRSRCQLVPLNALEPPNIIKVLARAREKYYQGQSIGGEILGYLSQWAGGDLRAALTGLETYVGMQEDSRNLDALRRVLGGRVLFDRADGHYDLASAFQKSLRGSDVDAALYYLSRMIIGGEDPRFIARRLMVTAAEDVGNADPQAFILAECVSRAVERIGWPEARIPIAQAVIYVANAPKSNATIMGISSALEAPDEPMPPCSGIP

SEQ ID NO: 92765 - protein, 268 aa, Unknown
  Obtained from environmental sample
  DOMAIN (113)...(157): RHS Repeat
  misc_feature (1)..(268): Xaa is any amino acid
SCGGDNDNGNGNVNGNGNGNGNSNGNNNGNGNENGNGNIQKIINEISYNANGVLSSYEEYEYDSKGNRTKYSIYSNGVLSQYFEYEYDSKGNLTKQSNYDANGVLGSYYEYEYDSKGNLTKQSNYDANGVLGSYYEYEYDSKGNQTKLSLYDANGVLGSYYEYEYDSKGNQTKWSIYIANGVLGQYNEYEYDSKGNRTKYSIYNANGVLSSYEEYEYDSKGNRIKSISYNSNNEVSGYTIYIYTSGVVLTGTSGDFLYSINMDGYYKH

SEQ ID NO: 92766 - protein, 243 aa, Unknown
  Obtained from environmental sample
  misc_feature (1)..(243): Xaa is any amino acid
FRITEGGNEIDDKEKVFLAPGHKYAGADISLLVERSQVTSGLRNEFAAASRDIGQAVKEIGNSKIVSVISSGEQPSREQHDPSLENALRGANNSYSPRWRFDLGLRLAATDLLAAAPKRSVVYIGSGNVGELAFERYSLSELSNYLANNSIVFNAVIVGTGQASAAVEYLCRETGGNIARLYQPQGIGPLIKSVAELPSGLYSYSFTSRLPTDFGRAWLPVEIEVKLMERSGLDSTGYYPPLE

SEQ ID NO: 92767 - protein, 303 aa, Unknown
  Obtained from environmental sample
  DOMAIN (188)...(264): Bacterial Ig-like domain (group 2)
  misc_feature (1)..(303): Xaa is any amino acid
VKPRPLLPGLSAAALVLALCACATKVKGLSLDRQTLTLALGQTETLKAHVQPNSAANLEVSWAIDNAECATVGNDGALVAKALGTATVTATTKDGGFTATCALTVVPSVSLVNALLILSPGDTRTLTATVVPEKAVEGGMEWSSSDTKVAKVSPKGVVKALALGTSTILVRALDGGQTAACLLTVAIPDKGVFTGKNALVLDWGRTHTLQDALPAAANQRLNWASSNASVATIGDDGEIRAISPGRATITVTSKDGTKKATYRLTVKPSNGEWLDLVDSKCSEVASALRQSRDRIGGLRQSQE

SEQ ID NO: 92768 - protein, 170 aa, Unknown
  Obtained from environmental sample
  DOMAIN (1)...(70): Helicase conserved C-terminal domain
  misc_feature (1)..(170): Xaa is any amino acid
IAVAHGRLKPGEMNARMSEFVSGEAQILLATTVIEVGVDVPNATVMVVDHAERFGLSQLHQLRGRTGRGAHGGHFVMISGSETERLRALVETSDGFRIAQRDLEIRGPGEFFGTRQSGLPRFQVADLVRDRQLLAQCREEAANTVARGLTQEQANWLEREKGRIGLAEVG

SEQ ID NO: 92769 - protein, 435 aa, Unknown
  Obtained from environmental sample
  DOMAIN (44)...(195): Thiamine pyrophosphate enzyme, central domain
  misc_feature (1)..(435): Xaa is any amino acid
MLTGRPGPVVMALPMDVQTRNVDAGLPPQGEFRTEAKPAGDPAYVEKAAQLMKKAKRPVILAGGGMLRSRCYDALVKLAETWGAAVITTMAGKSAFPETHPLYGFHTGSKGTLPGLELTRKADVILSLGARFADETTCSYRKGIAFNFPETKLIQVDIDAAEIGKNYPCEVGIIGDVGLVLSQLQEAYAPLAGSFNFKASPYTKEIAALKEAWFEKIKKDREKRFDKITISQLVGELSGCLPKETIVTTSSGNTQAQIFQEYAFTVPGTHLTSGGFSTMGWAFPAAMGAKLARPETPVVAVLGDGDFMMVMQELSTMAQYQIPVVVILANNSGWMAIKDLQNGMLGDGYVFGNDWIKNNEVYSPDFAEIAGAFGIQSKKISQPEEVAPAVNAAIASGKPAFIEVDVYRKFPQSGGDAYGWWDVPIPHYMPEAKNK

SEQ ID NO: 92770 - protein, 241 aa, Unknown
  Obtained from environmental sample
  misc_feature (1)..(241): Xaa is any amino acid
MTTIPLVISIVSLSLCVSGFFFLRWYISQRTDASRLLEEYRDEVYRLISEIDAATDRDSQLVEERIKNLRKLLDDTDKRISVYTRELQRSRNSEAIYKNLGRGIREALDSIPMASEKPLSPVEPVSSAALEATPPTETTTPSEIPAPVKTASTSQKTLPAEINELPFNDEEKGPQVSSVKRQKKHKTANLPPQKKPPEKSGIKMQIAQMALQGLSPSQIASRLGISLAEVDLALQLLNINR

SEQ ID NO: 92771 - protein, 135 aa, Unknown
  Obtained from environmental sample
  misc_feature (1)..(135): Xaa is any amino acid
MACVSYSKTINESYQKLQNYNAKTFDTEYGLVSYLDEGNGEAIFISHGIFGGYDQGYEHLNDIFGDSHRKIAVSRFGYPGSSLPSESTPGIQAKVFLELLDKLQIDKVFLLAASAGGSAGIRFALDYPERLKGLI

SEQ ID NO: 92772 - protein, 255 aa, Unknown
  Obtained from environmental sample
  DOMAIN (50)...(235): Mur ligase middle domain
  misc_feature (1)..(255): Xaa is any amino acid
MAAQSRLEAFNLVELAKKWKKTLVVVEDTLRGLQNAARIYLEKFPGLLKIAITGSSGKTTTKEIAAAIIGQEKKVVMNSGNLNSETGLPLSVFKVSQEHEIGIFEAGMNRRGEIAELAEVLKPHIALITNIGTAHIGILGSKEAIAEEKKAIFSRFIGKEKALIPLYEEEKYRNFLSQGVAGECVFYGPQSFTELGGLRDLGLGGTEITWSGKTVRFPLPGNFNLRNAFSALAIAREIPVSDEGIRKGLESVKPL

SEQ ID NO: 92773 - protein, 674 aa, Unknown
  Obtained from environmental sample
  DOMAIN (34)...(249): 7TM diverse intracellular signalling
  misc_feature (1)..(674): Xaa is any amino acid
MRILGDPTYLGTGVFFQTAPVYMDDYRVIERRQFNFINMVLCAVFAFTGVYYLMLYLSIKKRTEIFNLFFGILSILLFIYIICRQEWIYTLIPNSDITIRMEYGSLMLAIPMLGIFFESLGMKKITKTSLGYLIFCSLLCLTQILFCNQYGEEIILIWDLTALVYFSYILVYYIIYFRSRGRHKENIREGDIGESSDLHIGGILIGMVLSYLCGNFDILDALFFRMSIRLFTYSIFAVHIGMVFILSQRFSGMYKRLEQSNAMLENKVHERTLELEKQAIIALQASMSKSDFLAKMSHEIRTPMNAIIGMAELALREDRHEAAQEHIITIKQAGNNLVSIINDILDFSKIEAGKLEIIPVSYMLSSLINDTVNIIRMRLMEKPMRFFTNIDGNIPNNLIGDEARLRQILLNLLSNAVKYTDKGRIGLTITMDKQDNKHILLRMDVTDTGKGIKPEHQEKLFDEFVRVDAKKNQGIEGTGLGLPITRRLCTAMDGQLFMESEYGKGSVFTVIIPQGIETEERFAAVEEPEKKKILVYEGRTVYAKSVCWSLEKMKVPYTMVTNQNEFASALYSEEWFYVFSGYGLYERIKPLMEQEDSFFRGRKKPNLALMAEWGAEVFISNARFVSIPVQSLSIANTLNGKADRHNYFETSGVIRHSFTGARLWDPLESTCRHA

SEQ ID NO: 92774 - protein, 624 aa, Unknown
  Obtained from environmental sample
  DOMAIN (439)...(529): Helicase conserved C-terminal domain
  misc_feature (1)..(624): Xaa is any amino acid
LAAFFELVFDIPADHSFTYLIDDKAEAAAGKRAMVPFGKRDCLGFIIAQRESLPEGIKEDAVKKIRRVVDSEPLFDNNDVEIARWMAGYYLCSTGQALSAMIPSGRKMTVADISDNIEETEPRLSISDEQAAAISAITSANGTTSGSGTTSGSGGDNLPQMFYLYGVTGSGKTEVFLRAAQYMLNAGKSVIYLVPEISLTHQTADVIGKRFGSQAATLHSGMTPSARLAEWMRIRRGEAPIVVGPRSAVFAPVQNLGLIIIDEEHDGSYKSGNTPRYHARQIAFHRCQKEGARVVMGSATPSAEAWKLMSEGSIKRLDLSRRLSGGGMPEIKPVSLAGTTGCLSKELKDEILLTHQMGRQTILFLNRRGFAHFYQCPDCGWEQTCKRCSVSLTWHKSRGRCMCHYCGYSETPPSSCPKCGSINAGYRGFGTEMIEEEVRRTFPDLRLRRADADTAGKKGGLEEALLLFKTGMIDILLGTQMVAKGLNFPGVRLVGVIFADTGLHLPDFRAAERAFSLIVQVAGRAGRYFPDGKVIVQTLRMEDPVITRSCALDVDGFFKAELSQRRALNFPPFSRLIRFIIRSKDERRADDAVKRLAFFAKPLLPAGSDMLGPAECPIGIMNDN

SEQ ID NO: 92775 - protein, 328 aa, Unknown
  Obtained from environmental sample
  DOMAIN (52)...(178): ATPase family associated with various cellular activities (AAA)
  misc_feature (1)..(328): Xaa is any amino acid
MELFNDKNKSGDKNPLADRMRPRFLEDIIGQDHIVGQGRLLRRAIQADRLSSIILYGPPGTGKTSLAAVIANTTRAAFENLNAVLSGVKDIREVIDRADERSRLYSQRTILFVDEVHRWNKAQQDALLPWVENGTVILIGATTENPFFEVNRALVSRSRIFQLKPLGSNELMETVRRTLADKERGYGKWNVKFEEGAVEHLVEIAGGDARSLLNAIELAVETSITPWPPAAGTEIRISMEAAEESIQRRALLYDRDGDYHFDTISAFIKSVRGSDPDAALYWLAKMVRAGEDPKFIFRRMIILASEDVGLADPHALSVVISCAQAFER

SEQ ID NO: 92776 - protein, 256 aa, Unknown
  Obtained from environmental sample
  misc_feature (1)..(256): Xaa is any amino acid
SNRDAIFSAASPSRQDRILVPVANDGLLLWESLRRCPEGLSAAIVNTPAAKEALERYAAALDETDKPLIAVTEDILPDEKQSEEWFSCSQFDHILLRSARFAAPSAILADKAYSLLTKGGNLVLLSSPPRLGERISRILADECERQDLASLLEQAEKIFFENTTGAGLWDSAEIETAFAEKKFSVKFQTIEQKEERLITEKDISSWFNTDQSRWGSFMVKNLEKSVFSKIEEAVSLRIAKGPVLWRWKSILLTAVK

SEQ ID NO: 92777 - protein, 285 aa, Unknown
  Obtained from environmental sample
  misc_feature (1)..(285): Xaa is any amino acid
MSGPFDAALPPPYSGEWKQAERASPEDSPRLTSYQAPGGEAIQFVLKSFKFSGGQSMDTAEYPFGGLWTNEALNEKPQQLHIDGFVRCADYIQTRNALVEALRVTTGDSEPGYIDFPFWGRFPIVVIDYEVSETADEKGQCAVTLSFKRAGASAAERAASASVSGMGMALEAAIEDLQAAAVGSFEKALAGNADAGTAKTLSQAAAQIKTAMLSALGRIQAAQAKLNVISAEINGMLGLAAELVGAPRQLAQSLFNAAASIVGGLAEIKNSAAAYLPKGSPASSP

SEQ ID NO: 92778 - protein, 328 aa, Unknown
  Obtained from environmental sample
  DOMAIN (180)...(316): Thiamine pyrophosphate enzyme, C-terminal TPP binding domain
  misc_feature (1)..(328): Xaa is any amino acid
DKQPVFEEWAFQHPVNKLTGKKSDLGIITAGMGCNYYEENLEDFIAMRKKQGKKAPLHLHIGAYPLPGKLIRKLCESVDEVIVIEEGQNFIAGKLFGVTGGAFTDVKPLIQSGELDPDNVRAALGLAPRKSGLRTPANLPQRPPQLCQGCPHADSYETINKVVDALDSRPGKPDIGINSDIGCYSLGATPPYSAIESVICMGACIGMAKGASEAGLKHSLAVIGDSTFIHSGITALIDAVASDTPMTIIILDNSSVAMTGCQPTMVPSESLRSLLLGCGVKQEHLLELEARKQLIEENSGRLKKEIEYRGLSVVVFKRECLEAARKKK

SEQ ID NO: 92779 - protein, 249 aa, Unknown
  Obtained from environmental sample
  DOMAIN (6)...(179): short chain dehydrogenase
  misc_feature (1)..(249): Xaa is any amino acid
MDRGKNFALVTGASSGIGLAISRELARRRYPLLLVSNEEEKIVETALNIHGEYKVRAISLYMDLARKDSAQKVFKYCENNNIRIEILVNNAGIFFFRDINDTKPELIETVINLHIITPTMLSKLFAEQMIQGYLGENRKGYILNMASIAAWMMMPGITLYSATKSFLRCFSRAMRCEIHEKGVSVTTVCPGAVATGLYGLAPRYMKLGLRLGIILTPEHLARRAVKKMFQKKAEYIPGGLLTVFSFFLS

SEQ ID NO: 92780 - protein, 470 aa, Unknown
  Obtained from environmental sample
  DOMAIN (1)...(83): RNA polymerase Rpb1, domain 3
  misc_feature (1)..(470): Xaa is any amino acid
KKATIREDGLIETTAGRLVFNEEMPREIPFINYELKDKELRALIEYIFAEKGSWTTVKMLDAIKSTGYKYATVFGSTIGVDDIVVPKEKAEMIEKANKEVEAIQKKFNSGHLSPEERKNRVIEVWQKTNEDLANILMKTLEADRNGFNSIYMMANSGARGSRNQIRQLAGMRGLMAKPSGDIIELPIRSNFKEGLSVIEFFISTNGARKGLADTALKTAEAGYLTRRLVDIAQDVVVNEDDCGTINGIDQSAIKNGEDILEPLRDRIVGRYTLERVKHPITGDIIVNVNQEITKEIAAQIEEAGIESVYIRAVLTCEAEHGVCRMCYGRNLATNRTVDIGEAVGTIAAQSIGQPGTQLTMRTFHTGGVAFNISEENRIFLKHPVYVKDIAGAHVDKVDEETGVPTGVMLFTRKGHATVSRIMERHQLDSRDELLVENDQRVIRGVPIIKRGKEQILSQENALAMVIKNGK

SEQ ID NO: 92781 - protein, 263 aa, Unknown
  Obtained from environmental sample
  DOMAIN (57)...(221): Uncharacterized ACR, YhhQ family COG1738
  misc_feature (1)..(263): Xaa is any amino acid
VGIDTDKGEPNARSLRPGIPVYRYSDILMAFFVAILVTSNVASSAKIVDLGVSLFGFWGIPSVPLAFDGGTLLFPIVYVLGDVFTEVYGFRFARRVIWTGFIALSLCSLLFFVLARLPADAVWESYAGTAAFNAILGGMSTGGIALASLAGYLVGEFSNSMVLSRLKIYMKGRALWVRAIGSSLVGELLDSLAFVFFASLTGVFGWELFISLVLTNYLFKLSIEILVFPLTFITVRKLKKVERTDAYDVDVRYRLFYFGGKNG

SEQ ID NO: 92782 - protein, 276 aa, Unknown
  Obtained from environmental sample
  DOMAIN (7)...(181): short chain dehydrogenase
  misc_feature (1)..(276): Xaa is any amino acid
MKNIKDKLILITGGASGIGQLMAFAFAEKHARVIVWDINESVMKTMEDEARAKNIFIRGMVCDVSDRNAVYSQAQKLTADFGPLDILVNNAGIVSKKGENTVGPAFLGVPDESIIKVININALSLFWTSKAFLPSMIERNSGHIVTISSAAGMIGVKGLSDYCAGKFAAFGFDEALRMELRRMKSAIKTTVVCPFFIDTGMFEGVKTRFPLVLPILKKDYAVKKIVKAVLKNKKRLIMPRFVYSVYLLRLLPPAVMDWTANLFGISHAMDDFRGRA

SEQ ID NO: 92783 - protein, 407 aa, Unknown
  Obtained from environmental sample
  misc_feature (1)..(407): Xaa is any amino acid
MAEEKRLKEEEQKLIAEKERLKEEKRLREEQRLKEEERLREEERLREVQRLKEEELKLIAEEQKLKEEKERLKEAQRLKEEERQREEQRLKEEHQKIIAEEQKLKAEKERLTGKLRVITEVPQEEVVEEAPQEAPQEEVVEEAPQEAPQEKVAKEVPQEAPQEKVAEEAPQEAPKEEVAEEAPQEAPKEEVAEEAPQEAPKEKVAEEAPQEAPKEEVAEEAPQEAPKEEVAEKISKEDEKSIFGEPEEQKKKKGCFLYFIIIIFLLAIIAYCAKPYYIDIYYDYIGEKPEKENENAVVEKADTLQQNPEQNLGVSDSTENPSDTIVAKEEQDDKNAKKTEAAKKTEAPKKRTEAEKQTDDDVAQAIAAVLKSESKSEPEPAPKPVSEPKSKAKAETLNKGNLWDPLE

SEQ ID NO: 92784 - protein, 326 aa, Unknown
  Obtained from environmental sample
  misc_feature (1)..(326): Xaa is any amino acid
VSKSAVALAGFNEADADRLRKLIAKKAGGAKLGIYEKQFFEGCRKNRVGEDVIQKVWAMMLSFDGYSFCKPHSASYAMVSFQSAYLRVHHPAEFMAAVLSNQGGYYRPHAYIAEIRRMRLFTLGPDVNLSRWKYYGSGRDVVIGLMAIKGLSASGAKVLLEERDRGGDFTSLDDFSRRVSLNRDDIVALCPAGVFDSIACGLPRHLQARKLLSARSREIGNGELFAADDAPAYGVEKPVIAPTAKSVPKTANDLWEEYRALGFLRNNHPLALWRDEVMAVTHRVKASRIAEHMGQNVKMIGWPVTQKEVWTKDGLAMNFLTLEDET

SEQ ID NO: 92785 - protein, 319 aa, Unknown
  Obtained from environmental sample
  DOMAIN (122)...(287): Putative RNA methylase family UPF0020
  misc_feature (1)..(319): Xaa is any amino acid
LRPLLRSGPSGFEDASALGPPASWLSVQFLAYGMDARRELILDALEEVLSAPLLPGMEPLGAPTGIVERSGAKVRELEGLPLREGLVHGNFPPSGIVIFENDLPFAVHLEEGQKTGHFLDQRDNRRLAAACLSRLSQEEKNDGGPRVLDAFSYTGCFGIHAVRAGAQSVLCVDVSAAALETLKTNAALNGVSDRIKTIEADVFEYLRAAERRKERYDLIILDPPAFAKSRLSLEGAIRGYKEINLRAISMLSKGGVLVTSSCSQAVDEANFRKMVTEAAADAGRRLVETDFRRQSVDHPILVGYDESFYLKCGFYRVVD

SEQ ID NO: 92786 - protein, 294 aa, Unknown
  Obtained from environmental sample
  DOMAIN (191)...(294): L-fucose isomerase, C-terminal domain
  misc_feature (1)..(294): Xaa is any amino acid
MSVAIMRGKSYLSIGAVCMGIAGSIVSTDFFENYLGMRCEGVDEVEIIRRMSEGIYDKGEYEKALAWAKANCKEGEDTCNRKDLQKPRAEKDKDWEFIVKMTLIVRDLMVGNPKLKEMGFGEEALGHNALAAGFQGQRQWTDFYPNGDFTEAIMNSSFDWTGVRQPFVLATENDALNGTAMLFGYLLTNTAQIFADVRTYWSPEAVERVTGKKLTGRAANGIIHLINSGAASLDGSGRQSDKEGNPVIKPFWEISEAEAKACLDATTWVPANREYFRGGGFSSQFLTREGMPCT

SEQ ID NO: 92787 - protein, 281 aa, Unknown
  Obtained from environmental sample
  DOMAIN (1)...(281): 4-alpha-glucanotransferase
  misc_feature (1)..(281): Xaa is any amino acid
SFWQFCPLGPTGYGDSPYQSLCSFAGNTLLISPHELRAMGLLSEAELQTYPRLPEGRVDFGAVISEKEKLFRMAFDNFKPTPDFKAFCTKEASWLDGYALFRVIKTIHGEKPWWEWKEPYKKREKSVLANVSEKFASDLTYHKFLQYLFDRQWQKVRAFAAKQGISLIGDVPFYTAYDSSDTWMEPKYFLFDKKLKPTEVAGVPPDYFSKSGQLWGNPLYNWETLKKNSYSWWCRRIQKALEFADYVRIDHFRAFDSYWAIPYGNLTAVKGKWCKGPGKNF

SEQ ID NO: 92788 - protein, 456 aa, Unknown
  Obtained from environmental sample
  misc_feature (1)..(456): Xaa is any amino acid
AINEAIKSKTGEFDQIEKKNKKLRDQLEKNMGELRDDIKKTINSVTPARVALEPIVTNEILKSAGRYQQEDEFADYKRRSENIGNFCKTVKPKPASDLVDYLVKRVQQERPAYTHNEIVNIYTCIVQGFLTIFSGKPGTGKTSMCNIIADSLGLTPQASTVDDSRYVPISVERGWSSKRDLIGYYNPLTRRYDKSNMGIYDALMTLNTERENSPLPFVILLDEANLSPIEYYWSNFMAATEIDKSHNNPVWIDIGTEELIYIPETLKFIATINNDETTENLSPRLIDRAWVIKLPVIQKYENKALIAKGENAASDTILWRDLKAAFSGGDKPGESDSVKKQKENLTEIYEKFDAYQMEISPRIINVIDNYISVADGLMEKDRKNDPFNQEPEQAALDFAVVQKLLPKINDRYDVYEKLFNELLEICGDNNLVRTKKSINEMIDNKDRNMGYCQFLV

SEQ ID NO: 92789 - protein, 605 aa, Unknown
  Obtained from environmental sample
  DOMAIN (472)...(604): DEAD/DEAH box helicase
  misc_feature (1)..(605): Xaa is any amino acid
MAEFYHYCASFHGWQSAEQDEKTLAEMEHDFSRSHWTAICPAPVPGAEIFLQALDFDGGKKRYGLHEAFDYFVQFSAEDGTASYTFLFYLFKFLNLICTAGAFIPFVLSEDETLKIVWRPFETVPPVSGILKAIAVRECGLFTVKNNRKKEQIISGQSAVDILSCAFLNEWIRRKFIFIRGNFNKHGTDEEYRELLNLFFQGVRIDVSAPAQRSLPTAIDRWLSVLHIDFTAYQYALTVKEYGAKKTGKPEDNNTLQFALSMDVIVEQENGKKKIPIGQCKDLEALRAPIALSNYLPEIKDLTSIKKSDGSLVRLSEERLVSFLDSASGLLARLGIKVNLPKALARELKPRLVVKGNSSEKSLKTYLDLSTLQEFEWQIAIGDEVIPMKEFEKLVKQKRALVRFKDGFVKMNPEEFSRLLKKSKDQKPGFNDFLKAHFSGDSVLAFDSRQTIDNIFREQKFSIPDTLKAQLRPYQKRGFNWICSLLFSGFGCILADDMGLGKTVQSIASILRLKEEGLLKNKCLVVAPAALLDNWERELKRFAPSLRVSRYHGNRRIIDKKHDIFLTTYQTAVRDAEKLRNEAFSLLIIDEAHLMKNADTRIHAR

SEQ ID NO: 92790 - protein, 505 aa, Unknown
  Obtained from environmental sample
  DOMAIN (41)...(197): Type III restriction enzyme, res subunit
  misc_feature (1)..(505): Xaa is any amino acid
ARFHDFLKAHFSGDSVLATDTREIVNNLFREHDFPIPAALKARLRPYQKRGFNWACSLLLSGFGCILADDMGLGKTVQSIAVLLRLKEQGLLSEGSCLVVAPAALLGNWEKELERFAPSLRVSRYHGSRRNLDKQHDVFLTTYQTAVRDSAKLKDEGFSLLLVDEAHLMKNAETRISRTVKQLRSKYRLALSGTPVENRLEDLRSLFDFILPGYLGGADEFKKQFRVPIEVMRNRAQAEALRKITAPFLLRRLKTDKSIIKDLPEKIVINEYATLEKSQAALYESVVAESLQKSEQMERAERASLILTLLTSLKQICDHPRVFDKESPAISGLSGKAQLLLALLEEILANREKALVFSQYVETLDCLEKIIKSELGEPPLIYHGGLSQGARSEVINRFQNESAARILLISLRAGGLGLNLTSASRVIHYDLWYNPAVENQATDRAFRIGQKRNVFVHRFITKNSFEEKIDAMITSKQELADMTVASGESWIARMSHDELKALFER

SEQ ID NO: 92791 - protein, 298 aa, Unknown
  Obtained from environmental sample
  DOMAIN (57)...(115): Collagen triple helix repeat (20 copies)
  misc_feature (1)..(298): Xaa is any amino acid
AQGPKGENSDIPSIKEDGYWYIGEINTGVKAQGENGNTPYIKDGNWWIGDDDTGIAAQGPQGPQGPEGPEGPVGPAGSQGPQGPVGPAGPQGPQGPAGGTPQPQPTGNTLLIFQAYGGDNASGVTHHFVELYNNSNTAVDLTNYSLQYAAAKDGTTPESDWTVILLSGSIPAQSSYLILGKKNPVQTQRIQIADNSGDVNDNDFVLSNRGFKVALINGTAKLTAANPYNTDGNGTKAAGYIDMVGCSNSFSSNIITGYEGPASIETLPRNSAQEGIRRVNLTDTDNNNNDFVSVRYTT

SEQ ID NO: 92792 - protein, 191 aa, Unknown
  Obtained from environmental sample
  DOMAIN (39)...(110): Bacterial Ig-like domain (group 3)
  misc_feature (1)..(191): Xaa is any amino acid
MVFFYVFISVLFLFVTCLQPDDNIPFKKPVNLVKIEITSEPARKIYYVNDVMTTSDLAGLEVTAIYSDDSQKEVPLDELEISGFDTTEATEEQIITVIYEDQTADFTISINSVVLTEIKIVQQPKRTVYLTGDTLADINLSGLEVFAFYNNDTSSQIPITIDNITGFDSSTIGEKILTITYQDKTDQFSVV

SEQ ID NO: 92793 - protein, 482 aa, Unknown
  Obtained from environmental sample
  DOMAIN (154)...(481): N-6 DNA Methylase
  misc_feature (1)..(482): Xaa is any amino acid
MAKTKAKKEKEVTLETIMWNCRVVLRNKCSKSANRDAVLALVFLKFAGDKFEQRRQEIIKENGENRIFLEKASFYQAKNVFYLNETSRWDYIVKNASRDDIAILLDQALADIEEKNSSLKGALPQRFFSNLGVAKNDIKALIDEINKISEQRFHEKDLIGRVYEYFLQNFAIDEAQEKGEFYTPKFIVDLIAELIEPFKGKIYDPCCGSGGMFVQSVKFVDNHKGNRKNISVYGQESNPDTYRLARMNLAIRGIACKLGDKAASTFTTDQHKDLKVDFIMANPPFNLKNWRSPDELTTDYRWSGYGAPPVSNANYAWILHMLSKLDVSTGIAGFLLANGALNADGDEYNIRKQLVENDKIEAIIVLPREMFYSTDISVTLWILNNNKKARLLNDRSLRDRQNEILFIDLRTWNTNIYEKSYVMFDEKQIAAVKKIYTDWQSQQKGKYKNIPELCQSVKIPEIRKKDYSLAPSKYIEFIDHDL

SEQ ID NO: 92794 - protein, 547 aa, Unknown
  Obtained from environmental sample
  DOMAIN (44)...(107): FHA domain
  misc_feature (1)..(547): Xaa is any amino acid
MPIDLKIRTGFNKEDYRRMNNAEPTQTAATAAAAFLFPLDGRELAIGRDASCDICLTGIGVSRRHAVVRCDAAKPVVIDSGSTCGTSLDGAPITEAVLRSDSALTIGINVLRVDIDEVSISFTLLNSGGGDSALGAEGGVIRIGRAAENDICLPHPMVSRFHAIVKKGADGLSVVDQGSANATYVNGRSVRTRLLCEGDVVHIGPFRFYVTGGEFRRTDDISRIRIEAHSLGVRLGGKRLLDGVNLTIEPGYFVALLGPSGAGKSTLCKVLSGQLAPTTGRLFMNGFPAAKFGAVFARSMGYVSQQILLRPELTVWETLSDQSLIRLPDDSTEKERHCRAAEVLELMELTNRRDTRVSNLSGGEARRLHVGVELLASPSVVILDEPLAGLDPGLIGKFMQIFRRISDKGHTLILITHTLERLELCDRLVYIQTGKILFSGAPDAICGHFGVPSLSQVYEKSGDGTVVDAADGGRPAGDADASTHAAAASAQDLPRRDWTATLRHPLRALRFFSRQSYTLAERYAKVYVRDKRNMLLLMAQTPLITLL

SEQ ID NO: 92795 - protein, 460 aa, Unknown
  Obtained from environmental sample
  misc_feature (1)..(460): Xaa is any amino acid
SVCFSGDECYGNDRTQAQTNQRTETIDQSPDKIDQQAKRERTAQDVKDSIKQAKEWAAQLAKERAEQLAWEKKLRAEELAWERRERALQKERERIEREEDLAWERRRRAEEKRERAEQLARERADTLNGAVTAAQKLKEWWNTDFSTLIKSQNSKYPTPDEEGGLFEESGPLTDNNFKKSVFVKNTAYLKKMTGDITDDYQTYLSVRKDYANSPTFYFDMANWFYACGDKETAIRVLTSIADLELENASLYRLLGYRLKEFGEYALELFVCRKVVKWRPMEPQSYRDYALALADNGETQAALNWLNGLLTKTYSENIKNRSGGIGEVTVTEINGLIAKNPSLNKSKVYKKLLTDIPVDIRVVINWNMNSTDIDLHVVDPTGEECYYGRKETAIGGRMSADNRNGYGPEQFLLKKAMKGRYRIYVNYYGDRQVTNAGPSTVMAEIYTKYADKAERRQVICC

SEQ ID NO: 92796 - protein, 272 aa, Unknown
  Obtained from environmental sample
  DOMAIN (37)...(153): Vault protein inter-alpha-trypsin
  misc_feature (1)..(272): Xaa is any amino acid
MKTLTQRLVISAVTLFAGLGLSTANQPVLKVGGKEISDVYLQSLDIQVEVTGSIASTRYTMVFKNRTNGILEGELTFPLPDGRSVTYYALDINGKMREAVPVEKAKATEVFEEIEQRRVDPGLLERVEGNNFRTRIYPIPSGGTRTISIGYEEELSLENGELFYRLPMAYPDSIEKFTVKATVWKSGVKPIIADSADGFRFDKVGENYAASFSRENYRPDRALNFALPAPADIPRVMMQSAQGSYYFFASVAPSLETRKKQWSNDLAIIWDV

SEQ ID NO: 92797 - protein, 276 aa, Unknown
  Obtained from environmental sample
  DOMAIN (9)...(276): Quinolinate synthetase A protein
  misc_feature (1)..(276): Xaa is any amino acid
TGMNADRCAAIEEGRRYFGSRLTIMGHHYQEESVIRHTDRRGDSLELARCTSSVESPYIIFCGVYFMAETTALLARPEQEVHLPEPSAECSMALMSPPALLEKVLENLARRGRRVIPLAYVNSTLEVKAVVGRRHGAVCTSANAEKMLAWAMKEGDAVVFLPDRNLGANIADRLGLPEAERVLLDLRDKSGRIPEDAARARLFLWPGFCSIHTRFHLRQIERIRAEHPGIKVVAHPECSPEVAAAADAVGSTAFIIRYVEDLPAGACVAIGTEINL

SEQ ID NO: 92798 - protein, 289 aa, Unknown
  Obtained from environmental sample
  DOMAIN (3)...(289): AMP-binding enzyme
  misc_feature (1)..(289): Xaa is any amino acid
DDLRRLPFTTKQDLRDHYPYDLLAVPLESIVRIHASSGTTGKVVVAGYTRRDVDTWSEVMARSLCSAGVSAQDIVHVSYGYGLFTGGLGAHYGAELLGATVVPASGGATKRQVQLIRDFRATAMCCTPSYALHVHDTGMELGVDIAQLPLRVGVFGAEPWTESMRADIEKKLGIDALNIYGLTEIIGPGVAMECLDAKEGMHIQEDFFLPEIINPVTCEPLPPGEVGELVITTLTKEGMPLLRYRTRDMTSLDYTPCRCGRTFARITRIRGRSDDMLIIRGVNVFPQQI

SEQ ID NO: 92799 - protein, 255 aa, Unknown
  Obtained from environmental sample
  misc_feature (1)..(255): Xaa is any amino acid
MPVADVALGNSEENPGYSLEVQTPGHEPEQLVFSFKKVVYDPNALFSEVPASFNPIKAGLDEEKPVFVAYMAGRFISEKDSVLTNNIYSPTAHSAFEKTFTRTIDYAATVSWFNHVDAGEARAMRDLGLKTELPELKALREALSKALLGQYERPSMRGDPPELIIYKKGTKLAYKVSQLSDGYRAMLALVMDLARRMAQAHNDDGRPGESPLQHPAIVLIDEVELHLHPSWQQTVLPTLMGIFPNTQFIVTTHSP

SEQ ID NO: 92800 - protein, 174 aa, Unknown
  Obtained from environmental sample
  DOMAIN (1)...(149): Glycosyl transferases group 1
  misc_feature (1)..(174): Xaa is any amino acid
VFVFGAFRYYKGLNFLLAAVKATGIPVALLGEGGGEAALKARAEGLAEARFLGALPDEDKEALLSLCYGLVLPSHLRSEAFGLALLDGARHGKPLVCCEIATGTTYINVQGETGLAVPPADPAALKAALLALWADPALAARLGAGARQRYEKLFTAEKMVKAYMDLYGELLSSR

SEQ ID NO: 92801 - protein, 647 aa, Unknown
  Obtained from environmental sample
  misc_feature (1)..(647): Xaa is any amino acid
GAGLRDPDLVKADKLIDEKKHDEAILVLTDYIRRNPERFDNAQKRLKRIYQERENFDKTAEELINSLLNDPENQEKIYSLSTKLKSMENESSPLLSSFVSRTHEIAEFNVFRNRLINILETGRAQLDKGECEAALQTYASGMDLMRDEFFNEGYGITVENNIRRETERVNAVIGAFRAASTGFGAPAAELARAITSGNLNTTSEIINRLTPAMDRFIAQKQELYTALNAFDSALDRIRSANPETADRNYLSFLSILINGRQGESIQEGMSGAFETYWKNSINPVLTAITQNAITVNSTGITAINAGQYSNAVTALQRTGSFVNLSTLFFQKRRALNEKGNSPKVEFPGNTIMKDDIPAYITLRALSESANYLIQAANLAIRANTFSNTIHSVFTLWQEGKSGAVTAINGELQARNNAAAIRNEIDMVILNTAQSDNFLRSYHTTPYLNNAINAIDKIYTAAAALERQAAYYYYFIVDTELKRGITARTAELEKGKNFLNGQSRVRSDGSTVTDLFPVEALETLTAMLAALSADLERGNSAIDYYKNETRVVLTDENIAAIITGCEKSVGELNTLRGQGITLRNTANTRTTQAEAFRKEGERLFKEAQASYKAHNFDIARDRLQKASERFNSSLEVQESASLRLSWDT

SEQ ID NO: 92802 - protein, 828 aa, Unknown
  Obtained from environmental sample
  DOMAIN (438)...(703): Methyl-accepting chemotaxis protein (MCP) signaling domain
  misc_feature (1)..(828): Xaa is any amino acid
VKETQDNEKKTSIKVRYIIFSISLFLIIFIGGSAAFIFSMWKMLHSTVGYELEQAMELERAKLETSVNSEIAIALKMATSPLIQRHFLNPSDKDLKKIAFDEIDGYRRAFKSKSVFWSSGIDKEFYFAEDNHYTIDTENPDNYWYKMTLYETEKYNFNINYNAELHQTLLFINAPVFDAQHTPIGVVGTGIDLTEFVNNIYQNYKGGAALYLFNAQGEITGSKDVDQIKNKTTLDKALGDTGKIILERAKSDESQHFSVSNDVATVIGVPSLDWYLTAILPITMADALKSGMTVLFLLMMAAIAAILIISYIFILSLVRPMKNMVKMMDQIADNSDLTKRLEFKHLDEIGVLAHDFNSMMEKIRTFVGTIKYKINALTNTGYELSTNMMKTSKSVDQISADFDGMKSAMGKQEESAAEADKAVKVIEASIESLNKLIEDQSKSINTSSSAIEVMTANIHSVRNTLIENGKNVSELAEASENGKTGVQTVAEKIQEIARDSEGLLEINAVMDNIASQTNLLSMNAAIEAAHAGEAGKGFAVVADEIRKLAESSSEQSKTTAGMLKKIKASIDSITASSNEVISRFEAIDTGVKTVSTHELSIRNAMEEQEAGGKQILDSMGRLKEISVTVKKGAGEMLESGDNLNRQTSEFIEISNESMNGMNEIVNGAMKEIKSAVTLVDEMSAENSRNFEDLKAESSKFKVETGNEKKKILVIDDDETSLTMTKNMLEDNYDVTTVTSGTAAFDLIKKGFIPNLVLLDMYMPEMGGWNTLLKIRKLCESHKVHIAIYSSSEDPDGMAKAKEFGAVEYLHKPLSRTKLNEKVEQLLNL

SEQ ID NO: 92803 - protein, 288 aa, Unknown
  Obtained from environmental sample
  DOMAIN (13)...(77): Heavy-metal-associated domain
  misc_feature (1)..(288): Xaa is any amino acid
METIKKQGIQKLSFHVSGMYCKNCQNIIEKELKKTTGIHRAAVNYRSGRAVVTFDAGVIGFKKIQEVIENLGYQALEEGGKNQTLQSKTIPQIAGALVIILALFMLMRTFTTSSLAAAFPLAREGMSYAMLIVIGLLTSVHCVAMCGGINLSQTLIKREESKEKREKGRGNELAVSNEQLTMNNEQLAMSNEQLAVREKGIYSLLLPGVLYNGGRLVSYTAVGVLVGALGSAITLSGRFQGIVQLIAGIFMVIMGINMLGLFPFLRRIIPDMPKIFSKNMTDKKQDMA

SEQ ID NO: 92804 - protein, 70 aa, Unknown
  Obtained from environmental sample
  misc_feature (1)..(70): Xaa is any amino acid
MNIDNCVIKKYEKMTLKEIAKSPVYAIQGVSENDAKLLKEAFNVKTVADFANLKYVKWAQAICTLAEGEA

SEQ ID NO: 92805 - protein, 245 aa, Unknown
  Obtained from environmental sample
  misc_feature (1)..(245): Xaa is any amino acid
SRCAIKLGTYRVTFDVELNKDWYLELEAGTLTIIEKIDSVNNREDLADLLSILATNTPDTPYTIQLEVNNLYDIKYTLDDAAKYVTLDLSGSTINEIQSYAFYEEYYDSALVSYPCYFLTGIIMPDSVKSIGNNAFRGCENLTSVTIGENVSTIGNNAFRGCVSLTSVTIPDSVTSIKNEAFAFCEKLTTVTFLGNNLTTNSFAYNAFLGNLRENYISSSTNQGNSGTYTTKAPVNYDSTWTKQP

SEQ ID NO: 92806 - protein, 208 aa, Unknown
  Obtained from environmental sample
  misc_feature (1)..(208): Xaa is any amino acid
MRGLKKKHNRRFTLVVAGCMAQRLGETLKEKYPAVDYVMGTSARSIFPLILEAAEKGEKAALDLTENAVFSFSNSHLEEGQFRSFIPIMHGCDNFCSYCIVPYVRGREVSRDPENIAEEMRLVAERGVREITLLGQNVNSYFWEKDKMNFSALLKFVADTAGKSGIKWIRFLSANPEIFRPKQYGLWPKIPSSAAICTCPSSMAQTQS

SEQ ID NO: 92807 - protein, 423 aa, Unknown
  Obtained from environmental sample
  DOMAIN (67)...(420): tRNA synthetases class II (D, K and N)
  misc_feature (1)..(423): Xaa is any amino acid
SFPAETEKALADINTGTAAVIKGRLVPSPASGQAVEVAANSIVILGEAPADSRDNYPGYPLQKKHHSMEFLREIAHLRPRTNTFGAVLRLRSRMAFAIHEYFKEHGFQYIHTPIITAGDAEGAGAMFQVTTLDLEAAAKTGGAYGSTGKIDYDRDFFGKKTFLTVSGQLEAETCATALSRVYTFGPTFRAENSNTTRHLAEFWMVEPEIAFADLGDDMALAEDFLKFIFKKALDDCIEDLKFFDAHIEKGVIDTLTHVVNSKFAHITYTDAVAELEKAVKAGTVFEFNPCWGSDLQSEHEKYLTEKVAAGPVIVTDYPKNIKAFYMKQNDDGRTVRAMDVLVPRLGEIIGGSQREENLEKLIFRMTEMGMNVNDYSWYLDLRRYGSVPHAGFGLGFERLIQYITGMANIRDVIPFPRAVGQIK

SEQ ID NO: 92808 - protein, 355 aa, Unknown
  Obtained from environmental sample
  DOMAIN (27)...(157): Bacterial flagellin N-terminus
  misc_feature (1)..(355): Xaa is any amino acid
MRISHNIAAMNTHRQMGISEADGSRSMEKLSSGFRINRAGDDAAGLAISEKMRAQIRGLNMASKNSSDTISMIQTAEGALGETHSILQRIRELAVQSANDTNTDADRSELQAEVKQLLAEINRIGNTTEFNTKKLLEGSAKGVSDEIKGTLRVNNNSSLVLDNSKIAKMGEAVAGDKNWAFDGAYALVRTGKLKEGEFNAEGFMLVAPNGAQYKFDTLTEGGADVGVSVPGVIIFAEKNVGAGDTYIQFSSNAGVALAADYKSMAVGDIVTFIFSGYKAPSSNLANSFMAQIGANSGQTMFISIGDMRAQAIGVANIDISTKWGAATAIETVDNAIQTVSHQRASLGAAQNRLNT

SEQ ID NO: 92809 - protein, 349 aa, Unknown
  Obtained from environmental sample
  DOMAIN (256)...(327): Bacterial flagellin C-terminus
  misc_feature (1)..(349): Xaa is any amino acid
ALTLQGVNVTLGAVETDPGGGADPVPGVTQGSVTTLGAGSVLSKGSDVTFAGSKTLKILVSGKEVDIEYTAGATPGTDPGILKVNGELVADGKSITLEDGTILTNTDAVAGKLTVTEGRIKLVDGSGTAINKWTLMQDSTLADGSVIADTKGDVLVAGTVITDAKSFADGSITLGAEGKSVQFSQNADVILAAEYNNADVGDSITFIFSNYQAPSSQLNDSVMAQIGANSGQTAFVSIGDMRAKALGVADVDVSTKWGAATAIETVNNALQKVSHQRSSLGAIQNRLEHTIKNLDTAAENLQAAESRIRDVDMAKEIMEFTKNNILQQASQAMLAQANSQPQSVLALLK

SEQ ID NO: 92810 - protein, 370 aa, Unknown
  Obtained from environmental sample
  DOMAIN (69)...(290): ATPase family associated with various cellular activities (AAA)
  misc_feature (1)..(370): Xaa is any amino acid
ILTDEDQELTSQFTGDIPTPREIKIYLDQFVIGQDAAKKALSVAVYNHYKRIANPGKGGSTDVEIEKSNVLLIGPTGTGKTLLAKILAKKLRVPFAIVDATTLTEAGYVGEDVENILLKLIQNAGGNIAAAERGIVYIDEIDKIARKGENVSITRDVSGEGVQQALLKIIEGTVASVPPQGGRKHPNQEMIRIDTTNILFICGGAFVGLDKFIARRVVQHPLGFGAEAGVGEKSLKELFDALHPDDLIHFGMIPEFIGRLPIIVSLDELKREDLRRIITEPNNAIVKQYQASLAYDDVKLEFTEEAIDAIADTAIKQKTGARGLRAIVEKLMIDIMFELPSMKGSKHVIITEDVVKNLQTPIINQLQKSA

SEQ ID NO: 92811 - protein, 486 aa, Unknown
  Obtained from environmental sample
  DOMAIN (236)...(372): ATPase family associated with various cellular activities (AAA)
  misc_feature (1)..(486): Xaa is any amino acid
VAQYAEFTKKIGTEILSAVEKTENPEKLVNIIANAMSIKADRKIGLIRVADPASRLEKLLETLELENEIFGIQKNISGKVKSRMDKNQRDYILHEQLKEINRELGKDTTEDEFADLERSIEERRPGEEVLAKARKEIARLRKLQVFSPEAGVLRGYLEWITDLPWSEYSADTSDLSEAEKILNEDHYEMKKAKERIIEFIAVRQLNTQALIQTENAAVISQDQKSPAPLGIKGPILCFVGPPGTGKTSLGKSVARALGRRFVRISLGGLRDEAEIRGHRKTYVGALPGKIIQSMRKAETMNPVIMLDEIDKLSSDFRGDPASALLEVLDPEQNVAFTDHYLEVTYDLSRVLFITTANSLHSIPYPLLDRMEIINIPGYGENEKLAIAKQFLVPKALSENGLAPARVTFTDDALRGIIRYWTMESGVRSLEREIARCVRRVARQAVAANYGKPEGKPIGEFKKIVKSENLEKLLGRRKYKNEAWCSK

SEQ ID NO: 92812 - protein, 176 aa, Unknown
  Obtained from environmental sample
  DOMAIN (37)...(176): Bacterial extracellular solute-binding proteins, family 3
  misc_feature (1)..(176): Xaa is any amino acid
MGKLKLCTLVLALAFFAIGCGKKEPNGLEIIIKRGFLQVAVFGDDPPFGYIDHRGKNQGFEIVFAKRLAYELLGDSSKIEFIIVDPIGRFDVLTNGKADVVIANFTHTLERAKIFDFAHPYMKASISVISPKTTPIRNLSELAGKKLIVLRGTTSEKYFSEKHPEIELVTLGGRRN

SEQ ID NO: 92813 - protein, 159 aa, Unknown
  Obtained from environmental sample
  misc_feature (1)..(159): Xaa is any amino acid
MFLSEQVKTGAYSENMSLLSDVSLNLKKMELSLMESKLTLSNLMEFNNKEESFKNYFNGKMNWDSDILRIYMSSNEDSTQSPWFINAKEANGRVSFSMPYLDSPSNKILMDFSTNIYNNKGQDIGVVSHSFYLDKLARTFQRHKKSPEHEIYLLDYSGN

SEQ ID NO: 92814 - protein, 605 aa, Unknown
  Obtained from environmental sample
  DOMAIN (163)...(242): Cache domain
  misc_feature (1)..(605): Xaa is any amino acid
MPAINSFIKKITPKRPLYVQIIFTVFSYLIMVVLSYFFTRNIVDKYLKQNTENIFVSLQAQIMTDIMEPRITLESFSRTVRDMIINGDNAENLREYFNDMSNYLSQDKQSYVNFNGFMGYFETFPGGPVFIESSLWGNPLESARTEREWYKDAIVANGKIAETLMYHDSIYEDIMFIYSYSIFDGAGNRLGVVALRVKIDNIRKYIVNTVMVQGAYGMLISRDLVILAHPNEAFVGENARDSQIPFSIFSKELGSGIEINERPLISYKGEKAMASFRYLPNGWIMGIVTPKGLYYKSISYMAFILVLLGTALSSVLIFVLIRVDAARNKSDMENKHKTSFLANMSHEIRTPMNAIIGMTDLLAYEQLNRRQMDFVHDIKISAHSLLSIINDILDLSKIEAGKLTLNPVNYDFHALLDNVFSMFSYITQKKRLKFDYEVDLKTMPRYLYGDDVRLKQILTNICGNAVKYTEKGFIKFKVAIADNKLRFEIKDSGIGIRKEDIPKIFDTFQRFETEKSRNILGTGLGLSISKTFVEMMGGQIIVDSEYEQGSFFLVIIPVVLGNKEEVKLKKGLEEGQILLAPNAEILVVDDNEFNLKVAEGLLNLF

SEQ ID NO: 92815 - protein, 295 aa, Unknown
  Obtained from environmental sample
  DOMAIN (258)...(287): Helix-hairpin-helix motif
  misc_feature (1)..(295): Xaa is any amino acid
IKRASFTVKELADLTCEFYKRNYIEGLFLSSGIFADPDIVMEKLTETAKTLRTEMGFGGYIHLKVIPGTGDKMIREAGKWADRLSVNIELPTEKSLQCLAPQKSKKAIIGAMNDFSCLSREMEETKNKSRFLPQGKTAAVQFAPAGQSTQLIVGATNEDDRQIINLTSSLYNKFSLKRVYYSAFIHPGSIADKGNILDPRLPETSGPPLVREHRLYQADWLLRFYHFEAGEILTEDQPFLDAHIDPKTAWALKNLDFFPIEVNSADYETLLRIPGIGAKTARRIIESRRSRNLTI

SEQ ID NO: 92816 - protein, 450 aa, Unknown
  Obtained from environmental sample
  DOMAIN (64)...(298): NAD synthase
  misc_feature (1)..(450): Xaa is any amino acid
LPAGFSTIARTSDCEFAGVENAEKKIYGIQFHPEVRHTEFGDKFLENFVLDICGCKKSWSIKSYVPQISEKITKAAEGKKIFLLVSGGVDSTVAFVLLNKVLGQERVLGLHIDNGLMRLNESQQVMNFLKKEGINNLQICDAGKDFLHELQGVSEPEKKRNIIGETFLKIKDSEMARLSLNANDWIMAQGTIYPDTIESGGTENADSIKTHHNRVQGVLDLQEKGLLLEPLADLYKDEVRILGEELGIPKELIWRHPFPGPGLGVRLLCSNGKASGKSEILELKKAIDELSIKARLLPIKSVGVQGDARTYAQPLLIEGELSWETLENISTSLINRFKAINRSVWLVGRVSETAFETAEQYCTKEALDTLRLFDSICFNFLIENNLYDKIWQMPVVLLPLKIAGKPCIVMRPVNSAEAMTANFAKIDQSLLRDSLWPKLKEAWFGHFALR

SEQ ID NO: 92817 - protein, 424 aa, Unknown
  Obtained from environmental sample
  misc_feature (1)..(424): Xaa is any amino acid
KMAKLEFALAEKLRQTKSPKPKKDGAQVFLEALLLIMEGKRKEALPLLEEATALEKDYALFHFRLAENIFLLKDDCDDPQMLKEMEIALTLTQKENDEEKSAAKENEGLSGWVNNFAAQVALKKGNLNSAARHLEKARSVLGDLPAVRVNQGVLFYLQGSLDKALETLSADKKDDPDGIMANCAGNLLVRSRRFEEADEKYRQALSCQSDNVEYLCNRASCLMEINLYGEADNLLAKAHRKAPSPALLEMISYVAAKKGEYPRAEKACKSALEIDPNHAPSLISLGWIFIDQGKKREAIDVLRRLDNMALSDTSEKNREELRSSLQELFYMTIECASCKRDWKVLRESKPAPAIRLKAVPPDELPAGSCLDCGKTYCIGCAKEHLDSSGRFVCPVCGRTLKLVNEGLKQIVYDWAVKNSIANKE

SEQ ID NO: 92818 - protein, 277 aa, Unknown
  Obtained from environmental sample
  misc_feature (1)..(277): Xaa is any amino acid
VVTNVCGMDTSKVSGKHTTLCVAPSFTTHPDTTKKIRLEPLAPNFPELRVSASGSASLNYQWFYKSGYNGSWKPANTGYCGVYGGIFSFCNPLSSGSTNDTTYYRCRAYNTCGDTMSNVSGAHIVTTGNCVAGSAIDKLAANPRVPNAGLGAIWYGQEEIHEDHRREGGNYTVYYKLNENINKNTVTIGNQVWSGAVLAENCNKKTFNGGSSASLQYLADCRYGEDFPRAVGTNTSKPMGGDLFSWCAVVKYGKTLCPYPWRVPTAEDFRELDRGLI

SEQ ID NO: 92819 - protein, 412 aa, Unknown
  Obtained from environmental sample
  DOMAIN (243)...(358): HD domain
  misc_feature (1)..(412): Xaa is any amino acid
VKLGIFGGSFNPVHYGHFFLVDAAVSKLKLDRVVMIPAFRSPFKLEAENMEGSADDRLDMLAAAAAGDSRVAIDDCEIRRGGVSYTVDTIEDIAARYLPDGKPALIIGDDLADDFPKWRDSNKILELADIVIVRRNKPVSGNPETVYPFAHTLLDNEIMDISSQMIRDKIKTDRDWRSLVPAGARAIIEDRRLYGYNGSGQSSNLKFANIKFANIKFANDKDCSMEVILRIEDEARRVLTIERFLHSRNTALLAHDLCLRFGINPKMGYLAGIAHDLAKQMEPKLLLKMVKDDGLPVTEIEKGKPNLLHGRAAAVLLKERFCIHNKDVLEAVAFHTSGKENMSPLAKVVYIADKIEVSRNIDPALRKMCVNEDLDSILYAVLKKQIGKLQSKGVNLFEDTLRLLNKMKERAR

SEQ ID NO: 92820 - protein, 266 aa, Unknown
  Obtained from environmental sample
  DOMAIN (61)...(204): Cell envelope-related transcriptional attenuator domain
  misc_feature (1)..(266): Xaa is any amino acid
LSLSKTGASRLLLGLIILLIVLGAAAAVYTLRSNPVEDALAADRVINILFVIEEDKSPLSTYVLMYYPATRRAAIFDIPGDLGLLITKINRVDRIDKVYDSARIGNYENEIGKLLGIEINFSIVFSKENLISLVDLLEGVEIFIPTSVSYRDNDTLILFPSGITILDGDKAAVYASYRLPDEDNEMIVFRRQRFFMGLLDRIVNMNNNFKNPDAAKLYYSLFKTNMNRRTLVQLLDEFVSLDAYRTNIQSVGGNLREVSGQMLIIP

SEQ ID NO: 92821 - protein, 102 aa, Unknown
  Obtained from environmental sample
  misc_feature (1)..(102): Xaa is any amino acid
MVLNGAMEQEELALMSVDGQETVYDSDGESLPAFIFGDDDYEEDDDFEEEEDFEEEDDDDDDEDEDDYDDDDDLDDDDDDYEDEEDEDDFEEEDEDFDDFDE

SEQ ID NO: 92822 - protein, 276 aa, Unknown
  Obtained from environmental sample
  DOMAIN (202)...(275): GHMP kinases C terminal
  misc_feature (1)..(276): Xaa is any amino acid
MLKNAQNLTVLAPAKVNLHLAVLDRRPDGFHNIESVFLAVDFADTLHFELVERENSVEIVMEASSVPIPLERNLIFQALSLFRAKTGFSKGLKIRVEKRIPICGGLGGGSSNAASTLLALNKLADSALNRDLLLEMGASLGSDVPFFLHETSAARVTGRGEKIEALSPPHLFLTMVNPGFSSDTAAAYRLLDKKREGKEITLPKPVESIKAFDSFCNDFLPVFEEPEKSVYNEIISRLKDSGAEYANLSGSGSTCFGVFGDRAKAEQAAKALRNKW

SEQ ID NO: 92823 - protein, 367 aa, Unknown
  Obtained from environmental sample
  DOMAIN (212)...(367): GGDEF domain
  misc_feature (1)..(367): Xaa is any amino acid
MKNFLYTWRFYSFSREEYSECMNKLFINNLYNLRQSNMIVVIFAGIYSLVPLLIDSDKISFFACIATALIALLLSLYTNYKMQVASVNDKFVYIFTSLFYINIMAFAIFMSVRSGILWDSDKQVALFLFFLACSLLMFINPIIFNICLTFGAISVFIPLTFIYNKYITNAVYNTIDAVLAGIIGLYFTWQITKLRLGLELSTSMLEEERNKYLNQSTIDELTQLNNRRDFMQTFQRYLHNYRSYDDWLCIAIADIDFFKNFNDHYGHPKGDECLRGVGAAFAKVKENMGVYTARVGGEEFAMLWFEKDAAHADDVIKYFSGLIRDMNMPHAKSKVSDRVTVSVGVYVEQLGESSDVQTLYNLADKAL

SEQ ID NO: 92824 - protein, 266 aa, Unknown
  Obtained from environmental sample
  DOMAIN (34)...(188): Histidine kinase-, DNA gyrase B-, and HSP90-like ATPase
  misc_feature (1)..(266): Xaa is any amino acid
MQPDSQNQQQPQNLEFQTEAKQLLHLMIHSLYSHKEVFLRELVSNASDALDKLRFEALTNTAINAGAELAIRITVDKEAKTVTVSDNGIGMTREEAIENLGTIARSGSKAFLEKMTGDQRADSNLIGQFGVGFYSAFMVANRVRVVTKRAGSDGGAVAWESSGESSYTIGDAEKEGHGTDVVVYLKEDEAEYADLWQVRSLIKKYSDFIAFPIYLPNDKGESEVVNQTKPLWLRPASEVTPEQYEEFYHQALGGYGKTLCAMHSKA

SEQ ID NO: 92825 - protein, 422 aa, Unknown
  Obtained from environmental sample
  misc_feature (1)..(422): Xaa is any amino acid
MSDPEQCFPNLCAAIKEHAHKSDLPVPDVKDAPAGSMLSQILRNFSEIVAPKPLVLLFDEVDALEGPALIGFLRQLRDGFMGRGVGTFPVSIALVGMRDLKDYISAAKDGLPPSPMSPFNIKTDSILLGNFSRDDVQKLFAQRTEETGQQITGDALEYVWNQSQGQPWIVNSLFRRATMRVLREDDYSDVTLEHVESAREQMTLARETHLDSLAVRLRDAKIKKIIEPIIVGEINPDLGRENPDVQYVMDMGLIKWDTQNGLTIANPIYTEIITRNLNSGYHDIMPPPSAWKWQSANGSLDMDSLLKEFQRFWRRHSEIWDQKADYTEAFPHLLLMAFMQRILNGGGKMEREAAAGRGRMDLLVEYKGVKFIIEIKLIRSYDTPKEIHDEGLQQIAMYRDKTAPDAPAYLMIFDRREATKTL

SEQ ID NO: 92826 - protein, 308 aa, Unknown
  Obtained from environmental sample
  misc_feature (1)..(308): Xaa is any amino acid
KASPDIQTVTQNNSQNTSICPNCHAELPEEALFCPECGLSIKQRVCPKCGAPASATADICQTCGAWLLEGKCKFCYADLTSDDALFCPECGKPKDGIPCPHCGTLSIFDFCSNCGKPVTEEAIAELKHAQKEMAGKASPAAPETSAAQAAGKKTFGSNQDARRWYNAQAAAQTAGIETELAQLEALINSKPEPEEPEQIENETSPPARKSLFSDRQMESIRKTGAVVDEITRQRLEAERIAEEKRKAEEAERKRKEAERQRQLKEAQERKEALERQLRARAWRCNAYGTVHPGGPNECADPSRGGQWI

SEQ ID NO: 92827 - protein, 836 aa, Unknown
  Obtained from environmental sample
  DOMAIN (612)...(804): ATPase family associated with various cellular activities (AAA)
  misc_feature (1)..(836): Xaa is any amino acid
MQCVKCNTNNRSSAKFCKQCGTAISESKPAASLGLSIDQLVGFDEMKKKLSELQAILETKKHDNSGTRYSYDTIIIGSSGTAKTLISNLIANLFYKFGMIAKSKPEKIDGASLNGMSKKDIDSLFSKAKGGMLFIDNAQKLLDSEGKAMAAFSHFIDAMDANKDDPVVLMAGLPVGLREMVKSSESANKQIVNRFENIFIIPDYTPDQYVKITENELKKQSFTFSPEFSEKLLQRFRYLYKELKKPDNNIKSVNGYLALKEAQAIAGCYYLRKASDKIILPEDIKGNVDEKKSLQEIMAELDAIIGMAALKKEIKSLYTQLNQIAEMEKKGIKTDKPAQHFVITGNPGTGKTTVARLLGRIFEGLGLLDSGHVVEVDRSKLVAGYVGQTAPLTNNACDSAMGGILFIDEVYTLKQNDSDSFGQECIDTLIKRMEDDRGKFMVIVAGYKSPMEKFLTANEGLKSRFTKYFNLEDYSPEELAAIFESLAKKQRFIVPPETRVKIAAFFKDRCVRKTKDFANGREARNLLDEARKNQAERLSQAYIAGMSGEDTLTFLQEDIPGTTADKMVSIDEALKDLNMLVGLKSVKDAVTRITNSLQAQKLTGETETLAKHFVFTGNPGTGKTTVARIMGDVFKAVGMLPTNNLIEADRGKLVASYVGQTAKLVAQQCDNAMGGILFIDEAYSLKQGPQDSFGQEAVDTLLKRMEDDRGKFVVIAAGYTKEMEEFLASNSGFKSRFSDYINFDDYNTSEMREIFIGMCKKRKIEFAPGFDEALKKRLERLYAGRNAQFANARTVRQLFDKTRENVSGRVLAMQKTEEELKREILIMRPEDLDMTV

SEQ ID NO: 92828 - protein, 157 aa, Unknown
  Obtained from environmental sample
  misc_feature (1)..(157): Xaa is any amino acid
RKNWQNDQWREANQIRLMDDVFPKLEGSFSDGYPTDLGNFFPEREASLLPEDIELFKAYGVNSTNELMDKDPPPNSPWFPTWTMPNPPDGSPAQIALSRCEQTMKQRLPAMIIAPANQFESLWAAYVKEMNDNGLATYEAYMQDQLNKRIKDWGIKK

SEQ ID NO: 92829 - protein, 232 aa, Unknown
  Obtained from environmental sample
  misc_feature (1)..(232): Xaa is any amino acid
MNIKQSVNNFKTRVLSSYIMIPAVILALLLIAAISNNYLTNIINRKLLSNARTTLDALETELITDLKESRTALSKQSEYVRGMILNGAGEEEVRTYLYDTNEYILQNDGKRLLGFGGIFGCFNIFGGQMLDGQDRYLPEDYEPAEQPWYKEAVAAGGEIVYLPPHTGELTPVAVITYARGLFDNNGNLLGAIAMDTEFKRIREYIVNENLEKLWLGILLNEQYEYISQRNPE

SEQ ID NO: 92830 - protein, 478 aa, Unknown
  Obtained from environmental sample
  misc_feature (1)..(478): Xaa is any amino acid
MNIKQAVKTIKVRVLNSYILVLVVVLAFALMVALSSYFMTDIVKRQLASNAHAALNSLETDINTDLKEPRTVLGNQSECIRNMILRGADKEDVRTYLNDITEYIIQNEEKQLSGFDGIFGFFDVFGGVMLDGRNRPPPENYNPRERPWYKEAAAAQGEIVFLHPHTGAVKPNVVITNSRGLFDNDGNLLGAIALDVEFKRIRDYIVNEDSEKFWFGILLNEQYEIIAHREQSMEGTKYEDVNSDAARIVAELKMGHNVSEFRMRNYQNDTSITFFRKLENGWHLGIVTPEKEYFKELRRLRFIIILLGAALTIVFNIIIIRIVMGKEKADAILKETDGLLENINVMQRILNSLDAIIYVTNPETGEIIFVNDNSKKYYNIGDDCTGELCYKVFQEDANCVCDFCPCIKLDKDPNKVIEWIEFSAKTKRHYRNTACYIKWPGIDKAHLRYSVDITELYDARGQAVTANPRKSDFLARMS

SEQ ID NO: 92831 - protein, 314 aa, Unknown
  Obtained from environmental sample
  DOMAIN (1)...(306): Glycosyl hydrolase family 9
  misc_feature (1)..(314): Xaa is any amino acid
MPQDDKDDLLLFRVSHCSTAGFAASTALASRVYKPFDADFSNKLLQAAEKAWNWMEANPVFEPFNNPPDFRSGGYGDFSCEDELFWASAELYSVTGDKRYEEALKKRFSAVDFSGFGWRETAGFGVLCCLFILKDKLDESLFSLIKEKFLETADSKLALAMKSGYGTALGADSYVWGSILPILNNAIIMICACLLTKESKYRDAALNQLDYLLGMNATGYSFVTGFGDRPYRFPHHRPSFADGVDEPVPGLVSGGPNKQNPDMVTKTLIPQDTPPAKFYIDYTSTASANEIAIYWNSPAVFVAAYFDMISIKEL

SEQ ID NO: 92832 - protein, 263 aa, Unknown
  Obtained from environmental sample
  DOMAIN (21)...(209): Metallo-beta-lactamase superfamily
  misc_feature (1)..(263): Xaa is any amino acid
MGYYKVNQIYPWLFSIKDPQNVFCYLVVGNERALLFDTVYGIGSLPETVREITDKPLTVVLGHGHLDQANGACQFEEAWLHEADFELCREHTSEEVRKATLKQLNEWGVVLPDDFDPDVYVKGGTGNLKKLSEGMVFDLGGLHSEVVGMGGHTAGSIGLLVKEHKVLLDSDSANTQTWLFRLESLSVKQYIAMLERVVRLDFDVFFMGHSDAPMPKSDFHKFINAARHATIEKSEPFPLLPELKGFIYREDGVEIVISEAALR

SEQ ID NO: 92833 - protein, 74 aa, Unknown
  Obtained from environmental sample
  DOMAIN (4)...(72): Ribosomal protein L11, RNA binding domain
  misc_feature (1)..(74): Xaa is any amino acid
FILKTPPAAVLIKKAIGLDKGSAESHKTKVGKIPRAKLEEIAKLKMVDLTANDVEAAMRIIAGTARSMGVEVEK

SEQ ID NO: 92834 - protein, 295 aa, Unknown
  Obtained from environmental sample
  misc_feature (1)..(295): Xaa is any amino acid
DRVALLASDSKQGEMAAHCVAQSLQRFYGMAEKNIKTVVIERLNPNFAPETFRDGLRRLVVEVSQLIQRNKDAYEVILNPLGGYKGALPFVTVLGMLFGLKSVYIFEGSENLMFLPPLPVTLNLALFERARAALQYIEEETEVNKYDYLSRIADYAESEEELFLSYVESTDGKDNITLSPLAFALLKIEEDAPKTLKMLCALAETWKNSPGPLAATIQQNLQKMASPLWRDAHAHRLQGTDLLVMKPGNTADRYAGFVKDGIFHVTHIFGSHDEYGRVLSKEGKIKRNTSAERTL

SEQ ID NO: 92835 - protein, 216 aa, Unknown
  Obtained from environmental sample
  misc_feature (1)..(216): Xaa is any amino acid
TILDRVRLYILNAPMHTNTSCTMYYEDGFISLSDNEVYVDGGAYNGNTVELFIGKMHKAGKAHSRIYAFEPSPALYAQAVQLLSNRQNIEIVQKGLWSAEKELILFGNNTGGASFVIGSGSGQSIPTTSLDIFFQGKPESELPTFIKMDIEGAEKEALLGASGIIRRKKPKLSICAYHKPEDIFELPQTIKGIRDDYRFALRQHYDGAYDTVLYAV

SEQ ID NO: 92836 - protein, 64 aa, Unknown
  Obtained from environmental sample
  DOMAIN (7)...(63): YcfA-like protein
  misc_feature (1)..(64): Xaa is any amino acid
MGVVRTCRELVTLIEQDGWHLVRQTGSHSHYKHPVKQGLVTIPVHNRDIKKGTANSILKQAGLK

SEQ ID NO: 92837 - protein, 455 aa, Unknown
  Obtained from environmental sample
  DOMAIN (88)...(307): Bacterial extracellular solute-binding proteins, family 3
  misc_feature (1)..(455): Xaa is any amino acid
DVGEAAFDAYGDVTVEDFLPLIFSSVSMATRNYELAPIISVIQKALKNGGAQYANRLFNEGHYNYIKNKLLKSLNTEEKAYLQNTSVVPVSAAPWFYPLDYYNKYEKKWEGIAFDVLDEVTNITGLTFELVNSPDASWAEVFQIFNDGKAAICLDLIPSPERLNRYLWSKYIYLSENYALVSKHDFPNISIGEIQYAKIGLIKSTAWADVFQSWFPEAANVTMFDSQDDAFLALDRGIIDLVMAGTNALSSVTNYYELSNYKANYLFNSTIDYVIAYNKTEHVLWSIIDKALKYVDIGIISKRWENKTFNYEAKLERAQRPWLIGAIFVSLGAFVVILFSFKKNQQMKNQLELILNNVESGIAIIDMETREILDINPVVIRMFGDAKEKIVGHTCETLFSGTKGCPVIDNSQTMIQAERQFRNAADQIIPIVKSVSKIIYNGRPALLESFSDISH

SEQ ID NO: 92838 - protein, 526 aa, Unknown
  Obtained from environmental sample
  misc_feature (1)..(526): Xaa is any amino acid
MISLYITRDDVTPIFVTTDLAAHVNHLVFDKLLQYCEEEYFFPRLVTVVNEYLNAVEQVKGQIPDSVYNTSVLYFQTAQALLALAPKKSGDYYPSDDYRDVDAAQVLSNYPEQIAKEIEQMENASGFGQSNIFPNMQEDYSQYKVRGHYTKNGVLGAYFRTLMWFGRINFNFANEDLAAAALLITDITENSAQIKKLWQSLFDPITELIGASDDISFYELAPLWNKIKGAGFAQWYNAPSKLQNFISKEYTELRAPAISGFSLFKGPSEGGDHLTPPSGWRLFGQRYTLDSEIHNHVSAPRLPNRMMVSGLDIMKVFGSKTADYLLNESEYSKNSGMESLLNSLQQNLSKIKEDYWFSTYYTNILYQIRTQALFENGSGFYFTEKPNWNLKVMNSAHGTWAELRHDTILYVKQSAAERAGDGYEPTFRIKPLPKPIHYLEPNTPFWTVSAIGIQKLYAILEKYKFLDGQSARVLTGMHELFVKAAAVSALEAEDKQVSASDLEWIGNIPNQLAVHVLSLFASSGSG

SEQ ID NO: 92839 - protein, 492 aa, Unknown
  Obtained from environmental sample
  DOMAIN (288)...(469): Glycosyl transferases group 1
  misc_feature (1)..(492): Xaa is any amino acid
MVASEAVPFAKTGGLADMVSALSISLAALGHDVRIVLPRYYGIDRDKLKLLPGALGVPLGWGEEWSAVYTTTLPKAVKKNPVNVYLIDHEIHFGKDGIYGVPSEPDFLDNFRRFTFLSRAAFQLCRKINWYPDVIHAHDWPAALAPVYLKFAERVPASLKGFQKTVSVLTVHNLGYQGVYGKDNYNYAGLGWDVFYNAGFEDWSMLNMLKAGLYSADSLTTVSPNYAEETKTQAHGFRLDGVLRYRSADYWGILNGIDANVWNPKKDKLIPQTFSASDMTGKAVAKAALQKHFGLPVNPKVPLIGMVTRLVEQKGVGDLFGPTYGSMWSICRDMNLQVVLIGTGESWCEHEIGSLSYRLPNFKAHIGYSEEISHLIEAGSDFFLMPSRYEPCGLNQMYSLVYGTLPIVRRTGGLVDTVENYDEKKGTGTGFMFDQLNPSSIYNTVGWAVWAWYNKPGHIKAMRTKAMKQDFSWEKSAQKYVELYEKTLAKQL

SEQ ID NO: 92840 - protein, 70 aa, Unknown
  Obtained from environmental sample
  misc_feature (1)..(70): Xaa is any amino acid
MINSTGNETEPQKNDDSRADFISEFIKEDLAAGKYSYVHTRFPPEPNGWLHIGHCKAFFIDFNMAERFGG

SEQ ID NO: 92841 - protein, 404 aa, Unknown
  Obtained from environmental sample
  misc_feature (1)..(404): Xaa is any amino acid
MEGLRVKSGIPELDRVLGGGVMKRSAILVGGEPGIGKSTLLLQAAALAETKGRVLYISGEESAGQVKMRAERLGIKGDRIEIFCSGNLDDIMGILEAVKPVLVMADSAQTLFSDELGIAAGTLNQMKHCSWELIAWTKEYDAALFLTAHVTKDGVISGPKSLEHMVDTVLYFEDSTANDGDTRFLRAAKNRFGSVDEIGIFTMGAKGLQAVEDPSLLFLVRRDGELPPGIATAAVLEGSRTLLIELQALTVPAKGTMTRVFSGHIDSARVSRVAAVLEKHLGLRLSDQDLYVNVAGGIRINEVGVELALACVLYSARTGIPLPAKTAIAGELSLAGEVMPVRRLSARVKTAGNLGFTAFLGPQAISEEPSEEGLSAKDYSPLQNEGFSSFQNIKAVIKSLFSIK

SEQ ID NO: 92842 - protein, 81 aa, Unknown
  Obtained from environmental sample
  misc_feature (1)..(81): Xaa is any amino acid
LREEDICAHLDNPDIPDPDLIIRSAGEYRTSNFLLWEGAYSEIYISNKFWPDWEKEDLEAAVDDYMGRDRRFGGVNAANQE

SEQ ID NO: 92843 - protein, 371 aa, Unknown
  Obtained from environmental sample
  DOMAIN (5)...(114): 1-deoxy-D-xylulose 5-phosphate reductoisomerase
  misc_feature (1)..(371): Xaa is any amino acid
MKKRISILGATGSIGKSSLDVISRNKDIFDVVLLSANTKGEELDKLKTLWPSAVCVLSGIEGGKDKLLAAIAEANADITINGISGSGGLEPSLAAIESGSCLALANKETLVMAAPLVFRLAKEKNVKIIPVDSEHSAIFRLIQAHADGEKETVSEIILTASGGPFRKMGLEDLKKVTAKEALSHPTWKMGPKITIDSASMANKGLEIIEACALFDMPQDKIKVIIHPQSIVHSMVKLCNGAIYAQLSKPDMRNPIHDALFWPKTAPLDMEAINFDSLTLEFEKPDIQKFPMLDLARKSASLGGLYPCVYNAVNEEAVTAFLQNKIGFLDIPNITKNVLDQDWPGGCTQKKEILNTDALARKKAVFYINKNI

SEQ ID NO: 92844 - protein, 105 aa, Unknown
  Obtained from environmental sample
  DOMAIN (12)...(102): Peptidase family M50
  misc_feature (1)..(105): Xaa is any amino acid
MPLLLLLIKIVLGLVGLGIVVFVHELGHFLAARLVKIDVEAFSIGWGKPFLKKKIGSVEYRLGMFPVGGYCKMKGEGDYAQAWEEREKGIMPEKGSYLAANPAAR

SEQ ID NO: 92845 - protein, 436 aa, Unknown
  Obtained from environmental sample
  DOMAIN (198)...(270): PDZ domain (Also known as DHR or GLGF)
  misc_feature (1)..(436): Xaa is any amino acid
VLGLVGLGIVVFVHELGHFLAARLVRIDVEAFSIGWGKPVLKKKIGTVEYRLGMFPVGGYCKMKGEGDYAQAWEERNKGIMPEKGSYLAANPAARILVCFAGPFFNLLLAVLLLSSLWGVGFQIQTLGNKIILASEITPGEVFPADTAGFKTGDRILEIEGNKISYFHEIQENIAANPNKPLPITVERDGKIIQLQVTPSLEKSSGAGRIGVAYWADIVIESVKDGSPSAKAGLLPGDIVTAVNGQPLRNNYDLKKALDQEPGAIVLKYERNGTEGQAAINSKDIEEEIEFSLALINYHTPKLSFPSAVVKGVKESFKTLALSIKSLRLLFMGIDLTQAVSGPVRITYMMGDMAAKGGLRSFVELIALISIALCMMNLLPLPVIDGGMIILFFVELIRGKPAHPKAISIFQTCGIIIISCLMFFAIFGDIMFFVRR

SEQ ID NO: 92846 - protein, 62 aa, Unknown
  Obtained from environmental sample
  misc_feature (1)..(62): Xaa is any amino acid
MKQNITCLCGRTFSIDFEEDIALDEKPEQLEKICDGTFMSFDCPECGKKHKPEYSINLLWKS

SEQ ID NO: 92847 - protein, 273 aa, Unknown
  Obtained from environmental sample
  misc_feature (1)..(273): Xaa is any amino acid
VQSTSFELEPLDGAMAGGGTGGFGRLLPVYPLCAGLTQAMLRRFVERALDQFSARLEDELPEEICKRDKLLSKSAAIRAIHFPASTVDLEQAKKTLIYEELFYLEIMVGKRALERKGAGRKYFNHEPSRTGKEEKTTEYTELHGGEEAQKVGVTSDQWVVNREEANNDKLPTTHYPLTTTLQNHLLERLPFALTQGQGEAVAEINRDMDGAYPMARLLQGDVGSGKTLVSFLAALYAVENGGQAALLAPTELLARQHAQNAASLLEPLGLRVA

SEQ ID NO: 92848 - protein, 280 aa, Unknown
  Obtained from environmental sample
  DOMAIN (196)...(277): OB-fold nucleic acid binding domain
  misc_feature (1)..(280): Xaa is any amino acid
LSGQSSLFEDVSDAGLPDFAFEEFPDISRAEWLNIEKQLIGFYFSGHPMDEYKEIWQKAVKVDLGNHAGLKTGNCILVGIMNSIKVITTGKGKMAFATLADYNGEIEVTFFSKVWDKLNTRIKVDKVVILRGKIDYQQDKDRHGFIAEDLLDISEVDSAISEDEEQERNNSVFRNTWTYTADLKSSGLTSVKKGNYTAMGFLKRIREHRDSKGNEMAFGTLQDFEGEIDLVFFSKVWDECRALLKQDEFVALKGSYDPEDKKNQKNASFKVSSIADLAQL

SEQ ID NO: 92849 - protein, 240 aa, Unknown
  Obtained from environmental sample
  misc_feature (1)..(240): Xaa is any amino acid
LNKTKLLLDKDYTIAPLGKRLYSTFVEHLGRCVYEGIYEPGHPTADKDGFREDVRALVRELGFGALRYPGGNFVSGYNWLDGIGPRNSRPKRLDYAWFSVEPNEIGMDEFCDYAKSVGSEVMYAVNMGTGTPQDAGYAVEYANFPGGTYYSDLRIKNGHKEPHGIKLWCVGNEMDGPWQICHLDAHDYGKKALEASKIMKWVDPSIELCICGSATSHMPTYPEWDRVVLEYVYDKVDYIS

SEQ ID NO: 92850 - protein, 242 aa, Unknown
  Obtained from environmental sample
  misc_feature (1)..(242): Xaa is any amino acid
MADLHLQRPEAGQRVTVANVHTARFMLAFPSGDAALVKDGDDLILTFPDQGAIVLKHFYTAYTRDTLPEFVMDGHVVSCKEFFTMLGDEALMPTAARDAARYHDFSNLNLYGGIDKLHGLDSGGEKRAGPEDGLAAWGRHAQDDAQAGAPAGAQAGEKINHVPTVIDHYATVFEAGLPGRAGFDPDLPSSASGNSLAGSVRGDGVHSFRWDPANQGRYGDFIQSPDGAYRYELHDDDAVRAL

SEQ ID NO: 92851 - protein, 296 aa, Unknown
  Obtained from environmental sample
  misc_feature (1)..(296): Xaa is any amino acid
RRTDHHHIGRGDVVSQNAAPGNVLVVNDFDIREDGVIEYHTTWGELELNPRDGVYSYTPKTDGPIRDMAYGETHTEEFVVQTTDVHGAVSGTQKITVTLQGNDASVQLKGEDQAFFMKESGVGSELVVTRDPEGHVIDVRNAPTNNASQATAGTGTIAGSFQAVNHEPGCTWEVTINIAGQAVKVNLDPAKSGAQTLCNKTVTEIKTDADGNAVGTVKDIGTLVVTATKTADGEFAVGYTFALNQGAGTDCNAMQFGEQADLRLAITVDAFNPKHPDPDRLPQTHQADITVYGTND

SEQ ID NO: 92852 - protein, 363 aa, Unknown
  Obtained from environmental sample
  DOMAIN (1)...(91): NAD binding domain of 6-phosphogluconate dehydrogenase
  misc_feature (1)..(363): Xaa is any amino acid
EQLLEVLEKGDIIIDGGNSNYQDTIRRTAYVESKGLLYIGTGVSGGEEGALKGPSIMPGGSTAAWNLVKPIFQAIAAKVETGEPCCDWIGENGAGHFVKMVHNGIEYGDMQLICETYDIMKNVLGLSCDEMGNIFDEWNRGSLSSYLIEITRDILRYKDTDGRPLVEKILDTAGQKGTGKWTGIAALDFGVPLTLIGEAVFSRCLSAVKDERARASRVFSKPKPTAVADKAAFVKDLEKALYAAKVVSYAQGYLLMREAAKEYKWNLNYGGIALMWRGGCIIRSVFLGKIKEAFDKNPGLDNLLMDPFFTKILEDAQDSWRRVVSTAIQSGITTPAFNSALAYFDGYRSETLPANLLQAQRDY

SEQ ID NO: 92853 - protein, 107 aa, Unknown
  Obtained from environmental sample
  misc_feature (1)..(107): Xaa is any amino acid
NKKNVCIKAYTAGAYRAMKRRKTEIQPIKSQLNNYEKIIIMSPVWAGNPAPAFNSIIENLPSGKKIELVMVSAGSGTKKSAEGTKNLITAHGCEVTDYTDIKTMAKK

SEQ ID NO: 92854 - protein, 522 aa, Unknown
  Obtained from environmental sample
  DOMAIN (1)...(514): 4-alpha-glucanotransferase
  misc_feature (1)..(522): Xaa is any amino acid
SGLTYAVYRRLKEANGGRSWKDWQEYHTVTESDIESLWKDKTLSEAHIYWVWLQEALDSQFSKAAAEIASAGIVLEGDLPILMNEDSCDVWAHPEIFIQNLSAGAPPDMYSPSGQNWGFPVYNWKAQEKDNYSWWRKRLKIAEKYYSAYRIDHVLGFFRIWASSRNDYSSTLGRYVPYTPVTSADLMGLGFDKGRIRWLSRPHIPTGEIFDVLRNNWDGPFSDGDISAAAEIIFSKALSRVNNEELWLFNNKIKGEKDIDRLDLHPASHNYLYEKWSDRTFFEYAKGKFFPIWYYRESKAYKSLSSEEKNNLEALLEERHRKSEKIWARHGRKLLSVLVDSSDMLPCAEDLGAVPACVPRVLSKLGILGLRVIRWHRHWDREGQPYVPFDEYPRLSVCTLSVHDSSTIREWWENEADQMQFSGFIGVPSLPKKFNPGSARIILSKAASARSRFRVFQIQDILHLSSRWYSQDPSQERINIPGTSNEFNWTYRLPARIGEIAKDRELILAVRELSRVKPVKKK

SEQ ID NO: 92855 - protein, 470 aa, Unknown
  Obtained from environmental sample
  DOMAIN (138)...(449): Poxvirus D5 protein-like
  misc_feature (1)..(470): Xaa is any amino acid
MEVLMREQIGDESVFLRIEEFKKGLIQFTDSTNAMRLVKEHGRDIRYNAAWKKWVVWNGKYWEMDEGGVLIHEKGLEMVRNIYDELKKTADYRERMDIEKAAMMSESVRRRKAFVEAATWVSALRVKTDELDPNPWLLNVKNGTVDIKKGEFREHRQEDMITKIANVNYDPNADCPIWKKFVREIMDYKADIIKFVQTAAGWSLSGDISEQTMFILYGTGANGKSTFLNTIMYILGDYATATPTETFMKKTGDNFSNDVARLRSTRFVTTTEVEQGRRLSEPLIKKITGNDEMTARFLYGEFFNFKPTFKIFMATNHKPVIKGTDHGIWRRIKLIPFTERIPEEKQDKHLELKLREEASGILNWLLEGTAKWKREGLKAPKAVLLATDEYRGEMDVIGNFLKERCIQQKELSIRIRELYKAYTDWCDENNEHAVSERFLSMRLKEMGFEQTRTAEARYWVGIGLKITDNK

SEQ ID NO: 92856 - protein, 137 aa, Unknown
  Obtained from environmental sample
  misc_feature (1)..(137): Xaa is any amino acid
MPTIYDNREHILSRGINEALVSSKRADFCIGYFNLRGWKEIADSVESLTGDTILEGSGINQIEQKRYCRLLIGMQKAPLETILEHYLHDDDFQIDNGIAAKLKKQIAEDFKNQLAIGSPTSADETSLKILNRQMKAG

SEQ ID NO: 92857 - protein, 548 aa, Unknown
  Obtained from environmental sample
  misc_feature (1)..(548): Xaa is any amino acid
DRIPDLNVRKMLEKKVRSLYFDHLLIFINKGKTQAFWQLALREDGKIKKLVAFSWHKGQDVEGLFQKLRNIVFTLDEEDIITLADVKERVNTLTANSEKVIKAFYAEFSKQHKAFLGFIKGIEDAIPDTENNKKQWYASLMLNRLMFCYFIQKKGFLDNNINYLPDKLKECKKHSGKNNFYGFYRSFLLELFHNELGRPEDKRKKSASPVPFGVIPYLNGGLFDIHELESAFAKIAIKDEAFERVFAFFDDWNWHLDTRVTASGKDINPDVIGYIFEKYINQKEMGAYYTKEDITDYIGKNTIIPFLLDKVKSWYPAPFESGGGFWQYLQDSGDEYIYDSVKKGGEGLTSLDKVIIPENIRIGIDKQKPNLLERRKDWNMVTPDDIGLPTEIWRETISRLQRYFELREKISKGKIQEINDLITYNLNIRKLIQDYLEQTQDKKFIRAFYKALTEITILDPTCGSGAFLFAALNILEPLYEVCIQRMEEWFKANPKGNTDFEDKLTTLHSSEHPNLSYYIFKTIILNNLYGVDLMKEAVKLPNAAFRSW

SEQ ID NO: 92858 - protein, 98 aa, Unknown
  Obtained from environmental sample
  misc_feature (1)..(98): Xaa is any amino acid
MILTLSNPQAKIADVFVMLDETLPDIDKKTDAREFQTTIEDIAHWAGVSVAETGEILHTFAAQKRLEIYSTRMVVKNINDFARIVSSRRKQNPTGKKG

SEQ ID NO: 92859 - protein, 407 aa, Unknown
  Obtained from environmental sample
  DOMAIN (9)...(98): Cyclic nucleotide-binding domain
  misc_feature (1)..(407): Xaa is any amino acid
MENQFQLSHSSYKKDSYIILEGNQKADFFYIIQQGKVKIFKEAKLEGEDDVLGPGDIFGVISTMSSHSHIETAQAMTDVVVISVHQNQYVGLIQRNTQVAIKIIMQFSKRLRFLNDTLARLTLKNTADNGPSHLYDVAEYYLSQKQYSQATYAYGQYVKHCPNGEKAAAASEKFSKLSAHIKLAEFNANDVNRTYRKNTMLFAEGEPGDELFIIQKGAIKITKIVDNKEVLLAMLKAGDILGEMALLEGKPRAASAVAFENSDVMVVNKENFELMIKTQPQIIARITILLSDRIWLIYKQLSNILIDNLIGRMYDALLIQLEKNRVSLDSKTPYTFTFGRPELINMVGFPERKGDILFAEMLENKKLRIIDNKIHVTSTEEIFKQAEYFRKMDKIEKNRKAAQQNNN

SEQ ID NO: 92860 - protein, 287 aa, Unknown
  Obtained from environmental sample
  misc_feature (1)..(287): Xaa is any amino acid
GKSRWKSRDEFEEALICAKAELDEDSDKSLPEAERVLKIELNDTNRPDLWGTAGCARQLRIYHGGKIPDYGFFSRPNNVKKTAHKVRVQASVKQVRPYLAGFVAKGKPISDPLLRDMIQTQEKLAWNFGRKRRTISMGLYRTSLIKWPIIYKGVDPDSVSFVPLQWDTPLTLREILKQHPKGKEYAFIQEHEPIHPLLTDTEGFILSYPPIINSNDLGAVQVGDSEVFVELTGTDIACLNLAASIVACDLADNGFTIEPVEVEYEFDTPFGKNMVTPYYFQEPIFCS

SEQ ID NO: 92861 - protein, 348 aa, Unknown
  Obtained from environmental sample
  DOMAIN (1)...(167): SNF2 family N-terminal domain
  misc_feature (1)..(348): Xaa is any amino acid
TFSLLLADEAHLMKNAETRVSKTVKQLRSQYRLALSGTPVENRLEDLRSVFDFILPGYLGDAVKFKEQYRIPIEVMRSRETAEALRKITSPFLLRRLKTDKNIIKDLPEKIVANEYAVLEKEQAALYENVVAESIKKSEKVDPKERISLIFSLLTSLKQICDHPRVYDKESPAVSKLSGKAQLLVTLLEEILANREKALVFSQYVETLDCLQQIIKKELGENTLVYHGGLNQKTRADIVDSFQNDTSSRIMLVSLKAGGLGLNLTAANRVIHYDLWYNPAVENQATDRAFRIGQKQTVFVHRFITRNSFEEKIDAMISSKRELADMTVASGESWIARMSHVLLRELFD

SEQ ID NO: 92862 - protein, 184 aa, Unknown
  Obtained from environmental sample
  DOMAIN (2)...(174): ECF sigma factor
  misc_feature (1)..(184): Xaa is any amino acid
MAGKTAETLVSLRQRLLNFIRSRVNRLEDAEDILQDVFYQFSRVNDLINPIENISAWLYRAARNKIIDHHRKKKDEPLPASYDEDNDEYIFDELTDIMYGEESTPEIEMLRSLVFEEIQTALADLPKEQREVFEMTELLGFSVKETAEKTHTPVNTVLSRKHYAVKFLRKRLEELYSDVMGENK

SEQ ID NO: 92863 - protein, 184 aa, Unknown
  Obtained from environmental sample
  misc_feature (1)..(184): Xaa is any amino acid
MVLNGTLKEFILADVFNLLTQQKITGRLDLTSGKREAGIVFNDGIIVGADDGEENLTNKLFNYLIDIKRKTPEQLSPIFNAHTGNLGVLSTALHEQNFLTASELKGFAESCVEDICCSLLAWNEGTYRFNSMRSVAALACGAVSIPVENIIMEGMRRVDEWARMQEYITDEMVFVPAAGGGGAG

SEQ ID NO: 92864 - protein, 149 aa, Unknown
  Obtained from environmental sample
  DOMAIN (5)...(102): CHC2 zinc finger
  misc_feature (1)..(149): Xaa is any amino acid
MGTKFKDDVKDLVRARVDMTAVVGRYVSLKQRGRVMVGLCPFHNEKTPSFQVNPEMGVYYCFGCGRGGDLFTFVQEMEGVDFREALEMLADEVGVEVPRFGQRSAPGAGSGGRGGGNAKTELLDIHEAAAEFYRRCAEGSRTALDYFMS

SEQ ID NO: 92865 - protein, 221 aa, Unknown
  Obtained from environmental sample
  misc_feature (1)..(221): Xaa is any amino acid
ENDVIILSTVDNEISDFTDNANRLNVAVSRAIKQLIVIVNGDDNMQDKNIGDLVRYVEYNNLEIVQSEIYSVFDYLYKNYRKKRNEILQKQRKISEYDSENLMYGVIQKILIDEQFMKFDVAVHVPLKWIFRDMQKLDANEKQYAQNILTHVDFLIFDRIGKMPRLVIEVDGMAFHAKGTRQAERDILKNVILEKFKMPYIRFKTNESCEYERLTAALNKL

SEQ ID NO: 92866 - protein, 301 aa, Unknown
  Obtained from environmental sample
  DOMAIN (1)...(301): Protein of unknown function (DUF1703)
  misc_feature (1)..(301): Xaa is any amino acid
MSRPRRFGKSLLCSTLEAVFNGRRELFGEIAGWPALAIDSLEWEWKKHPVIQLDLNPGNYHDGKVILISALNNALNNIARMYDVELRGQFISEQFSNLIQDLHEHYQEKVIVIIDEYDKPLLSTMENDEMHVAMRNELKGFYSVLKSSDKYLRFVFLTGVTKFSHVSIFSDLNHLVDLTLDTRYADICGITQEELELNFQPEIKEILESTGKSHETYFEKLRRYYNGYRFSKKPLSVYNPFGLLNHFNNRGEFMPYWYETGTPTFLINLIVKQKINIIDLTNMRVGYDDFRKYDIETMKAE

SEQ ID NO: 92867 - protein, 51 aa, Unknown
  Obtained from environmental sample
  misc_feature (1)..(51): Xaa is any amino acid
VKQNPKISAADLSSVVGISKRKVEENLAKLRELGKLQRIGGTRGHWEMPNV

SEQ ID NO: 92868 - protein, 263 aa, Unknown
  Obtained from environmental sample
  misc_feature (1)..(263): Xaa is any amino acid
SRTALTVTVENTGNEPTGALSITKSSGVGDTPDSFEVLSSIESIVLGGSNSFPVKPKDGLSAGVHKTTITVSNADKDIGITRSFTVRYTAGFSISLKNGSTTLSDHTFNSRTALTVTVENTGNEPTGELSITKSGDSGDTPDSFEAPSSIGSIDTGSSIDFTVKPKDGLSAGDHKTTITVSNKSIDAKFTVFFTPTYSISLKEGGEPLSAHMFEDHRALTVTVENTGNEPIGALLITKSSGGGDTPDSFDAPSPKGSIAAGSS

SEQ ID NO: 92869 - protein, 69 aa, Unknown
  Obtained from environmental sample
  misc_feature (1)..(69): Xaa is any amino acid
VKAAFPGSFDPPTSGHINVIERAASLFGELVVVVAENKQKKYLFSAEERASMIRELVKNHKNVTVTVCD

SEQ ID NO: 92870 - protein, 272 aa, Unknown
  Obtained from environmental sample
  DOMAIN (97)...(272): Binding-protein-dependent transport system inner membrane component
  misc_feature (1)..(272): Xaa is any amino acid
MTETNKILPAGRLSPPVHYGSQRINNIVSLTLIHTVLIVLSVIWLYPILWIVLNAFRVEYNDQGDLIGIVVSHYFPKSVGFENFKRLFSSTSFGKWIRNTIIVAIFSTTLSTLFTLSTSYVMSKMRFKMRKPIMNIAMILGLFPGFMSIIAVYYILKALGLTQSLVALVLVYSAGAGMGFYIGKGFFDTIPDSLIEAAKIDGAMQARIFFSIVLPLSRPIIIYTALMAFMAPWMDFILARVILGEQNVNLHTTAVGLYYMLYGQRVDSNVFT

SEQ ID NO: 92871 - protein, 76 aa, Unknown
  Obtained from environmental sample
  misc_feature (1)..(76): Xaa is any amino acid
GESKRTLFRVEGATTEQVGKHLADRGIAVRAGHHCAQPILRHYGLESTVRPTLAFYNTAGEVDELVRAVREIAPKF

SEQ ID NO: 92872 - protein, 288 aa, Unknown
  Obtained from environmental sample
  DOMAIN (102)...(171): HAMP domain
  misc_feature (1)..(288): Xaa is any amino acid
KVFEKLMKESPILNEEERRVRLERTDTLKRYVQRYKKEACDPIAEAARAGNYGRCLEIVNNMGAYADEASKITAELRELANIIEKRTINNALSLSSQSKLLLVVIFAVFGVISILLSLLISSIISRPIRKMTDIANNVAEGNLNVNIDVNTNDETGMLAKSFSNIIDIVNLLTTNLKDLSKHFQTDTKLNSKHFSGAYKEVVESINSFVDAALSAQEEALLTIAAIFESNPHINILFDDSFKVIDCNPEAVSLMGFNSKEDLLNGFVDLVTRTLPTVLSHGELPQSLV

SEQ ID NO: 92873 - protein, 643 aa, Unknown
  Obtained from environmental sample
  DOMAIN (261)...(326): His Kinase A (phosphoacceptor) domain
  misc_feature (1)..(643): Xaa is any amino acid
TASRSAQFLGFTAKKELLDGFGDFISRAVPPVFSNGQRPQDLTQRLKTAAEEGAANFETELYFDGGIHRLSVDFRRIPYKNSFAVVAYIFDMTEMFQREMQLARAIELNELQLAKLNLVVQATKIGLWDLEVVQNDPVNPNNTFVWSDEFRHMLGYTDENDFPNVLSSWSDLLHPEDKERTLDAFAKHILDKTGKTPYDVEYRLLRKTGEYSYYRASGECIRDRDGAAIRVAGALMDITDTKNMLQDKERQKQEAEAANRAKSTFLATMSHEIRTPMNAIIGMTTIGKSAPTIKRKDYCFMKIEDASNHLLGVINDILDMSKIEANKFELAPVEFELEKMLRRVVNVINFRIDEKHQELSVNIDQSIPRTLIGDDQRIAQVITNLLGNAVKFTPEHGAISLVVRLAEKIDDDCTLQISVTDTGIGISPEQQKKLFQSFEQAESSTTRKYGGTGLGLAISKNIVEMMGGSISINSEAGKGSTFTFTIQVKRGKEEKQDHLLGVNLQNIRILAVDDDPDILTYFTEITQMFGSSCDTAISGEKALEIIDQKGSYHIYFIDWKMPGIDGIQLAREIKSRKSENSIVTMISAAEWGAIAKEAREAGVDKFLSKPLFPSTIAEVIRECLGVNQQAEKTQPADINGIFE

SEQ ID NO: 92874 - protein, 229 aa, Unknown
  Obtained from environmental sample
  DOMAIN (37)...(229): ABC transporter
  misc_feature (1)..(229): Xaa is any amino acid
MPSNEVLLDVKNLTVEFGTRHKRFRAVDNVSFHIFKGETFGLVGESGSGKTTIGRSIIRINPAKEGEVLFKGERINGKIAKERDRMVTHKIQMIFQDPMASLNERSKIDYIVSEGLYSLKNFKTEAERMEKVSKALCDVGLLPEFSSRFPHEFSGGQRQRIGIARALIMEPEFIIADEPISALDVSIRAQVINLLAELQKTRGLTYLFIAHDLSVVRFISDRIAIINKG

SEQ ID NO: 92875 - protein, 347 aa, Unknown
  Obtained from environmental sample
  DOMAIN (137)...(298): Exonuclease VII, large subunit
  misc_feature (1)..(347): Xaa is any amino acid
MFRNRIRSLSFEPKDGMLLRVRGSLSVYAQRGTYSIVIEEMERAGEGDILAMLEERKRKLAAEGLFSEERKRPIPRFPETVGVVSSPTGAAVRDILNILKRRARGIRVVILPTLVQGAEAGEAIARRIKQANYWKLADVLIVGRGGGSLEDLLPFSDEVVVRSIANSKIPVVSAVGHEIDWTLSDFAADLRAPTPSAAAELVSANREETLHIVRTLGNELCSSIKSRIERIRLLAKPFSLADLEYRFRSILQPRLMRFDEARDVLLENMHEKTAELRRRLDLARTGLEAASPLSALQKGYSVVMPLRGGKLQTPIRRAEDVKPGETLVIRPLEGLITAVAEKINSTK

SEQ ID NO: 92876 - protein, 86 aa, Unknown
  Obtained from environmental sample
  DOMAIN (11)...(74): Exonuclease VII small subunit
  misc_feature (1)..(86): Xaa is any amino acid
MATKKASGAKKTFEERLERLEALGDEIRRSDIPLDDAIKAFEEGIVLARNLEKDLEKIESRIEILMNSDEAAPDEAPELGLFDKEE

SEQ ID NO: 92877 - protein, 494 aa, Unknown
  Obtained from environmental sample
  DOMAIN (1)...(344): Alpha amylase, catalytic domain
  misc_feature (1)..(494): Xaa is any amino acid
MFDNGYDISDYTAINPEFGTMADFDRLLKEAHDLGLKIVMDLVINHTSNQHQWFLESRSGKENPKRDYYIWRDGKNGGPPNNWQAWFGGSAWTLDETTGQYFLHTFSPYQPDLNWENPDTRSAIYEMIRWWLDKGIDGFRMDAISLISKPKDFADGDIRKIIPNGPRVHEFLQEMRREVLSKYDIMTVGETGGVTIDEAIKYANADGSELDMVIQFEQIELDGGESFKWNDRKINLVELKEVFSRWQTVLYGRAWNSLYWCNHDQPRIVSRLGDEGEYREKSAKMLATCLHFMQGTPYIYQGEELGMTNTPFADIGDYRDLESINAYNELVVQEKRIARADMLRYMRLKSRDTSRTPMHWNNGPNAGFSTGTPWIMVNPNFKQVNVEKQTSRSDSVFAYYQKLIQLRKKLDIITFGIYELLLPDDPDLYVYTRKYNNEELLVICNFSRKERTFTLPERFTGAKQLISNEGDCKSPLVLGPFGAVVYYNDQGGQK

SEQ ID NO: 92878 - protein, 85 aa, Unknown
  Obtained from environmental sample
  misc_feature (1)..(85): Xaa is any amino acid
IDQFYLNASVYIGSENLEDIFQTAYNLMRQGIKMKDAAHLACAIKAGCDYFITTDDKLIKRYDGNTIKVRTPLTFLNDLEEKTDA

SEQ ID NO: 92879 - protein, 70 aa, Unknown
  Obtained from environmental sample
  misc_feature (1)..(70): Xaa is any amino acid
MRSVAVIKKEGMDCLVKSLGVLETEVFISSLLRENFDYTEWQREYFADQPLDDFLKKAKEYEQRKPFSIG

SEQ ID NO: 92880 - protein, 277 aa, Unknown
  Obtained from environmental sample
  DOMAIN (2)...(65): Protein of unknown function DUF58
  misc_feature (1)..(277): Xaa is any amino acid
MIKAKAGTDLRGLLERNGQKNIRMRGQGLEFRSLREYQEGDSIREVDWRATSRRRKVIVREYQEEQDQQVLFLLDSGYRLHRSEEDGRTHEMHTQFDSALEAVLLLSWVSLKHGDSVAVGSFGPARRWLGPRKGLSAFPLLMNGLYDLTSGPYPSSPFSALEDALFRLKRRTFIILISNFREEDGQSLSWILKRLEKRHLLLMVSLREKESEFLASKYPLEGEEALETAAAFSYLAARRELYASWEHSGLLTLETSTAALSAALVNRYLLVKRSGRF

SEQ ID NO: 92881 - protein, 246 aa, Unknown
  Obtained from environmental sample
  misc_feature (1)..(246): Xaa is any amino acid
DFAAARDVQKQILEAYTADFSKHVPGIHLQKVVQIWDSIPYQLAKENKKFIYSEIRKGASAKTFEAALEWLLRCGLIHRVSRVSKPAIPLKGYADSTGAFKLFLCDIGLMSAMSKIDVRVLLEGDALFTEFKGTLTEQFVCQELKLIEDIDLAYWSNEAPARSEIDFILQTGMRIIPLEAKSSTNLKAKSLSVYREKFRPETEIRTSLADYKKTGNLYDIPLYALGGLMEIINPDIEPKTAPNALP

SEQ ID NO: 92882 - protein, 663 aa, Unknown
  Obtained from environmental sample
  DOMAIN (9)...(162): Type III restriction enzyme, res subunit
  misc_feature (1)..(663): Xaa is any amino acid
MRKFEVVSPFKPAGDQGEAIAALAAGIKAGDKYQVLQGVTGSGKTFTMANIIEAVHMPTLIVSHNKTLAAQLFREFKGFFPNNAVEYFVSYYDYYQPEAYVASRDLYIEKDASINDEIERMRLSAARSMMEREDVIIVATVSCIYGMVTPDVYRKMTSTFSKGETVDVDSLMRRFVELQYERNDAVLDRGRFRRRGDTLEIFPAYMEEAYRVDLDWDRVERIRRFNLVSGEMLEEIDRALIYPAKQFVMPGDMVQNAMGAIKQELVERLEFFKSTGKIMEAERLKTRVEYDIEMLTEMGHCPGIENYSALLAGRKPGESPDTLVDYLPQEHLTFIDESHVTLPQIGAMYAGDRSRKQSLVDYGFRLPCALDNRPLRYDEFVERLDKTVFVSATPGKTEIEQSARVVQQLIRPTGLLDPEIEVRPSEGQMEDIYGEVQKRIEAGERSLILTLTKKMAEDLTDYLSGLGLRVRYIHSEVETIERVEILTQLRSGEFDVLVGINLLREGIDLPEVSFIAILDADKIGFLRSLTSLVQIIGRAARNAAGKVIMYADRVSDAMKTAIAETERRRAIQMEYNEKHGITPTTVKKAITDILQRHAAEERDAAASSVEVLKKSFNVIIPAERKKLISALEREMLEHAKNLEFEQAATIRDEIKKIKEIGNT

SEQ ID NO: 92883 - protein, 282 aa, Unknown
  Obtained from environmental sample
  misc_feature (1)..(282): Xaa is any amino acid
DYRNRPRVRSAVVYILSPGGIPISDAAFEAVKKYLINPVDSREAAAEKPQKIEEIEINPDDVPILTGFITANDTELGAMASQYGLAMALDDLIFCREWFSSINRDPTLAELRVLDTYWSDHCRHTTFNTILEKITIGEGPFAPALKNALALYESLREELYGNDPPSNRPRSLWDMAVIGAKVLKKRGAADDVDASKEINACTVKVNAEFSGGQTEPWLLLFKNETHNHPTEIEPFGGAATCLGGAIRDPLSGRAYVHQAMRITGGADPRASLDKTLPGNSRR

SEQ ID NO: 92884 - protein, 82 aa, Unknown
  Obtained from environmental sample
  misc_feature (1)..(82): Xaa is any amino acid
MEKPRIYTTPFSSVYPFYIQKAEKKGRSKAEVDTIICWLTGYTQQELQQKIDKNTDFETFFSQAPQFNPNASKITGSICGHR

SEQ ID NO: 92885 - protein, 404 aa, Unknown
  Obtained from environmental sample
  DOMAIN (4)...(69): Type III restriction enzyme, res subunit
  misc_feature (1)..(404): Xaa is any amino acid
MDESLEEVSPQEETISGSPREVIYNEKYPPEFFDFIIIDECHRSIYNIWQQVLDYFDAFLIGLTATPDKRTFGFFNENVVSEYSHEQAVIDNVNVGYDIYLIETEISKKGASIPKQLVEHRERLSRKKRWEQLDEDVVYTKNQLDKDVVNLSQIRNVIKAFRDGLPAMFSGRQVVPKTIIFAKTDSHADDIIQIVRDEFGEGNDFCRKITYSVDKADSVLSNFRNDYNPRIAVTVDMIATGTDVKPVECLLFMRDVRSRSYFEQMKGRGTRTLDKDSLRKVTPSAANNKTHFIIVDAVGVTKSIKTDSRHLELKPDVSLNELMMSVAMNSRDEDIFLSLANRLTRLDKELTTAEQSKYTESSNGITLRVTVQRLLDAFNADVIEERARKENNLSVKETVTEEQI

SEQ ID NO: 92886 - protein, 276 aa, Unknown
  Obtained from environmental sample
  misc_feature (1)..(276): Xaa is any amino acid
GNEYFANLYQASERTIINWINNLKDKGHIYVSYTYVPGKKEIQSRLLRIADSAPLKDKVKAGGNAGDGKPDGGAGTPDGNEGTEVVKKFSPRGEENFTTYGKNFQEVVKNFSIGGEKIFTDNIKFNIKTTASSPGPPESHAQPPPRPGEEAVAPLSSRELKEALPAVDPCLILSEDFYPRAANFMAANGLGRQYLSWMYEQCEIQKPRSVRGLYYTLFFKGNMPEIYKASIRPPPPPLKPPDTPCPACGALRSQSDDCCPSCGLPVNAAGGRIRLF

SEQ ID NO: 92887 - protein, 407 aa, Unknown
  Obtained from environmental sample
  DOMAIN (210)...(403): CDP-Glycerol:Poly(glycerophosphate) glycerophosphotransferase
  misc_feature (1)..(407): Xaa is any amino acid
MNLYLLYIDPGTGSALFSILIGAAATIYFLGRALIIKLKVVLSGGKTANAVSVEYPYVIYCEGKQYWNVFKPVLDEFEKCKTGLLYLTSAQDDPVFDTSWNFVKAEYIGEGNRAYARLNLLRAGICLMTTPGLDVYQLKRSKMVKHYAHILHAPSDATMYRLFGFDYFDSILLTGDYQAEDIRTLERQRNITEKKLVTVGCSYLDVYAEKIKNLPAEENHPFTVLVSPSWGASALLTRYGEKLLDPLAASGWRIIIRPHPQSKKSEATMLDRLQTRYKDSSNIEWDYERENIYSLNKADIMISDFSGIIFDYMFLRDRPVLYVSQNFDLRPYDADDIDHELWQFKTVKEAGIELREDDFPRITEIIKNAGDSESLANIRRKARETAWRYPGEAGKRVFDFMMGIIND

SEQ ID NO: 92888 - protein, 225 aa, Unknown
  Obtained from environmental sample
  DOMAIN (29)...(224): 60Kd inner membrane protein
  misc_feature (1)..(225): Xaa is any amino acid
MTDILYTIIIYPITQILEFVFVFAQKLFKETGFSIICISTAVSILCLPLYDIAEKWQQLEREIGKKLKPKVDKIKEVFRGDEQYMILSTYYRQNHYHPIYALRSSFGLLIQVPFFIAAYSYLSNLDVIKNISFLFIKNLGAPDALFSIGGFTVNLLPIAMTLINCFAGAIYVKGLPVRDKIQLYGMAGIFLILLYNSPSALVLYWTMNNVFSAFKNIYYRIQYKY

SEQ ID NO: 92889 - protein, 336 aa, Unknown
  Obtained from environmental sample
  DOMAIN (6)...(305): Nucleotidyl transferase
  misc_feature (1)..(336): Xaa is any amino acid
MINDCLIMAGGSGVRLWPASSSRKPKQFLAASKDGTKNFFSLSLERALRLVRESDGRVIVITGKTQLPFAVTACSKLSSDEKKRLVLIPEPDTKNTAPAIACAIAYAGKTGGWNRTMLVLTSDHIIKPLDVFMKNVKSAARYAEQNKLVIFGVSPSGPETGYGYIETGSGLAEDVYAVASFHEKPNRETAESFFASKKYFWNSGMFGFRCDFLAEQYRSIAADLIRPFEKLKAPDKNSYAKTKGLRVLDKWSGLKKAYKQAKVISFDYAIAEKCGQTVMIRAGFDWIDAGTWDDYARLLSGNTGADVYTAGADGCFVDSDIPVALAGVEDLIVVIR

SEQ ID NO: 92890 - protein, 292 aa, Unknown
  Obtained from environmental sample
  DOMAIN (100)...(176): Helicase conserved C-terminal domain
  misc_feature (1)..(292): Xaa is any amino acid
GFSEDVEYILEATPEDAQRALFSATMPTAVQKIVSTYLGEYETIRIAGKTATVEKIRQRYLSVRQEHKMEALTRVLEGEEFEGMLIFVRTKQATAEIAERLEARGFNAVPLSGDLAQSLRERTLNRLKDGKIDIVVATDVAARGLDVERITHVLNYDIPYDTESYVHRIGRTGRAGRDGNAILFVTPRETRLLAMIEKETRQKIEKMSLPTGEQISDKRVAKFKEDIIKTVQEQKGLDNFRNLVENIAMEQAIDIADIAAALAFMTQEEQPLFPKMEPLDAESRGNRDREAR

SEQ ID NO: 92891 - protein, 95 aa, Unknown
  Obtained from environmental sample
  DOMAIN (12)...(66): Helix-turn-helix
  misc_feature (1)..(95): Xaa is any amino acid
MKSNGKTPGTLLLEYINKNGLNCNRVAKEIKCSQTALRLISLDKSRITASVAVRLAKYFNTKPEFWLLTQMKHDLVKAANNKVLSKQLNSISSNV

SEQ ID NO: 92892 - protein, 346 aa, Unknown
  Obtained from environmental sample
  misc_feature (1)..(346): Xaa is any amino acid
VNRKNAPDYRPLMLILLVFLGVSMLPAAEAGIDFSIRYFDKRVYYLESDPIFIQVTVTNNSPSTYRFKLADERAFSIDFDVRTNSNRIVDAADILVRKRSQSQQVYFREVAIEAGESFSFVEDLKNYAALTQSGNYVVQAKIYPELYHTVRSENAGVWSLGTSGIRSGETILAAGYILESNRLMLNIRPALIPGPEGIPLELDVETNAVLVRERLPPDEVVSYLLTARQKSQWEKFFLYLDLEAMLSRDAYRRRQYNAESEEGRQRMISRYRLDLQNSVIDGDISLIPMNFSIERTVHNGQTGTVTVLEYFRVGSYTEKKRYTWYLEKRDEIWTIVDYSVVNLGTE

SEQ ID NO: 92893 - protein, 164 aa, Unknown
  Obtained from environmental sample
  DOMAIN (122)...(157): Adenylate kinase, active site lid
  misc_feature (1)..(164): Xaa is any amino acid
MKLIFLGPPGAGKGTLADRAVEFLKLPHISTGAIFRSAIAAKSPLGLKVKAIIDAGKLVDDETTIALVKEYLSKDDVKGGYILDGFPRTIPQAEALAEFSDIDKVVNFDIPDSLVLERLGGRRVCRKCGHNFHMVFDKPKEEGLCDHCGGEVYTRDDDKAEAIQ

SEQ ID NO: 92894 - protein, 183 aa, Unknown
  Obtained from environmental sample
  DOMAIN (1)...(150): CobQ/CobB/MinD/ParA nucleotide binding domain
  misc_feature (1)..(183): Xaa is any amino acid
AVIKPTPVKNLSVIPSHIDLSGAAVELIDQEKRDYFLKRSLEPAKPLYDYILIDCPPSLGVLTLNGIAAADGVFIPMQCEYFAMEGLSHLLKAVKMIQKGLNPSLDIGGIFFTMYDPRTRLAHQVIKEVSAYFKNKVFTTIIPRNVRLSEAPSHGLPISLYDPQCNGAKAYKSLTQEVLSRGS

SEQ ID NO: 92895 - protein, 302 aa, Unknown
  Obtained from environmental sample
  DOMAIN (46)...(136): ParB-like nuclease domain
  misc_feature (1)..(302): Xaa is any amino acid
VAVKKGLGKGLSALLPDEDLEKSAAQPYKPLSGEPGKNAKERTGEILIAPEKLNANPNQPRKIFNEDELSELADSIKQQGIIQPIIAEDAGDGTYTIIAGERRMRAARIAGLKEVPVVLRRYSDEKRMVVSLIENIQRANLNPIEEAQAYKQLAELESLSQEDVAARVGKNRATVANALRLLKLPALMQESIKKNELSPGHARAVLSVSDEKAREALYQEILKKGLSVREAEKRAAAIGQENKKPKKASEPESRNPELNAMQDKFMLRMGTKVIIKGDLNKGTIMIDYYSMQDLDRLYGILG

SEQ ID NO: 92896 - protein, 269 aa, Unknown
  Obtained from environmental sample
  DOMAIN (140)...(269): D-ala D-ala ligase C-terminus
  misc_feature (1)..(269): Xaa is any amino acid
LAVNNKITVGIIFGGKSAEHEVSLQSAKNVYDAIDRSKFEPVLIGIDKNGVWRSMGGSLSLLNSGDPRRISLNPNGIPVTLGPASEGRLSAQAAGDLKLDVIFPILHGPLGEDGTVQGLLKLAGVPFVGSGVLGSAVGMDKDVMKRLFRDAGLPIGKFLTFRHSEKLPPFAEIEAALGSPSFVKPANMGSSVGINKVRNETEYENAVREAFKYDVKIIIEEFIPGREIECAVLGNENPTASIPGEVIPSHEFYSYDAKYIDEHGARLEI

SEQ ID NO: 92897 - protein, 320 aa, Unknown
  Obtained from environmental sample
  DOMAIN (105)...(313): RimK-like ATP-grasp domain
  misc_feature (1)..(320): Xaa is any amino acid
SRFDPVLIGIDKNGVWRSTGDSISLLNSSDPRRICLNTEGEPVFLAPASAGVLSVQTAKAGVPPKLDVIFPILHGPLGEDGTVQGLLKLAGVPFVGSGVLGSAVSMDKDVMKRLFRDAGLPIGKFLTFRHSEKLTSFSEIEAALGGSFFVKPANMGSSVGINKVRNEAEYANAVKEAFQYDVKIIIEEFIPGREIECAVLGNENPIASIPGEVIPTHEFYSYDAKYIDENGARLEIPAQLDDDCKKRIQALAIKAFQTLCCEGLSRVDFFLKENGEVLINEINTMPGFTKISMYPKLWEASGIGYTELISRLIGLALKNV

SEQ ID NO: 92898 - protein, 211 aa, Unknown
  Obtained from environmental sample
  misc_feature (1)..(211): Xaa is any amino acid
MFDIFARICQYVEYYPFIAFGALMLAGLSVPISEDLIIITGALICQGKPSMLVPIFAATYAGVVISDYFPYLLGKYIRKGTVKSNFITRFFSPRKIVRIHHYLEKYGIFAFIAGRFIPFGVRNTMFMTAGLFGLRLRRFALYDTTAATISVSTLFFLAYHFGEAVEKPFQAVGIVLFVLLLSMVIFVVVNIIRKILKKRDRGPGVGDRGPN

SEQ ID NO: 92899 - protein, 457 aa, Unknown
  Obtained from environmental sample
  DOMAIN (1)...(175): tRNA synthetases class I (I, L, M and V)
  misc_feature (1)..(457): Xaa is any amino acid
TYFAWLDNIRDWCISRQLWWGHQIPAWHCADCGGLTVAREDPAACAHCRSGRLERDPDVLDTWFSSALWPFSTLGWPDQTPDLARYYPTSVLVTGFDIIFFWVARMMMMGLHFQKRTPFKTVIIHALVKDAEGRKMSKTTGNVVDPLEIIDRFGADAFRFTLCALAGQGRDIRLSDERIAGYGRFVNKLWNAARLVLTNAGRARLEAVRPAGPADSLPDRWLTSRLARFTAQVRRHLDEFAYDRLAETLYHFVWDEFCDWYLELVKPVLQGPDEAAADATRGHMLAALSAILRLLHPVMPFVTEELWSKIPGAAGPLMLAPFPREDEAGLDPEAEAGIGFLMDVTRAVRSVRADFRVPPASRLTPLIKAGDQALTRVLAEYSPLVLKLTGSAAFEAAGPGQAKPREASLTAFPWGEVWVPLAGHIDLAEEARRLEKELTGLDRDLAAARAKLANPEY

SEQ ID NO: 92900 - protein, 317 aa, Unknown
  Obtained from environmental sample
  DOMAIN (21)...(54): Tetratricopeptide repeat
  misc_feature (1)..(317): Xaa is any amino acid
MSSLAAGLVLGSCAGWGAASAEEYFSIGMAYYDIGKYEEAEKWLIRAKARDKTKSASEYNLGRIAFDAKRYDEAIKYFESVLKRDPNNVLALKAAAYTYIKNGDIDNASKMYKRLLVLVPESYDDGYNYALVLFAMKKYEEAEQVLKTYEFALLDNSDVLLLYARAQKEQGKPEAVDTYASWLVNNSDAKVRHEFAQALEGQQMYARALEEYRTVYKDLSSSSVDPSRHEVRFTIARLLLTADPGNAEGITELKGAVEEGYNDFDEIEKLLDDERVSAANKKEILAVVTEGRNAEAAAKAEAEAKAEAEKAAAAGGQ

SEQ ID NO: 92901 - protein, 187 aa, Unknown
  Obtained from environmental sample
  DOMAIN (3)...(187): Domain of unknown function (DUF362)
  misc_feature (1)..(187): Xaa is any amino acid
MGKKVGIVRCASYDPQEVYGALKNAVELSDNLDVAGKTVLLKPNILSDASPEKAITTHPVFLEAAIRLVREKGAGRILVGDSPGLQMPGFSGKVSGMGEATRKNGAEWIDFTKGKIEVPCPEGKVIKSFTLTQAVREADLIISLPKLKTHQLMQYTGAMKNIFGLVPSLAKSPFHVRFSSRESFAAM

SEQ ID NO: 92902 - protein, 304 aa, Unknown
  Obtained from environmental sample
  DOMAIN (16)...(169): Integral membrane protein DUF6
  misc_feature (1)..(304): Xaa is any amino acid
MTKKNKALAAVIACVLFWGFSFISIKIAVAVFPPMTLGALRFALAVVILFFIKRRIAPEERLQKKDLPLLAGAGITGVTLYFFFENNGVALIPASEASIFVGSIPVITMISEAAWAKISSSRKKELRKEEPEIDETAVISKKQRSLFLRIVLPGIGALISLAGVALVARVSFALSGTALGYVYMSGACISWVAYCLLTRPLFASHSRIFIVFWQSLAGLIGFLPFTFFEASWQAPGLDVWGHLLFLGLFCSALGYWFYAMALEDLGVDKATIFINLIPVISAVGAFFVLGETLKPLQWFGAALV

SEQ ID NO: 92903 - protein, 160 aa, Unknown
  Obtained from environmental sample
  misc_feature (1)..(160): Xaa is any amino acid
MANENAPLDKALAVYKNKPALIKEKIQDKIVIALSDGASVKVREKDIEIIHPGPVNNFNDIEGAAVSDSAIRETWELVLTEEKPLSLKELAEIVFGGYSPASAWAAFCLLLDGLYFTGTVSAIHPRQQEQVEADEKKRAEKFKASGERELFLERLRKRHL

SEQ ID NO: 92904 - protein, 128 aa, Unknown
  Obtained from environmental sample
  misc_feature (1)..(128): Xaa is any amino acid
MRLFDSLQPETRHLLDSVPALIDKTFPLPGRFRTMLPSAVAELSRLLTSGRGERSLSYLGRPNLLSAYLRYFLPWNLYRLCRLLPGLELNLKAGDVITDLGCGPLTLCAALWISRPDLRGLPLGVRCI

SEQ ID NO: 92905 - protein, 185 aa, Unknown
  Obtained from environmental sample
  DOMAIN (2)...(72): DNA mismatch endonuclease Vsr
  misc_feature (1)..(185): Xaa is any amino acid
MTSELRHKIMSHIRSNDTSIEVLLRKALWHEGIRYRKNLKTLPGKPDIAITKHKIAVFCDGEFWHGKNWETQKNKIKENRDYWVPKIERNIARDNAAEKKLINMGWVVLRFWGKDIKKDLNGCVNEIKEVIYEKTNGVDKMDYNSMIDLYAAESDPGYCIDLGEEVHAKTQRRKERKEKERIPHS

SEQ ID NO: 92906 - protein, 404 aa, Unknown
  Obtained from environmental sample
  misc_feature (1)..(404): Xaa is any amino acid
SLIQTIKTEKVDYLDNELIAIAQKSKNRTIISGIFGFFTEAEKSGLEDRAIKAVVERDQEANDTVLAAVNYLGSVKAGEAVDAIEELINSGESRFLGSALRALGRVAPEEEADSVAAFLLDYYNNRSPSDENKREIINALGEAGSKESVSFLSEIIKNTDERTTLRMAALEAMAKIGDDEGLDAVIEAVSSPDPNVRSSAVAALAPFSGETAESAILEAFRDSYYRTRIGAAQSAGKRRLESAVPYLRYRAENDDVPAVKDEAIKALGAINNEEAMTILDSLFSERKNSDRVRIMAADMLLQNNAEVYGSRVLAEMDDAKLKNQTPLYNGFIRIMGSAKATSMENVALRLIQGGGVIEKSLALDLALNNEFRQMADVIRSLLDDKKHSASIARKAQSTLDKLGL

SEQ ID NO: 92907 - protein, 116 aa, Unknown
  Obtained from environmental sample
  misc_feature (1)..(116): Xaa is any amino acid
DNFRLIPLNELIITLIPRHEYLRVTLRLALIVQISALVFRTTSALEIREAVKAEIISVFLCFIPEIFKIWTSVNLAWKARGGKDGIAKIKTVVFVLISLCFEKAALKAKALEARSV

SEQ ID NO: 92908 - protein, 343 aa, Unknown
  Obtained from environmental sample
  DOMAIN (12)...(65): HTH domain
  misc_feature (1)..(343): Xaa is any amino acid
MKEKTISGLSSKVRLLALLREKNGERASGSLLAKEMGISRVAVWKTVQALVQAGYLIETGDNGYLLSPKNEKDFLYPWEFGEKENLFFHYLNTGSTMDRAREQALRGAAGGSVFTAEKQTSGRGRSGRTWISRQGGLFFTILERPRLAIADYTLLSLIMQVAVVKIISSVCGKQAYLRWPNDVYINRRKIAGITSEISGEGNLISWLSAGIGVNVNNPAPLARTTSCMEVTGRCLSRREILVSILDEIEKTKKKFASHAVYSQGNRELAAEWNSLADCVGAKAVIFETDNEDKNLKEKTGKTLAKGTFAGIDPAGRCILKTEKGILYFNHGLVSLAFLNADNR

SEQ ID NO: 92909 - protein, 205 aa, Unknown
  Obtained from environmental sample
  DOMAIN (10)...(46): Sigma-70 factor, region 1.2
  misc_feature (1)..(205): Xaa is any amino acid
MQKKTSKLNDDLLETYYKQIKNFPLLTFEDELELSRKILEGDKEALHKLVNSNLRLVVKIAGLYNKYNVSHMDIIQEGNIGLIHAAGKYDYRKNVRFCTYASWWIRQFISRFLSNKSRMVRLPTRKEEALRKIQYTYHVLCQTLMHQPGNSDIAKELGLSVQDVDSIVNMAANSVSYEQNNSDEENTNAIDIHEDYTYCPERNLM

SEQ ID NO: 92910 - protein, 269 aa, Unknown
  Obtained from environmental sample
  misc_feature (1)..(269): Xaa is any amino acid
MEPIDVLDGKGRFIKGCLRDKKNVKVSYRDGRMAFLETVMARGDRRLGEVILAAWRAGARFDGWDEMFNLNLWTEAARTVGVDLERYTKPIDIEEILPWSAVSVGVDVDFLKRERERAFKEEPTPDCRTGGCVNCGACDGRVSTRLCVDADKSVSMKKSSDVSTNISTDVSMEKSSTVSTSVSTDVSTESSYGRKPRAAKDQTPSIQTKYRFFYEKMTRLRFLGHMDMVAVFHRAMAAAGFPLAFSQGFNPHPKVSFGPPLPFGFTGQN

SEQ ID NO: 92911 - protein, 192 aa, Unknown
  Obtained from environmental sample
  misc_feature (1)..(192): Xaa is any amino acid
SARASVCVAGNHDYAAVERTDTSNFTYFAFTAMEWTKRNITDADRTFLRALPLTAEVDDMFFAHSSPCDPERFTYVFPDNEYSVIEAFGHLNHKLNFIGHTHWPNIMYQEGERVILLSETSTHIEAGRTYLINVGSVGQPRDFDNRSCYALYDTEKQTISLHRVSYNYKVTQKKIKENNLHIFLAERLEKGR

SEQ ID NO: 92912 - protein, 167 aa, Unknown
  Obtained from environmental sample
  DOMAIN (1)...(167): ATP:corrinoid adenosyltransferase BtuR/CobO/CobP
  misc_feature (1)..(167): Xaa is any amino acid
MIHLYTGEGKGKTTAAMGLAIRAAGCGKKVVIVQFLKGRDTGELHSLGLIPNITVIRNSEAKAFFHTAPPEVRLKITEENNENLKAALAIPYDLIVLDEICAAYELEAVDRKAVDDLLRGFNPEKELVLTGRNPPRHFCDAADYISEIHSIKHPFDRGVQAREGIEY

SEQ ID NO: 92913 - protein, 212 aa, Unknown
  Obtained from environmental sample
  DOMAIN (9)...(212): FecCD transport family
  misc_feature (1)..(212): Xaa is any amino acid
MWFLIFSTGVLLIFLLNVSNGSANIPIRDIVQITLGKIGQSETNYLIVQRIRFPRALAAICGGAALAIAGFLLQTYFSNPIVEPYVLGISSGSSLFVGLVLIGGFNFGFQRITPVIMFIGAFIGASVIMLIIIAAATKVKNIITLLIIGLMAGYLCSATVSILSAFADRERIASFAMWNMGSFAGFTWTHLKIMYAIVGPTLLCSFLMAKPL

SEQ ID NO: 92914 - protein, 145 aa, Unknown
  Obtained from environmental sample
  DOMAIN (28)...(145): ABC transporter
  misc_feature (1)..(145): Xaa is any amino acid
MLITCQNVSFGYEGQPVVRGLSFSLEQGDYLWVVGENGSGKTTLIKGLLKLLNPMEGSVLFSDEFRQGKTGYLSQQSAGKKDFPAGVSEVVLSGNLSNMGLRPFYNAREKRAAKNAMKHLGIENLSQKCYGELSGGQQRRVLLAR

SEQ ID NO: 92915 - protein, 398 aa, Unknown
  Obtained from environmental sample
  DOMAIN (13)...(391): Iron-containing alcohol dehydrogenase
  misc_feature (1)..(398): Xaa is any amino acid
MKNFTNFSFYPYTEILFGKNTETEAGKMIRKHGGKRIMLVYGGGSVKKSGLFDVIEKALKSEGLYYTEFGGVQPNPRRSLVEKGIKLAQNEKIDFLLAIGGGSVINTAKAIALALANDGEYWKFFGGPLPEKMAPVGTIHTISGAGSETSRSVVIVDDMDSGHKLSVNADSCRPVFAIMNPELTYSVPAYQTGVGAADTIAHTVGKYFTKDNPACSLGDEFGEGLIRTVVKFAPIAIANPNDYEARAELMMAASFSHNELTSIGRSGKRGGEHPLEHQLSGHYDTAHGAGLSVIMPAWLQYIADNGTGKQIERVAQFGSKIFAVKADNASAKTIANAGLDAFRAWLRSIGMPLTLAELGIPKTELDAVVKRAVDANNGNISGFIDLDEKAIKAIYSSV

SEQ ID NO: 92916 - protein, 107 aa, Unknown
  Obtained from environmental sample
  DOMAIN (1)...(72): Histidine kinase-, DNA gyrase B-, and HSP90-like ATPase
  misc_feature (1)..(107): Xaa is any amino acid
SVTDTGIGISSEQQKSLFQPFQQAESGTTRKYGGTGLGLVISKRIVEMMGGSIWIESELGKGSTFSFTIQTLASSLNVKACSSVTDKQHAEKEQADIEGVLPDGASL

SEQ ID NO: 92917 - protein, 54 aa, Unknown
  Obtained from environmental sample
  misc_feature (1)..(54): Xaa is any amino acid
VEINREIVKALLEPTQVEIDYAANGKEALSMFRQSSEKYDLIFMDMQMPEMDGY

SEQ ID NO: 92918 - protein, 59 aa, Unknown
  Obtained from environmental sample
  misc_feature (1)..(59): Xaa is any amino acid
MMVAPRTGAWIETGLRLVARLDKAVAPRTGAWIETAIEISKRDQERDVAPRTGAWIETA

SEQ ID NO: 92919 - protein, 415 aa, Unknown
  Obtained from environmental sample
  DOMAIN (177)...(356): Integrase core domain
  misc_feature (1)..(415): Xaa is any amino acid
MGLSMREKKALTGEISKRYQRAERKEKTEILNELVKTTGYNRKYVLHVLANWGKTAVVSIGGKTVRLTVSPGKRRKGGGRKPKYTGGFVTALRKIWTFFSYRCGKILAPFMREQMGFLEKPFHLTEKEKELLLSASPSTIDRLLKTDKKKLALKGKSGTKPGKLLKKQIPVRTYYADADKKPGFFEIDTVHHCGTSDSGEFCLTLTATDVYSGWVELHPTLNKAHKWVFEALLDIKATLPFPLSGIDSDNGSEFINSALLKWCQDERIQFTRSRAYRKNDNCFVEQKNFTCVRNFVGYYRFSAEAERDALADVYRSLCPLLNFFMSTIKLISKTRVGTKIKKVYDKKIISPYQRLMASSYLSADVKAELYRRFAMYDPVKLQREVHKAVDALVSMNRATNLEGGKALAVSALQAI

SEQ ID NO: 92920 - protein, 469 aa, Unknown
  Obtained from environmental sample
  DOMAIN (2)...(469): Putative glycosyl hydrolase of unknown function (DUF1680)
  misc_feature (1)..(469): Xaa is any amino acid
LPPSLPAPGLDYGVPKDTGHGGCVFQDSDFAKWIEAASYSLVWHPDPALEKTLDDAIDIVCNAQQEDGYLDTYYIINGLDNRFTNLRDNHELYCFGHLLEGAVAYYEATGKRKFMDALIRYADCIDRLIGPEDGKLHGYPGHEIAEMALVRLYAITKNEKHLKLAKYFIDQRGQEPLFFEEEEKRNNNNFYWKDSLFRYQYYQAGKPVRDQHIAEGHAVRAVYLYSGMADIARLTDDADLLKACDDLWNNIVNRQMYITGSIGQSAYGESFSYDYDLPNDTVYAETCAAIGLAFFAKRMASIAPKGTYGDVIEKALFNGIISGISLDGKSFFYVNPLEAIPEASLKDHGKRHVKIERQKWFGCACCPPNLARIISSLGSYIHSLNNNAIYTHLFIGSEAKVKISGADMSLKIETKYPWEEQIDISFAMSAKTKFKYYFRIPGWCGKYSIRLNGIEQSCTVEDDYALIDR

SEQ ID NO: 92921 - protein, 453 aa, Unknown
  Obtained from environmental sample
  misc_feature (1)..(453): Xaa is any amino acid
VANNKDWKKTYFSEGGAAADFTDAEIDSMFSRVLAQACAELGKISSVLLIPPDVTRFHSQAGFLTGIAYRELTKAGIAVKVLPALGTHVPLTSAECERMFPDVPRSLFLVHDWRNDVVELARIDRRWIEKTTAGAVSYDWPVQVNKLLRDGGFDLIISLGQVVPHEVIGMANHAKNLFVGTGGKEAIDKSHFAGACFGMEKMMGRADTPVRAMFDEGLRLSDGMLPPVLYVLTVISARSETETANSDKPGKPSLPKGSLAMRGLFCGFGRACFEEAAALARKVNVDLLDEPIRKAVVYLEPEEFRTTWLGNKAVYRTRMAMADNGELLIIAPALERFGEDMGVDALIRKNGYRPGKEIIAKTKTDAELGGNLSAAAHLIHGSSEGRFTVRYCPGGKLTRKEIESVGFQWGDLNEQMKRYDIKTLAAGWNTVNGERIFFVPNPALGLWAEKRKF

SEQ ID NO: 92922 - protein, 428 aa, Unknown
  Obtained from environmental sample
  DOMAIN (80)...(342): Phosphofructokinase
  misc_feature (1)..(428): Xaa is any amino acid
MADNFDFTVEQLGECAIKSPIAMSTTIGDGVANYVTDEQFVHLSVGAKIGAQESYKRADILERAGPREMIYFSPAHVHAGIVSCGGLCPGINDVIRAVVRCLWYRYGVTRISGIRYGYKGFLPESQYPVKTLNPDTVDDIHKLGGTFLGSARGGGKEVVKIVDAMEKLNLNVLFTIGGDGTQRGTLDIAEEVKKRQLKIALIGIPKTVDNDFSIIDRSFGFQTAIEKATEVVSAAHMEACSAMNGIGLVKLMGRESGFIAACTALASHEVNFVLIPEVPFNLEGYNGFLHHLEERLKKRKHAVIIVAEGAMQEQLLTEKKTDAGGNLKLADVGTYIKDRIIKYFDDKKIDISLKYIDPSYVIRSAPANPADSIYCERLGNAAAHAAMAGKTNVVIGLVNNKYVHVPIKAAIAQRRHVDPEGNLWRDML

SEQ ID NO: 92923 - protein, 449 aa, Unknown
  Obtained from environmental sample
  misc_feature (1)..(449): Xaa is any amino acid
AGSRADKAEEAAVAKLRDQAQERLTLIKTSFEDKIKSVQETIKTKLSEIQEQVKINREEWKAETTAIETRQKTYSADWKKDIQELNTLAKEQQDNWNRDIQEFAARAQQQMESLDAALKKNREEWDAASRATGREIIAATEETIKTKLGEIQEQIKNNREAWQTESVAIEARQKAYSADWKKGIQELTVFAQDQKEQWDREIQEQIKNNREAWQAESAAIEARQKAYSADWKKDVQELTVFAQEQREQWNREIQEYAALARQQAEALGAAIQKQKEELGEAIKKNREEWEIAFRDTGQEVVSAAQERLEEYRQAQEEQFRQLSGIANDAARLEVELRRSMQDAMNHVNSDFAIFGQEIRGTWETASGEFNGQLQTLRHELAGIDRELAGIKEKAIENVSERLKVFEDEFLADLNKRGAVIDQQLAAWQETLDKRLEVIAADSEAKRQKT

SEQ ID NO: 92924 - protein, 446 aa, Unknown
  Obtained from environmental sample
  misc_feature (1)..(446): Xaa is any amino acid
MRGADESRKSFSEQLGRDLEEVKNAAENEINTKIGQYNLSVADTIRQSQRDLETQIHELVTDSKERYTALETSSEEFRKNIEEWQTQYNTRMRELDNAMEEARRRGREISVENEERLMAARNSLDEMRHEITAQVKLFDRTDMLKAELSRHVEDMSGNIERLLQLKNEIAHFENQFIQIKRLEDDVNAKMTRFLSEKRRIEVMESDFTRLLQTSQSVEEKLAQVSNSDDILQTMQVQIRRLEDAIKEAEEKYKRVERKSKTLQETNDGIDRNFRILQEDEQLVKRLEDTISTLRIDMDTIQSSVKTLSAENEKARDAAEKLSTLDETVKWLEKRIAEMNVARESLARLATELQNLDKDAQDQLNLTRSLLSREEGKIEGRVAGKAAGKAAGKASGRAADDGAPPPRDRENIIRLKRQGWSIDEIARSMKISKGEVELILELGPKEM

SEQ ID NO: 92925 - protein, 115 aa, Unknown
  Obtained from environmental sample
  misc_feature (1)..(115): Xaa is any amino acid
MQNFEYCNKTKIIFGRDTENQVGTETAKYTKRVLLHHSGKSAVKSGLIDRVKTSLKNFNIEWVELTGVLPNPRLSLVKEGVNIVKKEGLELILAIGGGSVIDSAKAIAVGAVNDG

SEQ ID NO: 92926 - protein, 391 aa, Unknown
  Obtained from environmental sample
  DOMAIN (15)...(158): Malic enzyme, N-terminal domain
  misc_feature (1)..(391): Xaa is any amino acid
MDYATESLKKHYEWRGKLETIPKMPVNTREDLSLAYTPGVAQPCLEIQKCPEKSWELTGRWNTVAVVTDGTAVLGLGDIGPEAGMPVMEGKCVLFKAFGGIDAVPLCIRSKEVDVIVETTALLAGSFGGINLEDISAPRCFEIERKLKARCDIPIFHDDQHGTAVVTTAALLNALKITGKKLENISAVILGAGAAGTAVARLLLALGLGDVVLCDKQGAIHRGMPNLNDEKARIAEISNRGMKKGSLADVIRGADVFIGVSAPNLVTAEMVKSMSRDAILFPMSNPVPEIMPDEAKAAGAAIVGTGRSDFANQINNVLAFPGIFRGALDVRASDINEEMKIAAAYALANLIGENELRPDYIIPAAFDPRVKDAVAKATAEAARKSGVARLK

SEQ ID NO: 92927 - protein, 357 aa, Unknown
  Obtained from environmental sample
  misc_feature (1)..(357): Xaa is any amino acid
RNNPSARLYRESSPQETVALGLVKMDEAKRKWFYLNSAKGKAAQSLSECRERAAKYQKCIAAGYSFTIGRKTDGTVAVIGHSKQSQWDTGSWRDIVAVAGSFNYAVGLRANGTAVVVKHGAFFGGWERPVIWWHIATVAVGDKHTVGLIKDGTVVAVGSYKHGQCDTGSWRDIVAIAAGSAHTVGLKKDGTVVAVGNNEDGQCDTMSWRNIVAIAAGDFHTVGLKADGTVVAVGHNGNGQCDTVSWRDIAAVTVRFDYTVGLKKDGKVVSVGLNENGQCDTGSWRDIVAIAIGEYHTIGLKADGTVVAVGKNENGQCNTGSWRDIVAIAAGCEHTIGLIAYGTVVATGLNNYAQCIT

SEQ ID NO: 92928 - protein, 462 aa, Unknown
  Obtained from environmental sample
  misc_feature (1)..(462): Xaa is any amino acid
ERCNDFGAGGVSVAVGELAAGLDIDLDKVPKKYAGLDGVELAISESQERMAVVCAAADADAFISLAAAENLDAVIIATVTSNDDNGNTAKDAAALKMKWRGKTIVDLSRTFLNTNGAPRSAQALLPAQLNAEPSEPPRHVHPGDALVNLGQELKSLRSGSRRGLQERFDGSIGAASVLFPWGGAEQGTPECGMAALLPSLEKQSRTASILTFGYDPDLMEQNPYEGAKGSIREALAKFACLGGDFRKARLSLQEYFQRPLSPESWGLPAEALLGALEAQLALGIPAIGGKDSMSGNYRDTARGIDITVPPTLVAFAAGTAPAASIRSGALGGKAGNVIVLLAQTESYSFKTANPNCNEWDIFKANMDALAALGAIGCVCSAYPVVSGGVAASLALMAFGNNAGLEMKSRAFTIIDGSSYQGAVLVEIDGAAFRDNPRVGEILGGAGCWEIAAFTIEEPVFRV

SEQ ID NO: 92929 - protein, 226 aa, Unknown
  Obtained from environmental sample
  DOMAIN (1)...(224): LytB protein
  misc_feature (1)..(226): Xaa is any amino acid
VIIRAHGVSPAVERELSKKGINILDATCPHVKLSQSKARSFVERGYRLFIAGEENHGEIAGIKGYAEDGFSSTNVSAACFVVSNAQEAFSSAEELYRCEPEAKTALIAQTTLRAEEYRAIGEKIQQFFPSLEIVNSICTATVDRQNALRELADVDAVIIAGSRESANTQRLLSLARELGKPAWLAEAVSDIPTEIGAYETVGLSAGASTPDDLIAVIEDALIYRLC

SEQ ID NO: 92930 - protein, 64 aa, Unknown
  Obtained from environmental sample
  misc_feature (1)..(64): Xaa is any amino acid
MEVREEEEDSKNIVDIMFDTLAEKDPEHFAVRQYRKYKLAAGLIYSNGRFNQRPLIICSRLFAV

SEQ ID NO: 92931 - protein, 666 aa, Unknown
  Obtained from environmental sample
  DOMAIN (1)...(75): Cache domain
  misc_feature (1)..(666): Xaa is any amino acid
MSAKPTTIIAYGRAMLDDDGNLLGVVALNMNFERVKAYIIQANLGKVWFGILLDENFNFIFHRDHGLEGTNFADVTSDTARLVELLKSGNNSVSEYSMINYQGIPSITFIRKLENDWYLGIVTPKDEYFTEVKRVRLILILLGAALSAIFSFILAHIITEKRKADAKINEAEKAIMANRVKSDFLAKMSHEIRSPMNVILGIVEMQLEKKGLPQETMEALGKMQNSGHLLLNIINDILDLSKIESGKMELVAGSYDIPSLINDTVQFNVIRFDSKPINFVLNIDENIPLNLFGDALRIKQILNNLLSNSFKYTDMGEVTLSFSAEASGAGVPGAGASGAGTPEAGVSGADKTVTLVIKVSDTGQGMTQEQLDKLFDDYTRFNIDPKRQIQGTGLGMSVTKRFIDMMNGEITVKSKPGKGTEFTIRIPQGYVDSAVLGKEGANNLQKLCAEREAKDSDNEIVREYMPYGKVLVVDDMEPNLYVTNMVLAPYGLTISTAKSGQEAIDKVKSGITYDIIFMDHYMPEMDGVEATKIMRDLGYKHPIVALTANALVGQAKIFLENGFNGFLSKPIDTRQLNSTLNKFVRDKYPVEVVEAARKMKKPEDEGDSELPDLSKLKALIVDDFMPNSSLTAGLLEEYKMQADCLLSGQEAIDKIKSGEPYDIVFM

SEQ ID NO: 92932 - protein, 337 aa, Unknown
  Obtained from environmental sample
  DOMAIN (59)...(293): Methyl-accepting chemotaxis protein (MCP) signaling domain
  misc_feature (1)..(337): Xaa is any amino acid
MIVHIKDEANGLSDIGNDLAGNMTETAAAINQITANIQSIKGRIINQSASVTETNATMEQVVTNINKLNGQVEDQSSNISKASSAIEQMVANVGSVTQTLVRNADNVKTLEEASEVGRSGLEGVVADIKGIALESEDLLKINAVMKDIASQTNLLSMNAAIEAAHAGEAGKGFAVVADEIRKLAESSSEQSKTIGAVLKKIKGSIDKITKSTENVLNRFEAIDSNVKTVSQQEENVRNAMEEQGEGSKQVLQSTSSLNELTQQVKRGSNEMLNETREVIEESSNLEKITQEITGGMNEMATGADEINIAVHHVNEITNKNREGINTLMQEVAKFKVE

SEQ ID NO: 92933 - protein, 305 aa, Unknown
  Obtained from environmental sample
  DOMAIN (10)...(304): Aminodeoxychorismate lyase
  misc_feature (1)..(305): Xaa is any amino acid
LAVEFDGETVTFEVFKGESAKSVGDRLAGLGLIRSRLFWQILCRYAGGQVKTGNYRVNVPSDSLAIHRLLVSGKQVLLRVTIPEGLTLGKTAKLMESAGICASEEFISMASDPEITGFYRIPGPGMEGYLYPDTYLFPSGYPAAMVVRAMADNFFARVAKMDERASIMPPDELNKRVILASIVEREYRLDEEAPLMAGVFQNRLDIGMALQSCATVEYIITEIQGKPHPEVLSTRDTEIRDPYNTYIKPGLPPGPIASPGEVALKAAFNPTKSDYLYFRLVEADSGRHYFSKTLDDHIKAGRLYT

SEQ ID NO: 92934 - protein, 255 aa, Unknown
  Obtained from environmental sample
  DOMAIN (1)...(55): DNA primase catalytic core, N-terminal domain
  misc_feature (1)..(255): Xaa is any amino acid
MFPIADRQGRVVAFGGRSLPGTAWGDGKEPPKYINSRETAAYKKGQVLFALDLALPEIRRSKTVYLAEGYMDVIALHQGGLPNAVASCGTAFTDEQAKLLRHWADTAILVFDSDEAGQKAASKGIITCRKNGLGCKLALPGLDGGDQKDPADILQKFGEDHLKLSMKSVIIDLDYLIAKAKTLFDVTTPKGKAEALALLYPYLDALESKTERDACVQTLADEMRADRGAVDNDYDSWRRSNGGASAGRAKDADSK

SEQ ID NO: 92935 - protein, 71 aa, Unknown
  Obtained from environmental sample
  misc_feature (1)..(71): Xaa is any amino acid
MSKAHRGKGIRELAAHGRGTCAICGATGIKVLYEAGEQKVKVCKPCRAAVKHGKKSVPAVETAPAEASAAE

SEQ ID NO: 92936 - protein, 296 aa, Unknown
  Obtained from environmental sample
  misc_feature (1)..(296): Xaa is any amino acid
MVLSAPPEFKLRKREGAIAALALFMLVFFGGALFVRPFQEKAVDRGGGLLEPKLFRFDFSQVIRLESEISVNDDLVLIIKKDPYDSHILLRRYTLSAYNPRQGFFRLGDLDEAAHPQNLPGRRTLLKTEEINNYSINEQEYYIVNFDSSAFIGMNMPVEIIPFETWDASSFNSAYAVVSYTSETFPYELIRSVRGNDWSESLGLNPEEYALYTDYGGDEAIAAFAREIIGSSLSRLTGRGGNSPSYCEQVQMIYDRLKFGEYRYSLKPGIAADGDQLKHFLLNSKKGYCSYYAFAF

SEQ ID NO: 92937 - protein, 138 aa, Unknown
  Obtained from environmental sample
  misc_feature (1)..(138): Xaa is any amino acid
SRIIEFLSSGNVNGIINFEQKNAAGEGYCSVNLSLASGPWVIGLISPEFSAYLNALMAPIATGEVMTKADYLIFVASIYGKNIADEIASSSIRASVNCPGVVQRVKGGTFSGRRAEFEIPLLDILVLEKPLSYEVVWK

SEQ ID NO: 92938 - protein, 269 aa, Unknown
  Obtained from environmental sample
  DOMAIN (2)...(208): Nucleotidyl transferase
  misc_feature (1)..(269): Xaa is any amino acid
VLMEVAFEPMLIWAVDAAKASGIGKIGVIIGNNAELIQKRLEKYDNCETFLQEERKGTGHAVMQAEKLLRERGGDALVLCGDAPFMDAETINGAYELHKSANNAVTVITAEIENPAGYGRVIRGENGGLIGIAEEKDCDAAQRLLKEVNSGAYWFNAERLLEVLPKLTSENKSGEYYLTDTVGLLRGSAGAYKTTNHMVTLGANDRKGLRRLNKIAAEMIIDGHLDNGVDIIGESSVIGRNAVIGRDSLIMPNTIIKGDTVIGKGCVIG

SEQ ID NO: 92939 - protein, 98 aa, Unknown
  Obtained from environmental sample
  misc_feature (1)..(98): Xaa is any amino acid
LSCLEPDIGLQRLSALMSANPARILGHKDRGRIEKGLRADLVLADIGAKWKVETEKFKSRGKCSPFAGKELRGKIIMTFNAGKIVFGGAVVSKGAVIV

SEQ ID NO: 92940 - protein, 69 aa, Unknown
  Obtained from environmental sample
  DOMAIN (1)...(52): Phage derived protein Gp49-like (DUF891)
  misc_feature (1)..(69): Xaa is any amino acid
ERYSLGLIIDYGPGYRIYFIKSGQTVVILLCGGDKSTQDSDINIKVKGMVADLKKNSLKKRKLKKGNNK

SEQ ID NO: 92941 - protein, 103 aa, Unknown
  Obtained from environmental sample
  misc_feature (1)..(103): Xaa is any amino acid
MSCAETTPGGRVKLLCENGLGMDVYKTLREEAFEANLEIKRRNLAIYTWGNASAFDPDKGVFAIKPSGVEYDELKPDMMVLIDLEGSVVEGRLKPSSDTKTHQ

SEQ ID NO: 92942 - protein, 345 aa, Unknown
  Obtained from environmental sample
  misc_feature (1)..(345): Xaa is any amino acid
MNKKNDIPLVEKHNQALLTIPLLLAKDGFNVTVTDPSWANYSLIPDTSIYNKYEKINAFNIIRRYTNLWYDKQNPDKKEFTYPRIKRNIIWFSILKMNNPLLRLIIYDKGWYWSTDDMGKSIIDFINSYAIMDFLPDLTSFDSIEKTALLFSNELAHEFAWLHGQDFKPSEIPSTIGNSVYASDARYHSNTALYLKLGEWFDLLRKNGVYDNTRIIIAADHGGDVKNLISNEPLSIKNESRELYNPVFLYKDFNSHGTLYVNNDFMTNADVPFFILNGLSDNPVNPFTGNQITTLPKEEGILITTHHSPMAGSHGKYVFNIKNNEWMYLHDSIYEASNWESFELR

SEQ ID NO: 92943 - protein, 470 aa, Unknown
  Obtained from environmental sample
  DOMAIN (1)...(49): Clp amino terminal domain
  misc_feature (1)..(470): Xaa is any amino acid
EATALKDEFVSTEHILIAISAGEGKAAELLKKAGVTKKAILDALRQVRGNQRVTDQNPEGKYQVLERYCRDLTALARQEKIDPVIGRDEEIRRCMQVLSRRTKNNPILIGEPGVGKTAIVEGLARRIVAGDVPEGLKDKKLLALDLGLLVAGTKFRGEFEERLKALIHEVQAAEGKIILFIDELHTLVGAGAAEGATDASNLLKPALARGELRCIGATTLDEYRKHIEKDAALERRFQQVYTAEPSVEDTIAILRGLKERYEVHHGVRIKDEALVAAATLSSRYITSRFMPDKAIDLVDEAASRLKMELDSRPTELDKLERKLLQFSIEKQALSREEDPASKERLAKLEKEIADITAERDAMKARWEAEKVDIQGIRELKQRIEELKIEETRYEREGNLLKAAEVKHGKIPEAQKQLAALAALMEKKRDKAGGTGTTALLREEVSEEDIAAVVSAWTGIPVSKMLSGEMQ

SEQ ID NO: 92944 - protein, 313 aa, Unknown
  Obtained from environmental sample
  misc_feature (1)..(313): Xaa is any amino acid
LFRYERAQKGRLREFFQLNLDIIGTDSISAEADLISAICAMLLDFGLTENDFAIGISSRRLLAAFLENLEVADANLIYPILDKRLKMPAEEFEKELLNAGLSEEKAKKLNAFMNCTSIGEIKSLFEWQGFPELEELFELIKIAGFENSVKLDLSVVRGLAYYTGIVFEVFDKAKNMRAIAGGGRYDNLTETLGGQRISGVGFGMGDVVLADLLKEKNLLPQSNADLPVFIASFKSDMKILFKTAGEFRKAGVACSHSLNAVKFSKQLEMANAANAKCVIFADGEKTNGEYFEYKILSTGEQGCLTWEKIKEKL

SEQ ID NO: 92945 - protein, 563 aa, Unknown
  Obtained from environmental sample
  DOMAIN (271)...(549): tRNA synthetases class II core domain (F)
  misc_feature (1)..(563): Xaa is any amino acid
MTQTIDITNTVKNLHPLEIRILLSYKKGDELTIEKVEKELRLKPGNGNQALSWLAGKGLVSELRREKAIFYEITSLGQEWKTKGSPEERILALVRQRLAAQDKLAANDRPRLTDIAGALGMENKDIGSAFGSLSKLGVLTLDGDKKVTIALPPESLDDPARNPALAQFTVLHGLFKKTAPEDGLLAEASLNDEEKKFISGIAKKRGASDAAFRQIDREIVVFGFSVAQDGSVPAEAAAAALKAAGISGEEIGTLSQQMLETGSWKGKAFRSYNVKTPPTRLTPGRSNPYAKFLENVKDKLASLGFEEFDGPLVETEFWNSDALFMPQFHSARDIHDSYSLSDPKKPGEIAKAKSIEEPWLSNVATAHENGGKTGSRGWSYAFDREFTRRLILRSQGTVLSAKTLPKAKIPGKYFGIVRCFRYDRVDATHLPDFYQTEGIVLGENVNLRTLLGMLDMFAREVAGAKEVKYVPGYFPFTEPSVEVHIKHPVLGWFELGGSGIFRPEVTQSLGVDVQVAAWGIGIDRMALMALGLNDLRDLFSGNIEDVRLRRLHETNKLKENTNA

SEQ ID NO: 92946 - protein, 87 aa, Unknown
  Obtained from environmental sample
  misc_feature (1)..(87): Xaa is any amino acid
MFSQYLSQSALKGTVKDLMTSGLAVEFIQPWYTPLSTTPATTGIAVGGIGSAFTVTPAGTTPVMHFLPGIQVRGEKNGNLRLNDFYF

SEQ ID NO: 92947 - protein, 307 aa, Unknown
  Obtained from environmental sample
  misc_feature (1)..(307): Xaa is any amino acid
MIMPKAMAGKASFKHPKFAPLTLDFTFKKAFANEQSTELLLFLLNTFLAEKLKSPIKKVSIINSEQLGKTRVNRNAIFDVYCEDAIGSRFIVEVQVDKQEYFIRRTFYYLCMIISNLAKKGKKYDFNIPKLYSISFLDFDINFGKNCAEVVQHLSIRNDKHPEVSYDMLQMTFVILPRFNKTESECKTIMDKILFAFKNGHKLKKAPKSFKEKELRDIFSIAEISNFTESELYKYETVMRNKYDQKAILAYAKEKGEAKGEARGLARGKKEGILQTAKNMIKDGLELERVARITKLSKEQIIAFSKA

SEQ ID NO: 92948 - protein, 92 aa, Unknown
  Obtained from environmental sample
  misc_feature (1)..(92): Xaa is any amino acid
MLNVALFGKTAGEWKEKNPSKKGNMRDYANIEQLLVLANLESYNAILIEQGHKQTDRIVLLNKAAHKQLETLLNARVKHDKLLILPKTLSSP

SEQ ID NO: 92949 - protein, 117 aa, Unknown
  Obtained from environmental sample
  misc_feature (1)..(117): Xaa is any amino acid
LFSIIAKKVKDYAAANPDKKIIRLGIGDVTLPLVPTVTNAMQQAVLEMGDAKTFRGYGEEQGYSFLRQAICKYYGKKNVALNEDEVFISDGAKSDLGNILDIFSNDNTVLIPDPVYP

SEQ ID NO: 92950 - protein, 295 aa, Unknown
  Obtained from environmental sample
  misc_feature (1)..(295): Xaa is any amino acid
MSKSSRFDDFFRKHPDTEEYVANAEFVMKQLDNALDDHTHNGTDSPLIDQSVTLDFAAHGGTIYVRTPAASSNQGELPDTSGLGDTYTKTAIDNKLAGKSDVGHTHVVSNITDFPIAIKNPEPLTINGQAYDGSSAINFDLSSSSFVENELDDVKNKLNNKSDNNHVHDGTIDDIFIKFSSGAYPLSICIYDLYDKKLNSSTFDEFTVEYNNKTQDLENKISAYHTKSEVENLLDEKADKTDTYTKSEVDATMADVMKTNADAIMTAQLTAGGAQAVETSQVRNIYAGTAAMAEN

SEQ ID NO: 92951 - protein, 131 aa, Unknown
  Obtained from environmental sample
  misc_feature (1)..(131): Xaa is any amino acid
MLPNEEGRKLTGKQLLAVLDEACGKGTIVISDDLSSYKILDKKTAKNFAHLTVNHSMGQYSAGNGVDTNGIENFWSILKRMHYGTYHSMSEKHLQNYVNKCAFRANHRGDAGEFEKLLKQTLIAGMDKRAA

SEQ ID NO: 92952 - protein, 695 aa, Unknown
  Obtained from environmental sample
  DOMAIN (10)...(70): [2Fe-2S] binding domain
  misc_feature (1)..(695): Xaa is any amino acid
AFRREKEVYAFAFAEAGAVQCGFCIPGIVLSAKALIDNDNDPPDEAIRKAIRSNICRCTGYKKIIDGIKIAAGLFRDNAPIPRRHFTGKMGENMHRPDAVVKTLGAGKYVDDLVFEGMLHAQAIRSAYPRARVLKIDTSAALAHPDCAAVLTAKDVPGNIKIGHLSFLSDYDVMIAEGSITRFISDTLALVVCEHKEKLDEVKALVKIDYEVLLPLTSPQAAMAESAPLIHHNKERNILSHEHLVRGNADEVLAKSKYVVKKHYSLPFTEHAFMEPECAIAMPEGEDGLVLYSGGQSVYDEQRECSRMLGIDPEKIHVMSQFVGGGFGGKEDMSVQQHACLAAWVLKKPVKVLLSRQESINLHPKRHAMEIELTTGCDENGMLTAMKAVIVADTGAYASLGGPVLQRACTHAAGPYNYQVIDIDGKAVYTNNIPGGAFRGFGVPQSCFATESNLNLLAEMAGIDPCEIRYRNAIKPGQVLPNGQIADGDVELRECLEALKETYEKAKAEGKHVGIACAFKNSGIGVGLKDIGRCVLSVENGVIHIRTSAACIGQGLATALTQIACQTLCPEAGSDFSAESGFPAESFFFEQADTTRTPDSGTTTASRQTLFSGEAVRQAALKLKAALDREGGRFEDGLKALTGQEFYGEYSGVTDPMGSDKPNPVSHVAYSYAAAAAILDDEGKVEKLAAVYDMG

SEQ ID NO: 92953 - protein, 852 aa, Unknown
  Obtained from environmental sample
  misc_feature (1)..(852): Xaa is any amino acid
MSLDRRVSTGMPGLDRAIDMLRLGDNVVWQVNTIEDYLHVVRPYIKQAKKDGRRLVYFRFGDHEPIMTEDEPSVLYKLDTSEGFEIFAAKMHEIIDREGLEAFYVFDCLSDLLKSWRSDMMVGNFFRVTCPFLFVLDTVAYFALIRGTHTHDTIARIRETTQLLLDVYIVDNKIYIHPLKVWERYSPTMFFPHLIEEDGAISITSSADTATLFSQVSGSGQPSDYWNITLDHARTLLNGNKEEQEEMKKLLISLVIGKELRITELALKYFTLRDVLDIARREIGTGFIGGKSVGMLLARKVLETDAQDAMRGHWEPHDSYYLGSDIFYTYIVQNGWWDLRMRQKTTEGYFTLAKELHEKMLQGKFPDIIREQFKQMLEHFGQSPIIVRSSSLREDNFGNAFAGKYESVFCANQGTPERRYAAFEQAVRTVYASTMNEDALAYRQNRGLTNLDEQMAILVQRVSGNHYGDLFFPHLAGVGNSSNLYVWDKTMNPDAGMLRIVFGLGTRAVDRVSGDYARLVFLDQPEKTPPVSHNDERRFSQHNADVLNLSGNQLEEVPLDKLSNLDLKTDGSIFFSVDTETINRLEELGRTYQYTPKISDFKKLLSETGFPKFTQTVLSTLVSAYSYPVDIEFTVNFDPNGEFRFNLLQCRPLQTKGLGRAIKIPDLKQEQIFFSSIGNFMGGNVRLSFDYAICIRTMEYLALPEQDKYNVARTIGVINQKYKDKTMLLLGPGRWGTTTPSLGVPVHFSELCNMAAICEVSYPKAGVVPDLSFGSHFFQDIVESDVFYAAIFNGEPDVVFCPEQILERENIFGKLLSGEKKLDSIIHIAETPGLILHSDITNQKLLIYWEQR

SEQ ID NO: 92954 - protein, 355 aa, Unknown
  Obtained from environmental sample
  DOMAIN (170)...(330): Peptidase C26
  misc_feature (1)..(355): Xaa is any amino acid
MKGYLVLQNGTVMEGSSFGAQGEITGEVVFATGMTGYLETLTDPSYYGQIVLQTFPLIGNYGVIPPDFESSNVGARAYIVKTPCQNPSNFRSEKNLDNFLKERSIIGLYGIDTRALTRIIRENGVLNGKIKMSPPTDADIAEAKAYTIVNAVAAVSSRDTAKPETKGDGTAARRVALFDFGAKRGIARALAARGCEVRYFSYNASADEILAFKPHGIMLSNGPGDPAEPANNGIIETLRVLQKSKVTIFGICLGHQLLALANGYTTKKLKFGHRGANQPVKDTSTGRVYITSQNHGYAVVTDNGSFVNVNDGTCEGMDYGNSFSVQFHPEACGGPLDTAFLFDRFIERMDKNVTR

SEQ ID NO: 92955 - protein, 404 aa, Unknown
  Obtained from environmental sample
  DOMAIN (5)...(402): Cell cycle protein
  misc_feature (1)..(404): Xaa is any amino acid
MKRLDWLFMISLFALIGIGLALVYSATSNSDLIWYKTDWFKQVIHFTAGSLIAGIIVFMPATFWRNIAWITYVVAIIALIIVAGSGHISKGAGRWLDVAGFRLQPSEFSKIAYLLANSLWLSKNRISIEQPKTLIVPGLLFIVPFLLVLKQPNLSTALVFTAMAIVQFYWAGFRMVDLFLLISPVASIIFSAISPLYWNLLIISVFFVSIKFKFPLWIIIFVMALDIGSGYASQMAWNSMKDHQRSRILTFVDPMRDPKGEGYQVIQSQVAIGSGGMFGKGFGEGSQVNLSFLPEEHTDFIFSVLGEQFGFAGTFVVLVLFFILLWRGIMICRLHENRFVNLVVAGACTILFFHTFVNVAMTIGFMPVTGLPLPFLSYGGSFVLTCMILIGLMLNMRLKGKDII

SEQ ID NO: 92956 - protein, 67 aa, Unknown
  Obtained from environmental sample
  misc_feature (1)..(67): Xaa is any amino acid
MQKDLLSLILQAGNIAQNEILKYWKTALNVEWKADATPVTIADKKAEELVRNFAQKRTPRFGFIGEE

SEQ ID NO: 92957 - protein, 158 aa, Unknown
  Obtained from environmental sample
  misc_feature (1)..(158): Xaa is any amino acid
RVVCNNTLQAALGTAKRKIAIRHLSAMEQRKEEAMMTMGAASRYFHELEAFASKLAGKKVSISKVLDRLFQVSRDMSKRQLQSNKEVKATIQNLLKTKDDLQNFKGSAWGVYNAIADYRSNAEPKRKTQTFADNKMARFIDGDPVLQQAQDIILEMAA

SEQ ID NO: 92958 - protein, 319 aa, Unknown
  Obtained from environmental sample
  DOMAIN (23)...(184): tRNA synthetase class II core domain (G, H, P, S and T)
  misc_feature (1)..(319): Xaa is any amino acid
MAAFIEPKILKGFRDFLPAAETVRRSLTANIEESFRSFGFVPIDTPALEYAEILLGKGGGETEKQIYRFADNGGRDIALRFDLTVPFARFVALHYNELAFPFKRYHIGKVWRGENAQRGRYREFTQCDFDIIGSDSPAADFEILLMIRATLLNLGVGVTIHINHRGLFNRFLAHIGQREKSVDVLRTVDKIAKVGYDETAAALAAITGDTNAKKILDFTAAVSGETFEETLNRITELSGGPSPESERLGLLRRFMNDALSDNGGGENGSFTLDPSITRGLDYYTGVVFETFITELPDIGSICSGGRYDNLAGLSQKAIP

SEQ ID NO: 92959 - protein, 475 aa, Unknown
  Obtained from environmental sample
  misc_feature (1)..(475): Xaa is any amino acid
MGGQYISQGVSKTVVIPGDTGRVVGWNAQTGGSVATGVNATFAMKSYKMEKADTLRIGRTAWAAKQSLAKEYRVQQTNGNSIVVIKLSPRSGVVYVSPDGKRDMYYGGDEGAQYTATPTGGRFFLFGKTDGDDDGSIELEMYASPSVSKKGDAQKSALTAGSESIKVQPADTREAFRVKTGAQQALRLYRSGSIESVDWVNKSGVITQNVKDGGKLTGESGILLVNYNEGMGKLKLCKDDNCLSSQNACRWAEPAGKKDSVPVIKEISRVTMAQGVNLYAIELTEPTHVSLHAATPAAAMVSADDKIGAYQEFWETLRWDIPLPAGKHIIGIKPLTSGSLFGIPLTIGLYPILQLTEEKPLQMQVMASQNRLAKFELQKKNHIGIGLSTQSQTVEAALLDAKGKEIATGSQIFKELDKGAYYVLLSVPSGSTQNGVSVTVRLFGQSPPPANPPTERIKRIIKDDRDESLESQASR

SEQ ID NO: 92960 - protein, 158 aa, Unknown
  Obtained from environmental sample
  misc_feature (1)..(158): Xaa is any amino acid
MSEIELRRKKSRLFRELNTIVTIMAREITIFFRSPGTAIMSLAMPVILMGMIGGNLMQNMAGGLGFQFGQFMLVGMLVNMLFMVTTMGMTSLVDDHEIDFNQEMLVSPVSRYSIVIGKILGCGFAAILSMAGTLVVSLVMGITLPIGKLLLILALSPL

SEQ ID NO: 92961 - protein, 250 aa, Unknown
  Obtained from environmental sample
  DOMAIN (5)...(250): Amidohydrolase
  misc_feature (1)..(250): Xaa is any amino acid
ALLSKNPHNKYAGPEDIIAALDESGFDHAVVFGFAFKDMGLCRLVNDYVIEITKRYPGRLTGFISVSPNAKGVEKEIDRCFSAGLRGVGELYPDGQGFNIENEKETRAFTGACIERNIPLILHVNEPVGHYYIGKNDIPLKKIERFVNNSRNLRIILAHWGGGLLFYETMKEIKEKFRDVYYDTAATPFLYDSRIYRAAEALGLCTKILFGSDFPLLPPTNYLPALEESGLSPDDKQLILGGNAQKLLKI

SEQ ID NO: 92962 - protein, 129 aa, Unknown
  Obtained from environmental sample
  misc_feature (1)..(129): Xaa is any amino acid
MNNRQTKEIHPAVIAVWAAVVSAGHLLPTIPILGTGGTFSLSHALSPLSGIFFGPVAGALCSAAGGFAGSLVAPHTAWMGPFTFIIGTATAFTSGCIAWGKWPPVVISGNGSLIINGGIIVYTIGTILW

SEQ ID NO: 92963 - protein, 91 aa, Unknown
  Obtained from environmental sample
  misc_feature (1)..(91): Xaa is any amino acid
MNYAMQHMHIPGAGNRMLPPQKPDRVYYAVLENKQAGPFSETELVRLINDKKVSKETYVWHVGLSEWKTVENVPEILRLVALAPPLIGETI

SEQ ID NO: 92964 - protein, 910 aa, Unknown
  Obtained from environmental sample
  DOMAIN (680)...(758): OB-fold nucleic acid binding domain
  misc_feature (1)..(910): Xaa is any amino acid
GLAKRYPQEKAADGLEWRQIQERCEYELGVIIQMGFTGYFLIVMDFINWAKEHDISVGPGRGSGAGSIVAYSLRITDIDPLKYGLLFERFLNPDRISMPDFDIDFANEGRDDVINYVTNKYGEDRVGQIITFGTLGAKAVIKDVARTLGISIDEAEKIAKLIPFSPGITLKQAFKDEPRLQEMEADPRYTELFALARKLEGLNRHSSLHAAGVVIGKSALHNLVPIFKDTKTGAIATQYDMNHLETCGLVKMDFLGLKTLDVIKHTEEIIRRRGGEFANFKVENAPENDEATFKMLGEGQSFEIFQFESDGMRNILKQVKPGKIEDLIALNALYRPGPMAFIPQFVESKTGRQAIHYPDPRLEDVLKETYGVIVYQEQVMQVARIIAGYSLGQADILRRAMGKKKKEIIDAEKINFLEGAERQGYSKTKAGQIYDILVPFAGYGFNKSHAAAYSVIAYHTAYLKANFPAEFMAANLTNEIHSANKEKLSECIDEARKMGIAIDPPDVNHSEKLFTIVDGRIIYGLLGIKGLGDVPADEIVRCRKDGFYHDFMDFLSRVDIKLVGKAVIEKLIQTGAFDRLGISRENLLGNLERAVEYAQKQKEDKKFGQTSLFGGTDEKEYTDFVFENFPETSRLEKLKIEKQLIGFYFSGHPMDEYRDLWEKIVKVDLGHLAGPETGNQILVGIIKAIRIVNSKSGKMAYVTIADYNGEIDMIFFPRVWEAWQDRIQEDQIAIVKGRIDYQKDRDKYSFIAEGLIDSREVETVITEEDALRRKREKFHSTWLYMADLKSGGLASAGKGSYTVIGQIVSLKETKDKNGDDMAFGTLRDFEGDIDLVFWAKTWKENRDLLGTDEFVALKGSLDPERDRNPQKPSLKVSKVDNLASLTRSAARKAEAGEQPKVPPLEMQAVK

SEQ ID NO: 92965 - protein, 342 aa, Unknown
  Obtained from environmental sample
  DOMAIN (5)...(227): PHP domain
  misc_feature (1)..(342): Xaa is any amino acid
MADFVHLHVHSDFSLQDAAVSVMQLADRAEELGMSHLALTDHGNMFGIMEFIATCQKREKPVNPIIGCEVYVSPDSRFEKKGTENENKYYHLVLLATNREGYFNLVKLCSLAYTEGFYYRPRVDEELLKQYHGGLIALSACVSGEIPRLIRAGKTAEAEQKALHYRELFGADGQGNPNFYLELQDHGIPAETLRGPLSQRDINKELIAISRKTGIPLVATNDVHYLNREDYIAHDILLCIGTAKFRTDEKRKKYYGDQFYFKTADEMAKLFADCPEAIENTVRIARRCVADVPKIGVKELTQYLPDFDIPPDFENADLYLRHLAGEGLAKRYAQEKTDGGIA

SEQ ID NO: 92966 - protein, 133 aa, Unknown
  Obtained from environmental sample
  misc_feature (1)..(133): Xaa is any amino acid
LEDYKYIDANLQPQEALENLINMGTRLAIITLGPKGAQAMLRRNNGTITSVFAPGINIPSIVDTVGAGDTFHGAFLAWLEKRGKLSHNAITELSENDLLDALVFANKASAFVCGRHGCQPPYFDEIEEKGIGS

SEQ ID NO: 92967 - protein, 140 aa, Unknown
  Obtained from environmental sample
  DOMAIN (1)...(132): Peptidyl-tRNA hydrolase domain
  misc_feature (1)..(140): Xaa is any amino acid
VNTVLLRQSIRNASEISFSRSGGPGGQNVNKLNTKVILRLRLSLIDGLSDAELERARELLANRISAGDEIVISSDEERSQRTNLERAYFRVEALITAAARLPKHRRPTKPSKAAHEKRLHVKQLQSRKKALRRPGPAPED

SEQ ID NO: 92968 - protein, 280 aa, Unknown
  Obtained from environmental sample
  DOMAIN (16)...(236): Methyl-accepting chemotaxis protein (MCP) signaling domain
  misc_feature (1)..(280): Xaa is any amino acid
MEQVIANINKLNGHVENQSSNVSQASSAIEEMVANISSVTNTLINNAINVSTLKEASEVGKTGLQDVASDIQEISRESEGLLEINSVMENIASQTNLLSMNAAIEAAHAGEAGKGFAVVADEIRKLAESSSEQSKTIGTVLKKIAESIKKITGSTDNVLTKFGAIDTGVRIVSDQEENIRNAMEEQGEGGKQVLKSAGALSEITRQVQSGSHEMLAGAREVIQESQNLEKATQEITGGINEMASGADQINTAVHNVNEISVKNREGIDLLIKEVSRFKVE

SEQ ID NO: 92969 - protein, 140 aa, Unknown
  Obtained from environmental sample
  DOMAIN (1)...(132): Peptidyl-tRNA hydrolase domain
  misc_feature (1)..(140): Xaa is any amino acid
VNTVLLSQSIRNASEISFSRSGGPGGQNVNKLNTKVTLRLRLSDIDGLSDAELERARELLANRISSEDEIVINSDEERSQRTNLERAYFRLEALLTQAARLPKHRRPTKPSKASREKRLHVKQLQSRKKELRRPEHTPDD

SEQ ID NO: 92970 - protein, 484 aa, Unknown
  Obtained from environmental sample
  DOMAIN (171)...(357): Radical SAM superfamily
  misc_feature (1)..(484): Xaa is any amino acid
MKDILLAVINAKWIHPSLALRLLKANLGPLEDTSEIIEFALRQPLREKTAPILAAKPRILGLSVSIWNHLATLELLKKLWEAWADEDVSRPVIILGGPEVSYLPKESEIFQFADYCIRGEGEIAFRELCGKILNKDDILINNEFNTVNVKEIKSGYSLYTDEDLRKKLVYVESSRGCPFGCEFCLSATGASATGASAVSAGVRDSRVREFPLEPFFCEMEGLIHRGAKTFKFLDRTFNFNIERSMKIMNFFLYNINEQIKQNRKPLVVHFEMVPSRFPPGLIDTIARFPPDTLRLEIGIQTLNPEVGARIGRPSKPEQELETLKLLAEKTNAIIHVDLIAGLPTEGMESFGKGFDALWDAFNGRDSRRVEIQLGILKLLPGAPIARHIECFGLMFNSLPPYELIESAAIPASNMDRIKNFARFWELLVNRGLLDIGPAPVFDRFMALSDSLLAHFGRNWGIAKDELQEQIKGLGTGDQGLENEQ

SEQ ID NO: 92971 - protein, 323 aa, Unknown
  Obtained from environmental sample
  misc_feature (1)..(323): Xaa is any amino acid
MLGYLSRAVPLESLLESEADASEAEKNRRFVEQVQDIRRYAQEELGLNLGKNYTRYVKIDRDYLAAVVSACAADSFTRHEWKYPVVGSLPYKGFFNIEDARKERAKLEKKGLDVWIRGVDAFSTLGWFRDPLYSYMRDYPPDRLADLIIHESLHATVFIKGQAQFNEELAEFAGSEGARMYMASRYGAASAEYRNMHKDEADNKRYVSFLQGLIRELNKLYESERNGEEKLIEKEKIISAAKKRFAAEYENMFSGAGYRGFTEMPVNNAYLELYRLYYTEDAYIANLFARSGKSLPEFIAAAKTISKKGDGRKMLAQALQNNK

SEQ ID NO: 92972 - protein, 440 aa, Unknown
  Obtained from environmental sample
  misc_feature (1)..(440): Xaa is any amino acid
AVTYLFRYPYGCMEQRSAAIMPLVIFGEYLDALGLKSEVDNPRKVVENELKSWAKVQLSGGGFPYWPSGTRADFYVSLRIAHIIAIAKSKKMNVPSSLNIADLNSYLGREYQEMQKWRNNSSSYYYQSYLQSYMLYVQSLLGEKVDPSRLAEILSRDNVDPSVLAFVGMTYRALRQNTDAANTAQRLRNLVRMSARGADITDPLDKHRYGYYGGMVEQLALTLQFFVDQYPGDDINTRLLFSLLESKRSGSGYWESTAVTIRVLSAVDALIRAENLTNLDVNGTVTLAGTELLKGAFKGLGAKPVTQTLDFTGPVLSGLPRDSLQSLNFTRRGRGNIYYTVSLRYAIPFELQTFRDEGIGVFMSLYDINTNEEIRGTALQNGKTYRARVRVSSNRDRTYVALRVPVPSGAEILDATFVTTASYGDRGGTSGNEQIRSSSW

SEQ ID NO: 92973 - protein, 92 aa, Unknown
  Obtained from environmental sample
  misc_feature (1)..(92): Xaa is any amino acid
MSPGSLLLDYIRNYNLNCNRVSKEIKCSQTALRLISLDKSRITTSIAFRLAKYFGTKPEFWLLAQMDFDLKKAVTNKPLNNALRGIAKARVK

SEQ ID NO: 92974 - protein, 402 aa, Unknown
  Obtained from environmental sample
  DOMAIN (28)...(400): Bacterial extracellular solute-binding proteins, family 5 Middle
  misc_feature (1)..(402): Xaa is any amino acid
AQSYYASEAQIFTALYEGLFSYHPLSLEPVPALAERWSLSEDKTQWTFILRRNARFSNGDPVRAEDFRAAWFSLIEPQKESPYSSFFDVIEGAREYRNGTLKDKDKVGIKAVDQRTLVIKLSSPASFFPAMLCHHSFSPIHPSMLDKTEWSPYKAGKNWTPPVSNGPYKIVSMDKKSIVLQKSDQYWDSNRVALKKIIIKFTETGDQAAHLWNSGEARWISGEVNTEALTDRSGIQVNVMFATHYYFIRSAEKPWNDYRIRRAMILVLPWDEIRSSYFLPAETLIFPISGYPDVQGISEANYEEAQKLMNEAGYKSGAGMPALIIRITPSRDAERVGSIMANAWKEKLGMNVRVEEIPFGKYFEAMKGNGYTVGSTTWIGDFADPYAFLQMFRRDSDLNDAR

SEQ ID NO: 92975 - protein, 286 aa, Unknown
  Obtained from environmental sample
  DOMAIN (51)...(154): ATPase family associated with various cellular activities (AAA)
  misc_feature (1)..(286): Xaa is any amino acid
DKANKLTPKEIVSELDKYIVGQKKAKRAVAVALRNRIRRLKLDPELREDIAPKNILMIGPTGVGKTEIARRLAKLAGSPFLKVEATKYTEVGYVGRDVESMIRDLMAAGFQMVKQEMQETVLQEAKKRAEEDLLDLLLPSNNKKPKEKKMKPVVRPMGAFSINPENSNGSIIGTTLQVGIPFMNNKEENEEEKDAEEKEEPVNEGEEEKFKATREKFRVMLHEGKLEDRPVELMVNQNPQFPMVEMMGAGMEELENSLSGIAGFFGGGKKKKVVTVARAREILEAE

SEQ ID NO: 92976 - protein, 248 aa, Unknown
  Obtained from environmental sample
  DOMAIN (59)...(162): ATPase family associated with various cellular activities (AAA)
  misc_feature (1)..(248): Xaa is any amino acid
MAENKQTDDKANKLTPKEIVSELDKYIVGQKKAKRAVAVALRNRIRRLKLDPELREDIAPKNILMIGPTGVGKTEIARRLAKLAGSPFLKVEATKYTEVGYVGRDVESMIRDLMAAGFQMVKQEMQETVLQEAKKRAEEDLLDLLLPSNSKKPKEKKMKPVVRPMGAFSINPENSNGSIIGTTLQVGIPFMNNKEENEEEKDAEAKEEPVNEGEDEKFKATREKFRVMLHEGKLEDRPVELMVTRILN

SEQ ID NO: 92977 - protein, 266 aa, Unknown
  Obtained from environmental sample
  misc_feature (1)..(266): Xaa is any amino acid
MLTKYFTPTHRGVQVEYSQKPSDQFQNWIDPVLYSERGTPPDVFALESEFVRKYVESGLLLDITDIYNANKSKLIDYPVEVATYNGRVYGLSWQVCPGAFFYRRSLAKKYLGTDDPAAVQRNFSNLEQFMRTARTLKDKSGGRCVVISSLGDLVRPFLSMRTLPWVVNGRLFIDPVMENCMDFIKNVHDNRLDGEVGQWSDGWFAGMRGELKDYSGNPLEVFGYFLPTWGLHYVLKTNAPNTSGDWAMIQGPVPYSWGGTWIAASA

SEQ ID NO: 92978 - protein, 352 aa, Unknown
  Obtained from environmental sample
  misc_feature (1)..(352): Xaa is any amino acid
MTKKKLLIGLLAVMLILGGCPESEEGVKDDGKNAPNTVKYESTDTAGKTYILVITVSGSGVAEGDTYVLTIKETGQPDKIITGTVSEKGTDGTLTLKQNGSEEPLSVNVSNGQMTAINGHIAVEGGEPITAPGPLTPSNNNNNNNNNGEGEINTGGNWLQRKIINYKVSNGVASVSSESNYNWIIYSHTSNNNYEEKYTVSGYLISDSGTITNSNGSYHQTMRYISDTNYEMISSSTYTYSNPDNMASTTTTTQQQQIRNGMTASSNATSEQTNSNGQFLKQTQTGTQEADPVTYLMLRYTMSATYNTNMPGSPYQDQSQTINYTIDLISDTGGIKTYKHHATGEDAGTYGE

SEQ ID NO: 92979 - protein, 787 aa, Unknown
  Obtained from environmental sample
  DOMAIN (477)...(750): Torsin
  misc_feature (1)..(787): Xaa is any amino acid
GQHEYLTPEHILYAALAFDEVQGVLFSCGADSEQIKQGMESFFEQKMPIVSGGEPTKTVSFHNIIERALIHCKSAQKGMVDVADILVSLYDEERCYSGYYLRKAGVKRLELLHVLSHSYSEDGFVNSQKNEKYAGVDDDAEAQKKAGKKTALERYAIDLTALARDHKLEPVIGREDELDRTVQVLCRRLKNNPIHVGDSGVGKTAITEGLAQRIIAGNVPPLLRNFSIYALDMGSLLAGTKYRGDFEERVKRVVEELLKKEKTILFIDEIHTLVGAGAVSGGAMDASNLLKPALTSGKLRCIGSTTHEEYNKFFEKDRALSRRFQKIDINEPSVETAIDILKGVKCRYEDYHHVHYSDEVVETAVRLSAQFITERRLPDKAIDVIDEAGAYARIEAYKHANEDSSEDGKTANESVEQPTVEVSEAKALAEEMTAAEKTHKSSTVQDAQIEKLEITLPVIESVVSKIARIPQRSVGESEKDKLKDLETRLKQKVFGQDDAISAVVKAVKRSRAGFRADGKPVANFLFVGPTGVGKTELARQLAETLGISMLRFDMSEYQEKYTISRLIGSSPGYVGYEDGGQLTDAVRKQPHAVVLLDEIEKAHSDIFNILLQIMDYATLTDNQGRKADFRNVILIMTSNAGAREIGKGLIGFGDRIQDDSAVNEAVEKIFTPEFRNRLDAIVRFGHLSREIMVSIVHKELDAFTAQLTEKNVTLTVTETCVDKLAEEGYSKEFGARNAGRLIEEKIKSFFVDEVLFGSLSEGGSAVVDWRDGYCMDIEETQDVTAEN

SEQ ID NO: 92980 - protein, 150 aa, Unknown
  Obtained from environmental sample
  DOMAIN (1)...(150): Prolipoprotein diacylglyceryl transferase
  misc_feature (1)..(150): Xaa is any amino acid
MHPTLFKIFSFPVPSYGTMLALSFLSGILLTMHFAKQRGLDPNAVADAGLYLIISAIVGARAYYVMTHFDEFRGDLLSIVNPFQDGRIGISGLVMYGGFIAAIITTALFFKIKKLPILPYLDAFSPGVGLGIAITRIGCFLNGVLLRAGG

SEQ ID NO: 92981 - protein, 533 aa, Unknown
  Obtained from environmental sample
  DOMAIN (49)...(235): tRNA synthetase class II core domain (G, H, P, S and T)
  misc_feature (1)..(533): Xaa is any amino acid
MASQPKTAVTPTRQEDYPEWYQQVIKAADLAETSPVRGCMVIKPWGYALWENIQRVLDGMFKATGHKNAYFPLFIPKSFLEKEAQHVEGFAKECAVVTHHRLQAGADGKLVPAGELEEPLIVRPTSETIIGAMFAKWTQSYRDLPLLINQWANVVRWEMRTRLFLRTAEFLWQEGHTAHSTQKEAREETMKMLDVYGKFAEEYMAMPVIKGEKTESERFPGAVSTYCIEAMMQDRKALQAGTSHFLGQNFSKASDIKFLDAEGKDEYAWTTSWGVSTRLIGGLIMTHGDDDGLIVPPRLAPSHIVILPIVHDDTSSNDVFEYCDRLAAELGDVRYDDRRLEVEVDKREGRGGDKVWSWIKKGVPIYLEIGPRDIAADSVFVGRRDKSRKERFGMSRQEFVGKVSDILADIQSNLFARAKAFRDGNIKVIDNKDEFYEFFTPKNKEKPEIHGGFALCHWNGSAAVEEQVKNDLNVTIRCIPLDGEEEEGKCVISGEVSKKRGCLWEVVLKDKDNICTQHYLKYFHFPFPLTVLC

SEQ ID NO: 92982 - protein, 140 aa, Unknown
  Obtained from environmental sample
  misc_feature (1)..(140): Xaa is any amino acid
MALPEKRWIQRLYNYEKAVTVLENAFRINQERELTELERMGLIQSFELAFELAWNLMKDFLHSEGVFDIVGSKGAIKQAFSKGIIENGEIWIDMINRRNETSHCYDEAIAIRVVTEVTHSFVAELKNFLATMKRYKQEQE

SEQ ID NO: 92983 - protein, 290 aa, Unknown
  Obtained from environmental sample
  DOMAIN (75)...(189): Oxidoreductase family, C-terminal alpha/beta domain
  misc_feature (1)..(290): Xaa is any amino acid
CLQTKPDIVTIATESGKHCQIAVDCLNAGCHVICEKPMALSTKDADLMISTAKRKNLKLAVCFQNRFNAPVQKLRAALDVGRFGKVLHGSIQIRWNRNEAYYAEAPWRGTWEQDGGTLMNQCTHGIDLLQWIMGEDAVRVQAQTRRFLRPIEAEDFGAAIIEFKSGAVGIIEGSADIFPKNINETLSVFGEKGSVVIGGLAVNKLETWRFADAEKNGDTEEKVLNPNEKDPPTVYGFGHSALFKDFVSAIEEDREPLISGDSGKKALEIILAIYKSQKTGKPVNLPLIFL

SEQ ID NO: 92984 - protein, 208 aa, Unknown
  Obtained from environmental sample
  DOMAIN (77)...(150): RNA 2'-O ribose methyltransferase substrate binding
  misc_feature (1)..(208): Xaa is any amino acid
MQKSTIKTAYTKSFGHSRDELGDENPWANKKKEKDEKKAALQWRPAPAKREEKELPWLKAIHSLATEKGREKEGLFLAEGARVVIEIAEHHKDLVQGVYVDETFDDEELRKKIKDTGLRIHSLTQSQMKQASSVVSGQGIFAVCRLANEKPNYDTAHTITLVDAVQDPGNLGSLFRNAVGFGIDGIILGRGTVDPFNPKVVRGSSGCF

SEQ ID NO: 92985 - protein, 394 aa, Unknown
  Obtained from environmental sample
  DOMAIN (165)...(333): Domain of unknown function (DUF303)
  misc_feature (1)..(394): Xaa is any amino acid
MGQREQNVMSFKAAAIFSDNMVLQHGKPVPVWGTGGEDGSFVSVFWEGEKSKIQIETAVSGGKWSLTLPPLTVGATGELVIKNENNEIRFHNVITGDIWFAGGQSNMEMELINVKNGETELAACANQNIRFYQVVKRAIVDHDYLREEAVSKWQICAPDTAAMLSAAAFFFVRKINADIGIPIGIINCSWGGTSISTWMSREQLMRSRAGQKFIDDYAEKVGGKTDEQYNAEMEEYDSQWRAWDERVRARREKAPDISWEILNKECGPCPWPQPAGNTSPYCPTNLYTARILRTAPFAIKGFIYYQGEEDESRYSDYCDMMYYLVDQWRSDWNDRYLPFLFVQLTMYASREDVEAGQPCRNWCALQESQYLASISIENTGMAVIIDCGEYDNIH

SEQ ID NO: 92986 - protein, 231 aa, Unknown
  Obtained from environmental sample
  DOMAIN (1)...(225): Aminodeoxychorismate lyase
  misc_feature (1)..(231): Xaa is any amino acid
VTIPEGVTLSKTARIIEEGGICSAREFLSAASDKSVMGKYLIPNESMEGYLFPDTYLFPAEYPAEKVVTTMADNLFSNLQKINPSILSMDPKELNEKIILASIVEREYRVEKEAPIMAGVFYNRLRINMAIQSCATVEYIMTEIQNRPHPSVLLFTDIEIDHPYNTYVKPGLPPGPISAPGLTALRASFFPDKTNYLYFRLEDVKSGRHYFSRTYDQHIKAGELITKPSWR

SEQ ID NO: 92987 - protein, 303 aa, Unknown
  Obtained from environmental sample
  DOMAIN (4)...(104): CHC2 zinc finger
  misc_feature (1)..(303): Xaa is any amino acid
MALISKASIAEVNNRLDAISVVGDYVRLEKKSGRWWGRCPFHGGGQEKTPSFKVDPDLKMYHCFGCGKGGSVISFVMEMDKLTYPEAIKSLAQKMSIELIYEEGGPQDGEDHSIKEELYELYKRMTGTFEHFLHEKEEGKAALNYILDRSISEEMIKKFQLGFAPGDRDFLHKFLKQKGYSDEFLEKSGLFSAKYKTIPLFSGRLMFPITDRQGKIVAFGGRALPGTVQSDGNEPPKYINSPETEIYKKGQTLFAIDLAKPQMRQTKTAYLAEGYMDVIALHQAEIVNSVAPLGTAFTDEPRA

SEQ ID NO: 92988 - protein, 354 aa, Unknown
  Obtained from environmental sample
  misc_feature (1)..(354): Xaa is any amino acid
MKAYYEYEDGTFWAIRTEGENCFTAEGCKYEDFWPELMLKTGSEEERYWRMPPNAKKIIFESPDAAEKEAAKMATEKGVAATMRNRKFWRIAVEISAYRLFFTPDEYKTPELCALAVKRDGMALMYVPQEMRVQELCEKAIYNDPYALEYVNENEKTEEMCQNAVKDMGETLKFVPEKFKTSKLCLEAIKNDEWALEFVPEKLKTPELCVEAVKEDPRTLKFVPEALKTRELCLMAERTRSSALIPVGCRSKKNIASTNKKDESSLCYLDDRLKTEELCLKAVKNDGLALQYVPYRLRTRAICLAAVRRDGNALRYVPEALKTRKLCLVAVKWNESGRAIRYVPEHSRTADFYT

SEQ ID NO: 92989 - protein, 508 aa, Unknown
  Obtained from environmental sample
  misc_feature (1)..(508): Xaa is any amino acid
VFLVNKVSRRIRTLAMVLLFASAAASQEALAESDSIIIMDSEDFEITVKQRAAPPLSPSSRIIKASEFRGKFADLPSVLESVSGVDIRSTGGYGQYAESSIRGGTALGIRVYLDGVPLNSASGGAVDLSKIPLDKITEIRVTKSTSGLRQMGAGMGGFVELFTVDEDTSQNIIGINIETGSFGLLKGGAIIKYSDKKTGLLRFARNDVIARSEATKQLGYLATRQSRKPHLLKTTHQINVDISKSDNDYPFIHDNGTIISTLRDPDPAWDDTLMRKSNNYYRSIDAAYSLSADISESHRITQQISAGAYGQGLFAYHYKDNQSGSTSGNTITYSIDYRGDISNRLTVGGEASGIVRRSVLSDPDAHFGLGGAKEIESGGVTADFLLDARYSFTENFYAAGLTGARYDGYAQESKERSEKPRMSRCEYRAGAEAVVKALIGESSETETALRAVYKYEIDTSSAAFNQWSSAPQNYHLGYPVAEAVFKMGVNPITVQFSAAASKRSPTFF

SEQ ID NO: 92990 - protein, 274 aa, Unknown
  Obtained from environmental sample
  DOMAIN (38)...(244): Mechanosensitive ion channel
  misc_feature (1)..(274): Xaa is any amino acid
MVAVTHYVLKLLKFFSTQIAKGRLVLNGFYADWAEPTFKILQVLLWAFTVAIVYPLLPGSESDVFKGVSVFVGLIFSFGSTSAIGNMVAGLVITYMRPFKIGDRVQIKETTGFVVEKNLMVVRLRTHKNEYVTFPNMLILSSSITNYNTSSTDETEGLILYTEVTFGYATPWEKVHEILINAALETDYVQKKPKPFVLQTGLDNFYARYQINCYTKDVDKVPRIYAMLYENIQNGFHEAGMDMTCSNYGVYVQKKEGEERRTSRRGAKTMNNEQ

SEQ ID NO: 92991 - protein, 268 aa, Unknown
  Obtained from environmental sample
  misc_feature (1)..(268): Xaa is any amino acid
MNFRPFALILVFLFLSAVIFARDIEVTVEDEDLDMPLEGAVIVLRGGRQFTCNSKGIALVTLPDDRSAVISITYPGYETFRLSIPGADPAKGSQVEKFKVALRLGGIMQGQELVLEAARPETSETKSGRSVAISDRELTRTAEIGIIEDVMNSVKLLPGVGYTGMFSATPSIRGGDPGDLMAVLDGFYVERPYHWMGSISIFDPKMVSSARLSHGVFSARYGHTISGLLEITSRSPSQTETEIEAAIGTSAASFNLSVPLSRQGGVLF

SEQ ID NO: 92992 - protein, 381 aa, Unknown
  Obtained from environmental sample
  DOMAIN (1)...(154): Caspase domain
  misc_feature (1)..(381): Xaa is any amino acid
FLLRRATRVQSNGVNYLIPIGANITSENSLRDRAVSVQWALSELNEAGNELNVVVLDACRDNPFSWARSNSRGLSVISNQPADSIIVYATSAGSTAADGTGRNGLFTTQLLKNIKTPGLEVNELFRRTGADVAQASDRKQIPAVYNQFFGNAYLGSRSTQPPGQNQSSAATAQAAAKEHYDKGEIFSGRNDWDTAILEFTEAIRLAPNYAEAYNRRGNAYTNKKDYDRAIADYTEAIRLDPKNADAYNNRGRAYHDGKNDCDRAIVDYTEAIRLDHKHVNAYNNRGRAYHDGKNDYDRAIADYTEAIRLNPNFADAYINRGFAYQEGKKDYDKAIADYTEAIRINPDYANAYKIRGDAYKAKGGTDRANADYMKARELGYK

SEQ ID NO: 92993 - protein, 253 aa, Unknown
  Obtained from environmental sample
  DOMAIN (20)...(253): Uncharacterized protein family UPF0027
  misc_feature (1)..(253): Xaa is any amino acid
MTETTIKPIPVKGKYNEALVYAKAIEASCENKICQYLDHPAFARTKVRIMPDVHLGKGTVIGWTATYDSLVIPSFLGLDIGCGVCACNLGRGKLSFDKLDKFIRKSIPSGQAVRDSPHEDLEEGFKNKISKLCEKQGKNSDRVFSALGSLGGGNHFIEIDADPHNNRWLLIHSGSRIFGANTAEYHETLALRETDADSPIKYLSGIFAQDYLDDVKFVQHYASVNRSHIAQTIAKDFFDVDIRETEYIDCAHN

SEQ ID NO: 92994 - protein, 702 aa, Unknown
  Obtained from environmental sample
  DOMAIN (169)...(238): HAMP domain
  misc_feature (1)..(702): Xaa is any amino acid
SFSTLNTLRINGNLYNKIIISKDLIADVLPPPGYIIESYLDVLQAVDETDPDKIDYFFKELKRLETDYNERHRYWVNEPLLEQGALRDAMITGAYDPAIQFFNIIFNQFIPALQKGDSEYAKKLAYGDLKSLYTTHRKSVDQVVLGATEKHEKSEDLAAITIQRDTKTLFTIAFAVIAVAVILSMAIRFSIVKPIVNVANILKIVAEGDLTQSINVDTKDEIGALAHDFNFSMGKIKSLIATIKYKISGLEHTSYELSVNMDNTSAAVQQITSNLDSMRNLMIKQENGAEEAGRAVGDIKSNIDSLKKIIEEQTESVNMSSSAIEEMTANINSVTRTLVENSKNVSTLTEASENGKTGVQTVAQEIQEIAHDSEGLLEINSVMNNIASQTNLLSMNAAIEAAHAGEAGKGFAVVADEIRKLAESSGQQSKTTATMLKKIKASIDNITKSSNEVLSRFGAIDSGVKTVSDHERNILNAMEEQETGGKQILDSISRLRDITSSVKQGSDNMEESGKTLVKDTNEFIKTSKETVEGMNEILMGINQINFSVNHVNEMSHENNSNFELLKQETDKFNDTVGNEKQKVLIVDDDSIHLEMVEAVLQSAYEIATAKSGKEALGLFYQGLVPQLVLLDLIMPDMDGWNIYKRIKAISGLHDTPIAFFTSSNDPKDIKHAQEMGAVDFIKKPYDKDDLVRRVGHILKNEK

SEQ ID NO: 92995 - protein, 531 aa, Unknown
  Obtained from environmental sample
  misc_feature (1)..(531): Xaa is any amino acid
IPAVMLELRNRIASAIGVSDEALPFAGELIEVKQDEASWQGAIERVLHGFALSLLVDERYYSALSYHINSTHLGQRLVYYRTGRAEQWQEKPVSPDSMVFKLNIKEEHYTEWLKAELRQRFNYSCVESVQAFRAAERAITREGQIKHSKTRHEKDDRRAVGDKRNWILGFNNHEKLALFQQQAQELAAAISDLEKKINTLSEQDNLNAKRALHCQTLVNMQWQEIDVLPIIERISAIEKQIHEMRDGNKVLREISERINMQKSIVSRADEDLCKAKIEHENTIRQLKESNDDLGRLQNDPSIVTPTPFQKKGLDGYFARITDNVRLDNLEKTTTSVVQVLNKECEEVNSGIAKCEKEIEKVFIEFKRNWPLDAGDLDTTLSSASDFFSKLTRLETDGLPAHEQRFFDLLQNQSHQNLAALYTYLNNARKTIMERMDLVNDSLRKVRFNQSENQKTYLHIEASDRQLPEVRDFKQDIQQSMSHAWSEDRELAENRFLTLNKLVERLSSQESEQKRWRESVLDVRQHVNSIGR

SEQ ID NO: 92996 - protein, 208 aa, Unknown
  Obtained from environmental sample
  DOMAIN (1)...(203): Domain of unknown function (DUF323)
  misc_feature (1)..(208): Xaa is any amino acid
MWKYEISQKEYKEVMKKNPSDKKGDKLPVEQVSWYDAIEFCNKLSSSVGLDPAYTISSEGVTWNRSANGYRLPTEAEWEYACRAGTNTPFNTGTDITLKQANFYSEIIHSSAQKTKAVGSYQPNAWGLYDMHGNVGEWCWDWYDENLPSGKQVDPTGPITGSGRVVRGGAFLSSDDKKGLVSSARKESSPRALYNITGFRVVRNAQLR

SEQ ID NO: 92997 - protein, 357 aa, Unknown
  Obtained from environmental sample
  DOMAIN (138)...(356): Domain of unknown function (DUF323)
  misc_feature (1)..(357): Xaa is any amino acid
ELRIPPRIGNRPVTEIGDRAFSKKGLTSVVIPESVIFIGNFAFSDNPIGSVSLGANVYIANNAFDSAGYNSFSAGFYNSQGRKAGIYSNSWRWLSAAAPVPVAATQLQQASVKTAQPAQTAQVTNTQQPVVSTDIPPAGKSVVLINGGTIPTKEHITVSSFYMWKYEISQKEYKEVMKKNPSDKKGDKLPVERVSWYDAIEFCNKLSTSVGLDPAYIINGEDVTWNRSANGYRLPTEAEWEYACRAGTQTPFYTGDKLEDAGWYRGNTRNMETLARSPFPVGLKKPNNFGLYDMHGNVLEWCWDFFAPYTAAEQVDPTGPATGDRRVYRGGCWDFEKLNCRSAYRFRQHVNFRFFYN

SEQ ID NO: 92998 - protein, 337 aa, Unknown
  Obtained from environmental sample
  DOMAIN (199)...(326): Transketolase, C-terminal domain
  misc_feature (1)..(337): Xaa is any amino acid
DSYHGVGSFSVNDGIDSGEHGKKTFTEAFSGIILEAAKKNDSIAAITAAMQTGTGLTKFKQAFPGRFFDTGIAEEHAATFAAGLAARGLRPIVAVYSTFIQRSVDQIIHDAALQNLPVIFALDRSGFVGADGETHQGLFDIALFRSAPNMTILAPSSGNELRMMMDWALAKNDGPVIIRYPKAYCPAERPEFSQPVQIGRGVLIRGKKKGQVCLFFTGSLYNEALEAVEILKQKGIEADLYNLRFLKPVDEDYIAGLLNEYKLTAIIEEGIKEGGFGEYLTSLAGLRNCKSKTVILAAESDFFEGNMALGTREELLAENGLDGKSIAGKISKIYIRD

SEQ ID NO: 92999 - protein, 357 aa, Unknown
  Obtained from environmental sample
  misc_feature (1)..(357): Xaa is any amino acid
MGDVITLRGRNFGAAREGAFVSIAGITPTNSSYYTWQDDLIILKIPESGDSGLVYVYVKGRRSNGVLFSNSASVPRLIEGEDTGMEPKITIVSPQTGVPGTLVAITGQNFGASKEGSGVFFSWDYAAHSINPYVVTEPEYIEVSEIEFGYESWNAREIRVRLPDGAVSGSLKIKTPNGESRPVFFDVAGKPGYKNFKDKRSYTISYSVDVKINEAVRPNNLYLWMPLPVTSASQRKVTLVSRSMEPFVENHRGVSLFKLDNLMAGAAHTINLSFNVEVYAVETNVRPVSIRQGKSQLYTAYTQSTNLIPADNSHIKSTVANIVGKEQNPYIKARMLYEWIIKNIDIDEIPFITSGAV

SEQ ID NO: 93000 - protein, 301 aa, Unknown
  Obtained from environmental sample
  misc_feature (1)..(301): Xaa is any amino acid
MDYLTQKAPPKREDRLKACIVYGGDLCNLADKGRKCGCLSDGSRKFEQGSICLLLPGISILNSLPDNVNILHGAVGCGACSHSQNANARSGGMARRGTVKDAVWLSTALNETDVISGAENKLYNAILEADRLYRPKTITVIASCVPAIIGDDVDGIVERAQSQTTARLVTVHCEGFRTKIWATAYDAVYHGIVRSLFKDPHIDEPFIKDNLYEERIAYERAHTVNLFSVSSMGYADEQELIRYLNAMDQKVNVFPGFADSDTMYALKYAGLSVSVCPTHDDYILKYMNEEYGIPYIIRHMP

SEQ ID NO: 93001 - protein, 247 aa, Unknown
  Obtained from environmental sample
  misc_feature (1)..(247): Xaa is any amino acid
MNRLEKSKELLLKNYEVYGMVNRSDTENLPGRESIENIVLGLEELLFPGYLENAHADNGNLLRTTNDKVNQLSGKLIHEVEKSLVFSARLGVLNCGHGGCRAAAALVTDDFFEELPRIRALLAKDLEAAVRGDPAAMSADEVILSYPGFQAITVHRMANFLWTRQVPLIPRMMNELIHRRTGIDIHPGAQIGESFFIDHGTGTVIGETTIIGDNVKLYQGVTLGALSVKKDESGHKRHPTIEDNVTI

SEQ ID NO: 93002 - protein, 308 aa, Unknown
  Obtained from environmental sample
  DOMAIN (16)...(302): Predicted permease
  misc_feature (1)..(308): Xaa is any amino acid
MIDILKREWTYLWFYSQIQFYQIFWYWLLGMVLGSLISVFGKEKISALFVEMRNAKMGLFGVVPASLLGIASPLCMYGTIPIAASFAEKGMEEDWLAAFMMGSILLNPQLLFYSAALGMDALVIRFVICFLCGIAAGAVIRLFFKNKQFFNFSGLTAPANRDTDPNPVLRFLKNFARNVKATAGYFLIGVLLSALFQRYVPPDGFARLFGGTTPAGRGFAILMAATIGVPLYMCGGGTIPLLQTWLRNGMSMGSASAFMITGPATKITNLGALKIVLGVKHFFFYLLFTVVFAFAGGILVDLVYGVIR

SEQ ID NO: 93003 - protein, 263 aa, Unknown
  Obtained from environmental sample
  misc_feature (1)..(263): Xaa is any amino acid
FLDLGRLLTVVRTGTDDPDEYKLSHIRNEWKTPELCMAAVKFNGVELRFVPDELRTKELCYAAVESNPYALTFVPESIKSSQLYLTAFKSNTWAIEIIPKECITWKMCDIAVKEHGTNLKFVPDRCKTPELYLIAVKSYGETLRYVPAKLRTPELCLVAVKAFGKNLKHVPKEIINAELCMASVQSEGENLKYVPKDFKDAEFCMAAVKLNGKNLKYVPEEFKSAEVCLNALIQACSNRIYGFYEIVKYIPKRFRNFDFRKRK

SEQ ID NO: 93004 - protein, 470 aa, Unknown
  Obtained from environmental sample
  DOMAIN (143)...(454): Poxvirus D5 protein-like
  misc_feature (1)..(470): Xaa is any amino acid
MQRQAMPSGMEHSAIGDEAVYLRIQQLQKGLLQFTDSTNAYRLVSEFGKDIRYIAPWKKWIVWTGARWQVDNGPLIHDRGLTMVRNIYAELYKTADYRDRLDIEKYAIQSESVRRRKAFVEAASWIPCLNAATDDLDRNPWLLNAENGTIDLKTGELLPHRQEDMITKIAEVRYDSEADSPMWKQFVREIMGYKPELIDYLQVAAGWAISGDTSEQSMFILYGTGANGKSTFLNVIQRILGDYAIATYAETFMKRNNDTATNDIARLRGTRFVTTTETEQGKRLSEHLIKQATGNDRLTARFLYGEHFNFLPTFKIFMASNHKPVIKGTDHGIWRRIKLVPFTTLITEDKMDKQLEQKLLGEKAGILNWLIEGVLRWRKEGLNTPATVLNATDEYRGEMDVIGNFMRERCVQKQGATVRARELFRVYQEWYDENNEMATSERMFGLRMKELGMVQKRTAEARYWQDVAVQ

SEQ ID NO: 93005 - protein, 405 aa, Unknown
  Obtained from environmental sample
  DOMAIN (81)...(405): Serpin (serine protease inhibitor)
  misc_feature (1)..(405): Xaa is any amino acid
MIRKIAVCLTMFALGSFFVGCNDKGGVSGPVSGDNTVVDVPPDSNKVVDVPDDNKVGGASFKVVEVNAQPLLAPNGVETALTAAATGANDFAFRLGAELAKGASGQNFVFSPYSVWMPLAALVNATDDTRKGALLAALGAAGVSQEDLNRAASRMLYGLTRSRLQQYPDRYHNPLKIANAIFVDNKVTLRQDFAQVFMDFYRGSSINVDFWSRDAVDAVNNWASENTEGLITKVIERFDSNTVAAIANAIYFSDKWSAEFDSAKTKEGDFHGPKGDLRAFYMLSEGRLFNYYEDDKAQAVSLGFTQGGGMCVILPKTDAGRVEDLYSSMTTGSFAEIRKNSVLAEGKLLLPRFSIDNDVKGLMEGLEALGVPLFDEIGPITKLIEEETRLAVTSVSQKAVIKVDE

SEQ ID NO: 93006 - protein, 65 aa, Unknown
  Obtained from environmental sample
  misc_feature (1)..(65): Xaa is any amino acid
MKKKIVLAYSGGLDTTVIIPWLKEQQPCDIAAVCVDLGQEADWKTIKQRAWTRGPFPAPWWTQKK

SEQ ID NO: 93007 - protein, 192 aa, Unknown
  Obtained from environmental sample
  misc_feature (1)..(192): Xaa is any amino acid
MLLKPLNLLILDEPTNHLDLNSKDILLDALSNFGGTIIFVSHDRSFMEALSTKTLELASGNGEPAHARLFYGNYAYYLNRINNEETEKAAVKTPRAEKAASGDTQLTSADKRTADKQRQAAVRRLERQEAELLKTLEELEKTKSALETELSLPEVYSDGQRAKEVKSKLDDCTAAIEAKTAEWEKTASALMQ

SEQ ID NO: 93008 - protein, 218 aa, Unknown
  Obtained from environmental sample
  misc_feature (1)..(218): Xaa is any amino acid
VGSRRAAILYDAGADYNTGLAESFRNQFKARGGQVVADEAYQTGDVDFNAQVTRIRAVNPDVVYLPNYYNDVSLQAKQLRAQGIDCALVGGDGWDSLTDNAGDEMLNSFWSSGFAADTTDPKGVAFVRAFQAKYNREASQFAALGYDTMMLVIDGIKAAGSFDPTAVKNAMAKLSGSYVTGNIRFDSDRNPIKGAAILEIVKQGGKLVNVYKATVNPK

SEQ ID NO: 93009 - protein, 184 aa, Unknown
  Obtained from environmental sample
  misc_feature (1)..(184): Xaa is any amino acid
MKNEKKSKDKFRLVDFLVILICLFGALYSVNLFWSDLFQTLNGQNKTPIGTVSVKKNIVQRRMSDRVVWDRLIRESPVYSNDLIRVGDNSEIDLHVGGNSININENTLLRLHYDKNTGEFQIDLNSGSIGLVTSPEGGGVVLNVMGKKMKATPGSALNAAATDDGVALQVSKGSALIAEEGQNG

SEQ ID NO: 93010 - protein, 525 aa, Unknown
  Obtained from environmental sample
  DOMAIN (187)...(256): HAMP domain
  misc_feature (1)..(525): Xaa is any amino acid
MNVFRENSVKERENAEMGQTILINASPIFNKAQSSISLAAIFFPIQEGSGCVLFSTENLNESFGMGVNTSFLINSTGDIIADADIERVKTYVNLSKQEIIKQIFNSSERNKQMLAELDVQLTQNYPSSSSFFSYLWEKISKNDKHKETKKARHYLAYTRLNTAGCVVITTIEYDKVFEGINATTRRNLYLTAAILFISIMCIWFFAKSISVPLKALAEAAHMIEGGVFDIELHPASRDEIGVLTSSFKKMCSALNIFGKFTNRDIAVQAMRGEIKPGGLSKHATIFFSDIRGFTEKSENFVKTFGTEASDRIVFWLNEYLSNMVYCVEKTNGIIDKFIGDAVMAHWGTATTSGNPQKDAFNCVKSALMMRDMLRKMNKNRKEENIGSPPIRIGCGINTGIVTAGQIGSDLRMEYTVIGDPVNLASRVEALNKPLGTDILISENTYNLVKKFFITEEMPPVTVKGKEKPIRLFAVVNFNFSAMNTPPAVSEPTTLAEVRKNLGIEEKDISKANVNAEELKYKIGGK

SEQ ID NO: 93011 - protein, 313 aa, Unknown
  Obtained from environmental sample
  DOMAIN (137)...(311): 5-formyltetrahydrofolate cyclo-ligase family
  misc_feature (1)..(313): Xaa is any amino acid
MLDIVKAIAKNRGKINEHNLPRLPRNIKGALLQSFVKELNEAVSAPSEEFPGQIPRKAAPRTNINEDLREKLRELRNEKAAQLKIDSGLLAKQSQLNVLADSLCGTWEEKFEAAEFMKWQKEIWKSLASKAILPKTPAEFRSLAKEKLSAMSEESRAEESEKLLAELYNHPVLANGYIAAFYPAKFEPQIVPFLKKLAKEGRLLLPRVQNKQKMEFVFIQNLESELHKGAFGIMEPKPDLPAYENPPAAFLVPGLVFGKDGTRIGHGSGYYDLYLSSFKGIPRLGIAYSAQIRNALPQNAMDMRMDEVLWVRG

SEQ ID NO: 93012 - protein, 375 aa, Unknown
  Obtained from environmental sample
  DOMAIN (2)...(225): Ribonuclease BN-like family
  misc_feature (1)..(375): Xaa is any amino acid
LGEAVLVQLAANIPFLNGVLDETWLAEELSSIAESGMRLRGTAGLVSAIVIFWSGRIFILSLQRGLKVIFTGTQKRNPIHEILIVLIVELAVLSGAILMIFFSITARKIYEFFDLFSNTTFFSNIQSLINISIVPFFLMIIIFYIACRFIIVNGPSRISAFWGSLCFAFSYTVFSRIMTVFLNQTQYNFLYGALGSLIFLLVNVFFFFTFFFFFAQLTKVLDSFDALLFLQFRQAKMLTGRPGFEHLLFLSEKGKLQKYSHTYPKGTVIFLKGDEENDIFYLLEGEVNLFISDENPNEEPITLQPGTFFGEMGHLLCENRTATAKAKTAVTALVLPPPLFDEMLKYDTSMDRTIMELISQRLKTRNEQFDAQVKQ

SEQ ID NO: 93013 - protein, 106 aa, Unknown
  Obtained from environmental sample
  DOMAIN (2)...(96): CobQ/CobB/MinD/ParA nucleotide binding domain
  misc_feature (1)..(106): Xaa is any amino acid
MKIAVSGKGGVGKSTVAASIALILAQRGGRVLALDADPDANLAASLGIPKTVKITPISKEIALIEERTGAKIDQYGQIFKLNPNVSDVAESLRFHITGWNFWFWGR

SEQ ID NO: 93014 - protein, 170 aa, Unknown
  Obtained from environmental sample
  misc_feature (1)..(170): Xaa is any amino acid
GFLDEPILSAFGSSTYVSVKREDVVSILAEEIEALHAEGAIAGIHCCGNTEWSILVDAGVDIVNFDAFEYGDTIAIYADSVKKHLEKGGVLAWGVVPTSEKIREQTVESLEKQLEKVMDNLASKGIDKKLITEQAMITPSCGTGSLATGDAEKVFSLLCDLTKRMKEKYA

SEQ ID NO: 93015 - protein, 199 aa, Unknown
  Obtained from environmental sample
  DOMAIN (24)...(151): Phosphoribosyl transferase domain
  misc_feature (1)..(199): Xaa is any amino acid
MLDPTACTLDDISGLTLLQRYLCDHYIRNLEFLEQNVRPNWAFCSVDTGGENQVRDFANAFGAPLIVGHKQRDYFKANTLKSFNVLSAVPVEGKTLWIVDDLIDTAGSVESLIRALAPYKPAEINVIAVHATLSPPAPERIMKLRSEGLLKRVIVTDTVCLSSLKTQLPFLEVVSSAELSARLIHTFLTNRSMGALMDL

SEQ ID NO: 93016 - protein, 293 aa, Unknown
  Obtained from environmental sample
  DOMAIN (161)...(193): Ankyrin repeat
  misc_feature (1)..(293): Xaa is any amino acid
SPLYVALAAPEGIRQWLFNPTTIAARDGLGNSILHYAAQWKIDDYIPFMILQGVNVDAANATGETPLFMAAKNNSPSTAKVLLNNNADLNARDSLGNTPLHATVRWNAKNAAAALIDAGIDIDVHSLNGNTPLHEAVTWGITDIEILLIERGASLEVRNADGNTPFMEAVIACHTASIGRLAARGADPMTRNALGDTPLHKAVAMEQYDIVDALLRMNVSIHARNTRNKTPFQSALGVSPRMVSALLTKERINGPDDFGNSALHIALQEKAPASILRAIIAQGIRLNAGIPMG

SEQ ID NO: 93017 - protein, 236 aa, Unknown
  Obtained from environmental sample
  DOMAIN (56)...(88): Ankyrin repeat
  misc_feature (1)..(236): Xaa is any amino acid
LGIFLPVGSGCKGTPSTVEKTAEKPTNDVWALLASGDERAKNYFLGEVDIRAVDSNGRTALHYAAELENPQLAAFFLSLGADPNAQDYDGRSPLGISAAKADPWVAKILASGGANIHQPLKGGASPASLALLMEDSAFLQAILTPTTLDSVDREGNAILHLACISGNLRAVCDILAASQLFNDSAVIGQTDMDGKNALDVALERPDSSVHMQIAEQLILVGAFSDSPIFYYFAPAA

SEQ ID NO: 93018 - protein, 516 aa, Unknown
  Obtained from environmental sample
  DOMAIN (346)...(512): Pterin binding enzyme
  misc_feature (1)..(516): Xaa is any amino acid
MKISDSYTALLSLAKERILLLDGGMGTMIQRFNLTEKDFWQHKGNNDILVLSRPDVIESVHTEYLKAGADIIETCTFNSNAISQADYGLEGECYKLNKAGAEVARRAIDTFGGTSRKFVAGSIGPTSKAAGMASKVDDPASRGITFRELANAYQVQIKGLLDGGADILLIETVFDTLNCKAALYAASLEQEERGVRVPVMVSGTISDASGRLLAGQTLEAFWNSVSGYDLFSVGLNCALGAEEMGSHIAELSRIANVFISAYPNAGLPNPLGGYDETPEGMAKHIEKFAANGWVNVVGGCCGTTPETIAAMKKAVQGKSPRKIPELPKTTRLSGLEPVEITENSNFINIGERNNMAGSLKFAKMIRENNWSEAISLSVAQIENGAQIIDINVDDGLLDSREKMRHFVNLYVSEPAAAKCPVMLDSSSWDVLVAGMECFPGKGIVNSLSLKEGEEVFLKKAKEVKRMGFALVCMAFDEEGQASSYEKRTEVCKREYDLLTEKLNFNPCDIFLTQISS

SEQ ID NO: 93019 - protein, 307 aa, Unknown
  Obtained from environmental sample
  DOMAIN (9)...(307): Chorismate synthase
  misc_feature (1)..(307): Xaa is any amino acid
MSSVFGKLFTLSSWGESHGKAIGAVVDGCPAGLEISEEYIQQFLDRRKPGQSAITTQRKESDVVKILSGVFEGKTTGTPISMIVENADQHSADYEQIKDWWRPGHADEVYDSKYGFRDYRGGGRSSARETIARVAGGSIARKFLKEKCGTEFTATINIDNNSIENAKKNGDSIGGIVSLTIKNPPKNLGEPVFDRTEALLAMAMLSIPATRGFEIGKGFEAANMLGSEHNKFADGTYGGITSGEDILCRIAFKPTPSISKMQMAKNKNGSFGEISIKGRHDPCVAVRAPVIVESMAALVLMDLWLQL

SEQ ID NO: 93020 - protein, 340 aa, Unknown
  Obtained from environmental sample
  DOMAIN (105)...(269): CDP-alcohol phosphatidyltransferase
  misc_feature (1)..(340): Xaa is any amino acid
LPLEAVAKRPLKLATRFALGYRRLPDTGIIELMKTKEERIKPVRIKPVKIKKRRLRYIAVLPSFITLMNGACGFIAIVFACRSAEVSWDFLFMRNFNMTSYALAGYMVFLAMIADMMDGRVARLTRTTSSFGGQLDSLSDAISFGAAPAFLMMKLVEYHIDNLSFDRFRFSLLIWRGIFFSAIFYAMCAVVRLARFNVENEENESAHMNFAGLPSPAAAGVIVSLVIIHQQILPRIISRAPDSMKIFEIITIFTLPLVTFFSGILMVSRIRYPHLANQLFRGKKSLAMLLLLFACGILIIWNLQLVMVIGFCGFALFGVFRWIVLSIFRKPHHPPSEVKT

SEQ ID NO: 93021 - protein, 240 aa, Unknown
  Obtained from environmental sample
  DOMAIN (144)...(201): Bacterial regulatory proteins, luxR family
  misc_feature (1)..(240): Xaa is any amino acid
MGGVLMLSRAAELQTEIKGWLEASGFEDVAVTGKENEELNMAICNKKPRLVIVDSLFFQDGTACRVGDLVKMFPKLNVAVVSFHDFDASRAPWFIWEGAKSYLSLWEGNEEFQRGLRIVRNGGQYISPKVQRLIDHYEEWPDTNSEMTKRQKECLVMLCCGIIPLQIGEILNISKRTVDNHLNSLYRAFHVGSREEMVALAWEMELVTPKDIHLYNRKKERLPFPEWAEVKRNIDKFYLD

SEQ ID NO: 93022 - protein, 257 aa, Unknown
  Obtained from environmental sample
  DOMAIN (10)...(226): Reverse transcriptase (RNA-dependent DNA polymerase)
  misc_feature (1)..(257): Xaa is any amino acid
SESIRGGWYKPKPVKRVEIPKPDGGKRLLGVPTVIDRMVQQAAVQVLQPIFERTFSDSSYGFRPGRNAHQAMRRAKKYCEEGCRYVVDLDLEKYFDTVNHDLLIKMVREVVKDETVIGLIRKFLKSGVMVDGLVSQTEQGTPQGGNLSPLLSNIYLTKFDRMLEERGHKFVRYADDCNIYVKSPRAAGRVMESCIKYLEKKLKLKVNRKKSGSGSPKKLKFLGFSLYQWKEAIRIRAHEKSLNASVIPRLCRGTHKV

SEQ ID NO: 93023 - protein, 516 aa, Unknown
  Obtained from environmental sample
  DOMAIN (242)...(503): Transposase DDE domain
  misc_feature (1)..(516): Xaa is any amino acid
LPGVLDFTDNSQGMFLTVNLNEQLIPGTFEWSLDYLINRMDLSLYEQNYHNDETGACAYPPKVLLKIIIYCYSAGILSSRPMEKACRDNITVKALAEDCEPDHDTIATFISTNHEAVKDLFAQVLMQCAKLDLIKGEMFGIDGVKMPSNASKEWSGTIENLKKKKEKLEKHISRLLLRHRELDKSEEAKKIQKKYKETMGDDKERRERSIERLEKRLKKLDEFLKTAQPKKGASGNEVQSNITDNESARIKGPHGYIQGYNGIAVADSRNQIIVCAEATGSSESGNFPKMLESLEENMKAITGKEEPLKKSVCLADTGFSSEENLQEAAERGIEVIIPDPQFRQRDPDFEGRQKEKKYFDKEDFKYDEKKDEFKCPNGKVLTCKGEVKLGNNEGKKYQASAKDCSQCPFADKCIKSKNKKEEGGKSRPRTLYIVTRKHEENLSEKMRDKIDNPAYREIYSRRQQIIEPVFSDITYCKGMNRFTLRGTEKVDAQWKMYCIVHNIGKCIRALGKKLGA

SEQ ID NO: 93024 - protein, 405 aa, Unknown
  Obtained from environmental sample
  DOMAIN (4)...(235): BadF/BadG/BcrA/BcrD ATPase family
  misc_feature (1)..(405): Xaa is any amino acid
LLHLGIDVGSTTVKAVVIQPETKEKLFSCYERHHACQSEKVYAFLKDIFSRFPNEHFRLALCGSGGRTIAQMINAPYIQEVVANSIAVRNFYPQARVAVELGGQDAKIVFFYHDSVTNQLAVGDMRMNGSCAGGTGAFIDEIAALLRTPVEKFDSLAANGTQVYDISGRCGVFAKTDIQPLLNQGAIIEDIALSTFHAIAKQTIGGLAQGLEIRPPVVFEGGPMTFNPTLIRVFAQRLGLKDTDIIVPQKAELFIAYGTALAINENFLEQDGGHDRNFSPEAALTSLAMYREIVLGNSTLQNTNYFSNEAEKENFYARHRMQVINHEISAQRGDTLKVYLGIDAGSTTTKFVLIDEDENVIDSFYNPNKGEPLKVIKQALLDMYEKYTAAGVNLEIIALGTTGYF

SEQ ID NO: 93025 - protein, 54 aa, Unknown
  Obtained from environmental sample
  misc_feature (1)..(54): Xaa is any amino acid
MSERFVNIDRETPMLFPVDTRDWLPEDHLVHFVIEAIEQIGVDGFKVNQRGNGS

SEQ ID NO: 93026 - protein, 115 aa, Unknown
  Obtained from environmental sample
  misc_feature (1)..(115): Xaa is any amino acid
VNAIGALCNGEHSAIKCYRHTTDSAFFEAWFKNNLLKELPKGYTVIMDNASFHRKKELRKIARGKARLLFLPPYSPDYNPIEKSWANMKRFLRNSLKDFQSVDFGIYNHFGLIES

SEQ ID NO: 93027 - protein, 375 aa, Unknown
  Obtained from environmental sample
  misc_feature (1)..(375): Xaa is any amino acid
VVMKIDIKFLVVGFSFLMFLFLAATVFALPETPEFGADTVQDLFSPDMAGQGTFVTSRGSAPFSAINPAQAGQTDRMILSAGAIGVTNLNIASELGGIFDLGLLYPTKSATFSGTLRYYYFDQFKTDFPLKNELGGNFSVAKEFFPQFSLGAGINFGAGPDNWTLSADLGLLHNLGDLGFIKNFTWAFVMRNMGMSWAPTWFTPWLGFTFDFIYIEGKGGKPSPLIMNFAADVGVPSVIVPENINVIAKAGITITILEKITLSVLWPGAAGYNMREAKEDDGKRFQWLPSVGMGINFIIPFGGKRHGEYRLGENRLGEFRLSERRPSDGDITFDAAFKPLYYDVYATGAGVTWYAGYRDDLPPNIIVEYPETQYI

SEQ ID NO: 93028 - protein, 279 aa, Unknown
  Obtained from environmental sample
  misc_feature (1)..(279): Xaa is any amino acid
NSDTPTVNRNPGPNTYIVKFVTGTSVISIDDLHLTEGARIPKLPALTKDNDAFGGWYTDNGTWNELWNFDTPVTRDITLYAKWEPPPGIKVHFETNSGTPTVGDQNLTNGTLVVEPPPITRDGYAFDGWYKEAIFTNKWNFAADTVNAAPGSTITLYAKWHQVVDVYTVSFEPNGGSPAPNTQNITKDGKVFMPQAITKEGYGFGGWYKEAAFTNRWDFAIDTVTGDIILYAKWDPALYFVEFDPNFGDMPLAVEFIANGARIYEQIPIEFKQDYGFGG

SEQ ID NO: 93029 - protein, 375 aa, Unknown
  Obtained from environmental sample
  misc_feature (1)..(375): Xaa is any amino acid
MINFYPLYIDPGTGSALFSILIGAAATVYFLGRALIIKLKVFFSGGKAANSASADHSFVIYNEGKQYWNVFKPLLDEFENHKTSLLYLTSAQDDPVFDTSWSFVKPEFIGEGNRAFARLNMLRAGICLMTTPGLDVYQLKRSKMVKHYSHLLHAPVDATLYRLFSFDYFDSVLLTGDYQAEDIRTLEKQREIREKKLVTVGCSYLDVYAEKFKNLPVEENHPFTVLVSPSWGSSAILTRYGEKLLDPLAASGWRIIIRPHPQSKKSESQMLERLYARYKETKNIEWDYERENIFSLNKADIMISDFSGIIFDYMFLRDRPVLYVGQNIDLRPYDADDINHELWQFKTVKEAGIELREDDFPRITEIIKGAATAIT

SEQ ID NO: 93030 - protein, 248 aa, Unknown
  Obtained from environmental sample
  DOMAIN (4)...(167): Glycosyl transferase family 2
  misc_feature (1)..(248): Xaa is any amino acid
MKQGFLIPVYRHGKTACPLAERLSASALTVIMVDDGNDEETRNLLADCAAKIPGVALVSLKKNSGKGEAVAVGFKKAAELGLTHVLQIDADGQHDEGKIAFFLEESAKHPDMLICGYPEFDETAPKSRVKGRKISNFWASVATLSTELKDVLCGFRVYPVDVSLRITQTLFLDKRMGFDPEILVRLYWKKVFPVFHPVKVTYPPDGISNFRKVRDNICISLMFTRLFMGMILRLPLLLALKKKRRKQR

SEQ ID NO: 93031 - protein, 98 aa, Unknown
  Obtained from environmental sample
  DOMAIN (8)...(72): 2Fe-2S iron-sulfur cluster binding domain
  misc_feature (1)..(98): Xaa is any amino acid
MDNKMINLKINGRPVTVPAGTTILKAAREIAVNIPTLCWHPDLEAWASCGICIVKAENSPKMLRACATAVEEGMSIITHDSEIVEVRKTGAGADPLNA

SEQ ID NO: 93032 - protein, 153 aa, Unknown
  Obtained from environmental sample
  DOMAIN (20)...(147): Metallo-beta-lactamase superfamily
  misc_feature (1)..(153): Xaa is any amino acid
MNLEAFVLGCGGMMPLPNRYLTSVLLRREGELFLFDGGEGTQVALRKLNLRWKKISVIFVSHTHADHVTGIPGLLMLSSQVDRDDPLYIIGPPRIAEYIETSRRVLDMYINYEVIVKEITEPGVVYEGDGFHIRCFPLRHTKPCFGYTLEEDM

SEQ ID NO: 93033 - protein, 412 aa, Unknown
  Obtained from environmental sample
  DOMAIN (60)...(401): Glycosyl hydrolase family 57
  misc_feature (1)..(412): Xaa is any amino acid
MTNTRYVISLVLNAQLPFVREYTDSARRCQFFTDEECEEADVKSVEKPEYTFEPEQDKDLLVPCSVEESWFFEAVSETYLPLLGIFDRLEGAHIPFRLGISLSPVLGQMFCDDYLIKKYVAYLEHQIEFGRHEVERLDGRDECALAQHYFNQAVEQHTAFTIRYDRDILKALEHYRKKGRIEILAAPATNAFLPFLCRFPQALRAQMETALSFYRYTMGISPMGFWPGELGWSNDLSPYIQSYGFNYSIVNSHGLLFGRPPPSRGTFYPVKTGDGLFVLACDYNASTLVRGMKKKGPYRDNNRDTVNEPENAEINYFIAKNGEKYHSGYKYRQIGNNGLYTPAAAKSCAQDHARELLENISGRLTAASAYIKETPISLCAFNADSFGRRWHEGAHFIESPVQVGSRLQGTAI

SEQ ID NO: 93034 - protein, 319 aa, Unknown
  Obtained from environmental sample
  DOMAIN (82)...(264): Peptidase family M28
  misc_feature (1)..(319): Xaa is any amino acid
VKANEGKNMTTPEWAKRAPYDRYFDFIAPDADRYAILTKQISALNFNSTVINVEGNNHIFIFPPGQKSLRSASGVFPYSGTAPYLFSAHYDRVEGSPGANDNSIAVFHLLNAAVTLAQKGIDRWLIVFTDKEELTAGECFENQGSFTLAKKIKSWGLEKAKIFNFDACGTGGVFIISTTTDLILKTGGHEASPNIRDIIKNIASLRNHALEISQKLRLERVLLAPTPFSDDVGFLRAGLAAQTITMLPANEASQYEALLRDRPEFGNLIISGEVKAPAEYRRLPETWRSLNNAQDTVSRLTPEYFKTFVNFVVELCAEN

SEQ ID NO: 93035 - protein, 61 aa, Unknown
  Obtained from environmental sample
  DOMAIN (2)...(56): Ribosomal L32p protein family
  misc_feature (1)..(61): Xaa is any amino acid
MAVQQTKKSRSKKGMRRSHDRVDVPAVVFCACGQPTLPHRVCAACGSYKGRKFTALADGQQ

SEQ ID NO: 93036 - protein, 431 aa, Unknown
  Obtained from environmental sample
  DOMAIN (1)...(360): tRNA synthetases class I (I, L, M and V)
  misc_feature (1)..(431): Xaa is any amino acid
IVREFRGAELVGREYVPLFPYFADKKNEGAFRVIAGDFVSTEDGTGIVHIAPGFGEDDARAGLAFGIPAVCPMDDEGRFTSEVPDYAGVFVKDADKAIIQRLKKERLLIRQDQYTHNYPHCWRCDSPLLYRAVSSWFVSIEKIKSDMLAANERVVWTPAHLKHGRFGKWLEGARDWAISRNRYWGSPIPVWVCECCGHSVCIGSIEELEGFSGKKVTNLHKHHADALTGTCPLCGAVMRRTPEVLDCWFESGAMPYAQAHYPFENKERFEATFPADFISESLDQTRGWFYTLIVLAAALFKDTAFKNVVVTGLVLAEDGQKMSKHLRNYPEVNEILNDFGADALRLYLMNSALVKAEELKFSAAGVKEVLRAFHLPLWNSYSFFVTYANVDNWDPERDAIPFSAITHPLDRWILSAVQRLTADVDTSLEVY

SEQ ID NO: 93037 - protein, 356 aa, Unknown
  Obtained from environmental sample
  DOMAIN (24)...(317): 3-dehydroquinate synthase
  misc_feature (1)..(356): Xaa is any amino acid
LKFNFGTFQTTAHIMPALPGIDEIVKDFSAEGGIKSLLICDTNTFRFAEKIRGNRDIPVCVLEPGEAQKDWQSVENILHQAGNAQIGRDGLFIGIGGGVITDISGFAASIYMRGCALALVSTSLLGMVDASVGGKTGFDLFGIKNLAGTFYPAAHVYIPLESLVSLPPAEWKSGIAEIIKTAVLEGDEFMTLLEELKGGFSVMTKTIAPCIERAVRFKGRIVEEDPFEKGSRRMLLNLGHTFGHALEASVGLGRVSHGEAVAWGIARSCELGLALGVCPPARAKRIMSLLKAFDYETAASAAGAELIQALGSDKKKRRGKLIFIVPDEKSARPITADSLEFMDTVGRIIKGEISFL

SEQ ID NO: 93038 - protein, 134 aa, Unknown
  Obtained from environmental sample
  DOMAIN (2)...(133): UDP-glucose/GDP-mannose dehydrogenase family, NAD binding domain
  misc_feature (1)..(134): Xaa is any amino acid
MANITIIGTGYVGSVSGACLADFGNYVICVDNNCEKIESLKKGVIPIYEPGLDAVIDRNIRCGRLSFTTDLAAALKENHVVFIAVGTPPSDDGSADLAHVETAARQIGAFIDKYTVIVDKSTVPIGTGRKVTGW

SEQ ID NO: 93039 - protein, 567 aa, Unknown
  Obtained from environmental sample
  DOMAIN (474)...(545): Bacterial flagellin C-terminus
  misc_feature (1)..(567): Xaa is any amino acid
MQINHNIRAMVTQHALFQNDNAMTKSLEKLSTGLRINRAQDDAAGLAMSEQMRTQIRGLAKAKRNSQDGQAALQIAEGALAEITNMMQRQKELAVQSANDTLTSTERMYLNDEFQALTKEIDRIAKNTDYNGKNVLLFDVDPNKSFGATKLDPYNKEVAFLEAANVVRKVFGENLEGGLSALTVSRGGVTSPTGGIDDINAAIKAINAVVVSLNGILTDSNIETALKALITAAGMTGTSGTGLGNDELTTTTISYMQNRGFTEAEITQNNAKALKAVNDLLRDASDALRNYQAASKGELDVKKGAIATITYVFIKAITQSDFADVKGLSGNTGIGSLDRIINQLKAAKSDAGGPGGTAGLAILAGIFGANASAQMQDDLKAVMGLDANKMVPNTTGKTKEIVQTWQKDIADLQAAYKVYSERNIATGSAASEVLHVGPNYSSGLGGATSNQIKVNYVAIDVKGLGLQAQQIETREGAQRAIDKLQETIKVTSSNRAAIGTYINRLDYTINNIASMEYNIQDAESRIRDTDFASETTSFTRNQIMVQAATSMLAQANSLPQAALGLIG

SEQ ID NO: 93040 - protein, 190 aa, Unknown
  Obtained from environmental sample
  misc_feature (1)..(190): Xaa is any amino acid
YLVGGTAYSLQIGHRISDDIDLFTPDKLDKEIILDFVQNEISNDFGILKSGNSIYQLYNEKEKLKLDFVCFPYKLLDPLLEVEGIRMINKNDLSAMKVSAVGTRGNEAKDFYDLYCLLKEMSIDQIFENFKKKYGMDNFWHYQKSVVYFDDVEDSSWNGLRFLKENVSKDTIKSVLTQAVIEYERNNLLP

SEQ ID NO: 93041 - protein, 229 aa, Unknown
  Obtained from environmental sample
  DOMAIN (47)...(224): Ribose 5-phosphate isomerase A (phosphoriboisomerase A)
  misc_feature (1)..(229): Xaa is any amino acid
MKQAAGRTAVDSLVKSGMKLGLGTGSTAIHVIRRVGELLAQGTLNDISAFATSFQSEIECEKLKIPFFPLNSRELAGRLDLTIDGADEVDPQSYLIKGGGGAMLIEKIAAYASAAFAITVDESKIVDSLGTGFPVPVEVIPEARTSACMALEAMGATVTLREALRKAGPVITEHGNLILDIRFAKPVDPVAMEREINFIPGVVENGFFTRNRPAVYIARMDGNIEVRGK

SEQ ID NO: 93042 - protein, 299 aa, Unknown
  Obtained from environmental sample
  DOMAIN (204)...(236): Ankyrin repeat
  misc_feature (1)..(299): Xaa is any amino acid
MRVFLICLEEEKENAFLLSAFLEKTGIYTEKLLIKTRDEGLKLITDYTHVVILSALGPGWIDFLAGFFCGSHLPILVFGEKAIESIPAVFAFCFKFFDTEAKLHDYLVNEYEIVKKNEAASEVNHIRQALLDKGIPTTPDALAQCVAENKVDEVSLFLAAGFLPNIKDKKGIPLLCISARNGHVSTVEFLLRSGAQVDIIAEDRGSTALIDSSMGKNKDVIKTLIEAGADVNFQSKDGQTALVVVVGEGDEEIVEMLVKAGADPDIKDALGVSARKYATIFGNSKMLAIFDRKEFDEAI

SEQ ID NO: 93043 - protein, 134 aa, Unknown
  Obtained from environmental sample
  misc_feature (1)..(134): Xaa is any amino acid
MDKPKIYLETTIFNFPFADDAPQLRADTIKLFDEIKTGKYEPYTSAYVIDELENTVQKDKLVKMNGLIEEYNITKLPMSSEAEKLAELYLAEGAVNKKFITDAYHIAITTVNELDFIVSLNFQHIVKQKTIRET

SEQ ID NO: 93044 - protein, 76 aa, Unknown
  Obtained from environmental sample
  misc_feature (1)..(76): Xaa is any amino acid
MDTILILDFGSQTTQLIGRRIRDMGVYTEIVPGDAPLGAQTIGNDVKGIILSGSPESVYERGLVPDNNVYTCGLPL

SEQ ID NO: 93045 - protein, 90 aa, Unknown
  Obtained from environmental sample
  DOMAIN (52)...(84): Ankyrin repeat
  misc_feature (1)..(90): Xaa is any amino acid
MKKETNTLKRSNYSEQSREEGLQLIIASDKGDIETVRSLLKKDVYIHTQDKDGRCAIVAAAYKNHLEIVDVLIAAGADVNMKDDTIQSAY

SEQ ID NO: 93046 - protein, 496 aa, Unknown
  Obtained from environmental sample
  DOMAIN (112)...(320): Methyl-accepting chemotaxis protein (MCP) signaling domain
  misc_feature (1)..(496): Xaa is any amino acid
DGDLSNKVTVKTRDEIGNLADYLNLTIENIRNLIGTIKHKIDALTNTGHELSANMERTSESVDQISYNFEGMKTKMGKQEESAAEADKAVKNIKSLINNMNRLIDEQSTSINTSSSAVEQMTANIHSVTHTLIENSKNVNELTEASENGKVGVQAVAEKIQEIARQSEGLLEINAVMENIASQTNLLSMNAAIEAAHAGEVGKGFAVVAGEIRKLAESSSNQSKSTADMLKKIKASIDGITVSSDEVLSRFEVIDSEVKTVSQHEQNIRNAMEEQEVGGKQILDSMLHLKETSVSVRKGSEEMLESGNHLTKQTDDFINISNTVVTGMNDIVNGSMQEIKEAVTLVDEMSAENNKNFDQLKEESHKFKVESADEKKKIIVIDDDGTVLTMTKSILSGVYDVTAVNSGKDALQLFFQGYIPHLVLLDLSMPEMSGWDTFLRIRDLTKLHNVPIAIYTTSEDSKDRAKAQEMGAVDFIKKPCRKEELLSRILQITGNK

SEQ ID NO: 93047 - protein, 126 aa, Unknown
  Obtained from environmental sample
  misc_feature (1)..(126): Xaa is any amino acid
MGIYYSFTNWNAITGTAVEWTGFRNYLAIFRTDITFLHSFLVTVAYALINIIVLNVCAFFLALLVTSKIKFKGIYRAGFFLPNLIGGIILGYIWQFIFNNAIPKLGEAIGFTWLKDHQFLADPVSG

SEQ ID NO: 93048 - protein, 306 aa, Unknown
  Obtained from environmental sample
  misc_feature (1)..(306): Xaa is any amino acid
DTDVAYVDPANGKVIGFPVAVEGWGLGYNKALLAKAGVDPRTMVNVAGIKAAFEKIESQKSALGIDAVVSMVAGPGMTWVTGLHGINAYLTLGLPYNDSAKYIDMLLKGQVDNARLAKFAEYYNLLFKYSNKNTLLTGGYDQQLGDYAIGKTVFIHQGNWTDPTFKDLGITFEMGYVPHAFLDETTDGIFVGAPSWYIVNAKSKNVEEARQFLIAMAGTLDGHNYMVTNAGMVPAFKSCTLRPAGQFSRAVQEWSNQGKIYAWQQNEMPDGFGMNTLGPIFHQMASGQIDPQGFVRLAAGAVSAIK

SEQ ID NO: 93049 - protein, 334 aa, Unknown
  Obtained from environmental sample
  DOMAIN (45)...(331): Protein of unknown function, DUF258
  misc_feature (1)..(334): Xaa is any amino acid
MQQMHSGVLDEKPLKERWSREGKTEAKRKKLKPLEENFLAEQKELGLVLSVHRRSCEVRLQSGKEIKAFYLAKSVEEAREFPAVGDIALIGENFIIGLKPRKSVLTRPGPRTRESQELVQAANIDQIAIVMSLENPPFNFGFADRFLLTANFNNLPFILILNKCDLMENIPSEIQEFIELTDNTILTSAESGNGIEELKEKLHSKISVFSGQSGVGKSSLINKLVPSALLNTSEVRKKDGKGRHTTVASSYLDLPGGGAVIDTPGIRALGIMNLSTDELARCFPGFFESNVFDCKFKDCKHQSEPDCAVLKRISEGQISEARYKSYLRILGSLL

SEQ ID NO: 93050 - protein, 477 aa, Unknown
  Obtained from environmental sample
  DOMAIN (106)...(258): ATP-grasp domain
  misc_feature (1)..(477): Xaa is any amino acid
MQEQIIILGAGVMQGPAIRIAKELGLFTVVADGSSAAPCIPMADKFEQIDLKDKEGIETLARSLQNSGGLVGIMTAGTDFSATVAWAAEKLGLPGIPYEAALNASDKARMRSCFKKAGLPSPEFTAITGAELQDKPVLPFPLVVKPVDNMGGRGCRRVNNIEEYREAAAEAIRFSRSGRAIVEAFMEGPEFSVDAIVYRGEITICGLADRHIFFSPCFIEMGHTMPTAIAPEQQDALLETLCAGVRALGLAGDKSVGAAKGDIKLTPSGPMIGEIAARLSGGYMSGWTYPYSSGAEPIRAAILAAIGRKPDCLVPVKTWTSAERAFISIPGTVKAISGIDEARRRPFVKDLFFRVAEGDKVDFPRNNVSKCGNIISAAPDRASAVEAAESAARSILIRLDPSDPETGEFLLSEGKDNREQITDNREQRTVSREQGAGSSERGTGFPPDAYLLGPELKAALAALPDTKLQGQRENLQI

SEQ ID NO: 93051 - protein, 280 aa, Unknown
  Obtained from environmental sample
  misc_feature (1)..(280): Xaa is any amino acid
AGITVTAVDFNAFYYKYLTELTIPNTVETIGRNAFANNNLAELIIPDSVKSIGVGAFSNNLLAGVTISGSVTSIGDNAFSYNQLERVRIPDGVTFIGDNVFFSNKLAEIDIPESVTSIGMLAFASNQLISVYIPQNIETIGYGVFSNNLLGSVTIPGKVTSIRNYAFENNRLADIDIPENVASIGNRAFANNMLTDVRFSEGLKSIGDGAFAYNKLTGIELPESVESIGDGAFENNNLAAITIGDKVTSIGKSAFANNELEDITIGEGVIFRWGLCFCVQ

SEQ ID NO: 93052 - protein, 185 aa, Unknown
  Obtained from environmental sample
  DOMAIN (112)...(183): D-isomer specific 2-hydroxyacid dehydrogenase, NAD binding domain
  misc_feature (1)..(185): Xaa is any amino acid
MKILVTPTSFGPDSESPAMKKLRSFASQLVFNPTGKPLTESELIPLISDCDGCIAGLDFYTAGVIESAGSLKVISRYGVGVDRIDLAAAKAKKVVVCNTPRANTQAVADLTIGLLICLARNIPVLDKKTKEGQWPRSTGIELYGKPIGILGLGAVGKAVAKRALGFSMRVLARDPVIDSEYVNQT

SEQ ID NO: 93053 - protein, 452 aa, Unknown
  Obtained from environmental sample
  DOMAIN (191)...(350): Thiamine pyrophosphate enzyme, central domain
  misc_feature (1)..(452): Xaa is any amino acid
MATMKASEAIIKILETEGITAAFGIPGAGINGLYKFLGQSKVIRHFCHRHEEAAVHAAGGYFRASGKIAAAICTSGPGATNFVTGVYSCNIDSIPVIAITGQAVCAQLGKDAFQCVDIAKICEPVAKKTYCVTDPKKVVETFNEAFYLAREGKPGAIVVDLPLDVQNADIEFDPASYKSRPVTAPEPAAADIAKAVKMIGEAKNPALLLGGGVILADAAKEAVELAEILKTPVICTYMAKGAIPEEHPLNAGHAGIQVGQPVGNKVFVDSDLILGIGCRFTDRHTGAISVYRGNRKFIHINIEPKEIGKIFPADLGIVADAKKAILALIAEAKKTGTSASHVDTDKLPALRKELARKTDYDKKPIVPHRVFQELNNYFGDRVIFTTGCGITQIWSGQLQKINKVRNYLPSGGAGCLGYDIPAAFGAAIATGARTVAVMGDFGFTFMCRNWEY

SEQ ID NO: 93054 - protein, 378 aa, Unknown
  Obtained from environmental sample
  DOMAIN (1)...(216): Protein tyrosine kinase
  misc_feature (1)..(378): Xaa is any amino acid
FLSEGQAVAKLSHPNIVNIYEMSSENGVYYIAMEYITGTNLYQHLNENKPKLVDVLEIVSKLAEALAYAHSQKIIHRDLKLNNVIMKDPLTPVLIDFGLAKALEESDSGGGITRTGEIMGSPAYMAPERLMGKEVDHRSDICSLGIMLYEMLTFKNPYLDQRNLHQTTYNVMEANPIPPKKLIPWLPVEIEAITLKAMAKDPDARYQTMDELRQDIIRYQNGEAVTARPPSFKKRTASYMRKRWAPIAITLLVLIFSGIIGGGYYIQRKRVYSYWQLFYAQSLSATASEWTLVNSDSLHPGKLEDGNKSFTLSSQGFSYLRLEQRFNRDVMIEFDISAPSDNLHRAGLFLFGDSPENAHCIHINRDGFGESGKLPRKP

SEQ ID NO: 93055 - protein, 301 aa, Unknown
  Obtained from environmental sample
  misc_feature (1)..(301): Xaa is any amino acid
ATETIDGGVWDTVLQIDGVKEKTVKINPGSTAEVSFKAAALGAGESRIIFTLTSPSVNERIIKTLKVDRPVLYETVTTIGSLASDNPFIEEGVIIPSLVPEGTGSLSVSLSSSRLALLKEAVRYLLDYPYGCLEQKTARLLPLVAFADRLETFELESPVENPKKVIEDELAMLVKNQLSDGSFPYWPGGKYGEQYVTLRVAHIVYLARQKGYAVPDTLNTQTLTKSISEADFSTSVYKEDPFLKGYSLWVRAMYGMRIGAEISLFIKPWGRAWHFWLGLRGPCRNGAWFERPCHFSQGQSK

SEQ ID NO: 93056 - protein, 213 aa, Unknown
  Obtained from environmental sample
  misc_feature (1)..(213): Xaa is any amino acid
LPAFPKTAGDENAGIKKAGFFTALKTPIVWVFAVVLGFMSAVEASTPNWAGLYFQDVYDLSAETRGAVFISTYFIFFTVSRLISGFIIEKIGYMRCLFIAVFAAIVILVVGFIYGAKGINVLPVLGFFVATFWPTLLAAAMVYFREDSAVMTSAIIAIAGALNSGFQYLVGLTNRFIGPAWGYRSAALYAVLVIAALLFLVRLQKRPYAGTTV

SEQ ID NO: 93057 - protein, 429 aa, Unknown
  Obtained from environmental sample
  DOMAIN (85)...(313): Nicotinate phosphoribosyltransferase (NAPRTase) family
  misc_feature (1)..(429): Xaa is any amino acid
MILNTLKGLSVFDSAFLDFLKTFRFNGSLWAMDEGTVVFPQEPLIRVEGSLIECQIIEGMLLNTVNFQSLIATKTCRIWLASGKGKLMEFGMRRAQGFNGAISASRAAYIGGANGTSNTLAGKIFGIPVMGTMAHSWVMSYNNEEEAFDAYAAMYPDRSVFLIDTYDTLRSGIQSAIKSGKKLAEKGKSFGVRLDSGDIQYLSTEVRKRLDEAGLQKAFITVSNDLDENIIENLVKDGAPVDSWGVGTRMVTGGNVAAFTGVYKLTARLEGKTAIQEGNLRASHSVEVPVMKISDNPEKTTNPGVKQVWRIWDSKGEAVADLLGINNDDDAPKVGQCYPFWHPSADYRHFNHKIEAAEAMLKVRIENGAITAQLPSLDEIKSYASANLDRFDATYKRLLNPHIYKVSITENLRKLKLELIEKNLTRRRD

SEQ ID NO: 93058 - protein, 423 aa, Unknown
  Obtained from environmental sample
  DOMAIN (80)...(394): Pyridoxal-phosphate dependent enzyme
  misc_feature (1)..(423): Xaa is any amino acid
MNDMRYISTRGNSEPLSFAGAVMEGMVSSGGLFVPEKIPCVDFSKLTGLSYREIAVAVLTPFMGGFDGGEIAGCVNEAYTFESFDIPEVVKTVPIGNNRYILELWHGPTAAFKDVALQIMPQFMRFSKVKCADNSRTLILVATSGDTGKAALEGFKNREGISIAVFYPHGGVSEIQRLQMATTDGNNTHVFAARGNFDDCQNGVKALFGDSGLRDKAAEHGVKFSSANSINWGRLCPQIVYYVKSYLDLVSTSVISYGDKIDFCVPTGNFGNILAGYYAKEMGLPIRKLICASNKNNVLTDFFKSGEYSIKGREFHKTMSPSMDILISSNLERFLFEMSERDAGKVDGWYDWLTKMGKFSVDKDIMERMRGVIEARWVDEDEALKTIGEVYHESKYVMDTHTAVAAAAVGGVNSDRDNDVPVI

SEQ ID NO: 93059 - protein, 586 aa, Unknown
  Obtained from environmental sample
  DOMAIN (232)...(462): Glycosyl hydrolase family 3 N terminal domain
  misc_feature (1)..(586): Xaa is any amino acid
TVKALNENGTSIKDAVVLLKVNDSLIAYARTLSDKDGKFTLLQGKEAPGEIPTPITKPQTVLPTQFASYSVMDLKGKTYNSLNNLPQGIYVLLGKTESGKNFNLGTLYHEGGTLTPKLQSLNTKSPILSKTTTTKGEVQLIVRKVGYLEKEVEFSSFSEDVGIVVLERDPLEDRIDSVMKLMDLNKKIYQMTQAQVGTSFGSNGNFYGSVLQGGTDYSSTVLSSMNTAINSASPKIPVIYGKDMMHGAAAINGATVFPHNIGMGATRDSALVRKACEVTAQESWVGNVDLIFGPAISVPQDDKWGRTYEGFGSTPELAIEMGAACIRGYQGAKYNAPWRVIATAKHYLADGGVSKDRGNVPDNDNIRKIHFPGYEAAVEQGVLSVMASFNQIDGKHQHIDSLRLTGWLKTELGFDGYIISDWQGIANSTRPGFTEDYGGSGPTLTSDAVRNAINAGIDLAMEPGSHTNFINFLTTLVNNGQVSRERIDDAVRRILRAKFRAGRMDNPAGIGNTVKSTYGDIGSAAHRDIAREAVRKSLVLLKNNDALPISKSAKVFVTGSHATNTGYQCGGWTGSGCDGGVFINLL

SEQ ID NO: 93060 - protein, 971 aa, Unknown
  Obtained from environmental sample
  DOMAIN (139)...(218): Bacterial Ig-like domain (group 2)
  misc_feature (1)..(971): Xaa is any amino acid
GNLLYANADGTVVVTARIPNGKAEGRDYTQDFIIVIGSGAPPITKEDQEYTIGIFMFDNESDDTVTVSPNKGKAGDTVMLSYTVANTAHYNQLDFGGINANIASVLEAGTGTRTYTIYAADSSNGVITITAVFTHTDLIIDPIAFEDPSGHITKNDGDEPFTNAITTEHKGTGLITYHSSNESVATVDSNGKVTIHAVGSTVISAEKAADTQYAHAITTYTLTVNHKPGSAENPFLVTNEADLRKVGTGTDGWVLSAHYRQTANIAMTGGNFTTIGDNTNRFLGVYDGNGKTITGLTQVTTSSYAGFFGAIDAGGTVKNVTVTGTINQNGSSTSYTGGIAGVNGGTIDNCFFNGNVNGNTTSDDVGGIVGMNSGTVINSRSNATVSGRTRVGGIAGSNNGKIDNCYNTGAVTGSQQVGGIAGGSSNSGNYVKNCYNTGNVTATTTTTTANAGGIVGQSSALIEFCYNTGNVSGTNNIGGIVGYINSGCTIQNCVSLGLKVNGTAAGRIGGTNNGGTTTANLARQDMKTGPVGSEAIVTTGAAGNMAGANVSLGTALSTVFNTNWLSSLWNISGDLTLGGDLPTLKTNTQIPAPTLPVELGSAEAPFLVTNEADLRKVGTGTDGWTLSAHYKQTANITMTTSNFTRIGINTDTGNFSGVYDGGGYTITGLTITGTSYQGVFGAISGTVKNMNVTGTITQNGTGNNISTGGIVGVNMADGTIDNCSFSGTVSGTGCDQVGGIVGYNYGTVINSRSAATVSGRTNIGGIVGQNQGKIENSYNTGSVSGTNQVGGIVGALSGSSSYIKNSYNTGNVTATDSTSNVGGIAGNCTTGSLVEYCYNTGTVSGAQYVGGIVGTGGSTVTVQYCISLSTRVITTTNSTYAGRISGIQGVTMTGNKARSDLLLGPSTQTTPVTTGTGSNKDGENVSLGTTVMNVFTSFDANIWYIWNTPMNTGGDLPTLRKKEQSPAPTLP

SEQ ID NO: 93061 - protein, 693 aa, Unknown
  Obtained from environmental sample
  misc_feature (1)..(693): Xaa is any amino acid
VEYKESYEGELEDEIVQEIVAGYTGFDMPGTNLSGYSEKHDGLFGIKARAKIGPLMLTTVLSHAQGEAMTRELGGKNDPNSTTALRDNEFIKNRYFFLDNVYKEYNNRVYNFANPGNSRPLPPRITQFQAFVSIQCNETSNSTVRRYKANINGSEVCFRMLTENQEYTVDVDRGFVRFEYSVREDEIIAIAMTAADGSLNKGRIVPINTPNNETVQIETLKPNGLDELDANNPLFGLMWRNVYYLPALDDSKLDLFYLDPAKGDTIRHVNARLISNVMGLTDEQGRARIENVEIFKTDKQELVIPPWNAALNGNEPFANSALGDMASDMIYKFGLRNTAMRDYVAKFGILTNGIAKRDSYDDLGWNILQGTVIVKTNSGTLLVEGEDYNLDYEMGVLDLISTRAKSAESIFITYQRESDFVLEKKVFAGLRGEMRLPFISDNSFMAASLLYQSASTTAGDLPQLGNEPFSKMHLSFNTSLDFQPEWMTKAVNYIPLVKSESESSAKVDFEMVHSRMNPNTSVDKGAYIDDFERTKDGYSLSMRHPVWHPSHYPFKYSGGVEGIADSMLNKLRIPVWDFYWYTPNAYDDARKINRFEVWRRDPNNSRYNSSDTYIDVLRLHATPASRDHPLDVQDRFRNSYASITTSFGRSGLNMENHRFLELVINPRGPGPLGRKGKLMIQIGTFSHDQVRDG

SEQ ID NO: 93062 - protein, 409 aa, Unknown
  Obtained from environmental sample
  misc_feature (1)..(409): Xaa is any amino acid
LKRRLDLFISAIAGVYASATANLFTSAKACRTAVALIFAASSLFAQGLRYEPPVIDGHEPPFKQSGGSPFTSDRPAILKNNGKMFSDTTVIDFEKRQLTFLRQDKDGNAVQSYHYGELNDYINDGKRYSFYEEWYNKLTAEARTALGEPPAPKLQWELAVHYPPWAQRLLGNDPPRLKIEGSLKLTVAYDYTRIVIDKDTTTDFVPLDFEPEYEFAIRGSVGRLISVNITHSRKNGFDLTDDPLKNFKVEYKESYEGELEDEIVQEIVAGYTGFDMPGTNLSGYSEKHDGLFGLKARAKIGPLMLTTVLSHAQGEAMTRELGGKNDPNAMTALRDNEFIRNRYFFLDDVYREYNNRVYNIANPGNSRPLPPRITQFQAFVSIQCNETSNSTVRRYKADINGSDVCFRML

SEQ ID NO: 93063 - protein, 195 aa, Unknown
  Obtained from environmental sample
  DOMAIN (12)...(182): N-acetylmuramoyl-L-alanine amidase
  misc_feature (1)..(195): Xaa is any amino acid
MRIVDFFLTVNPFTRPGRKLAVCKGIIFHYVGKNNQKAIDVWKFFEKTCPVDKHYSSAHYIINLDGYIYHAVPDEEVAYHCGSEKPDPVSGRIYTNWARQKYGYYACDPVKTSPNFCTLGIELCIDAAGNFTPETIQAAVDLSVQLLEKNLLFVDDIGHHNKVVGFKDCPLPWVKNPSLFHEFKEMVKAKMGCLL

SEQ ID NO: 93064 - protein, 279 aa, Unknown
  Obtained from environmental sample
  misc_feature (1)..(279): Xaa is any amino acid
VSKLTIAFPERIFFDEISQIAVNKQIPFYFSGLRLLVVSLLFFAIILFVYKPLSAKAGYYLFEYKFDPTNKKQNLIYVSLVILTLIYSGFCVYTSISEDYSNTPMNHQYSRYLVDAFIAGRTNIDFGHPERLLGAERPYDYYYLAANGYELGVDWAWDIAYYKGKFYTYYGPVPAVLLYFPYKLVTGNYMSHHTGVFVFAAVAVIFLALLWRFLVKKYMPEARFAFYLLSFLALFFVSHLFAGLRYPAIWLIVQVAGFTFIVAGTFLLLKSVDRDNIRY

SEQ ID NO: 93065 - protein, 133 aa, Unknown
  Obtained from environmental sample
  misc_feature (1)..(133): Xaa is any amino acid
ELQGQIDGSLNEHQKVFDQWCKDFNEVRPHEALGMKVPADIYKKSERKYPGENVEHRYGKGFKVRIVNDRGFMNLNQKRVFVGNPFAGYNVGVKEFVEKSTEVWFGNYLLGVINNDTGLIEPNFAIMQLTKKS

SEQ ID NO: 93066 - protein, 235 aa, Unknown
  Obtained from environmental sample
  DOMAIN (1)...(232): DNA gyrase/topoisomerase IV, subunit A
  misc_feature (1)..(235): Xaa is any amino acid
MGVEGIAVGMSTKILPHNVLEVLEAEIACLTGKKFELYPDFPTGGYVDVSSYEDGNGKVLVRAKMDTSDPKRILITELPFGSTTESLINSVDSAARNGRLKILGINDFTTDKVEIEIKLARGVYAQETIDALYAFTECEQSISVNLLVIKNGFPTVMTVTEIIKYHAKQLVKILTKELELEKKELLDKLHLRTLERIFIEERIYKAIEKMKTAKGVQDAVMAGFKPFLSEIGPRK

SEQ ID NO: 93067 - protein, 279 aa, Unknown
  Obtained from environmental sample
  misc_feature (1)..(279): Xaa is any amino acid
ISLNGKKDAQVRTGNAVYNLTERALIEEIRKDTEEKIAAKENEIASIVSKLNEIDDQLSKLYSSNQSLTSDQISSQEKLLTLQNYYRDQLAVLQDERSQILEASRLREARLKAQLDERTREFAAAQQKASSELESAINELEKLRTEQEKITAIDAQISGGLASAKDNIQKKQYDQATGIVENLRRFCNNPALASSRVFQTRKDFYNQSIDFMEAMINDAIKNSGSSSGADQFELKAENVKLQEKIDEMQKTINAQSSGDSGLKSRIDELNANVTSLQKD

SEQ ID NO: 93068 - protein, 455 aa, Unknown
  Obtained from environmental sample
  DOMAIN (1)...(168): Glycosyl hydrolases family 38 N-terminal domain
  misc_feature (1)..(455): Xaa is any amino acid
VRQFLVGKKACKEMLGCEGDTLWLPDVFGYAAALPQILSLCRINYFVTSKINWNDTTRFPYNTFIWRGIDGTGIKTHFINSWATGYNGMVNPADLAETWNNVQNKELQSASIKPIGEGDGGGGTARGDLEAARRLANLEGAPKAGWKKVSDALESIFAESAHWPEWQGELYLELHRGTYTTQGAVKRYNRKLEFAMRTTEFFSSLAMLESGTSYPHERLLKNWKLLLTNQFHDIIPGSSIGRVYDEAKETYKKIEADLADLTETTLKKLSGCADASVSDGLRFYNDLGWEREDPVSFPADLIKGAAALKAHGDDSETVFPIQRYINLDGNVIAVCCPRLPPLGWITLSPAEFTASSCFTFRGNNLKTPFYEVGFDEAGRITSLFDIEGDRELVAPGGVLNGFVSAQDVPVLWEAWDIEADWTRYLTEETRLLSTEIAASGPVCFRIRRKYKIGEA

SEQ ID NO: 93069 - protein, 77 aa, Unknown
  Obtained from environmental sample
  misc_feature (1)..(77): Xaa is any amino acid
KIASIKNNLPVYVFSGSSDPVGAMGASTTALVNEYRKKGINDLEFVLYPGARHETLNETNREEVMDNLLSWISKYCE

SEQ ID NO: 93070 - protein, 413 aa, Unknown
  Obtained from environmental sample
  DOMAIN (108)...(257): Poly A polymerase family
  misc_feature (1)..(413): Xaa is any amino acid
MRYRYSTGKNGKPVKKAIIYTCDEHGINFSDINKEAVGIIKKLRHAGFDAYIVGGAVRDLILGKKPKDFDIVSDASPAKIKKVFRNSRIIGRRFRLVHVYFEERVFEVSTFRSLKDGYTGNIFGTMDEDVFRRDFTMNALFYDIEQQVVIDYVGGMNDIKKKQVKPVIPLSEIFTEDPVRMIRAVKYAALAGFSIPFNLKLKISRQSDLLTGISPSRLTEEILKIINSDNAAAVVNLLDKMGLYNYIQPNAAGFMRKNPSFREKYLKSMAALNDGESGRGQVLSALFYDYLETVYDWEGEYISGKNLPASIEDFRKIFKAVRSFVLPMNPPRYDLERALRKFFSSRGITIKRPHIEKLKPAAETAENKPSAARKRRHRKHKPELKEPEKNMQNAGDSNIIRVVRKLQFLNNFH

SEQ ID NO: 93071 - protein, 139 aa, Unknown
  Obtained from environmental sample
  DOMAIN (77)...(99): MORN repeat
  misc_feature (1)..(139): Xaa is any amino acid
LVTAIFTKAMSLTDSPTAKAYMTLTAYGSVYEGDFVDGKPHGNGKFTWPEGSVYEGGWVNGKPNGKGKMTLNDGTVYEGDWVDGTENGKGKITFADGNSYEGDFVNRKCHGKGKMTYADGTVEEGRFENNKFVEGEKHG

SEQ ID NO: 93072 - protein, 338 aa, Unknown
  Obtained from environmental sample
  misc_feature (1)..(338): Xaa is any amino acid
MLGYLSRAVPLESLLESETGAAGSAGGAESADASETEKNRRFVERVQDIRRYAKEELGLNLGKNYTRYVKIDRDYLAAVVSACAADSFTRHEWKYPVVGVMPYKGFFKIEDARKERAKLEKKGLDVWIRGVDAFSTLGWFRDPLYSYMRDYPPNRLADLIIHESLHATVFIKGQSQFNEELAEFVGSEGARMYMESRYGVDSAEYMKMLISEEDNKRYVKFIQELIKELNEVYESEKTREEKLNEKEKIISAAQERFASEYDNIFSGEGYRGFSDLPVNNAYLELYRLYYTEDAYIANLFARSGKRLPEFIAAAKTIPKKASKRSSASKGSTGREMLA

SEQ ID NO: 93073 - protein, 468 aa, Unknown
  Obtained from environmental sample
  DOMAIN (302)...(468): Glutamine amidotransferase class-I
  misc_feature (1)..(468): Xaa is any amino acid
MNKFMFVSGGVCSSLGKGVAASSIGALLESRGLNVRMVKCDPYINVDAGTMSPYQHGEVYVTDDGAETDLDLGNYARFTKGRLSKANSITTGQVYESVIRKEREGQYLGRCVQVIPHITDEIKSRILAVSKEDNDTDVVIIEIGGTVGDIESIPFLEAARQIIHECGRSNAISVHLTLIPEVAGGELKTKPTQHSVKSMQETGIQPDILICRSPVIMDEPMRRKIALFTNVESDAVFTSPNIDTTIYKVPLVFSEQQLDLVILRKLGVESRHADMKPWLSVMKHFEERAGKVRIGIVGKYMELHDAYKSLYEALFHAGLECDVEVELVKVDSAELEKNENALDGIKVDGVLVPGGFGQRGINGMVRASAWARENKVPYLGICLGMHIMVIDWGRNVLKWSDADSTEFNQDSKYPVVSLLEEQVNVTNYGGTMRLGAMETVNADGTHILAAYGEKHISERHRHRYEFSN

SEQ ID NO: 93074 - protein, 643 aa, Unknown
  Obtained from environmental sample
  DOMAIN (1)...(229): tRNA synthetases class I (I, L, M and V)
  misc_feature (1)..(643): Xaa is any amino acid
SRNRYWGTPIPVWLCDCGHKECVGELDELHTLVGDGDKSAGKSIHAQTARQVQESLRTKDAAKRLSDAGIDSVWIERLANVNISPVDIHRHIVDKLEVKCPKCGAMMKRTLEVLDCWFESGSMPYAQQHYPFDNKEIFEKNFPADFIAEGLDQTRGWFYTLTVLSGALFGKMAFKNVIVNGIILAEDGKKLAKRLRNYAPPEDILNQLGADALRLFLINSPAVKAEDLRFSEKGVTDMARAVLLPFWNAYAFFVTYANVDGWKPTTLEPPKGGTELDRWIVSLLSDVISSVNKEMELYNLYKVVPHLVDFIDNLTNWYIRRSRRRFWRSENDGDKNIAYGTLYYVLVQFSKVMAPFLPFVTETIYRNLVNGKLPGEPPSIHLTAYPSAATDAIDEPLELKMKLVRQAVAMGRALRSRFTIKTRQPLSEFTVVLSDRKKIDLIRDMEELVKEELNVKKVTFDSDEERVVSISAKPNFKKLGKVFGQKMKDAGALIEQFSAADIKRLESGDKIDVLGTALAYDDIEVRRTKREGLEVETEGELTVALEVTITPELKRECVAREFVNRVQNRRKEIGLNVADRIVIRYSSPKEIENALADFRDYVCAETLAVNIESAPAAAINNAENVDIEGSAVIIGVEKTDIGG

SEQ ID NO: 93075 - protein, 387 aa, Unknown
  Obtained from environmental sample
  DOMAIN (2)...(387): Formate--tetrahydrofolate ligase
  misc_feature (1)..(387): Xaa is any amino acid
FIVDGLGGKANGVAREDGYDITVASEIMAILCLSSCIDDLKARLGRIIMGYTYGKQSDGSEKPVTAAQLNAQGAMAALLKDALKPNLVQTLEGTPSFVHGGPFANIAHGCNSVMATRMALQCADYVVTEAGFGADLGAEKFFDIKCRLGGFKPSAVIIVATVRALKSHGGVKKQDLEKENLAALEAGMPNLLQHIENITAVYKLPAVIAINAFPNDTKAELDLVEAKCRALGVNVALSEVWAKGGEGGEQLAREVVRLCEQPNSFEFVYDVNRPVREKIEAIARKIYRADNVTILPNAQKQIEQIEKLGLDKVPVCMAKTQYSFSDDPLLLGAPKGWTLTVRNIKISAGAGFIVALTGEIMTMPGLPPVPAAEKIDVDNSGKISGLF

SEQ ID NO: 93076 - protein, 269 aa, Unknown
  Obtained from environmental sample
  DOMAIN (72)...(95): 4Fe-4S binding domain
  misc_feature (1)..(269): Xaa is any amino acid
IRGTDDVDVPVKGGKYCKTAHIGRAIMDADIVVSLNHFKGHEGTGFGGAIKNIGMGSGSRAGKMAMHNDGKPQVNKKACVGCKICARFCAYAAIVFDDGKASVDGKASVDGKASVDHKKCAGCGRCIGSCSKNAIENNWDTNNQMLSCKMVEYAKAVLDGRPNFHINVVNQVSPYCDCHGESDAAVVPDIGIFAGFDPVALDKACIDAVNAAPSIKTSIIGERKCDHKDAAGNDDHFTNIHPTTNWRDQLTYAEKMGLGSSEYELVTVK

SEQ ID NO: 93077 - protein, 718 aa, Unknown
  Obtained from environmental sample
  DOMAIN (421)...(717): Domain of unknown function (DUF323)
  misc_feature (1)..(718): Xaa is any amino acid
MAVKNLGIAVFAVMFVFALAGCNEAGDTSNPTASNGGSTPGGGTTPGGGTTPGGGNTVINTAAIVVIAPVKGAAPSTTATVEDNGNFTIGSVSWSPTDNPFKGDEVYTVDVTLTAKSGYTFTGLTSASINGQSAEVSNNTGSTVKLSHTFPATNTKTVTSIAIKSQPTKLTYTHGDTLDLTGLAVTLTHDDTTAEDVVAADFVDKNVTANPSAGNSLIYSTHNRQPVKITYGSLTRNTSSLTVNKATPTVEDFEISGLTQEYDGSPKRVTITPKEEKSDGVITVKYNNSTTAPAAVGTYTVTFDVAATTNFNAKSGLSAGTLTIINQTVTLNSVIANGSTSQTTTQLTLTFDKAISGLRASDITITGVSIVIKGNLSGSGPTYTLDVSGFSTGGSFSVAVYKSGYTINGTPKIVTIYNLILPIEMVSIPGGTFMMGSPISEPNREPWSASYYPKNETQHSVTLSSFKMSKYQVTQAQYQDVMGVGFEEDITIIKYYGIGDNYPIYFVSWYGAIVFCNKLSIKEGLNPVYSIGGKTDPAEWGAIPTSIDTTWNAAVMDKSKNGYRLPTEAEWEYACRGSYDNKATETNTKPFGIGDGTKMISGLANFCVIYPYDLAKGGHYEDSSATGYVGKTTEVGKYAANNYGLYDMLGNLCEWCWDWYGSYSSGSQTDQTGVVTWSSRVGRGGGWDRYGRDLRSASRYGNYPGNRYSSVGFRLARP

SEQ ID NO: 93078 - protein, 573 aa, Unknown
  Obtained from environmental sample
  DOMAIN (16)...(176): Na+/Pi-cotransporter
  misc_feature (1)..(573): Xaa is any amino acid
MTILTLLLRMTGGLCMFLFGMKMMSDGLQKSAGERMRKTLNFMTGNRFMGVLTGFAATAIIQSSSAFTVIVISFVNAGLLTLTQFIGVLFGTNIGTTVTGWIISLVGFKISIDTLALPAIGIGFILSVIKWKYKHVGDLLIGFGFLFLGLYFLSHGIENSNSLFDFAAIGTIRENRILAVLIGLGVGLVMTIIINSSSAAVTLIMTLAFQDVITYEMAAGMVLGSNVGTTINAVLAGIAGNTESRRAALAHVLFNVLGLIWALPLLFPLLRLVDSIFPGNPTAAGPGNSAIPVHLAGLHTLFNIINTIIFLPFVKQYAKLISFLIPYKKQEEKSEHYKFAYISAGNTGSPELNILRAEKEISDMAGIVSFMYSRFYTVLRSLREEDSNDKEDTAELCTELLKKEEYIDEMRETLTNFLIECSRVKLNPKTETRVTYLMQVIVALESMSDECYSISRLLEKSVGKNCIFKDKEMDELIPYVGKVEEFLNLLENQLGRNPSSELKIRAAELENQIDKERKKLQKLGRKRIEAGGNVKAELLFIDLVRRIEKLGDYCFEISEENTLKKWINNIITR

SEQ ID NO: 93079 - protein, 59 aa, Unknown
  Obtained from environmental sample
  misc_feature (1)..(59): Xaa is any amino acid
MHTREAKGILSANNGMNISRGCTHGCIYCDSRSKCYRIEHDFEDVEIKSNAPVLLEDAL

SEQ ID NO: 93080 - protein, 423 aa, Unknown
  Obtained from environmental sample
  misc_feature (1)..(423): Xaa is any amino acid
MRDTLIECCTLDWSKISPAIFGAMFQSVMNDEERHDIGAHYTSEENILKLIRPLFLDGLRDEFEKIKKLSPTLRRERLIKFHDKLASLKFLDPACGCGNFLVISYRELRLLELEVLEILLGQEQVLDVHSEIKVNVNQFYGIEIEEFPAQIAQVALWLVDHQMNLLVRERFGTYYIRIPLTAAASIHHANALTLDWESVIPKNELSYILGNPPFLGARIMSKEQKAEVNTVFDGMKENSNLDYVTCWYKKATKYIQKTEIECAFVSTNSICQGEQVPILWPELMNKYNIKINFAHQTFKWSNEARGKAAVYCVIIGFALADRDTKKIYQYATVTGEPMETLVKQINAYLVDAPLLFIQKRSKPLCNVSEMVFGNMPNDNGNFSLTEKERKEIIKENPEVRKIIKPFTGADEFINNIFPVLSLA

SEQ ID NO: 93081 - protein, 222 aa, Unknown
  Obtained from environmental sample
  misc_feature (1)..(222): Xaa is any amino acid
VNLNLKYLPDKAWFLYVGKTLKYSLYTSVHPLDGFWDLTHEKRGSLAAANVIVALAILVDVMRLTLTSFQFVTVNMEYFNAAIVMMRIILPIFLWVVANWSLTTLMDGKGRMLDIYMAVAYALAPSVIINTVMIVLSRLITYDEGAIYLVLAGFSVLWTAILLLAGMMMVHDYSLTKTVLSSLLTIVGMGVMVFIFVVFFSLISDAVAYFVSLYKEILFRVL

SEQ ID NO: 93082 - protein, 602 aa, Unknown
  Obtained from environmental sample
  DOMAIN (1)...(59): His Kinase A (phosphoacceptor) domain
  misc_feature (1)..(602): Xaa is any amino acid
MSHEVRTPMNAILGITEINLQKESLPPDIQEAFGRIYNSGYLLLGIINDILDLSKIEAGKLELVPVNYDVSSLINDVVHLNVIRFDNKPIVFDLKADEKIPLTLSGDELRIKQILNNLLSNAFKYTNSGKVSLSIDVEHSWNAAWVTLVFRVSDTGQGMTSKQLEKLFDEYTRFNQEANRTTEGAGLGMNITKRLVELMNGDISVESEIGKGSVFTVRLPQRIVDTGVLGKEIVENLMHFRIGKMTLMNKAPQIVREYMPYGKVLIVDDVETNLYVAKGLMSPYGLIIDTAGSGFETIEKIKSGEVYDIIFMDHFMPKMDGIEAAKIIRDLNYTKPIVALTANALTGQTEIFLTSGFDGFISKPIDIHQLNFVMNKFIRDVYPAEIVEAARKIKNNMEENSGKTPSVNPALLKVFTRDAEKAVIVLEMINRKQGNYTDEDIKLYIINVHAMKSALANIGEKEISDLASKLEKAGHERDNAVIAEDTPVFLSALRAVVEKNKLIIDKISNKDADNNQYDDMNYLYEKLAVIKKACADYDKKTAKKTLSNLSKMKWPPPVVELMDKIAEQLLHGEFDEAAKLAGDLKNSNNKPLFPLDFHKGKY

SEQ ID NO: 93083 - protein, 87 aa, Unknown
  Obtained from environmental sample
  misc_feature (1)..(87): Xaa is any amino acid
SFSGGGVETNPNTIAKAYNELEIRGILATQVGSGTYISDKKPVLEDDSLKRKIKEVAGRFIQEMRDLGVEKKELSGLIESIIKEEKR

SEQ ID NO: 93084 - protein, 301 aa, Unknown
  Obtained from environmental sample
  misc_feature (1)..(301): Xaa is any amino acid
MVSVAVYIFINSWLGGMKIESRRNIVNYELGAAKLQTKVYFEKKDELPSYENFYGWEIYGDALSDEGYISAPRYTFSGTLSSTSGSAPIIFYAVEPDAEREVLRYVPYVDFGRFVQNGNFEIALGTVAAEKLKVGIPSRPYRKDLEELISLTAQNSQDADFLRSLYDEAPVSKNIFDPVDTRAVKGNERMMLKKNASKTDLDRYWKMISMAGRNNVRINAVIDIKAAPEIIRIDKWNGELFPALREEDKTLVQSAYNLEELMGSYLLIEDDEIQLAKVLDAMIRAGFQGAVNHINQALRWL

SEQ ID NO: 93085 - protein, 231 aa, Unknown
  Obtained from environmental sample
  DOMAIN (58)...(231): Predicted permease
  misc_feature (1)..(231): Xaa is any amino acid
VVVAGVINSPDPLPNGNTAYIPLDVLQSETGMMLQGAVTELVIRERGVPDSRLPGESESSAVITAALNRGLANMGLTLPDDLAIHTWQDYMAEYLGYETIQTGAPRIIEFLLLFLSFLGISNTILLAILERTKEIGMMRAMGITDGQMILIFMLEAGFIGIIGSILGIIVGCVFNYPMVKYGMDFSAMGDLLSNGIGFRTTAVFRSVWNIPIIIGSGVVATVLSSFVAYFP

SEQ ID NO: 93086 - protein, 471 aa, Unknown
  Obtained from environmental sample
  DOMAIN (12)...(164): Phosphoglucomutase/phosphomannomutase, alpha/beta/alpha domain I
  misc_feature (1)..(471): Xaa is any amino acid
MTKDELNCALDKMILSASGWRGIFAADSAGIPDEENKTVEITAIHKIITGAAAFIFSEYLQKSKNNPLVLFGTDTRPTGKAITETMIPVLLASGCNVRFSGFTAAPEIMAWARSAANAAGFIYISASHNPVGHNGIKFGLTDGGVLAAEETNKLIADFRLFFKKDDSIQKIENLISAADPASLKKVYSGETASKAEARKAYYDFCGVVAWDGGIHSACGIHSACGIHSTRDNEIVSVIKNDLAKRPLGVVCDFNGSARAVSIDGDFFSELGLKFDCINGKPGEIVHRIVPEGESLDPCKALLEKTHAVDPSFIIGYMPDCDGDRGNLVIWDDVKNAVRALEAQEVFALACVSELAHLVRMETESSKAAVAVNDPTSMRTDRIAEAFGVSVFRAEVGEANVVGLARKLRGQGYTVRILGEGSAGGNITHPSAVRDPINTVLAIVKLFSIRSSAGNDGLFEIWCKCSGQAEKY

SEQ ID NO: 93087 - protein, 70 aa, Unknown
  Obtained from environmental sample
  DOMAIN (5)...(69): Heavy-metal-associated domain
  misc_feature (1)..(70): Xaa is any amino acid
MENITLNVEGMSCEHCVKAVTKAVGGFAGTKNVKVDLKAGTASFEFDSSKTSLNEIKAAIEEEGFKATGA

SEQ ID NO: 93088 - protein, 56 aa, Unknown
  Obtained from environmental sample
  misc_feature (1)..(56): Xaa is any amino acid
EIRDSKKAEGHDRIYTHGEKESELMSQRINTQIPVNEKTLEEMKNIAGKLGVEFTF

SEQ ID NO: 93089 - protein, 234 aa, Unknown
  Obtained from environmental sample
  DOMAIN (22)...(230): Glycoprotease family
  misc_feature (1)..(234): Xaa is any amino acid
MNTLAIDSSSNVLSVALETETSILHEEIEKANSHSCFLMECTDGLCKSAGIKPADLSLVACMRGPGSFTGLRIGFSAGKGIALALGIPLIAVPTLDCLAYSLSTKAGLVIPVLDAKKGCFFAAFYREGKRLTDYLDANPLELLKISSKILLQPEEKLLLTGSGAELLQSRLKETCQSKLILNKNINLDKEFSRGRARELLKIVKDNNIYKANDIYGFPVYLRKSDAELNYKKNG

SEQ ID NO: 93090 - protein, 375 aa, Unknown
  Obtained from environmental sample
  DOMAIN (24)...(364): Aminotransferase class I and II
  misc_feature (1)..(375): Xaa is any amino acid
MSKFWNSRVRNISPYVPGEQPRDRKFIKLNTNENPYPPSPKVIKAIQEATNERIRLYPDPQCTTLREAVVRRYGVKSEQVFAGNGSDEILAFAFATFFDSSGGNEETILFPDITYSFYPVYADLWDIPYRTIPVSEDFSIKTADYKIPSGGVVFPNPNAPTGMPLLLSDILSLAEYLEKRDKVLIVDEAYAAFGAESAVPFINKHGNILTVHTLSKSSSLAGLRGGYAIGNHELIEGLCRVRDSFNSYTVDRLALAGAEAAVSDAAYYDEINRRVIATRERVTKTLQSLGFIVLPSAANFIFVKAPIKKNSIEKTEPCIGGADLMAALREKGILVRHFNKNRIADYLRVSMGTDEEMDAFLEACKAIIDNIGNTK

SEQ ID NO: 93091 - protein, 439 aa, Unknown
  Obtained from environmental sample
  DOMAIN (9)...(439): Histidinol dehydrogenase
  misc_feature (1)..(439): Xaa is any amino acid
VKIIHTTEFDSFWKRGAAQDDNETESAVKKIIAAVRSEGDMAVRRFTSRFDKSSPEKLEVPMSVALEAREEMRRSDPQLYSTIELSASHIKRFCQKQREQFFDFEYEMEKGLITGQKVIPVQKAAVYVPGGRFPLFSSVIMCLLPAFCAGVEEVIFASPPLEDGIPDRKILATAAITAEIAERELRVFAVGGAQAIAALSLGTESIPGSDVVAGPGNKYVAAAKRLLFGEVGIDFIAGPSDVLVISDNSITADISQNANLIAADMIAQAEHDPDARARALVPSRELAEKIAGAIEKQLANLPTAETARSSLELGGLIIVYGEKKEAIRIANIIAPEHLELHVTDPESWIPKLKNYGSLFIGALSAEVLGDYSAGINHTLPTSCSARFTGGLSVRHFLKTVTTLRCTRDEGFEKNRQAAEILANAEGLAGHAQSAALRKD

SEQ ID NO: 93092 - protein, 591 aa, Unknown
  Obtained from environmental sample
  DOMAIN (381)...(591): CO dehydrogenase/acetyl-CoA synthase delta subunit
  misc_feature (1)..(591): Xaa is any amino acid
VRVTLITDQAEVEKRLEIARKVYDERNRRLEAMTDESVETFYSCLLCQSFAPNHVCVITPERLGLCGAYNWLDGKAAYEIDETGPNQPLKKGECLDPVKGIWSGVNEYVYTNSHKAIDSFCAYSIMDRPMTSCGCFEAICAYVPECNGVMIVNREYLGETPIGMTFSTLAGSVGGGNQTPGFFGCGKVFLSSRKFLSAEGGFARIVWMPKELKDLLHDDLLKRFDEKGLTGFIDQIADETIAVTGEGVRAFMEKVKHPALKMEDMARFAQSAESDATAAKTVPAKTDAKAEAAPAKGTAEEGTPITGVDIAAITEQVKSAVAKEIVSSIIDLLSERFLGQAVAKPEAPKPEVKPVISASTRISEIKSFAIPAESSSAATYAVKLGNSKGEGGTRGKTRVVGGANCMPFHFWEGRMPNRPLIAMEVYDSVSAKYPDILREAYKGLLDKPADMAKACVTQHGADLISVRLDGIHPDRENRSAVQSVELVKSILAAVDVPLIITGINHYEKNNEVMKAIAQACEGENLLLNWVEQDNYRTIAGAAMAYGHTLVAQAPIDVNISKQLNILLGNMGLAPDRIIIDPMTSTIGYGVE

SEQ ID NO: 93093 - protein, 442 aa, Unknown
  Obtained from environmental sample
  DOMAIN (54)...(442): Amidohydrolase family
  misc_feature (1)..(442): Xaa is any amino acid
MAQVVIHNAKVYLKRNNFAQAVLIQNDKIIATGTNEEIISKAHDAQKIDASGGLLLPGFNDSHMHLYSFGRNKYRIRANGVTSIDELVERGRELIERIKPQEGSIVSGTGWNQDMFTGEKRLPNRHDIDRISTEHAVVIFRVCGHTLCCNSLALKMAGITRESVHTESGQIELDENGEPLGVFGEGSALYKIRDMVPPYSQEQIEDQLLYAVSHALKNGLTSVGSRDVIEDNYQSIVDAYIKLFTEHDLHLRVNLQCTIEKDAVFNEFLRRGWITRASMGHPYLTMGASKLFADGSLGSRTAYTRKPYLDAPSTRGFQVHPQEEMDALVLKNHKNGFQVIVHAIGDAAVEETLNAFEKANGGRANEPRHGLLHCQITDLPLLRRIADNGVLAFMQPIFLTHDLYALESRVGRELASTSYALATMDRLGVKVAYGTDSPVESM

SEQ ID NO: 93094 - protein, 342 aa, Unknown
  Obtained from environmental sample
  misc_feature (1)..(342): Xaa is any amino acid
YGNINIDFVSVNAGIYLNRKNESQNPYDYRYGIAVSQSIFGLSLSTSLSARSNKSESSYYFFLNAAYNFGLDKHYVSLSNDIGRYSYNANPRSLENPYYDPEYYDYYEPKYIEIPGYSEHSWNRSTSLGWEWSDGGNYNMGQRYSANLSSQGDMNTNIKKNMHANLNASYYFNRAEISASHSYSRHENIFGKAFHTNITNARFGTSFMFADGLWAFGRPVRGGFILADVNNSLSGAVVRVNYSEEYDSDLSHSGLLGAAYKNGIGVYHPNSITIRLNDMPIGTYLEQNQYYVIGAYKQGYALRLGNEMRVFMQVRLRDKDGNLSNYFAAISHIGPDGKVTNA

SEQ ID NO: 93095 - protein, 84 aa, Unknown
  Obtained from environmental sample
  misc_feature (1)..(84): Xaa is any amino acid
MEMCQSCGMPMNKDPHGGGTNADGSKNIKYCSYCYQNGTFVGGETTVEEFQEFCRKKMIENGTPKFLAWIFTRGMKRLERWNKK

SEQ ID NO: 93096 - protein, 881 aa, Unknown
  Obtained from environmental sample
  DOMAIN (1)...(137): Insulinase (Peptidase family M16)
  misc_feature (1)..(881): Xaa is any amino acid
AYLTLAVKAGSVLEEDDEQGLAHFVEHMAFNGTERFPESKLVSYLRSLGMRFGPEVNAYTSFDQTVYGIEVPVETDEQKTRRIPETALAVIDDWTRAVTFSPADVDDERPVIMEEYRTRLGAWERLRQKWLPALFRGSPYANRMPIGLPEIIEEAPASRLEGFYRKWYKADNMALILVGDFDGEALEASLTGHFLIEKPAEPVNRPFYDLPLPKKGNLEILTLTDSELTASYINLYFKRGPQARRDDLSYYRGEIIDYLIDTMLSLRFEEALLKPETPHVSVNAGTVSYATSSRFYVLLSQPKTGGVEASLEDLLRIKETMLRYGFTDSEMKTAADTLVSDLQKLVQEKDKQQSQKYIDSLTDYYLKGGNYADVEWELNAVRQMLPHITAKDINAAVKDYFASTDIQVFVFAPDSEQDNLPDEARIRRMVAGSKKMKIAAPSAKAVEGALLSSEPEKGSVVSESVDAETSAIFWELSNGARVILKSTKNKNDEIVMQAMALGGTSSVAPEDEVSADLAIEMAQVSGLGPWTRPELTKKLAGKQVSLSQYVYSYYRGFRGSSTTGDLKTFFEMMYLSFTDQRIDNEAVQAMMDQYKTSLALRREDPHAVFSDEINRTIYSGHPHFKPLELNDLPKADIDTALAFVRKSLNPADYTFIFTGNLNLKMMREYAETYLASIPQKESWNTWTDLKVTRPGKVENIVHKGKEEQSTVYMVWFSKAPFSDELSAACQVLNEYLDIKLDDEIREKMGGVYSISSGVSVSPVPQGELSMQVYFSCDPKRATELQTAVIALLNQAAGGVIDNDTFTKAMEAPKKEWEVSIQSNAYIAQSYANSSVLLNLPLSRLDKRPKLFDAVTQADIQRVCAQLLRSDGPAIVVLMPDK

SEQ ID NO: 93097 - protein, 94 aa, Unknown
  Obtained from environmental sample
  misc_feature (1)..(94): Xaa is any amino acid
LKNKAAFFVALRYLWGRANEGGRYLRGAAAGIAVSLVPIIVTLIVADGMIRGITDRYLELGTGHLQVFEMFSSEKKDGDKEDIIEKIKAYDGVK

SEQ ID NO: 93098 - protein, 478 aa, Unknown
  Obtained from environmental sample
  DOMAIN (88)...(201): CBS domain pair
  misc_feature (1)..(478): Xaa is any amino acid
MFNESYSYDDVLLLPGYSEVLPKECNIQTILCDDIRLNVPVISAAMDTVTEEKLAIAIALEGGAGVIHRNLPPEEQAHQVANVKRFLNWIIESPITVPNDAYVRDVRSLTKTYGVSGVPVVDSNGKLKGIITNRDLRFCRDDSLPVVKVMTEEVIVVEGEPTVEKARDKFAEFRIEKLPVVDHEGRLKGLITVTDMEKHENFPNAATDKTGKLIVGAAISPQDYGVRLPLLIKAKVDFVVLDTAHGDSKNVMEAIKKIKKEYNIPVIGGNVATKDGTKKLIDAGADAVKVGIGPGSICTTRVVAGIGVPQFSAVWDCAEEAAKSKIPVIADGGIKFSGDITKAIGAGAGVVMIGNLFAGLKEAPGSEIIFDGRIYKEYRGMGSMGAIADGAGDRYQISKDEEPVPEGIEGRVPYKGELRTYLNQLISGLRKGMGYCGCKSITELNKYRKFVKITASGLRESHPHDITITQEAPNYSPS

SEQ ID NO: 93099 - protein, 408 aa, Unknown
  Obtained from environmental sample
  DOMAIN (152)...(339): ATPase family associated with various cellular activities (AAA)
  misc_feature (1)..(408): Xaa is any amino acid
VINGDISIILLTENLADIASRLAASPSTVKICVPFPDAKVRESFLHSREKEGKILLERGLSPEKLASVTSGVNLMNLNRLVSESYEENKPLSLDFMRHKKKEIIENEAAGLLEFMETSFNLSHVSGHDFVKKRFKNAAKAIKMGRHDVLPMGYLIAGPVGTGKSFMVSAFAGEIGIPMVKFRNFRTKWQGETESNLEKVLNILVAMSPVAVMIDEADAFLGDRNQEGDSGTSNRVFAQIASFMGNTEYRGKIIWFLITCRPDLIPIDLKRQGRAEEHLALFYPETDKDREDLFKTLVRKLDLDIRNFSVSDLFRKYNHEYSGADLEAVLVRAKLLAAMDDRVFVKREDMEEAMSDFNPAAYPYDVELQNLVAVLECTSREMIPKKFQKLPRSKIISEIQELKVLVRER

SEQ ID NO: 93100 - protein, 450 aa, Unknown
  Obtained from environmental sample
  misc_feature (1)..(450): Xaa is any amino acid
MDSVERRFSLNGNNGRVKGIFLWEGRRVTFVPLTPLEKNNDYNLSLSAEAHDTNGLSMDSAFDKKFTTRPGTQRPELISFSPSMYARIDDLKTEVRLYFSLPVPLSALYDNVSFNPSMSGVWRQEEEGKLAVFTPSVPWTKNKRYEMRYSTSLTDNKGMNIGNDFKSIFITGTDKEIPELLQANRVTKDGVVIPLERDATGFTSAAENYTENRGWEKEDRLFLVFSKPVDSASVKNCLSVEDASSVFLETVPGFNTEFLFCFETAPVYESRFVLKIKSGVRDGAGNESRDEYIYRVFANGKSSKSPRLSGIRMPMLPQNNTGLVSFGAEELFKDFPITDENYPSGVSVKTWIELYFDTAQGALIDIFSVMELFRIETSNNVLTFSPLQIKTGNFTVPKPQAGWENFERVEIIGNLTNSICFGIVNFQIGSGLKDSLGNKNEKLLRISTIK

SEQ ID NO: 93101 - protein, 268 aa, Unknown
  Obtained from environmental sample
  misc_feature (1)..(268): Xaa is any amino acid
MVVRSGGGGWHCYWIFHEPIPCNAEYRGWFEQGLRRISGALAKFGADPKVCDCSRVLRLPGFFHCKGKPAFVTLESVSDARYTPDEVLAAFPAPETPALPTEKGAKPQPAAKANASAKTAAKTSATAKTAAKTSATANPRCAEEAEEEEEEVAPETIVKYVRKLDLAVQGNDGSGTTIKAALKVLDRFGISQEEAVALLDEHYNPRCQPPWSREELARKVSEAAKILAKNAKLNQQHPRVPGFQWRADGLNKLVTKGRGDHADIIPVW

SEQ ID NO: 93102 - protein, 114 aa, Unknown
  Obtained from environmental sample
  DOMAIN (17)...(68): Helix-turn-helix
  misc_feature (1)..(114): Xaa is any amino acid
MGGQEIKAALGQNIKNLRSYRQYSQAVLAEKADISITYLSKIERGLKFPKPEILSQLADGLGVELYELFKADHVPKPIPVVATEYNKKLIDRLSKEMAQKVTRTMDSVFKRYLK

SEQ ID NO: 93103 - protein, 159 aa, Unknown
  Obtained from environmental sample
  misc_feature (1)..(159): Xaa is any amino acid
RLAEIDAIDARKRYYIIRKTGLALQLLENAYGDNTKWKWSFVELEGRYAAVAKNIMNLKTAVVNTDPNSPDYEPTMYHLRLIKKLLMQAADRYREKYELSTNRIDDFKMGINFLNALRRIHALLGERPEAETLKKKAEIWSSKLETDHKKHEEAPARKS

SEQ ID NO: 93104 - protein, 471 aa, Unknown
  Obtained from environmental sample
  DOMAIN (1)...(471): TCP-1/cpn60 chaperonin family
  misc_feature (1)..(471): Xaa is any amino acid
VAKEVELADPYENMGAQLVKEVATKTNDVAGDGTTTATVLAYSMVKEGLKSVAAGMTPIELKRGIDKAVEIAAQEIKKSAKEIKDTEETSHVASVSANNDIEIGKTIADAMDRVGKDGVITVEESKTMDTTIDFVEGMQFDRGYISAYFVTDRDTMTTVYEDVYILIHDKKISGMREMLPLLEKVAQSGKPLLIIAEDVDGEALSTLVLNSLRQTLKTVAVKAPGFGDRRKAMLEDIAVLTGGQVITEELGMKLENTELSHLGKAKTIKIDKDNTTIINGGGKAKDIKDRIAQIKVQIEDTTSSYDKEKLQERLAKLAGGVAVINVGAATEVELKEKKHRVEDALSATRAAIDEGIVSGGGIALIQASLALEKADTKGLTDDEKVGFKIVKRALEEPIRQIAENAGLDGAVIAERAKSEKKGMGFDAAKMEWVDMMKAGIIDPAKVTRSALQNAASIASLLLTTECAITDI

SEQ ID NO: 93105 - protein, 123 aa, Unknown
  Obtained from environmental sample
  DOMAIN (1)...(123): Protein of unknown function (DUF1121)
  misc_feature (1)..(123): Xaa is any amino acid
MSVPKSLLYKKLGPRVVRALKERFFDAWYFDEPSEALDKILSLIPPEHVVSWGGSLTLGELGVTERVALEGYKVIDRDKAADRQERFELMRQALLCDTYLTGCNAVSEDGQLVNIDGLATAWR

SEQ ID NO: 93106 - protein, 313 aa, Unknown
  Obtained from environmental sample
  misc_feature (1)..(313): Xaa is any amino acid
FWVIAITAMIVSVLTGCVSYSVQSVVISAANNATQIKAGETLQFSFNVEASGKDTSKSQVVKWNVSSTADGKGPVISGTGINSGGLLTVSANEIYPVLYVTASHAVFSSQKDQKQIQVSGPKVGSVVLSTTASSVVVGKTVKLSAFVAGLPPNQGLTYSVGSKNDGTGAVAQGTSIAADGTLSVAAGEKNPSLWVRAVSNSDRSKFDVKEIKIVSVTSVAVSAEGGTARVLRGAKLKFNAAVTGVNNPGTGVTWKVASKNDGTGDVTAGTAIASDGTLTVASSEAAATLYVIATSSVDTTKSGSIAVIIPTVT

SEQ ID NO: 93107 - protein, 643 aa, Unknown
  Obtained from environmental sample
  DOMAIN (89)...(643): Carbohydrate phosphorylase
  misc_feature (1)..(643): Xaa is any amino acid
MMDYKYLQNTYVRYLRNFLVKDEMTATVYDKFMALAYAVRSEFVDHWINTQRGYIGKRRIYILSMEYTLGKSLYNNMVNLGIEEVFTEAVGSLGISVKELFERDDEFDLGNSGKARTAACVLESMATLGLPSMAYGLRYDYGQFRQEIRNGVQVEFPNDWLHKGHPWEIVRPEYESVVKFSGESSPVDPTKPLGPHVWKNAEEVYAVPYDIPIVGYRNEVVNTLRLWSARANEEFLPDYQNHNDYVRACEEKSQSGRITKVLFPDEDVRRAHDLRIRQQYFLVSAVIQDIIRRHKQNGNNIADLGAKTAIHLNGSRCALAIPEMMRLLVDQEGMDWKEAWRMTQSIFSYSSRAVQREHVETWPVYKITQLLPRIMQVIFDINLEHLDLIRARGCHDLDLLRNLSLIEEGEVKRIRFADMAVLGSNSVNGVSAAHTEMLKKQLFPNYYSQYPEKFYCKTNGVSHRRWLYCANRPLSALISRPIGDGWVRRPEELSKLEFYAESPEILKGFGNVKNRAKSELCGVLRERVGAVVDPAMLFDINCRPIHTTKRQVLHVLYMLHCYLKIKKGENLACRRAHIFAGKASPSDFLAKQIIHLINIAAGIVNGDAAAREQMRVVFIPNFSVGWAEELVTAADLSEQISTA

SEQ ID NO: 93108 - protein, 499 aa, Unknown
  Obtained from environmental sample
  misc_feature (1)..(499): Xaa is any amino acid
GTVISRDEEEVIVLSKASIRNASTEEALWSLNASRIWLLPGSDFAVFNAVLKVGEIPVLYIPFFFFPADELVFHPVIGYRTREGTFVQTTTYLLGRPKADTGSQSSLTKILGNSNDMEKKREGLFLRSTGKKMVDPNATSLKVMVDYYTNLGSYIGTDLEMPAKGILSALNLSMGIGLTRTVYPVNGNYTPYFPDYDGSTDKNYSNLFSKEVPFRYRFKTNSSVSGKYGGFSWSLPYYSDPLVDNDFLKRAEDMDWVSMLQKGAAVEPDETTQSQLGSYSWRFTSQVSPRFPSMSPYISGISLSSISSTVSFRIVNANPSSSDIRFYSPNSSFYVPDTATLYSMNVTVTGTPLSFGESAASRTDDKSDTTEQPDPFKDIGVPRSPFENMQKEDTKKKDPSDKLVPPELNQRFELPKTGSVKTSLDYRVAPSGASTLKFNSYKWKQYDEIDWGDISSILNSFGGDASTTVNVNHSENFFSNSFSYMGSGTWRQYGYLTKK

SEQ ID NO: 93109 - protein, 161 aa, Unknown
  Obtained from environmental sample
  DOMAIN (1)...(141): Peptidase family M48
  misc_feature (1)..(161): Xaa is any amino acid
INAANSEDALAGVIAHEVAHIQLQHSIIAIKSSRITQALLITGTSAAGAAAGMDVNQLTDVFNESVGEIVQTLVNNGYSQTQEYDADNTALSLMAGAGYNPRGLIDMLKELNAIQSKTAGGFNKTHPNPDQRIANAEKSVGKYNVTDNRAIRQARFNAAVK

SEQ ID NO: 93110 - protein, 848 aa, Unknown
  Obtained from environmental sample
  DOMAIN (369)...(676): Penicillin binding protein transpeptidase domain
  misc_feature (1)..(848): Xaa is any amino acid
VLPTKILDIDGNLITEFSADEKRALVSLNELPKHLIYAVLAREDYDFYNHKGFSVRGIARAVVGKLLRKDLGGGSTITQQIAGTLYTDRREITLTRKIKELWWAFQMERRFTKNEILEIYLNQIIMGPGVYGVEAASQYFFGHSAREITLAESALLVIQFSSPTHYNPLNNPNQAMNRQRVVLDKMVEMGYTTTEEAEASFNEYWDNYDYTRASTAAYYNRTDAAPWFSEYVRRELDQRMYGSMDYYRDGYTVYTTLNMKHQEAANKYMEEGIKRANVEYARSSGTRLVDAERTWLPVIDLLSLYFNLDQIHSTSDAQNEQKALNRYTKTINPLLDMAALAFGIPEIRTLTGVGFANLKTSTEQNVVEGALISIENDTGFITAIVGGSKYDESNQLIRAVQGNLQPGSAFKPLYYSAAIDSRKFTPATVINDLPIVFYNEDGTAYMPLNFLGKWNGSVLVFDALAQSMNVASIRVLDGIGFDAAIDRASSLLGYSDPDDIRRRFPRVYPLGLGIISTSPLKMARAFSIFANLGREVTPIAIRSIEDRNGRIILDIEREARQEQRRKGNSVQVISPQNAFVMTSMLRKTVERLGGTLYNPSGWGSKFTFKDANGKTFKMPMAGKTGTPQNWSDAWTIGYSAYYTTAIWFGFDKPGNSLGLTLTGSTLAGPVWADYMREIHQGLPYRDFLRPATGLVDITVCLKSGLLKTPSCSEGVTLTFLEGTQPVLFCEECGSTRGFEAFRYIELNPMFFDTLNFINDLKMPVLDEAFLREIEEDMRRSQTNLTISRSDVPSPGTPPALNMPTLNLDLIESNPQPVPQHVSENDSDEKETFGMDDDLEPPSYNPVLD

SEQ ID NO: 93111 - protein, 809 aa, Unknown
  Obtained from environmental sample
  DOMAIN (422)...(729): Penicillin binding protein transpeptidase domain
  misc_feature (1)..(809): Xaa is any amino acid
MGSRSNSATSTWLVRLLAAFTVILAVFIGIGLGLSLAETTNIKNQENFFEFAPALPTKILDIEGNLITEFSADEKRALVSLNDLPKHLIYAVLAREDYDFYNHKGFSVRGIARAVVGKLLGKDLGGGSTITQQIAGTLYTDRREYSLTRKIKELWWAFQMERRYTKNEILEIYLNQIIMGPGVYGVEAASQYFFGHSAKEITLAESALLVIQFSSPTHYNPLNNPNQAMSRQRVVLDKMIEMGYTTSEEAEASFNEYWDNYDYTRASVSAYYNRVDAAPWFSEYVRRELDQRMYGTMDYYRDGYTVYTTLNMKHQEAANKYMEEGLKRANVEYARSSGTRLVDAERTWLPIIDLLSLYFNLDQIHSTSDAQNEQKALNRYTKTINPVLDMAALAFGIPEIRTLTGVGFANLKTSTEQNVVEGTLISIENDTGFITAIVGGSKYDESNQLIRATQGNLQPGSAFKPLYYSAAIDSRKFTPATVISDLPIVFYNEDGTPYMPLNFLGKWNGSVLVFDALAQSMNVASIRVLDGIGFDAAIDRASSLLGYTDPDDIRRRFPRVYPLGLGIISTSPLKMARAFSIFANLGREVTPIAIRSIEDRNGRIILDIEREVRQEARRKGNTVQVISPQNAYVMTSMLKKTVERPGGTLYNPSGWGSKFTFKDANGKTFKMPMAGKTGTPQNWSDAWTIGFSPYYTTAIWFGFDKPGNSLGLTLTGSTLAGPVWADYMREIHQGLPYRDFLRPATGLVDATVCIKSGFLKTPSCISGEVTLTFLEGTQPMYFCEECNKNRGFEAFRYIELNPMFLRHIG

SEQ ID NO: 93112 - protein, 427 aa, Unknown
  Obtained from environmental sample
  DOMAIN (144)...(346): Transposase IS66 family
  misc_feature (1)..(427): Xaa is any amino acid
MQVETLDATVRDNVNELEIYKQRYQELKTINLELQNKVIEIETRNKQILNEYLILKEQYDLLTYKRFARSAEQLLEDKKQQLLFAEEDEPPETNEEKSEELQTVKSFTRKKNGGRKPISANLERRPRVIDIPESEKTCACGANLTRIGEETSEKLVIIPPQIYVDQIVRPKYACRQCEGTEEEEEPAVRIAPVEPAIIPKSIASPSLLATIFTQKFEMHLPYYRQEKQFEQIGAAISRQDMSNWQQQAYEKLEPLFAMLEETVKSGPVLQMDESEVQVIGEEDRSDTQKSYMWLARGGPLGKKVILYKYRPTRAAYNVMEFLQGYRGYLQTDGYKGYDSAAKDLTGIIQVGCFAHARRKFFEAAKISSKGRSAEEGIKYIRSLYAIENELRDKNIDSGMFLSKRKARAGPVLEKFRAWLLKRKDEVP

SEQ ID NO: 93113 - protein, 454 aa, Unknown
  Obtained from environmental sample
  DOMAIN (169)...(408): ATPase family associated with various cellular activities (AAA)
  misc_feature (1)..(454): Xaa is any amino acid
EAAAKFAQRYITGRQMPDKAIDVIDEAGAMRKLAPPFVPPEIAGIEEEIRLLAEEKNAMVSMQDYERAAEVRDKVRDLRGRLDGMLSAWEENSLGDRLRVDESHVRRVVAEITGIPLTHLEEKESRRLLNIEEELHSGVVGQDDAVRRVASAIRRSRVGVSSPKRPLGSFIFLGPTGVGKTLLAKRLSEYLFETPDSLVRIDMSDYMEKHNASRLVGAPPGYVGYDEGGFLTERIRRNPYRVVLFDEMEKAHQDVFNLLLQVLEEGELKDSLGHTVSFSNTVIIMTSNAGVREISRDSRLGFGSGSGLLSQSEIESQATSELKRLFPPEFLNRVDDTVVFHPLSVEQIESILEIELAELSNRLAEQNYSIEISPEARDLLIEKGWDPKFGGRPLRRTLQKELEDPLARLLMENDWPKGTVFTANVRDGKIELTGNAPTYTDELSIRDEELIYSE

SEQ ID NO: 93114 - protein, 338 aa, Unknown
  Obtained from environmental sample
  misc_feature (1)..(338): Xaa is any amino acid
LNVFSFGSAQYIKNKKNSVIITALIAVITFVFFTGNSILSKADINIRKAYIDNLTGDVVLEKSGDMTLNLFGGNAPVIDSYFSIPVLPAYNTVMELVSSQEGIAGITSQVSGRALLDYRSIREEVLLCGIDPAAYFSVLPGIKLNEGRFLTTGEYGAMITMERALKIERQSGQFPAIGDPMLFTSGGVIGFKIREVPLVGIYSYHNPGQFLNEIILVDPQTVRVLNSIQVAGESDYIPEEKSLHLLSSNIDEIFDIDFSSDEIDEFSNDEFSIEMLQTFLTDGNIEENSLNKKYTEDGGDWNFIIIRLKNNKYTSAFINSLNDKLKSFGITAVNWRIS

SEQ ID NO: 93115 - protein, 203 aa, Unknown
  Obtained from environmental sample
  DOMAIN (11)...(127): Miro-like protein
  misc_feature (1)..(203): Xaa is any amino acid
MQSTPKALRLAIGIFGRRNVGKSSLLNAITGQQVSIVSPQPGTTADPIEKPMELLPLGPIVFIDTAGIDDEGTLGDLRVQRSESALDRIDLGIIVTEAGAWGNYEEKLLVEFNKREVPALVVINKSDVQAPTGAFISEIESKGCAIIACSAKTGGGIVEAKDALLRLAQKWGLGGHFESRHLISDLVPPNEVGLLVVPIDSQA

SEQ ID NO: 93116 - protein, 494 aa, Unknown
  Obtained from environmental sample
  misc_feature (1)..(494): Xaa is any amino acid
MKLKPPIMAFLLFFAGITAVYSQNTTFPRLTPDPKALEYYRLGEKSEYSWTALAQISLWASGDTSISNIDKIRDASDSIKNAVDLPASDRDRAEYILKFMHKNIIKSYSLYQTRIDTMLSTGRYNCVSSAVLYMVLCQSLGINAKGVMTKDHAFITITIGDTDIDVETTNAYGFDPGNRKEFHDQFGRLTGFSYVPAKNYRDRQTISRIELVSLIMNNRIVDHERQNQFADSVPVAIDRAALLAGNALTVGSIKDTQDTIFTDPQEDLMDRLLNFGAMLLRAGKEEESLQWAAAASPVYPDEKRWQEFIMAAVNNHLMKFIKANKQADARKFLDGQRPVLSQANYDKLDALLIDSELLGIANQIRAAADGDAVVNAIEQARNSGKIPEKRAIELITFAVQKTAASLSTSPAGNWRAAIQYVEVYLSRFGANRELEQALNIYRSNLATDYHNRFAAEWNKKNYTEAERILNEGLAEFPKDRQLLSDKQTIAKQGR

SEQ ID NO: 93117 - protein, 130 aa, Unknown
  Obtained from environmental sample
  misc_feature (1)..(130): Xaa is any amino acid
MKIHPTVKETAAILAGAGKQAYLVGGAVRDLLRGKKAKDWDLATDALPEEVIALFHRKKGLNSFVIPTGIKHGTVTVHFKGLAMEVTTFRSEFGFSDRRRPDRVEFGDSIEVDLSRRDFTMNAAAYRLPS

SEQ ID NO: 93118 - protein, 216 aa, Unknown
  Obtained from environmental sample
  DOMAIN (1)...(216): Domain of unknown function (DUF323)
  misc_feature (1)..(216): Xaa is any amino acid
MVHVKGGKFKMGCQDEQENCMNDERPRHEVKIKDYYIGKYPVTQKQWWSVMGVNPAHMEGENLPVEQVSWEDVQEFIKRLNVLTGKKYRLPTEAEWEYAARGGARSLGHKFSGRPYLHDVAWYNYNSNGSPQAVGTKEPNELGVHDMLGNVWEWVGDWYDRYYYKESALKNPSGPKYGGERVSRGCSFNSDEPICRMSLRNYHKPTSRTIYLGFRL

SEQ ID NO: 93119 - protein, 345 aa, Unknown
  Obtained from environmental sample
  DOMAIN (204)...(329): Transketolase, C-terminal domain
  misc_feature (1)..(345): Xaa is any amino acid
DPGGYHGVGTFSVSGGLPDTVKDTARLTFTDSFANALLAAAGREKRVIALTAAMEQGTGLSHFKKTYSHRFFDVGIAEGHAVTFAAGLASQGLKPVVAIYSTFIQRSADQVIHDVSLQNLPVVFVLDRSGFVGGDGETHQGLFDICLFRMIPNMVILAPASGNELALMLDYALILEVPAMIRYPKAPCPAEILEFSLPLEKGRGVWVRRNPHSRICLAFTGSLYPQALGVLQILEGRGIISDAYNLRFLNQVDEEYLVEILNSYDLVVFAEEGVRRGGFGEYAAALARCRNCRARVIIFAVDGDFAANGDALGTREELLRANGLDAEGIAGKIAGSRDQGFGVLR

SEQ ID NO: 93120 - protein, 78 aa, Unknown
  Obtained from environmental sample
  misc_feature (1)..(78): Xaa is any amino acid
LADIVSFGVLPAAIGYIGYDPAGNFISLGWFDTVIFPIYLMAALIRLAYYNVIETELHGQNKKRTYYEGLPVTSVAII

SEQ ID NO: 93121 - protein, 73 aa, Unknown
  Obtained from environmental sample
  misc_feature (1)..(73): Xaa is any amino acid
VESKPVVGYYGLWVALTYLSVVVAILGIHFALTENVRYALVCLMISGVCDMFDGRVASLFRNATPARSTTGYR

SEQ ID NO: 93122 - protein, 303 aa, Unknown
  Obtained from environmental sample
  misc_feature (1)..(303): Xaa is any amino acid
MSKFLTALTRLAGSAGSAKLMKLAGLTVLTAALLLSCSDDTDDPVDNSGQDNVEPPTAAVSIAVTAIAADYSAANFEIISTDNYSVRQNLIPGLHTDNVVRVKGGDVYILERFGKDNVIKYNSKRMAVEYQEHIGEGLNIQDIAVVSETKAYISCHESVNLIVFNPKTGKKVSTVDLSRFNAYAGTDSAEAYPYASSLAVYGDYLYVACQRLNSIFEIADTSLIAVIDTRANAIVTSIKLNKKNPASMDILDGKLLVSSSGDWSDVTATSSGIEMIDLVNNENLGLIADGGAFGGSLGNVIFI

SEQ ID NO: 93123 - protein, 280 aa, Unknown
  Obtained from environmental sample
  DOMAIN (80)...(188): TonB-dependent Receptor Plug Domain
  misc_feature (1)..(280): Xaa is any amino acid
AAARGEPGDLPDAFSSTAILGVGVGGEFLVFLAYNALRRVRALALVLLFASATASQEALAESDSVIIIDGDDFEITVKQRAAATLSPSSRIIKASEFRGKFADLPSVLESVSGVEIRSTGGYGQYAESAIRGSSALGTRVYLDGLLLNSASTGAVDLSKIPLDRITEIRVTKSTSGLRQMGAGMGGVIELFTADGGTGQNIIGIDIEAGSFGLLKGGAIIKYSDKKTGLLRRSAPRNDVIASVAAQLVYLSESQSIYRYCNDHRYVGCADRRRKRPRPAV

SEQ ID NO: 93124 - protein, 287 aa, Unknown
  Obtained from environmental sample
  DOMAIN (88)...(285): Binding-protein-dependent transport system inner membrane component
  misc_feature (1)..(287): Xaa is any amino acid
VGEGEGEGIDGVCVRSRTNAAVGNWGCGMRSAKPTGKFSLGMFTLTVIFLYLPLVILVVYSFNNSKMMAWGGFSLRWYTELFFSSENLWHSFWNSAVIAVTSATVSTAIGTLGAIGLYWYNFKFKKVISVAAFIPMLIPEIIIGVSLLIFFAGIKLQLSLFTIFLAHTTFNIPFVLMVVMARLEEFDFTIIEAAYDLGAGELQALSKVILPAAFPGIISGFLIAVTLSLEDFVITFFVSGPGSSTLPLHIYSMIRFGVSPVINALSVVVIAGTVVLAALSRNVVKYM

SEQ ID NO: 93125 - protein, 158 aa, Unknown
  Obtained from environmental sample
  DOMAIN (31)...(157): ABC transporter
  misc_feature (1)..(158): Xaa is any amino acid
VKGSHVAITGVEKYFGDFHALKSVSIDIKKGEFYSLLGPSGCGKTTLLRIIAGFEEPSGGAVLLDGRDVVPVPANKRPVNTVFQSYALFPHLTVFENVAFPLRLRKMENAAVRAKVQEFLELVKLPKEGKKLPAQLSGGQRQRVAIARALITSQASSL

SEQ ID NO: 93126 - protein, 421 aa, Unknown
  Obtained from environmental sample
  DOMAIN (135)...(300): MatE
  misc_feature (1)..(421): Xaa is any amino acid
MAGIAFCPLAIRFFGMEEFSETVFLTRLMFPFLAFVSIAAFFQGILNSLKIFAPSGFAPIILNLITILCAYGLSPYTQNPARAMAVGILIGGFVEAAIQLPFILRHKSRMRFFFTGIKRAINNLGTRKVLRLVGPTVIGMAAYQLNDMVSTALAGNAGEGIVSSLQYSLRLQELILGVFAVSIGTVLLPDLAEYAKSGRWDIFNRRLSSGMNIIAFITIPITFFSLTQGQGMIALLFQTRSFNEESARLTLAAFTFHIPGLYFIALNRVLAPAFYAQSDAKSPTIAGIFSFVVNMALAAVLAFPFKGAGIAFALSFASAVNTAALLFFLRKNKDITLGSTLRSALLYTAKLISFSALALIPILLLSPGISVLFSGRGRLVSQGAPLMLNALIYAGTGLVLLAVTRDKQLLGIIKIMKGSRG

SEQ ID NO: 93127 - protein, 368 aa, Unknown
  Obtained from environmental sample
  DOMAIN (2)...(364): Glycerate kinase family
  misc_feature (1)..(368): Xaa is any amino acid
LVCATIEAGILRADKKTKAVKIPLADGGEGTARAITEAAGGKFVEVTVQNPLGKKIKAEFGLIKKGKAAVLDMASASGIELLKREELDPMKASSYGTGELIKAALDSGARELIIGIGGSATNDGGIGIISALGFKVLDENGKPVGQGGQALAKIASVDVSGADKRLKDVSVKVACDVTNPLLGPKGASAVFGPQKGATPQMIKTLDAGLGKLARAWIKAGLTKDVEQSGDGAAGGVGAALRICLGAKMESGAMLVMRYAGFFDQLNGKGKGADLVITGEGMTDGQTAGGKLCSVVARESRNAKVPVALLSGGIGGDAGSLLASFDYAVSISCGQIGLDAMIKDSQRDLALAAENLIRAIQIGKKLNGK

SEQ ID NO: 93128 - protein, 67 aa, Unknown
  Obtained from environmental sample
  DOMAIN (14)...(51): KOW motif
  misc_feature (1)..(67): Xaa is any amino acid
GQVGALLPIEAPLIKEGDSIRIKEGPFSDYTGLVEEISKERGKLKAMVVIFGRSIPVELNFSEVEVL

SEQ ID NO: 93129 - protein, 79 aa, Unknown
  Obtained from environmental sample
  misc_feature (1)..(79): Xaa is any amino acid
MNAFIYLGPELGRKQDAVDSVKKKFPGAEEHVFYAGETAANVIADTIQNQSLFAESRVIIIKNAEALKKKTTLIFLFPV

SEQ ID NO: 93130 - protein, 507 aa, Unknown
  Obtained from environmental sample
  DOMAIN (200)...(344): GAF domain
  misc_feature (1)..(507): Xaa is any amino acid
GWYMGVVTPRDNYYQSTRHLAVILSAFGVVFAVLLGWMLLTISSGKAASDERIQLMSDSNPIGMSFWDGNLHIIDCNKTSLEMFGLSSKKEYFEMFDLLSPERQPDGSISKIKGFELLRETLETGFNRFEWLHQKPDGEPIPCELTLIRTKYKKDYTIMAYVRDLREQKRIMKMMEWRTHLLDMVNSAATILLSSNNAGSFESSMMRSFELVGHCLDVDRVQIWRNEMVENEMHYVLRYEWLSEYGKKCKSVPLGLHFPYSMKKEWEELFLRGDHINMPLKDMSPEDQAFLGYYEMKSIVMIPMFLENEFWGFFSIDDCRNERVFTSEEISILSSAGLMMSSAVNRNLQMNKMREADERMHIMIDAAPLCAIFWDKDLNPIDCNQETIKMFELSGKQEFIDKFGLLSPEYQLDGKHSREKGGELVKKALEEGFSNFEWMHQKLNGEQIPAEITCVRVKYKDEYTVTGYVKDLREQKAKLAEMRKAELAEESSKAKSDFLARMSHEIR

SEQ ID NO: 93131 - protein, 700 aa, Unknown
  Obtained from environmental sample
  DOMAIN (215)...(433): Bacterial extracellular solute-binding proteins, family 3
  misc_feature (1)..(700): Xaa is any amino acid
FYKWLSNLFGITFKPETFEWSSLQEKIIKKEIDFTFELAQTPERRKDLFLSKPVAQRPFKIYRITGSEPLAKIISLRKPRFAFLTNSVLLEDTKANAGYEFDVVFVEDHAEAYPLLKNGQIDAYIALDNTESVFDVFGNVTGEDFFPLIFRSFALLTGNEELSPIIYVLDKALDANTLAYLTKIRKTGYQKYLGTKLYELLTNEEKSFINSNPIVPIAAEFNNYPVSFFDTETKKWQGIYFDALGEITNMTGMKFEPVCENNMQYHELLTILENGNAQIISELYRLKEYEGRFLWSDVSLLQDNYAFITRSDFHNIDLSEVSYLRVGARHSHYSDLFTKMFPGHENFFKYATQEETWDNLKNGTIDAIFSSRRRLVIYTNYHEEAGFKLNLIFDDEFDTPFGYNRDALVLKSIIDKSLNLIKINNISNQWMNKSYDYRAKMTAARLPWLVGVSVLTFLILILVLSLLTRSRSIGRELEDLVKERTRELTFETSKLQAVIDSIPDILFCKDTDFKYTQCNHSFERFVGIKEEQIKGMTDKEGVWFQPEDMKNIHEKEKSVIINNKAITFEEKIHSPLTGKEKYFETVKAPIKQNGEVVGIVAIKRDITGRKEMEQELAFKTAKLQMIIDTIPDILFCKDTSLKYTQCNKPFENFFGISEADMLGKADEDSPWFSPDMLKDITVTELAVMEHNKSFTSELNL

SEQ ID NO: 93132 - protein, 306 aa, Unknown
  Obtained from environmental sample
  DOMAIN (4)...(169): Glycosyl transferase family 2
  misc_feature (1)..(306): Xaa is any amino acid
MYLSLVVPCFNEEAAIPLFYNKAVKITASINKKFELIFVDDGSRDNTLNVLRQLANQDRRIHYISFSRNFGKEAAMLAGLQAAHGEYIVTLDADGQDPPSLIPQMLEAVVSGEYDCAATRRVNRTGEPPVRSFFARCFYALMKKITDIEIISGSRDFRLMNRKYLEAILAIPERNRFSKGIFPWVGFKTKWFEYENIERRAGKTKWSFWKLFVYSLDGIIAFSTKPLAIASVLGILLFIIALFFIIFIVIRRIAWGDPVGGWASTICIILFCSGIQLFTTGILGQYMAKTYTEAKQRPQFIVREAL

SEQ ID NO: 93133 - protein, 548 aa, Unknown
  Obtained from environmental sample
  DOMAIN (18)...(132): MGS-like domain
  misc_feature (1)..(548): Xaa is any amino acid
MEGEMKRRALISVFYKDGILELASYLNGAGWEILSTGGTSKHLKDNNITVTDVSSVTGFPECLDGRVKTLHPAIHAGLLARRDEKSHMDTLQELGLGTIDLVCVNLYPFFEKVQAKLTLEQTVEFIDIGGPTMLRSAAKNYHDVVVLTDPADYAETINGLKAENVPLEFKKRLAGKVFNLTSAYDAAVSRYLLEDEYPEYWPLSLKKGQSLRYGENGHQSAALYLHTDRPGVLGGMVKLHGKELGYNNIRDLDLAWKAACAFGLAADGTEPIGEAEVRKFIPQAADGGKVCCVAVKHNTPCGIALGDTLLEAYEKTFACDPVSIFGGIVASTVTVDAQTAAKLGELFLEIVAAPDFEPKALEILMQKKNLRIIKLSKAPVETHEYIAVDGGLLVQQSDRRLLEKWDVVTKAAPAAQDLRDMIFGMRAVTFVKSNAIMIVKDEAATGIGGGQVNRIWPTEQALDRSIAAIQTAGTVIKAEDNPWKNENSARVLASDAFFPFADVVEAAAAAGIKSIIQPGGSVNDKMSIEACDKHGIAMVFTGIRHFKH

SEQ ID NO: 93134 - protein, 112 aa, Unknown
  Obtained from environmental sample
  misc_feature (1)..(112): Xaa is any amino acid
MNLGIKDRFESALEKYGLSQAQAAREMNYSPSVLSAYRKDEYKGDVEKLEGTILQWIARQVKGRERKRVPIVETDDLRRISNAIQIAHAEKDIALIIADAGSGKSTAAAWYA

SEQ ID NO: 93135 - protein, 431 aa, Unknown
  Obtained from environmental sample
  misc_feature (1)..(431): Xaa is any amino acid
MGVGLLKAHLEAFDTIGAGIIDLRREGYDKQYEYADAIKGAYGVFFFQHPSMLEYQERLKKKKERSNVETILHVDKIPSNNQITRLLDGIRSETFTPVFEQGLETAQRYKGLDQYLVLGGRYRLITLDGVWFYQSENIKCGHCLRQQLKDGQTLYYHDMIAAALVKPGFQTVLPLAPEFIRNEDGKEKQDCEREAAKRYLERKGERLEGLKPTFLGDDLYACHSICAKILDMGMSFIFTCKDESHPWIAEQVKYARMEGYVRSEWNGRNHLEYRYAWVNGIENRAEGEKLSVNYLSLQIWNQEKDEITYSNSWITNKPVTADTAAFLAHCARTRWKIENEYNNVLKCRGYNLEHNFGHGQEHAADIYCLLNILAFLFHSIQDALDEDYQAARKSFGRRDAFFWALRYEICRYLHNDWSLFFLTVAGQAPDG

SEQ ID NO: 93136 - protein, 257 aa, Unknown
  Obtained from environmental sample
  DOMAIN (141)...(251): Transglycosylase SLT domain
  misc_feature (1)..(257): Xaa is any amino acid
MRIDGFNTDYNATRGLEAKGSTAQGSRAAQVAKEFEAMFTSMMFKAMRGTVKEGSLIPKNMGESIFTEMLDGEYAKMSSDTGALGLAALIQKEIDRCEGRTPALDGNAPAFSAGRRNRPSWSYASGDSATLIEKVRGKWESLISEISARFGVDKDLVTAVVARESAGNPNAISPKGAKGLMQLMDATARDMGVRSSFSPVENLTGGIKYLKNMLESFNGDESLALASYNAGPGAVRKYNGIPPYRETREYVRAVLAL

SEQ ID NO: 93137 - protein, 387 aa, Unknown
  Obtained from environmental sample
  DOMAIN (125)...(330): Transposase DDE domain
  misc_feature (1)..(387): Xaa is any amino acid
MNKHNTVLGQMLGLISRSRFEKLVKEHKTEHGAKGLKSWTQFVAMLFGQLTGQHGLRSMEQGMNSQRNGWYHMGIANAEREVKRSTLSYANAHRSADLFKALFASLLIQAQTLKASHGFRFKNPLYSIDSTTIDLCLKLFPWADFRKGKSGIKLTVKLDHQGKIPCFVVESNAREHDAKKAREVPYETGDVLVFDRGYADYGYFASICEKKAYFVTRLKKNAVYKRVRKNPVKESGNVISDYEIIIPSLSKEITLRKIIIRDPETKKRLVFLTNNLKWSAETVSGVYKDRWQIELFFKAIKQNLKIKRFYGNSENAVMTQIWIALIAYLMFYLLKAKSKSLRLSFTNFISVIKTMLFQRVSLYDFLSGTSPPLKNKKQHERQPEFVW

SEQ ID NO: 93138 - protein, 321 aa, Unknown
  Obtained from environmental sample
  DOMAIN (7)...(285): Beta-lactamase
  misc_feature (1)..(321): Xaa is any amino acid
MKINFYVRAIEKQKLNCEGIIVLQHGEKVAEHRWIPEAPRNSFSVSKSFVSIAVGMAIDRGKISLDSRIADFFPEYCRKAGKRLSVLTLEHLLSMTRGHRAFSRPPMVVDAITQPLAYQPGAHFVYDNGSTFLASAMFTKAMGLTVREFLLDALFRPLDIPDPQWPESSDGHTVGATGLALATSSLARFGQFLLRRGQWQNRQLVSSAWIDNAARPQANTRSRRPDCDIGYGFGFWPCRYGCFRADGKDGQFVVIFPGRTLWLQSIQTKKSPILFCTQYGRRYCRSCDIPNLFFFHPVTVCICSLEKPISVICMNNSGIYS

SEQ ID NO: 93139 - protein, 219 aa, Unknown
  Obtained from environmental sample
  misc_feature (1)..(219): Xaa is any amino acid
GCYRGSERNAAYQLDAQDITGPLDKQITDACIFVKKNMRVYAEKEPARRDVPQYSMQAVFEAVVNAVAHRDYSITASKIRLHLFSDRLEILSPGSIPNTMTIDTLPLRQATRNELLASMLARSPAETSGNDGTRHFFMERRGEGIPIILAESMKLSGRLPEYRLLNGNELLLTIYTAIIHANDGDGFFQRTDTNCNRMKKEKIGDVTRAAVSPPILSTE

SEQ ID NO: 93140 - protein, 290 aa, Unknown
  Obtained from environmental sample
  DOMAIN (13)...(289): Dihydroorotate dehydrogenase
  misc_feature (1)..(290): Xaa is any amino acid
MSEKNNTQENQCDMSVNIAGVKLRNPVIAASGTFGKAREYSSIFDISLLGGICTKGLTFVPRDGNKGMRVWETPSGLINSIGLENPGIQSFLENDLDYMKRLGPAIIANLCGSTSDEYVKGAVLLNESSIDMIELNISCPNVRDGGLTFGLDAGTAAALVIAVRRVCKHKPLMVKLSPNCPSIASVANACVNAGADALSLVNTIRAMAIDVENRKPVFDNIIAGLSGPAIKPIALRMVWELKDTLKNMKDIPIVGMGGISCTNDALEFFMAGADAIQVGTATFANPHAMA

SEQ ID NO: 93141 - protein, 520 aa, Unknown
  Obtained from environmental sample
  misc_feature (1)..(520): Xaa is any amino acid
MASALNPAAEGEAQRIIFNAGYLALAGLGEESGFSFGSTGLGAIFPTKYGVFGGSLWFINSDFASFLLGSYLQGNFNAAKELYPGMSFGLGLNIGYHFSDGPAITGDLGFRYNMGTMGPFENFTWALTARGLGKSWIPYALTPAAGVSLDVFRIRGKAGEADHVKMNFAADLMAPTFQNLAGKIGLSFLIADIINVSGSTQFNVRESLNGTDPSAIPSIGISAIFKLNSGGQRIIGGALPSEGELAVDAAAKPLYNGIWAMGGGATWTVGVADKNPPVIVIDYPETAWISPNNDGKADDLEFPISITDERYIMEWVFEISDVYGEPVRVYRNKEIRPETQGVQNFLGRLQAVNTGVEVPQTMRWDGTLDSGGIAPDGRYFFTVSAKDDNGNTSIKGPYEVNVDNTPPEITLDPFVGEMNIFAPGSGGGRNTLTITQTGSQEDLWEGGIYDSSGSKVKTFNYIDNEPAPIVWDGTDDSSTIVSDGVYSYRIAATDKAQNSGEASLENIIVNTIRPIVGLAI

SEQ ID NO: 93142 - protein, 317 aa, Unknown
  Obtained from environmental sample
  DOMAIN (171)...(316): AIR synthase related protein, C-terminal domain
  misc_feature (1)..(317): Xaa is any amino acid
MNYEDAGVSLARADKAMVGVKKSVRTTFNAGVLGDIGNFGGLFTLSHLGLKQPVLVSSVDGVGTKLKVHFGLKSHNLPGQDIVNHCCNDILVQGARPLFFLDYLATGKLESGVLEAVVEGMALACRENDCVLIGGETAEMPGMYNEGEYDISGTIVGVVERDEIIDGKSIAPGTVVLGLPSTGLHTNGYSLARKALFEAGGYKLDSKTDGIEGTIGEALAVPHRSYYHSLIDLVHAKKLQGLVHITGSGFQGNIPRILPKGVSVQINRSAWKVPEIFNLIQKCGNVERDEMYSTFNMGMGMLVFAAQNDVAEIRKHW

SEQ ID NO: 93143 - protein, 251 aa, Unknown
  Obtained from environmental sample
  misc_feature (1)..(251): Xaa is any amino acid
MENKFKNEFISKYSKLLLDQGMIDNELYLKYEVKRGLRDISGKGVLVGLTEISEIVSYVIEDGDLVPCEGKLYYRGINIENFVKGFLDENRFGFEETSFLLLFGHLPVKSEMEAFSLLLEENTVLPDNFIRDIIMNAASKDMMNSLARSVLTLYTYDEKPDDISIENVLRQSISLIAQFPLLAVYGYQAFAHAHKGQSLVIHTPMKGLSTAENLLYMLRPDSKYTALEAKILDIALVLHAEHGGGNNSTFT

SEQ ID NO: 93144 - protein, 639 aa, Unknown
  Obtained from environmental sample
  DOMAIN (160)...(501): Alpha amylase, catalytic domain
  misc_feature (1)..(639): Xaa is any amino acid
VIGNIRHDVSLFTEYDIYLFKQGSHSRLFEKLGAHLTSGPDNTKGTHFAVWAPNAKYVSVVGPFNNWDAGRHGLSARGDGSGIWEGFIPGLSHGTLYKFHIDSNTGRYKVNKGDPFAVFWEQPPATSPIVWDMTYAWGDGDWMGKRKAKNSLNAPISIYEVHLGSWKRKGENGNEWLSYRELAPELADYCARLGFTHVEFLPVMEHPFGGSWGYQTVGYFAPTSRFGTPQDFMYLVDYLHQHDVGVILDWVPSHFPSDEHGLVYYDGTCLYEHADPKKGFHPDWKSYIFNYGRNEVQAFLLSSAIFWLDRYHADAIRVDAVASMLYLDYSRKEGEWIPNQFGGRENLEAIAFLKRMNEEIYKAFPDVQTIAEESTAWPMVSRPAYVGGLGFGMKWNMGWMHDTLVYMAKDSIYRKYHHSELTFSMLYAFTENYVLPLSHDEVVHGKNSLVNKMPGDDWRRLANLRLLLSYQFNHPGKKLLFMGGEFAQFVEWNHDHQLNWELTQWDRHSGIQRLVSDLNRIYKKEPALHYYDFEPKGFEWIDCNDWEQSILGFIRKGPDEFDRLLIVLNFTPEPRRGYHVGVPVAGFWEEIFNSDALEYGGSGVGNAGGMETEAKSWHGHNQSLPLTLPPLGAVLFKIR

SEQ ID NO: 93145 - protein, 87 aa, Unknown
  Obtained from environmental sample
  misc_feature (1)..(87): Xaa is any amino acid
MTSTENKPPVSTANTGNEEPVGLFYGGFVMIGMAVGAFAGFMIGGGQEEFLGGGWIDSLIGVVTGLFIGVGLGLIYHGIFLSKKGKW

SEQ ID NO: 93146 - protein, 336 aa, Unknown
  Obtained from environmental sample
  DOMAIN (5)...(336): Hsp70 protein
  misc_feature (1)..(336): Xaa is any amino acid
MAGRTIGIDLGTTNSCACVLEGGKHKVIPSAEGGRTIPSIVAFAEIGEVLVGHAAKRQAVTNPRRTLFAIKRLIGQRFDSQKVQETITHLPYPVVRAANGDAWVAIGERQYAPPEISAIVLGEIKRAAEAYTKEKILDAVITVPAYFDDAQRQATKDAGRIAGLNVLRIVNEPTAAALAYGIDKKGKKELLAICDLGGGTFDFTLMEMSDGVFEVLATSGDTFLGGEDFDLAIIRHLLGKVQNAYGIDISGDPFAMQRLKEASEKAKCDLSFSDQVEIIVPFLTKGTASPLHVEEKLTRGEYEKMVAPLVGRMIGPMTDALQQAGKSVSDVDQVIL

SEQ ID NO: 93147 - protein, 81 aa, Unknown
  Obtained from environmental sample
  DOMAIN (2)...(76): GrpE
  misc_feature (1)..(81): Xaa is any amino acid
GAGVELIQKQFGDVLRRQGVSEIEIRPGDMFDAHVAEALTTIDTANFHEGSVVDVCEKGYNLGERLLRPAKVVVASGNNPA

SEQ ID NO: 93148 - protein, 318 aa, Unknown
  Obtained from environmental sample
  DOMAIN (5)...(114): 1-deoxy-D-xylulose 5-phosphate reductoisomerase
  misc_feature (1)..(318): Xaa is any amino acid
MKKRISVLGATGSIGKSSLDVISRNKDEFDVVLLSSHTRGNELEKLKALWPSAVCVLSGEEGGKEKLLAAIGSLNADITINGISGASGLEPSLAAIEAESNLALANKETVVMAAPLVFRLAKEKNVKIIPVDSEHSAIFNLIQAHSGGGKDTVSEIILTASGGPFRKMSIQELKNVTAKDALSHPTWKMGPKITIDSASMANKGLEIIEACALFDMPHEKIKVVIHPQSIVHSMVKLCNGAIYAQLSKPDMRNPIHDALFWPKTAPLNLDAIDFDCLTLEFEKPDIKKFPMLNIARESTDKGGLYPCAYNAANEEAAA

SEQ ID NO: 93149 - protein, 225 aa, Unknown
  Obtained from environmental sample
  misc_feature (1)..(225): Xaa is any amino acid
LKFKYLIIAFSILIVLFLLTTTLFPTLIPGSVYALNLRNVASPLLFFMAAVLACLGIFFLINYRLFLLLEREDWPALAYYLEQKIFVKNKYTSRYVKLLASSYMVISDYPSVIKLENKAFLAKRPVVEKNVLIFGSARVISGDYQGAASFFKIHLESSKLSKQNKEWVHWFYGFSCLLESSFDKAEKEFMFLAGSSKDSIIAGISAYFLANNLAGKSLRRLDFWL

SEQ ID NO: 93150 - protein, 899 aa, Unknown
  Obtained from environmental sample
  DOMAIN (736)...(811): Hpt domain
  misc_feature (1)..(899): Xaa is any amino acid
LLIILFSVFLGVTYTRKNMEKTIEADMMVVADIADHFVSSELELLRLQALDAAGHIAREPSNLSDILEKTEPLFPQFLGMSVLNYTALAASAGNSPAPAEILENKYIKRAFLGDTAFTSTYPTDNGVVFYLAVPVPELRGHILVVTIPGLYFNERVSTFTVWKTGHIFIDDSEGTVLANIREEWIQTRANFIRMGETDSRYAEIGSVIKLASLGNVGIGYFSISGIPRMCAYRPISGSKEGWFLGIIAPLPESPVKNLDRGFLAVGLVAFIFSLLGAIIASYFIKKPFEETARLKEEAESHLRSKTDFLANMSHEIRTPLNVIIGLTDLILEEDTLEKTVTENLIKINNAGDTLLSIVNDILDFSKIESGKLTLSPVEYHMSSVLNDIVTLVITRLGEKPVIFSLNIPDELPAKLFGDDLRVKQILTNLLSNSIKYTHRGSIELKVNCTREGDAVWMHITVTDTGIGIHEDDIKKLFLDYFQADAKANRNIEGTGLGLPITKKLVDMMDGEITAESEYGKGTAFRLRIKQGFVEDTPLGAETAEKLRSFRYIDDKRTAAKRLVRLNLSYAKVLVVDDMQTNLDVAAGLLRIYNMHVDCLSSGEEAVNRIYSENPVYDAIFMDHMMPRMDGIETTDKIRALGREYAKKIPIIALTANAIHGTEKMFFAHDFQDFVTKPIDITEMDAAIKKWVRDGTRDEVVIAPEPTEEKQMTIEIPGVDTKKALSLYAGDTGIYLPLLRSYITNTPATLEKLKNVSMENLKSYVITVHGLKGTSAGIGAEEVRAQAFELENLSRAGDLRSVLAMNDKLIADTEVIVANVKEWLDENDVQEAKPRLKAPDRGLLAKLLESCESYDMDGVEDAVKELEKAEYDEEGELVTWIREMVDMSKLGDVGKRLKEL

SEQ ID NO: 93151 - protein, 258 aa, Unknown
  Obtained from environmental sample
  DOMAIN (1)...(258): Protein of unknown function (DUF1703)
  misc_feature (1)..(258): Xaa is any amino acid
KYLIEKAREKIGEKAVVIIDEYDCPLTSTLNKRDVHIELRNALKTFYGVLKSYDEYLRFILLTGVSKFSQVSIFSELNQITDLTLDPRYADICGVTQEELEANFGPEIEDVLEKNGRNRDEYLDDMRRFYNGYRFSENPLTVYNPFGLLKHFNSGGKFSEHWYETSTPTFLADLIEKHKVNILELGNLRVKAADFGKYDIDNMEIAPLLCQTGYLTITDYDEKSQRFTLDYPNEEVRAAFAETLVKHGLRVPPNKGDA

SEQ ID NO: 93152 - protein, 408 aa, Unknown
  Obtained from environmental sample
  misc_feature (1)..(408): Xaa is any amino acid
MKRIGFIVLALLLCGAMVLTGCKKKEPGQQQSGAQYHIGIVTGTVSQSEDDLRGAEELIKRYGSVAQGGMIQHVTYPDNFMDQQETTITQITTLASDPLMKAVVVNQAIPGTAEAFKRIKERRPDIILLAGEPHEDPLVIQQSASLAISCDFISRGYTIPWAAKELGADTFVHISFPRHMSYESLGLRRQIFEAACNDLGIKFVFVTAPDPTSDVGVAGAQQYILEQTPQWINQYGKNAVFFCTNDAHTEPLLKQLFAYGGLFVEADLPSPLMGYPGALGIDLSAEAGDFPAILKKVEDAVKAKGGAGKFGTWAFSYGFTASAGLGEFAKRVLDGKAKIDSASDLYAALGEFTPGAKWNGGFYIDAATGVRARNQLLIYMDTYIMGKGFLPTTAQTVPEKYYQIKFQR

SEQ ID NO: 93153 - protein, 339 aa, Unknown
  Obtained from environmental sample
  DOMAIN (60)...(250): Radical SAM superfamily
  misc_feature (1)..(339): Xaa is any amino acid
MELGEKISILAGAAKYDASCASSGSDGKGTPGGKKFGASVPAGVCHSWTEDGRCVSLLKLLFSNVCRYDCAYCVNRASADIPRSSFTVQELVDLTSEFYRRNYIEGLFLSSGIFADPDIVMEKLIETARTLRTQAGYGGYIHLKIIPGTGDRLIKEAGLWADRLSVNIELPTEKSLVHLAPDKSGQSILGAMGDFSNISCEFEEARRKPRYLPRGKAAVPAFAPAGQSTQLIVGASAEDDRQIINLSSSLYRKFSLRRVYYSAFIHPGIPARGYGGTDPRLPDIPGPPLVREHRLYQADWLLRFYHFKAGEILGEDEAFLDPHIDPKTAWALRHLDFFP

SEQ ID NO: 93154 - protein, 67 aa, Unknown
  Obtained from environmental sample
  misc_feature (1)..(67): Xaa is any amino acid
MPAAMADGMVKIAVLVNLAAGDQSRQFLEGCVSEGRSMGFTVDTFVSGADKGRCAEITAGIARADYD

SEQ ID NO: 93155 - protein, 235 aa, Unknown
  Obtained from environmental sample
  DOMAIN (54)...(191): HD domain
  misc_feature (1)..(235): Xaa is any amino acid
IEVHQLVEAQRKELQYFNENMQKMVAEKTQSVIELQNALLKTMAELVECRDDTTGGHIERTQKGIKILLEEIEKSGIYREETKGWDMNLLLQSCQLHDVGKISISDNILKKPGKLTDEEFNEMKKHAGFGEQIIEKIETLAKESAFLNYAKIFAASHHEKWDGSGYPRGLKENEIPLLGRIMAVADVYDALVSERPYKKAFTHEEAVRIITEGSGTQFDPALVIVFINAADKFKK

SEQ ID NO: 93156 - protein, 662 aa, Unknown
  Obtained from environmental sample
  DOMAIN (199)...(342): GAF domain
  misc_feature (1)..(662): Xaa is any amino acid
CREHAVKETPLQARLKSGDEMAVLERAIIDMELRIRTEVAERLQTEENYRTEMEEQIEKLSNLLNSLGEYICVTVPETGEILFLNDNLRKAFNIEEDGLGRRCYELLQTRKRKRCEFCPWYQLEKEPDKIVEWKQQHGNRTHRKTGRIIDWPGGVKAHLEVGVDITEMNQAQMKAEYYTKVANTLSNTALMLLSQKEETFESTMMNGIGIIADMMDLDRVTVWRNTMKPDGLYGGQVFRWDRNDGGKTPTAVKFTEIKVSEWTPRWEKVLSAGETINGPARLLPEAALLQSFGCVSVFITPIIMKEKFLGYVMFEDRKRERIFTDGEADILQTASLIISSTVTRYKEAEKIREANERLKLMLDATPLGCQIIDHNLITIDCNEAAVKLFGFRNKQEFIERWVDSCNPKYQPDGMSSDEKRYMFRKKAIEEGSCTFEWMHQTVDGMPLPAEITLTRVKYEDTFVLVRYTRDLRKIKEMTENIMYFKTEAEKIYFDPLTDIYNRRYLDENLKRVISTLSRSGAALCLMMIDIDYFKKYNDVYGHAKGDDCLKMVAAALKKSVTRIDDFVVRYGGEEFTVVLPNTGEKGAHLIADRMLNNIRNLEISHDISDAADYVTISIGVVSGIVKHTYSADYWLSQADKMLYKSKQEGRNRYTFKTVDDNS

SEQ ID NO: 93157 - protein, 834 aa, Unknown
  Obtained from environmental sample
  DOMAIN (6)...(213): PHP domain
  misc_feature (1)..(834): Xaa is any amino acid
MPQDFVSLHNHTEYSFLDGAIRIKDLVKRTKEFGMPAVAITDHGGLFGAVEFFVECKNAGIKPILGFEAYVAPNSRKDRTSSTDERHYCHLILLAKNNTGWKNLMRLSSIGYLEGFYYKPRIDMEVLRQYGDGIIATSACVAGAIPQAILSGDIDRARKLTEEHIAIFGKENFYFELQDHGTPEERAASEGLIKLGREMGVPFIVANDAHYLNADDALSHEMLLCIQTQTTMDDPKRMRFGNGQIYFKSPEEMAKLFPDVPEAMTNTLEIAERCDVDIEADPQLPSVDVPDGFSGPADYLSHLARSGLKTRYAEVTPELEKRLEYELGVINSMNFAGYFLIVQDFVRKAKETGVMVGCRGSAAGSLVVYAIGITDVDPIKFDLIFERFLNPERISMPDADIDIADRDRYMLIDYVVEKYGREAVCQIINFGSMKAKMVVKDVARVNGFSVSEMNKLSGLITEETLAASFGLVDGEGKPRKDIPPISAIIDKNDFERYQTRVNQLTTAVMGDSAYKNVFRHAAVLEGLTRQPGMHAGGVIIAPGEVVNWAPLFKQSNSDVIMTQFNMNYVEKIGLIKMDFLGLRTLTVLQDAQRLVKKCHGIDIDLWKLPDGDPKTLDLFGRGETTGIFQFESNGMKDYLRKLKPSGIEDLTAMNALYRPGPMDNINMFIDRKYGREKIEYPHPCLENILNVTYGVIIYQEQVMRIAQAMGKFTMGQADILRKAMGKKQVATMEKMGSKFIEGAVSQGIEKKIAKEVYDLMAKFAGYGFNKAHAAVYAHLAYQTAYLKAHYPLEYMTAYLGAYLGNMDEFLKIRNEAEQMGIRLLQPDVNTERLR

SEQ ID NO: 93158 - protein, 74 aa, Unknown
  Obtained from environmental sample
  DOMAIN (14)...(74): Uncharacterised protein family UPF0047
  misc_feature (1)..(74): Xaa is any amino acid
MLYEYSLSAQRQDFYNVTNKVREAIAQSGVADGIAVVYCPHTTAGITINENADPDVVRDLLIGLDKAFPDRAEF

SEQ ID NO: 93159 - protein, 302 aa, Unknown
  Obtained from environmental sample
  misc_feature (1)..(302): Xaa is any amino acid
MENSNQCRQSNGQGNQAAGKPAVLLEELKKELASLRGGSRRGLQERFDGSIGAASVLFPWGGKEQGTPECGMAALLPSFRQDTSEHAFAEAYEPRGSLTASLMTFGFDPALTEADPYEGAKGAVKEALAKFACLGGDYRKARLSMQEYFERMESPESWGKPAAALLGALEAQLALEVPAIGGKDSMSGSYRDQANGIDLAVPPTLVVFAAGTAAAASVRSGTLSGKQGNPVILLYGRPERESSESNEWHVFKANMNALAALTERGLVKAAYPVGAGGVAAALALMAFGNMTGLEAHADCLGL

SEQ ID NO: 93160 - protein, 277 aa, Unknown
  Obtained from environmental sample
  misc_feature (1)..(277): Xaa is any amino acid
IIAILISGLTFPFMTQLGHGLIPFPENVFRMTIGNGFITWLDFLMLVSLSMLLYWYKRGGGRRAGWTLSDLGLAGTPDGEGAAAGPASTSGGIIPRAVIAAFILTGTMYVLVCVSVALFRIDFRFIWPFFRPFTALRFGQFLVYLPFYAAFFVVNAGARLYGQLRLPEFPLNGKKCGALTQLVWWGYSVLLMLGGVILIALIEYVPFLMGVGPGADLLFTSLFGGPFMSVMILLIPQFAVFFFLSTWLYRKSGTVYTGSIVLAILATWVLSGGSAVF

SEQ ID NO: 93161 - protein, 346 aa, Unknown
  Obtained from environmental sample
  DOMAIN (18)...(342): Aldose 1-epimerase
  misc_feature (1)..(346): Xaa is any amino acid
MKIDKKIFGVLSNGKKVKLWTLSAGDLKLSLTNFGATWTSLLAPSREGVKDDILLGYSNLDGYLHNEPFIGVTVGRFANRIKDATFSLNGKTYDLQANDGKNSLHSGLRGFDKLLWRSEAYEENNGVYVRFEVESPDGDCGFPGNLKAVVTYGITESNEIICDYHAKTDKASPVNLTNHAYFNLAGEGKGNILSHNVLLYSSYYVQVDKNCIPTGRLLPVNDTVFDFKTRRKICSDDSFFKPFKGYDHCFVVDGEPGKLRPCAEVYEPDSGRTMKVFTTQPGVQFYTGGHLKRVEGKQGSVYTKYSGLCLETQHYPDSPNQNSFPSCIVGPEKDYHEKAVFAFSCN

SEQ ID NO: 93162 - protein, 450 aa, Unknown
  Obtained from environmental sample
  DOMAIN (70)...(135): His Kinase A (phosphoacceptor) domain
  misc_feature (1)..(450): Xaa is any amino acid
CNVAFENGTNRFEWMHQKLSGEPLPVEVTLFRINYKGEHNLAAYIRDLREQKAMELLTKQQAEAEAANRAKSSFLATMSHEMRTPMNAIIGMTVIGKNADTIDRKNYALNKIEGAAQHLLSVINNVLDISKIEANKMTLSPIRFDFEKMLQKVINIINFRVDEKHQRLTVNIDDNIPRFLVGDDYRLTQVILNLLANAVKFSPDSGEIGFDATLAGETDGICELRVTVSDNGIGVSPEQQAKLFSPFEQADSSTSREFGGTGLGLVISKRIVELMDGKIWIESELGKGSKFIFTVKAARGAATDDEHHEADGGVLPASTVGAAFEGKNILVAEDVEINREILNMLLEGTGITIAFAENGAEALQMVTDAPCKYDAVFMDVHMPKMDGLEATRRIRALPELVNRKRALPIIAMTANVFKSDIDGCLEAGMDDHIGKPIDIDVVTEKLRKYL

SEQ ID NO: 93163 - protein, 672 aa, Unknown
  Obtained from environmental sample
  DOMAIN (312)...(551): Methyl-accepting chemotaxis protein (MCP) signaling domain
  misc_feature (1)..(672): Xaa is any amino acid
MVISQPCPAIVTFIEINLPELLPYLAPADSPILHIIKLIKEYYPQYKDHKVAVISPCIAKRREYDETGLGDYNITMIALKNLLNSQNTDLSSFPRVEYTGVNAERAAGFPIPGGLLDTAERFEPGIRRRTEKIEGVYAIYPYLREITEMLKTDASLPLLVDCLNCEKGCLGGPGTGNAEKPLALLKEPVQRRMAKLEEELNTHTGEKAVNKYHDVLKRYWKKDMYNRSYRNLSENNMIKQPSEEEITRIFRSMKKFGEEDIYNCTCCGYGNCKSMAKAIFNKLNKAENCAHYILALLTEKTNTEELNRQLQEHIAMASGLIEGINKLINKLNAAIISQADTIAQSSAATEKMIDSLRETSEISRKKQVAIKGLIEDTAKSQTSMRETIQSIEEISKSVEGISEAIKIISAIAANTNLLSMNAAIESAHAGEAGRGFAVVAGEIRRLSDSTRENSVNIAKTLKSIINGVTVTEKQSGDTGTRITAMAKEISSFAETMTGIINTFGELSAQSGEITNTLDELQSQSEMVKTDYADILTMTEKLHTAMHDLTMLSKKKVLVIDDDEPVLIMVKDALQNSCNVTAINSGKAALDLFLQGYIPHLVLLDLNMPEMGGWDAFVRIRNITQLHRIPIAIFTSSDDRKDKEKALELGAIEYIHKPISIDELQEKITKLTG

SEQ ID NO: 93164 - protein, 395 aa, Unknown
  Obtained from environmental sample
  misc_feature (1)..(395): Xaa is any amino acid
MKIYSFPRGGFLYEDPTSPIKSSAANAFLPALSVISLGNKAKPVYPVVSIGETVREGMLIGRASGAGTANVHATVPGRIIRKVSWKDKNNINNDAFVIKMEGAFEKLGRKEEVLIWHGLNCYDLQKIISDYGIVEMENDEKPLSDIISASRKKDKLTLVIRCVFDDPWLAADYALCQDRLSAVIEGAAIVAKACLKVTQLVFAVSHREQELGEKLLSAAGNLKIPSSLVLTGSRYPQRNNRELKLALRTYEKKENVDLGSLLILGPAVLAAAFDAIVHKKPILDRYVAVGGSAVYKPQIMKVRIGTRIGEVIEQCGGFIETPERILTGSPLSGREVMYLDEPVGKSCYAIVAMSKSQASVHSQLNCINCGECRVVCPMGLDPQSIYKRIRLRELE

SEQ ID NO: 93165 - protein, 284 aa, Unknown
  Obtained from environmental sample
  DOMAIN (56)...(281): DNA methylase
  misc_feature (1)..(284): Xaa is any amino acid
MDKRGKDRVKTPAGHNFEKIVSCSLKGYNPFFQSKSSVIFNNDCLEILSSIPENSINMIFADPPYMLSNDGFTCKSGKMANVNKGKWDKSKGFEADTVFHDKWISACRRILKPEGTIWISGTYHSIYQCGYFLQKNNFHILNDITWFKPNASPNLSCRFFTASHETLIWARKDKKARHTFNYKEMKNGFFPEDKLKKENTQMRSVWSIATPKNNEKEFGKHPAQKPLDLLKRIVLASTDKNDIVLDPFCGSGTTGAACMFVKNRSFIGIEIEKKYCALAKRRLE

SEQ ID NO: 93166 - protein, 298 aa, Unknown
  Obtained from environmental sample
  DOMAIN (79)...(283): Lon protease (S16) C-terminal proteolytic domain
  misc_feature (1)..(298): Xaa is any amino acid
GNREKFLVPKELEENGLARAKITFKDEAILEIIRHWTMESGVRSLEREIARCVRRVAKAAVNKEYGKSADKPIENFKKAIGREDLEKLLGRRKYKNDVVFKEARIGVSYGLAWTETGGTMLPVETIRFEGSGENIITGNLGDVMKESARIAISFLRSVQDRYNFLVKNMAKTDFHIHVPEGAIPKDGPSAGITLAASLLSTLCQVPPKPGFAMTGELTLTGRILPIGGLKEKLLAAIRNGMEEVLLPADNKEEWEELSADIKKTLKVHFVDNAWEAFEILFPNGILCTRKKPTTPAKK

SEQ ID NO: 93167 - protein, 470 aa, Unknown
  Obtained from environmental sample
  misc_feature (1)..(470): Xaa is any amino acid
LVRKSGLTFAIETPTDFWQMAINKQVSGEDVVSILREAKKRGWKGAKFYFMVGLPLEGSSLKEESSSVEEEEISAFIEMVARQTRMNFNINIGTFVPKPHTPFQWARQISKEEAEGKLAYIRNRLKPQGHKVGIQDPLISIIEGIASRGDERAEGIFEEAYRAGCRLDSWTEFLKREIWEELLDKHKNLVNVFLSKKETSTLLPWSIICSGLSEKFFLHEIEKSCNEELTYSCIKKCNNCGICDKSAKIVQNSIQLKESSGNIEQVIPTTKKTDPDTYKIIFSFLKQGSAVFHPHLGLLEIFYMTFLRADIPIIYTQGFNPLPKLEIASSLSLGIRAGAEIASIETDGYFSAEQFKKSLNEFFPEGLQVVEAMNVFIPSGGKKHSLSSLLWGYVYTGKDSEKEIVEAKEEKSYREARIGSTGSIYSLERLSLLASLNGAKDKSSGASYFEVYRSLYPETGESKQLCRKHE

SEQ ID NO: 93168 - protein, 707 aa, Unknown
  Obtained from environmental sample
  DOMAIN (213)...(419): 7TM diverse intracellular signalling
  misc_feature (1)..(707): Xaa is any amino acid
LGKKSLKFFEKSQGVFVFLLLLIGARVFAQDNYVTDTSIASPWRRFNSGVVSIRLDKFLLYVGTQSEMDGMAALEFDVPGFEPYYGGDLPNPAGHNENYYVFKTTFSVSTDCLNRDISLYFDPLYAPFIVRINNTVIYQSGIYSGGVYSTGTYLAYHIPLADGLIYYSEDNAPIENVLVIEAFPQYENNPLPEFSIAEFSYNEKKAFIKNLLTSHLVLTAQVLSLLIAVYHFFLFFSRGRKDIKYLYFSLLCLSFFLAYTNVGFVFSSAHYTLLEKLSRIGQVFCLPFFAAFIIESVGIFVGKKKYIIIGLLGYSVLCVSFIAIQNTKQYVNEMFNVMTNINTIPLLAGSIVILSYVVFFRKNIKIVPLFIIALAVAGSSLRDLFVLQSGTVPLFWMAPYSFILMVIIIYAMLMTEENFIQGAFSRYLAPEIISEIVKDPNKLNLGGEKREMTALFTDIQGFSAISEQLDPAHLVRLLNKYLTGMSNIIMENLGTIDKYMGDAIIAFFGAPLFNPDHGALACRSALAIKAAEKELNETIIREKLSPVPIFTRIGINTGEMVVGNMGAEKKMDYTIMGNAVNLASRIEGVNKYYHTGGILISEYTRAKIGGEFPLRRIDCVRVVGITAPLRLYELLPMDTDQSAVEIWEKALDLYERRDFKKAFSLFISLLKRYPKDNAAKFYALRCKAFVETPPPDNWDAVRNLTNK

SEQ ID NO: 93169 - protein, 225 aa, Unknown
  Obtained from environmental sample
  DOMAIN (7)...(225): Branched-chain amino acid transport system / permease component
  misc_feature (1)..(225): Xaa is any amino acid
MSIIYFLAQQTMFFSIPLLIVALGGMFSERSGVINIALEGIMIMGAFTGVLFISLLQQFIPGQPILLLAVLVSMIAGVLVSLLHAYASINMKADQIISGTAINMMAPAVAIYIARMIRTVQQIPFINQFRIEKVPLLGDIPFIGDLFFKNAYITTFIGFIILGVSAAVLYKTRFGLRLRSCGEHPQSADSAGINVYNMRYAGVMISGALAGLGGLVFIIPTSTQF

SEQ ID NO: 93170 - protein, 128 aa, Unknown
  Obtained from environmental sample
  misc_feature (1)..(128): Xaa is any amino acid
MRGEEGRKRYTTDPAHMPESHRAVSDWSPGRFISWAAKYGEQTKKFIALLLERKEHPEQAYRTCAGILRLAASVKPLQMEAACIEAMARKLYSYSCFAGLIENLKLQEPLRHENLRGSAYYKEDDHVR

SEQ ID NO: 93171 - protein, 386 aa, Unknown
  Obtained from environmental sample
  DOMAIN (326)...(386): HAMP domain
  misc_feature (1)..(386): Xaa is any amino acid
MKIKFKLSIVVIAIMAVVVAGIATLLLLQASKNTLQLSLRSQEHLANSRAEFWKGREDGYIRALTTLANVMGDFETVKPEERRDRYDAMLKSALDEEPQMVALYTVWKPNALDGMDEQYIGRTGASPTGQYAMAWTQENGVTEKRVSNDINNVMGHITGPNAFKDLVNEPELRRINGADKYTIRIVVPITNNRKNNEEVVGALGCLLTIDAIQKVVENTIKVNNEIDMVVIYSDTGAILAHYKPERIGRNMFDVDVELGDSRKEIVEAINNGTVYKGQIFDPHHDDTMRYVVKPFQLGDSDTNWSVLIGVSESYVLKEIRAITKFTVILAIIAILATAAVIFVILGFITKPIVTVTDTLKDISQGEGDLTRTIPEKGNDEITAMSR

SEQ ID NO: 93172 - protein, 64 aa, Unknown
  Obtained from environmental sample
  misc_feature (1)..(64): Xaa is any amino acid
LPERKRILILGAGVMQGPALRIACEMGLETIAIDADPRALCVPLAERFEKIDLTDREGIEKLAR

SEQ ID NO: 93173 - protein, 352 aa, Unknown
  Obtained from environmental sample
  misc_feature (1)..(352): Xaa is any amino acid
AKRITKRFKKTPIAPIKKDNGNISICKLSSDKIAIPVINKIQNIKLSGSICIIVRTNEEALNIVGLLNKKGIAARKIQTNDDFNLYNLVEIRNFIDDINKNNDSYTITNEIWQQAKDNLIKKYGSSNNLPSALKLIGDFEETNNGTKYKSDLKQFVRESKLEDFISSSEGFILVSTIHQTKGREFDNVFLALSRFPKLDNKLESNDAKERKIYVAITRAKQNLHILYNESYFDKINIENIERTSDNNSYPVPEEITLQLSHKDVALGYFASRKREIDSLVSGREMSICETGCSVGNTQVLKFSSKFCDQLNDLKEKGFSPVKAIVRHIVFWQNKDKEEEIKIILPDVEFSRK

SEQ ID NO: 93174 - protein, 81 aa, Unknown
  Obtained from environmental sample
  misc_feature (1)..(81): Xaa is any amino acid
SDSLTVKEILALREAGENIAKRWAATLSCHQAIRDGERLDGDSALALAKEALMLPEPRCPHGRPLWTEVSREALYKAVRRN

SEQ ID NO: 93175 - protein, 167 aa, Unknown
  Obtained from environmental sample
  DOMAIN (28)...(149): Histidine kinase-, DNA gyrase B-, and HSP90-like ATPase
  misc_feature (1)..(167): Xaa is any amino acid
MALHTTNINAGNIQVLPPQEARRIAAGEVIDRPAALIREFIDNAIDAGASVIEVSIEGGGAKKAEVSDNGSGMDRENLEKCVLPHATSKIRCLDDLDTVETLGFRGEALAATAAVAGLEIITCSGGGAASSGGGATGGGSSGAWRLETGPGGDKLHITAASRTRGST

SEQ ID NO: 93176 - protein, 549 aa, Unknown
  Obtained from environmental sample
  misc_feature (1)..(549): Xaa is any amino acid
RDGKVYGKVVIGTQTWMAENLNYTPQSGNSWCYDNSTDSCKKYGRLYDWATANAACPVGWHLPSRGEWDNLAESAGGTMASTSSGTWHEWFDAGQKLKSKSEWNNRDDGKNGNGTDDYGFSALPGGFRNTDGGFRNVGIGGNWWTATESNSGNGGVYVRYMVNSNDHVQENNYGKNQGFAVRCVQDGNTIPTPTYAVTVSSTGTGATGNGNYEVGATVSISAGTAPSGQTFKNWTTSSSGVTFANANSAATTFIMPGNAVAVTAVFETLSYTVTVIGGTGGGSYAQGATVSISAGTAPSGQTFKNWTTSSSGVTFANANSAATTFIMPGNAVTVTAVFEATGGGGDGLETFTDSRDNKVYKKVTIDGQTWMAENLNYEVADGTGSWCYKNSADSCTKYGRLYGWNTAMNGASSSNTTPSGVQGVCPSGWHLPSSAEWNTLVAKAGGSSVAGSKLKSSSGWNNNGNGTDDFGFSALPGGYRLTGGSFNNAGNYGDWWTATESGSGNACDVLRQRPRERVRPRQRLRFFCTLFAGLKRGAGRRSQPASCRC

SEQ ID NO: 93177 - protein, 407 aa, Unknown
  Obtained from environmental sample
  misc_feature (1)..(407): Xaa is any amino acid
MTVKSVRQRVWQEREEGIDSLLGDEDDGALVESKALVMLQSKALLAGRLARTVPYFLNDRAVEINSYQDWWICEKLLARRSVLFVVAGYPAIGMGHVYRALMLAHEIADHGIRFLCTKESELAVRSIAERDYKTLTQQGDLADDVLALQPDLVVNDILDTDAAYIRKLKAAGIRVVNFEDEGSGADEADLVINALYGDKGRDARRLYGWRYFCLRDEFAAGRRNVFRPRARTVLISFGGTDPSDFTRKTLDVVEPLCRERGLDIRVVAGPGYAHRKALERHLAELANPRLSFTHATNVMSRMMEGADLAVCSAGRTVYELAHMRVPALVMAHHERELSHRFARAANGFSWLGLMQPDFHTAKLRRAFLRMLEPSVRARCFERQDRFHFAKNKGHVVQRIVRLLGSEG

SEQ ID NO: 93178 - protein, 531 aa, Unknown
  Obtained from environmental sample
  DOMAIN (267)...(489): Methyl-accepting chemotaxis protein (MCP) signaling domain
  misc_feature (1)..(531): Xaa is any amino acid
VSTVQQIVDDLKKEVYDGAGIAAVYSDNATAIAHWDKDRIAVNLKNNDKDKTLFGDDLNRLADAILNGKIDILDKYSQVMKTEVYYIFQPILVSGFETTPWSLQLGIPVSEIKKPIHTLISFSIIFAVILLVLAAVITLLVVAGIVKPIIRVTATLKDISEGEGDLTRTVSVSSKDEVGDLAMYFNKTLEKIKGLVLIIKKQAHVLSDIGNDLSSNMTETAAAINQITANIQSIKSRVINQSASVTETNATMDQVVTNINKLNENVESQSLNVSQASSAIEEMVANINSVTTTLINNAENVKNLQEASEVGRGGLQEVATDIQEIARESEGLLEINAVMENIASQTNLLSMNAAIEAAHAGEAGKGFAVVADEIRKLAESASEQSKTIGNVLKKIKESIDKITKSTGNVLNRFEVIDTAVKTVSLQEENIRNAMEEQGEGSKQVLQSAGSLNELTQQVKSGSEEMLVGGKEIMNESQNLEKATQEITNGMNKMTSEADKINLAVDHVNEMCEKNREGINTLIEEVSRFKVS

SEQ ID NO: 93179 - protein, 871 aa, Unknown
  Obtained from environmental sample
  DOMAIN (20)...(272): Alpha-2-macroglobulin family N-terminal region
  misc_feature (1)..(871): Xaa is any amino acid
AGKRQGCSRRQNRRAGPLAVFNFPNGDFVSRFTEPQGSYWSNTFGNGFRVRVSEGSGSTLDRAEFVPNDSHNLWRFSIQAYENPFIVERERPVIFLFTDRGLYRPGETVTFRGIDRKIIIGQYSAYQGRYKIEVSTGAYQAPVIASLEGNTTGNGGSFGSFTLPQNIDPGQYRIIYRRIGTTGSAQEREPATSVSFTVANFERLRFESSLKFTDPVVYQGEKLNASLSASWLAGGGLSGAPYTWYMTREPASVIPGGTEGPWRYWNFGPESDDGRSFVGRGEGTLGPDGKTGISNDTSGEGIEGAAYRYRLETSVQDAARQEISARASVLVHPASFYIAARLDSGTIRTPTDSGSDSGAYFLNAGQPATLSWALVSPNGDGVGTSLTSQDLSIQLVRHEWKQARQQGTGGRVNLVWERVEEIAAQRNVKIAPANEGVSGVFNFTPDKSGLWELRLSSRDQKRRIAATRSHFYVTGSGWVRWGLDDVDTISLTTDRPSYAPGETAKIMIRSPLEKGKYLLTLERENIISQRLIELNGSALTIDIPIEDSYLPVIYAALSSYTTRSGPAQNSYYEPDMDKPKGIFGVTPIYVDNESRHYQIEIDTGRNAYRPAEQAEVKIKVLLNGKPAANTEVSFLAVDRGVVDLIDYHVPDPLASFYDPRHFPLGVRGADSRSLLIDPVTYNISDLQGGDSDDDKGDGAAARKLFGDDMKERKDWRPTAVFEPYLVTGPDGIAVVKFSLPDSLTSYRCTAVAVGVNNFGIKEQDLKVSAPLTAVAALPRKLRWRDTGTVSLILTNLENTPVEASVTLASFSEASAGAETIIEVDGVDSRTVKILPGASQEVAFKVAAIGTGVARLSFTLRSPQVNERIIKT

SEQ ID NO: 93180 - protein, 411 aa, Unknown
  Obtained from environmental sample
  DOMAIN (148)...(297): ATPase family associated with various cellular activities (AAA)
  misc_feature (1)..(411): Xaa is any amino acid
MVRDLMAAGFQMVKQEMQEAVKQEAEKRAEEALLDLLLPISEKKHKDKKQRPGPIMRPMGTFQINPENSNSSIIATTLQLGFPAFKKNQETQDSENEQKNAEGQEESADEIKDGENERFKATREKLRTMLREGLLNDRTVELTVGQNPTIPAFEMMGGSMEDLEASLSGIAGMLGGGQKKKVVTVPRAMEILKAEEAEKLVDRDRVSDEARQRVEETGIIFIDEIDKIAVKGDRGGGPDVSREGVQRDILPIVEGATVNTKWGPVNTDHILFIAAGAFNVSKPSDLIPELQGSFPLRVELDSLGKDDFLRILTEPKNALIKQYTELLATEDVKINFTPEAVEHLAALAADVNTKLENIGARRLHTIMEALLEELSFEASDIAPANIDITVDYVNEKLAEIVKDQDLGRYIL

SEQ ID NO: 93181 - protein, 394 aa, Unknown
  Obtained from environmental sample
  DOMAIN (336)...(394): His Kinase A (phosphoacceptor) domain
  misc_feature (1)..(394): Xaa is any amino acid
MKNILKKNYIFVAAAILIVSAYFITGVLVFANKQYNAINEENMKVTVNIIKGFTPFEVFTDRELAAEWVSNLDISNEYRITLINRSGRVVFDTEADSAVIENHLDRPEFQASVRNGTGFAIRRSATLGQYYLYTAAAINDPYGKFTGVLRFSRLIPGFFTRLLSSTFPFLVFGFFLIMGICLSLYHFTRYQSHLAEEKLNTELEKKTAELKLIVEKAEAETRHREVILNSMFDGVLTLDSKLNIIHANQRLCSLFDQNGDYQNMSLVEFSHSAELEKAADIVLSTGQPYEFTFKRYNGKLQQFQGFAAPLDTGPHTAPGIIMVLGDISRLVKLEQIRKDFAANVSHELRTPIQVIQGFAENILNSPVDEYKQILHFAGIIRKNARAMDNLTSDL

SEQ ID NO: 93182 - protein, 296 aa, Unknown
  Obtained from environmental sample
  DOMAIN (68)...(286): Binding-protein-dependent transport system inner membrane component
  misc_feature (1)..(296): Xaa is any amino acid
VNYLKKRKITDSFWYALMTAASIAVGAALVGIIAYILIQALGMSAAADHSNATSGGAAGVEFFRIRSLVPMIVSTAWTVVVSLAIALPVGVMTAVYLHEYAAKSSLSRFLGLAIDTLAGIPSIIYGLFGLLFFCRFMDLGQSIIAGGFTLSIMILPVIIRTTEEALKTVPVSFREGSFSLGATKFQTIVHVVLPPALPGILTAAILAAGRVVGESAPVLLTVGLARNLPKTIFEPGRTLTIQLYYLTKEAIEADDFAHAFAAAAVLIVVVLLINTLVKIIGRSFGGSASTDGGNDD

SEQ ID NO: 93183 - protein, 96 aa, Unknown
  Obtained from environmental sample
  misc_feature (1)..(96): Xaa is any amino acid
GFAPAKSGVLAGIILGFSRTVGETMAVILVAGNSVQLINSPLEGVRTLTATIALEMGYAEGRHSQMLFAIGIVLLVMILILNSVILFIRRSGDEEA

SEQ ID NO: 93184 - protein, 467 aa, Unknown
  Obtained from environmental sample
  DOMAIN (11)...(97): Glycosyltransferase 36 associated family
  misc_feature (1)..(467): Xaa is any amino acid
LQTINENCLNAVNESRVETRFFGLAGAPVTSYCGDRAAFLGGYRDYGNPVSIEKGRLDGKLNYNLNPCGALHTALTLKGGESVSLVFLLGQKREAEAKALIARYEDSGLPDREINDLKNYWHGKLTNLKVETPDENFNHMMNTWNAYQCFITFNWSRAASLIYCGQRNGYGYRDTVQDIQGIIHLDPEMALEKLKFMISGQVSHGGALPLVKYDHNPGHEDKPEDVSYRTGTGHPSYRADDALWLFPTVWKYITETGNTALLDEEIPYADSGTDTLYKHLDKAIDFSLNHLGIHGLPAGLHADWNDCLRLGANGVSVFVAFQLYYAFEIMIRCAKHKGDAATEMRMNELKKKFGAIIEERCWNTDRFVRGITEHDQVVGKPDDPEASLWLNPQSWAIISGFAPQKRSNAIMDLVYKQLNTKYGARLMAPSYRRHAFDGALALLFNPSTKENGGIFLQTPGLADLAEA

SEQ ID NO: 93185 - protein, 70 aa, Unknown
  Obtained from environmental sample
  misc_feature (1)..(70): Xaa is any amino acid
GQRHIDFYSGFVYSMLDLPEELFTPLFAVARVSGWCAHRIEELVNAGKIIRPAYKSVSKQTPYTPLHERG

SEQ ID NO: 93186 - protein, 281 aa, Unknown
  Obtained from environmental sample
  misc_feature (1)..(281): Xaa is any amino acid
MAETAEPRGERMIPYVGCKVYQNNWQNSTAMGILQAMPDAEHFYDLFGGGGSVTETALKLHNKGILGTWNKWQHIHYNELNTGVYLLNKAIWEGTFDFDKARNTWISRERFLAEKDEPTAWGAFVWFCWSFGNGGDFYIYGEKIELAKQLMHVLVTSDISIIKGETIKERRLALKRIFIEHKVVELEMLQNLERVQNMERVETPQKIHTTNLDYRDVPIEPHSVVYCDIPYEGATKFYGVAFDVPAFYEWAKTRDFPVYFSGYTCTDNDFQVVWEKDVQCR

SEQ ID NO: 93187 - protein, 435 aa, Unknown
  Obtained from environmental sample
  DOMAIN (344)...(435): Stage II sporulation protein E (SpoIIE)
  misc_feature (1)..(435): Xaa is any amino acid
MMDVFPWIIREVDPRNFFWYKEAKARGTLYWTDIYSDTRGRGLIISCVIPFYDHSGKTSVIKGVVRSTVLLSDFSRITDVAGVGRTGELFLLNREGVKIYSSNGVEVKPGEGGGVEGTNFLESKNPHLRSLGMSMTLGASGMAELEIDGLPNYVAYAPIQTLGWSLGVAVSVQELFVSAQLTENQIRKVTDDTKAVMDRYIFLLAGLIALLLFLTMLGIAVFALRFTRAVTGPILALNEGVHEVAAGNLNREVIVQTGDEIEQLAVSFNMMTSRLRRHIEEIARATAEKQRLDTELDIATQIQMSILPNIFPPFPGRKKEFDLYAEIHPAREVGGDFYDFFFIDDDHFAMVIADVSGKGIPAALFMIITKTLIKNRLQSGENPAMALEAINRQLCNNNISDMFVTAWLCVLEISSGRLEYVNAGHNPPLLRRKDQ

SEQ ID NO: 93188 - protein, 278 aa, Unknown
  Obtained from environmental sample
  DOMAIN (94)...(277): Peptidase family M48
  misc_feature (1)..(278): Xaa is any amino acid
SYPFSGNGYGGFTLFVSSSSVLSESATDNWEEIGYVPLTFNDGVGRVSFTGEKNPLALVSNSELFAASFQQYDKFLDENDVVKSGSDAEMVNTLGKDIKEAAERWYKKEGKSSYLKDYKWEYHLVKNDQVNAWCMPGGKIVVYTGLLPVTKNKDALAVVMGHEVAHALLDHGRQRVSLAFLQQLGLSATGLGASLLGASELTQSLFVAALGIGSNLAVALPFSRDNESEADEYGLYLMAIAGYNPEESVPFWERMANGKSNSKFEEMLSTHPSVISAQ

SEQ ID NO: 93189 - protein, 337 aa, Unknown
  Obtained from environmental sample
  DOMAIN (105)...(336): Bacterial extracellular solute-binding proteins, family 5 Middle
  misc_feature (1)..(337): Xaa is any amino acid
MDRYGVAPKKIVYAIILCIIIFSGCASVKSAPQQAETDAFDLPSAPDRPEFAESRPRVQTRDELTVTFSKNEVELDFRKSYLASEAQLFTAIYEGLFSYHPFTMEPIPAAAEKWELSEDKKQWTFTIRQEAKFWNGDPVTAEDFRAAWLSILSPQSDAPYSSLFDVIEGAKEYRTGMTHNTEKVGIVASGTKTLVVKLNAPAFFFPSMLCHHSFSPIHPSMLNNEDWSKKPPLSNGPFYITEMNGDKIVLVKTNAYWDASAVSLNKITLKYTESGDEASSLWNSGEARWISGEVNFDTLTDRSGIQVNAMFATHYYFIRSGEKPWNDYRIRRAPCLA

SEQ ID NO: 93190 - protein, 136 aa, Unknown
  Obtained from environmental sample
  misc_feature (1)..(136): Xaa is any amino acid
IYELQYFDQAKGTETWEHLNFGQFRVDLDRKIKIYTGMSGQGPFMNKLKAMAEEQVLEYLERAIKDLQALHRTLTALDEYFKASVPREERDQIKGIKPELASVKNCFVKANQIRHEYSAQKEEEEQMRKLGINPDD

SEQ ID NO: 93191 - protein, 277 aa, Unknown
  Obtained from environmental sample
  misc_feature (1)..(277): Xaa is any amino acid
MAEQIGDESIFLRLQQLQKGLLQFTDTTNAYRLLTEYGKDIRYNFLWKKWIVWNGCQWEMDDGYLIHDRGLKMIRGIYAELLKTADMRDRIEIEKHGMQSESARRRKALIEVASWIPELNIKTDDLDRDPWLFNVKNGTIDLRTGEMREHRQEDLITRIANVEYDLNADCPVWKKFVMEIMNYNADLIHFIQNAAGWAITGDTSEQSMFILFGTGANGKSTFLNTIMNLLGDYAIATPTETFMKKSGDQITNDIARLRGTRFVTTTEAEYGKRLSEP

SEQ ID NO: 93192 - protein, 468 aa, Unknown
  Obtained from environmental sample
  DOMAIN (23)...(454): DNA gyrase/topoisomerase IV, subunit A
  misc_feature (1)..(468): Xaa is any amino acid
MAFIKNLFDRNFLEYASYVIKDRAIPDLEDGLKPVQRRILHSLFEMDDGKFHKVANVTGHCMKYHPHGEASINPALVVLANKELFIDRQGNFGNLFTGDDASAPRYIECRVTPLAKDIFYNPKLTTWADSYDGRNREPVLFPAKIPVVLVMGVEGIAVGMSTKILPHNVIEVLEAEIACLTGKKFELYPDFPTGGYVDISEYQGGNGKVLVRAKLDTSDPKRILITELPFGSTTESIINSIDSAARAGRIKIQSINDFTTDKVEIEIKLARGVYAQETIDALFAFTECEQSISVNLLVIKDGLPTVMTVNEVIKYHAKQLVKILTKELELEKKELLDKLHLRTLERIFIEERIYKGIEKMKTAKGVQDAVIAGFKPFLKDVGPRGVSDDDVEHLLRIPIRRISLYDINKAKDEMEQIQARIKEINNHLKNITAYSVSWLKGIIAKIKANEEIGGGKRKTLVGAFDKVI

SEQ ID NO: 93193 - protein, 217 aa, Unknown
  Obtained from environmental sample
  misc_feature (1)..(217): Xaa is any amino acid
EINSHLKNITAYSVSYLKGIITKIKANEEIGRGARKTLVGEFDKVIAKEVVKRDVELRYDSKTGYLGTNVSGAKIAEVSPYDRILAIRKNGMYTVMDLSEKAFIGAEAWFIGAADKDILSKTIFTIIYKEKDTGYPCIKRCVIEGWIMNKDYFLVPDGAEVMHIDIKPKFTFTVKYKPKPRLKVLSEDFKAQDYNVRGLKAGGIRLSAKEAEKVTGV

SEQ ID NO: 93194 - protein, 68 aa, Unknown
  Obtained from environmental sample
  misc_feature (1)..(68): Xaa is any amino acid
MKRYSIKCLPGNTEYVDILKEMDNEYLVRFTRSNSGNTKTSEETITRHLFNICVQTGYLNPIADGSAA

SEQ ID NO: 93195 - protein, 506 aa, Unknown
  Obtained from environmental sample
  DOMAIN (175)...(245): HAMP domain
  misc_feature (1)..(506): Xaa is any amino acid
MKIRLKMFLVILPLIIVPLVLAETASYFQAVNGITRLARELLGFKLGELEKYANNQWSLLVDNNYAGKPEMVEAAEKAVEQYGRSILLSDTEIVFAVDKTGKTAMSTSEIKLSPPESKALLQLLEHENQGLQTAVIGGEKRIFQAFYFTPFNWYILISEKEQVFFEDAKMIAFQTIISLGASVLIAVFMLIIVTRRLTNPLGKIVTTMESIIETADLSSKVEVEYNDETGILAQTFNNMTEELNRAYSQIKRYAFDAVLAGKKEERIRQIFQKYVPNDVIERFFASPEKMLVGDNRKLSILFSDIRSFTTISEGMAPDDLVNSLNRYFSGQVDIIYNRKGIVDKYIGDAIMAIWGAPEKHEDDALQSVLSALEMSDAVLKFNENQRKLGKCEFKIGVGINYGEVTVGNIGSERKMDYTVIGDAVNLASRMEGLTKTYHSEILISESLFDELRQTAPNAGLFYRLLDTVAVKGKTKGVRIFTVKKSLTPHEQKGWQLHNQGMKLYYA

SEQ ID NO: 93196 - protein, 690 aa, Unknown
  Obtained from environmental sample
  DOMAIN (3)...(104): ATP cone domain
  misc_feature (1)..(690): Xaa is any amino acid
LIKQVVKRSGEIEGYDRTKISNAVRKAFSAAETGKNTEEFQARIEKITARVEALIREMMSSRHPNSIPAIEEIQDLVENTLIEEKETRVAKAYILYRARHEAMRDAKKLMLDIDSTMDGYLKQSDWRVNENANVNYSLGGLILHNSGSITANYWLKNIYPEEIASAHRNADFHIHDLSMFSGYCAGWSLRQLVSEGLGGVADKITSKPAKHLSTLMQQAVNFLGCLQNEWAGAQAFSSFDTYIAPFIKADDLSDKEIKQCLQSFIFGVNTPSRWGSQAPFTNITLDWTCPADLREKKALVGGEEGDFCYGDCQEEMNRVNRIFIELMLEGDAEGRGFQYPIPTYNITPYFDWESDNARLLFEMTSRYGTPYFQNFINSDLDPSDVRSMCCRLQLDKRELRKRGGGLFGSDELTGSIGVVTINLPRIGYLAKSEEDFYRRLERLMVLAKDSLRIKRKIVSRLLEGGLFPYTRRYLKNLDNHFSTIGLVGMNECLLNFLGREFTIATDRGRSFALEVLGFMRNKLADFQEETGELFNLEATPAESTSYRLARHDKKKYPRIISAGRDEPYYTNSTQLPVMETDDIFEALDLQEKLQTAYTGGTVFHCFLGEAIEDWRVCRDLVRTIAGKYRIPYFTISPTFSVCPVHGYLKGEHFYCPKCRENKENELREKIAVLEEERSAAKAAVMAAAVL

SEQ ID NO: 93197 - protein, 576 aa, Unknown
  Obtained from environmental sample
  DOMAIN (353)...(518): ABC transporter
  misc_feature (1)..(576): Xaa is any amino acid
MAFVQFSKVSLAFGDRDILKDVSLHLASGSRACLAGANGSGKSTLMKVLAGELPADSGDRAVQRGTRISYLPQSGIVHRGKSLRDEAETAFAHIHELIDRAEKIAALLQNAKSDDGTSKALLEDHHRLQEQIENSGYYRREAAISSVLAGFGFSPNDLDRDTGEFSGGWQMRIALAKALLEQPDILLLDEPTNYLDIEARTWLENWLVKFPGGCLLVSHDRYFLDVTVDEVYEIFQGNLKRYVGNYSAYEKTRQMELAGLMKRYTEQQEEIAKTEALIRRFRYKATKAAFAQELIKRLEKMERIEIPENLKKINITFPPPPHSPRVALTIEGLGKSYGAKKVLHGLDLTLDSGERLVVAGPNGAGKTTLLRILAGNDNDFEGSVKFGSGISAGYFSQDAAEALSGSEQVLEFMESGAPMALIPKIRDMLGAFLFRGDDVYKPVSVLSGGEKSRLALLYMLLKPLNLLILDEPTNHLDLHSKDVLLETLNQFKGTIIFVSHDRAFMEALSTKTLELSPVADASSRARLFYGNYGYYLEKTMSNEQLAGSKGREITDNREESRRHDNQKTAMEPEDAK

SEQ ID NO: 93198 - protein, 324 aa, Unknown
  Obtained from environmental sample
  misc_feature (1)..(324): Xaa is any amino acid
GRRIYRLKAGEIIKILSIAEGSPAIGSTGEPLPGEWYKVLTEDGSTGYCFSYRLRVFEYGGGEFAASAPVVNEKADDPVLDALLSKTWSPESYLTMINSKTINLEDLSRKWRFDPGQETGLARIFVPDIDKSYSYTGIRPDGNRVWRFEGTNLSMQLRSDTTLAVQFLEGSGSTRTLLFVSLPVSVDDLILQETARRERLYNKIYSQGPVYTSNNYGTITFKGGGRFSWRNFDLLVPRFIPEDIEGDGTILMDLFLDRTLEDRYDGAFTLRFTNTKAALFCMYSLDNEGFRIEIIPDSSIEDVTIVRRGASPMVLYFFRDTELW

SEQ ID NO: 93199 - protein, 258 aa, Unknown
  Obtained from environmental sample
  misc_feature (1)..(258): Xaa is any amino acid
MVEMLVEWTDEGITQQYVKRLYKYLPYENYALLQSCGKVHELTITFNGKTGESIGIIDVVIDKPIPFYFSGLRLLVTSILLFAIFTFVYKKLRAKAAYYLFEYKFNPKNKNQNIVYICIVALVVLFSWICVYTSVADLYENDLRFSQYNRFLVDALIAGRTYLDYGHPEILSNAERPYDNSWRIANGYGETINKEAFDWAWYKGKYYCYFGVVPAVLIYIPYKMITGNYLSNHAGIFLFGAIAIVLLAVLWRYCVKSI

SEQ ID NO: 93200 - protein, 573 aa, Unknown
  Obtained from environmental sample
  DOMAIN (107)...(179): S1 RNA binding domain
  misc_feature (1)..(573): Xaa is any amino acid
VESDTSPVKNTENIQTQLQEESLKSFERLEEGQMIEGKVIQVTPDQVFIDVGGKSEGKIPIEEFQNTPKVGDTVQVILITKENKYGEVIVSKQKADAKLFWKNLRQAFSEHTAVEGVIESQVKGGFDVNLGSGVRAFLPVSQSDIQKVENPEKLLNLKSRFYVERLYSDGKINIVVNRRKCMEEEHDTKRKAFFENTPIGSDVTGIVKSFTSFGAFIDLGGFDGLLHINDMSWGHVTRPKDYVKKGQEIKLKVIRIDNKEKRINLSLKHYTDDPWVHFEEKYHVNDIVKGKVTKLTDFGAFIELEEGIEGLAHISEFSWIKKIQKPQDLLKSGDVVECMILGYDLQAGRVSLGLKQVKDNPWETIEEKYPVGTRVKRKVVKITSAGAFIELENGIDGFLHVDDMSWTKKIKNPGSALAVGQEVEVMVISVDTANRNIKLGMKQLSEDPWKKFCETYKPGSPVEGEVASVTDFGVFLRVPGGIEGLIHKSNLVENREDDPDEALKKIKVGDKLKAIVLEIQGDKQKVAFSLRGYQKKAQKDELSRYMAEEEVSDSTYTLGSLLKSKNPQANESE

SEQ ID NO: 93201 - protein, 446 aa, Unknown
  Obtained from environmental sample
  DOMAIN (67)...(445): DNA polymerase family A
  misc_feature (1)..(446): Xaa is any amino acid
DIVPKGKTFDAVPLETACRYSAEDADFCLRLKCCLEGKLGNAEPLFKDLEMPLLPILAEMEGEGIKIEKKILNNYGTELGKELEDIQAKTYKLVGHEFNLSSTQQLQKVLFEERKLKPDKKTKTGYSTDVAVLEELAREDEVPALILRHRTLSKLKSTYVDSLPVLADKDSRLHTNFVQTGTATGRLSSREPNLQNIPIRDEEGRRIREAFIARPGWVLISADYSQIELVVLAHLSGDKNLLSSFVEGKDVHARTASLIFGMEEKDIQSEQRRIAKTINFGVMYGMSAFRLSNELSISRTEAAAFIEAYFKTYAGVRDFIESLIAKTEKTGFASTILGRRRFIPAINSRNKTEKAAAERVAVNTPIQGSAADIVKTAMLNLDKALTAANSPAKLLLQVHDELILECPQEKAKETAELVKREMENAVKLKIPLRASVETGKSWGDFH

SEQ ID NO: 93202 - protein, 274 aa, Unknown
  Obtained from environmental sample
  misc_feature (1)..(274): Xaa is any amino acid
MEDKINISLLQRILVENQEAVQKIELSERELVLEAKGNYIFVGPRQAGKTFCLFQIIKQYIKKYPAKKILYINFEDDRLLTFNASHFQLLLDAYKSLFKETPILFLDEIQNIDGWEKFSRRLADSKEYKIFITGSNAKMLSKEMATTLGGRYLIKNIYPFSFSEYLAANKVKLTEHWQFSNKRYEIRRKFNDFFKFGGFPELLHFKEKRLWLENLYKKVFYGDLIARYKIRNDFALKILVSKLAESIHDEISFNRMKNIIQSIGTPIGASTIIE

SEQ ID NO: 93203 - protein, 134 aa, Unknown
  Obtained from environmental sample
  misc_feature (1)..(134): Xaa is any amino acid
MGLLDNNIETIDTNASPAAHGWCFQVGSGISLMLDYVQDFSHIKMEGKSDDIELTLGEGKKIYAQAKSVKQIGDQRNAGKNLNDALKVLSKDEQNGDAFKLIYITNIENPLSSKKASAFKYDQLYDFSILQTLD

SEQ ID NO: 93204 - protein, 77 aa, Unknown
  Obtained from environmental sample
  misc_feature (1)..(77): Xaa is any amino acid
MLINNSDYFVILDDIKQDFPNIKGYSVRNLKYMRKFAEFVSDEGKVQTVSALLSWSHNTLLLDKTKTLDEYLGKHNE

SEQ ID NO: 93205 - protein, 256 aa, Unknown
  Obtained from environmental sample
  misc_feature (1)..(256): Xaa is any amino acid
MKVTPADAGGYYGVDDYYLESKGYWHGNAEMTNLLELSGDFNHDDFPKLLWGNYPKGGEQPISIVENSGQDNRRGGTDFTFSAPKFVSILSFQDERIRKAFDTAVQRSLDYVESFIQVRHKHNGVVSIEKTGKAVFAVFNHRTTRPPEEDETPDPQLHAHCAMANLTVDSEGRFRCIHNPFTPEMIPFLGQRFRNELAKEIQKLEDYQIYVTDRTEGFFDIKVKGVSQEDIAKDFSSRSEQIEEKLQEYRKLRYKH

SEQ ID NO: 93206 - protein, 231 aa, Unknown
  Obtained from environmental sample
  DOMAIN (118)...(147): Helix-hairpin-helix motif
  misc_feature (1)..(231): Xaa is any amino acid
MLSGKIKWEAIFSALEKWRRTLGTKDNSTSGTNDPSVNTVAEHYNHSPWAVLVSTIISLRTKDDVTLKASEKLLEKAANPSELSALRQDKIEKLIYPAGFYRNKAASLKKIAAILLEQHNGKVPASMEVLLSLPGVGRKTANLVLNEAFDLDAVCVDIHVHRISNRCGWLTSKNPEETEMILRDILPKKFWKRINRLLVLYGQNLCRPVSPFCSRCVIAKFCSRRDVNHFR

SEQ ID NO: 93207 - protein, 96 aa, Unknown
  Obtained from environmental sample
  misc_feature (1)..(96): Xaa is any amino acid
MNTNMKTPGTTLLEFIGKNGLNCNRVAKNIKCSQTALRLISLDKSRITASVAVRLAKYFNTKPEFWLLTQMKHDLVKAAGNKNLCKKLSSISIAVT

SEQ ID NO: 93208 - protein, 301 aa, Unknown
  Obtained from environmental sample
  DOMAIN (1)...(48): Helicase conserved C-terminal domain
  misc_feature (1)..(301): Xaa is any amino acid
GGQTKLLAATDVAARGLDIDGLAMVINYDLPSEAENYVHRIGRTARAGKTGRAITLASEQDVYELPAIERYIGKKLPSEIASAELHAEDASAGQQIRTEVYEDRREERHVHGKGARPHVQNKGGGSRHGGKVHDDYDSRKHQADTGGKKSEHQQQGHPQSDRQRMKSRESGDGKYGRHEGKAHDDSRGRKQGKPLVGEKHVRQHESQDLSHLSFEERMALYKQKYNKDDKPAAQKRQKPGGGQKHPGGQKHPGHAKQEPAHAPAEQKPEQKPRQMPAQLPAQLPEKKGIISRLLGKLGLRK

SEQ ID NO: 93209 - protein, 183 aa, Unknown
  Obtained from environmental sample
  DOMAIN (3)...(140): HD domain
  misc_feature (1)..(183): Xaa is any amino acid
DITGGHIERTQRGIKILLEEIEKSGVYREETEGWDTDLLLQSSQLHDVGKISISDNILKKPARLSDEEFNEMKKHAIFGEQIIEKIEALAMESDFLNYAKIFAASHHERWDGSGYPRSLKENEIPLLGRIMAIADVYDALTSERPYKKAFSHEEAVRIITEGSGTQFDPELVKVFIRTAERFK

SEQ ID NO: 93210 - protein, 1468 aa, Unknown
  Obtained from environmental sample
  misc_feature (1)..(1468): Xaa is any amino acid
LGYGLDGGSALEGGNGFETNLAFLIDKSAPEITEINVPKDALKTEFTVDGIIAKTFGVKKLSVKLGNDEIAVLDKDSNGEYYLIKKPVEGNNYGVEITVERRPNAKRSFDFTATINPVSIKNGGTLKDGPTSLTFTAVGSSGQAAIGVDSFTLDTTGPAITVGAPINNNVYVVGADWITLKNAVDGDDFSGAASVETIYDKLFNARIKDKKASFTVTFTDDFSNVFSDKNNKYWYRFDGEGWKEATVPGTEFGKKSVSVKLPLPAGEEWTDSVHRLSVRVKDSLDNGYDNTTSDLIISALGDGKENNDYGHETYRAFMIDSGIPKLTEIQTELGTISSGGSLSVSGRIDNTFKVMELNAKIGSSTTNINLSNYVTPYANSKKTYYFENVPINSSDIKAATNDVEGSYTVSLTVQGSSELSDMKVSTFILDTKGPTISINAPINKVYLGSGQIDAFENAMLKNSTESLGTDDKRIFFRLLNNNVKDVSAGLSGSFSDTYSEIGTKYWYSFNGGAWREEDTNVSTADNKNTVGWKINLTTQSDGTVKIPNGETLKDGLNSLSIRVKDSRSNGYDKDSNDVPIEGGYGYETNVNFILDTGTPVLSAVTGDLSDGNVPTVLGPMTSSEYVRVNGVITGTYMVKRLSVSLGSGATIALTNDGNITYQKGDTNIKDIHLEPVNATSKTFNYYFDVNTSGLAYGSRTITINALGSSDNSNVKTVSFIYDDKGPNVSVSVPSSKLIMTNEVKNDLNSALLSGSLDPITQIPLYNSLKTMLITDSSTNLSGTFNDEYSAVADKSTNNTFWWQIDGGEWKEGTLAVSKEKSVSWDVPISGLLDGVHLLSLRVKDEWGNGSDGTDLGNGGYENNIAFMIDRSVPEIKVTDAPPIPINGGYTFKGTITNTYGVKRLSVKLGNNELASIEEGQTKPGITLIQTPGNGRSFDFTFNIDPSIMDDGPASLVFNAIGSSGQVAMLPSSFTFDKTAPKITIGAPISESFYVTDDNQWKELKNAFKDDDFTGVSSGVNDIYANIFKTRIKDNSASFTITFNDDHSPVFLGGKDFFWFKLDDDTEWKPAIVDENDLNRQSVSIKLSPTAGAKWTDGVHRLSIRAVDSLGNGYNISTGNDAPETSSGLGYQSNLVFMIDSGAPVLDFKIDNPKSGIINTSTPLEISGTINGTYEVQDMSVKIGSTSITIASDAVKRTGNGKKEYSFAEVIIDQSEIYTATGGNEGSYTISVTVKGSSDQSEMKVNTFVLDTKGPVISINAPIKEKIYLDSTQLKDINDAISDNDIDSLKNKFFDTGITLEKKYYDLLKYNVKDASAGLTGSFTDTYSAIGTQYWYSFNGGNWEDGTPIQNGSNNQSMDWKIPLDGLYNGLNQVSIRVKDALGNGFSGGTNPDGNNGNGYETNITFILDTGVPELTTDDFENNTVYGPGSFTVSGQIIGTFMVKRLSVSIQGPLASIIENQIDGSGSST

SEQ ID NO: 93211 - protein, 1125 aa, Unknown
  Obtained from environmental sample
  misc_feature (1)..(1125): Xaa is any amino acid
RATDSLGNGYDNLKADTAPEKENGVGYQSNLVFMIDTGIPELFVKDNNGKKVPSEAQDFGIHNKSFNISGEINKTYDVQDLSVKIGSTVVAQRTNNGATMNNMTFTKKPNGKRTYYFTNVNIDPLLGASITDGSKDGSYTISVSVKGSSEQSVSNVSTVTLDTQGPKITVNAPIKEKIYLSDSQRGTIEDAITANNIESLKNVTFTGNTTTTLEKVYYDLLRYNVKDASSKLSGSFADTYSDVGTQYWYKFNNGSWETGNTIITNAGNLKSKDWEIALPSTLPDGMNRLSIRVKDTLSNGYDTGTAPSSDNSGGNGYESNINFIFDTISPALTEIGGGIADTSAGKDPTVKGPPEFFTVTGQVTGTFMVKRLSVSIGGAAEVEQGQSATVLQTVDGVTTPLGGNFFIENFSLTPAGKKTFNYSFNVITKKSGGELAYGSRTITINAVGSSDNSDVKTLSFIYDNKGPTVNVSVPSSKEYLNKDEKDSLNYVLDNGKPYLTGQEEIYKKLDAMVISDASAKLSGTFNDDYSDVAVTGSNTFWWDIDNSGIWKTGILGVNNKSVSWEVDIAGLGVGVHILSLRVKDSLGNGYDKNSGLTGKGGGAGFETDIAFLIDNNPPVIEDIVVPEAAINSQFPVTGRVTDTYGVKKLSVKLGNDEIAYAEKNSLGNYVLTRKPGVNYVESIVIDRTNGVGKSFDFTVTIDPRAGSMEDGPKSLTFTAIGSSNQAAIGVDSFTYDTTGPKVTIGAPINGSIYVVGNEWTDLEKAVRTDVFTNTGIPTGNGSTYDKLFQARIKDNTASFTVTFADNYSNVFESDKNTSFWYRFDDGAWQEGLAPIGEYNKNSASVKVQLPDGGTWTDGLHRLSVRVKDSLKNGYDKKTLDGVISTLTGDKKNNDYGHETYRTFMIDSGKPTIAFTNDKTELGVFSKTESPGISGTITGTYKVQELNAKIGSSTKNIDLKSFLIDIPGSMKTYNFNVDINPSDIYEATKFAEGSYTISLTAKGSSDQSDMKVSTFILDTQGPAISINAPINKVYLTSGPTGQISTFEDALLNNNTGLIASLDRPIYYRLLNNSVKDISAGLSGSFSDTYSDIGTKYWYRFNGGAWREEDTNVSTADNKKTVGWKIN

SEQ ID NO: 93212 - protein, 247 aa, Unknown
  Obtained from environmental sample
  DOMAIN (1)...(122): Type I restriction enzyme R protein N terminus (HSDR_N)
  misc_feature (1)..(247): Xaa is any amino acid
MPKEAQARIKINRFLEEAGWRFFDSSDGKANIVLEPSVKITKTKLSGLGDDFDKTKTGFIDFLLLDKQGFPFIVLEAKAEDKNPLFGKEQAREYAQSQHCRFIILSNGNSHYFWDLERGNPQVIYRFPSPESTESYASFTPNREALTNETVADDYIVLSKKPDYKNDPSWLDEKSRPEFIKINKLRFLRRYQVRAIRTIQRAVREGRDRFLFEMATGTGKTLVSAAVIKLFKRTGVGSSRVDLQACK

SEQ ID NO: 93213 - protein, 275 aa, Unknown
  Obtained from environmental sample
  DOMAIN (71)...(275): Glycosyl hydrolases family 31
  misc_feature (1)..(275): Xaa is any amino acid
KIYGLGQYQQPYLNVKGCDLELAHRNSQASVPFAVSSLGYGFLWNNPSVGRVSLAKNVTTWTASSTKLMDYWITAGDRPADILKNYACVTGTVPMMPDWAMGFWQCKLRYQTQEELLGIAREYKKRGVPLSVIVIDFFHWPCQGEWKFDPEYWPDPRAMVDELESMGVKLMVSVWPTVDHRSENFREMEEKGYLIRTDRGHRISMNFLGNTIHFDATNPEARQYVWNKIKENYYKYGIKLFWLDEAEPEYTYYDYDLYRYYLGPVAEIGNLFPQH

SEQ ID NO: 93214 - protein, 262 aa, Unknown
  Obtained from environmental sample
  misc_feature (1)..(262): Xaa is any amino acid
MGANTKYKDSVFSLLFNDPDLLRELYCALKGISLPHDIPVTVNTMQDVLFMGRINDISFEIGGKLVILVEHQSTINPNMALRLLLYIARVYEKIIGDNKKIYTTNLIPLPRPEFFVLYNGVSPYPDEKTLKLSEVFESVASLGIPEKEIPSLELVAKVININQGRNEEIVQRCKTLNGYCAFIGKVREYEKEGCSLEEAIREAVIYCRDHDILKEFLGRNASEVMTMLLTEWNLDDAEQVWYEEGMEKGMEKGMEKGMEKGR

SEQ ID NO: 93215 - protein, 305 aa, Unknown
  Obtained from environmental sample
  DOMAIN (4)...(300): Bacterial lipid A biosynthesis acyltransferase
  misc_feature (1)..(305): Xaa is any amino acid
MRPLRKFIPRSIRHRILGWMAKAGFAIGRALPRPIGLALFSFFGWACYYILGTDRRLTVHNLNFVFGNEWSKKKIHAVARAVFISQGKNLFDAVHLGAIKDNVFDNIVSHDSLYGVAQACERGKGIVAITAHLGCFEMLLHLFARRGLECFAIGRAFKNPDVDETVRMMRSGPGIEYIDRSESTRKIVRLLKHGKVMGVLIDQDTHVEGVFADFLGHPAFTPSSAVRFAMKLGIPMFVSVTARLPGNKHHVYVSKEIIPVNTGDPKADLVANIQKINDIISEYIRKHPEQWVWMHERWKTQPVDT

SEQ ID NO: 93216 - protein, 221 aa, Unknown
  Obtained from environmental sample
  misc_feature (1)..(221): Xaa is any amino acid
MSLFMIGYTTTASFGLYFFKYAYGNEGMYPIFAMVLGVSQITALAIFPLFSRIFDRKSLFTGAIILISAGYIIFFFAPVTTMIFIGIGGTLIFVGQSFVQLLMLMFLADSVDYGHWKLGKRNDSITFSLQPLINKMGGAIAGGIVSAVIIVSGIKEANTAAEVTKGGLLMMKLAMLIFPLVCIAASYFICRFKYKIDSRFYEQILSDLRARGELKSDAESS

SEQ ID NO: 93217 - protein, 500 aa, Unknown
  Obtained from environmental sample
  DOMAIN (1)...(500): AcrB/AcrD/AcrF family
  misc_feature (1)..(500): Xaa is any amino acid
MNDTPAVILNIQRQPGANIIAVVDRVKRLLPQLTASLPSSVEVEILTDRTTTIRASVRDVEFELMLCIALVVMVIFVFLRTLSATVIPSIAVPLSIVGTFAAMYALGFSLNNLTLMALTISTGFVVDDAIVMIENIMRYIEEGENPLRAALKGSEQIAFTIISLTVSLIAVLIPLLFMGDVVGRLFREFAITLSITILVSAFVSLTLTPMMCAKLLKHKKPDEQNRFYRASEKVFQSIIDFYGRTLQWALGRQPTILVVAIATFLCTILLYIVVPKGFFPVQDTGVIVGITEAPEWVSFDTMSQRQQALAAVILKDPAVESLSSFIGVDGTNTTLNSGRIQINLKPLGQRRTGATEIIHRIQSDVSSVRGIQLFMQPVQDLTVEDKISRNQYQFVLEDADPAELAKYVPMLVDKLQQLPMLRDVASDLQNNGLQVKVVIDRTAASRLGITPQILDDALYDAFGQRQISTMFTQMNQYRVVLEALPGMLNKPEDLLGLYVR

SEQ ID NO: 93218 - protein, 630 aa, Unknown
  Obtained from environmental sample
  misc_feature (1)..(630): Xaa is any amino acid
MENKSPNNDNRSSSHFERLRLNQIFAEAVKYPLVVVCAGAGYGKTSAVHDFAQEYQATTFWLQLSERDNSSARFWESYLHVLAKVNAPLAKELTKLGFPDTKEKFNHYLSSLNNLAEKKRRIIVIDDFHCLKEPSVIKFVEEGILFKLPPGTSVFIISRTIPDLKTAKNCYEKQIFNIVEDDLRFTENELAQYFRSREISSSHETLREIMQDTGGWAFAINFIAQSFQKAPGYSGYVRNALRTNVFGVIETCLWNGISARLQNFLLRLSLIDHLSIDLITQLAGTDAEIISDFERLNAYVRRDNDINAYFIHPLFLEFLRTKQDLLLEDQKRETYSVSGDWCAKNGFKIDAMSYYEKTGNYQSIVTILDELTAQIPQNIAQYAGKILDRAPENAFDNVEFLAEMHLRTYLCQGLWQKSLDLVKFYEAKFLKLPHDNEVRNRTLAQLYVCWSYIRALMAVTDNNYDYAIYMEKANKCVSSLDDPGKFGPYYSGAWINYAGSSKKGVLEEFINFSARIRDNLSHNFLKGSVAGEIELMKGELDFYRGNVNSALPLLNLAVKEARLEKQFGFVHRALFYMLRSAVYQGNLAMAEQALKDTKAQLDENIYISRFFDYDISLSWFYCYLGLPEKM

SEQ ID NO: 93219 - protein, 537 aa, Unknown
  Obtained from environmental sample
  DOMAIN (237)...(443): Bacteriophage Mu transposase
  misc_feature (1)..(537): Xaa is any amino acid
MTGYIKTSVIASALLLSRKETMKRARIEGWPCVMRKGGLVFIKNRLPAGVQLALAERETQAVDGTGEGGLSQLTDKAREAAQNRSALIYEYHQSGLNIADFVDAYNCGQFGAHLQKELGKVSARTLYRWLKEQKEAGGVGTQALAALAPRYGIKKSGAGVTLSDIERSLLKKFWLVNTRPTMSHAWRNMLHAYPHSRCTYQTAARFLQSIPPAERDLFRLGKKRFDDLYLPYVEQNINRYRSLDLVVSDHHVLDCVVLYHGKLIRPWVTTFQDYRSGKIVGFFPTVKPSSLSIIAAYYMCCIRYGVPKAALFDNGRDYRSKLLNGYKTTAKQFTPEGIAEEVEVFFQGVLPALGTDVRFTKTYSAKSKGRQERYYRLLGEYLAKDIGSYVGSDTTTKPDDAVLMWRSIDGMAKREDIPAWDYFVRACAAMIEYINDTFESSGKGMDGKTRSRVFTENLPENIRRVSKEELQQALYRSEVHKCGRNGIRHHGVHYYHPSLVGYAGQDVVIRNKIITDNEMPVYAVDGTFICTAVSDYF

SEQ ID NO: 93220 - protein, 356 aa, Unknown
  Obtained from environmental sample
  DOMAIN (167)...(349): Predicted permease
  misc_feature (1)..(356): Xaa is any amino acid
GIDADSYFTLFPGINIEEGRSLISNEYGAMITVERAKRIETQSGQYPQIGMPLLLTSGGAVGFKIREVPLVGIFSYANPGQFMNEIVIIDPQTVRVLNSIQVASSQDVELGEDALALLNADADDIFSDIFSAHEDDTTAEIFSAETLQAYLSENKPEDNVNFSGGDWNFIILKLEKSKNAHFFISSLNKKLEPYGVTAVDWRIAAGTSAILLLLIQALFNIGIFLVCIAGVITVINILLIGVFRRTREIGTLRAIGAGDLYIASLILQENLLLTAFAGAAGIFGGILFIKWINSLSLIIPNELISSLLGGNVLSLGLIPAIAVSAFILAVILGIVVSIYPINVTVRVEPMEAVRNG

SEQ ID NO: 93221 - protein, 430 aa, Unknown
  Obtained from environmental sample
  DOMAIN (166)...(430): Aldehyde oxidase and xanthine dehydrogenase, molybdopterin binding domain
  misc_feature (1)..(430): Xaa is any amino acid
MDAARVLRGEITMEDLWPKVPEGASIMGANYPRPSAIAKVTGTWDFGADAGLKLPEGTLHIKLVQAQVSHANILSIDTSEAERIPGVYKVITYKDVPGTNRINGLAFPQNKGSGKERPILNDKKIFQFGDAIAMVLAYSPKIAEEAASKVKVDIEELPAYMNALAAMDEGAIEIHPGTPNVYFENHVIKGDEVEPMFEKLPYVVEDSFYVQRQPHMPIEADVGFAYMDEEGNLVIHSKSIGIHLHTLMIAEGIGVPAEKLFLVQNGAGGTFGYKFSPTMEGLLGVAAMVTKKPVFLAFNMYQQFTYTGKRSPFFIDLKFGADKSGKLVCMKSDWTVDHGPYCEFGDLLTMRGTQFIGSGYNIPNIRGNGRTVATNHAWGSAFRAYGAPQSLFATEVLIDELAEKIGMDPLEFRYLNVYREGSTTPTGCPP

SEQ ID NO: 93222 - protein, 230 aa, Unknown
  Obtained from environmental sample
  misc_feature (1)..(230): Xaa is any amino acid
MDKRLFQECDEKCLRDEPAACTSRCPVHVDITSLAGEIEKGDYKNAYKILEKRLPLASIIAMICDHPCESACVRNMPIRISELERAAVMYGRSPKKKLVSLPKKKGNVAVVGGGISGITAAFELDKKGYNVTIYEQSERLGGRIWDFEHVSRELIDDELRRIGDMDIKLALNRKIDISALGPLTNEYDAVYLGTGYMGGIPPYCSRHFPGSKFVCVCRRQAVRFRLGYRI

SEQ ID NO: 93223 - protein, 109 aa, Unknown
  Obtained from environmental sample
  misc_feature (1)..(109): Xaa is any amino acid
MVTLLQPSIQELEAHNISHERDQYIHMGFIPDAYRINANPWAAQFKYLTALLRRDIAPLIRVENRKAFKRFFRLLAERIGLALNLRNFAETVGVPPHILVRWIRVLEAH

SEQ ID NO: 93224 - protein, 179 aa, Unknown
  Obtained from environmental sample
  DOMAIN (27)...(164): Glycoprotease family
  misc_feature (1)..(179): Xaa is any amino acid
MNLLAIDASCSVLSVAVCRDRDYYYAQTEAGMKHSELVMEMINKQMEKAEMKPADLNGILCMGGPGSFTGLRIGFSIAKGLALSLNIPFVPIPTLECIAYSAIGLSLPVIQARKGAYFYSLFNDGRRITEDGDGGINQISELIIKSTHENKNINITGPAAEEIYASLGEDIKSLCIYSC

SEQ ID NO: 93225 - protein, 229 aa, Unknown
  Obtained from environmental sample
  DOMAIN (29)...(193): Uncharacterized ACR, YhhQ family COG1738
  misc_feature (1)..(229): Xaa is any amino acid
MAFFVAILVTSNIASSAKIVDLGISLFGFWGIPSVPLAFDGGTLLFPIVYVLGDVFTEVYGFRLARRVIWTGFIALSLCSLLFFVLARLPADAVWEDYAGTAAYNAILGGMSTGGITLASLAGYLIGEFSNSAVLSRLKVVMKGRALWVRAIVSSLVGELLDSLTFVFFASLTGVFGWELFLSLVLTNYLLKLSIEVLVFPFTFLAVKKLKKAEEIDTYDVGVKLNPFK

SEQ ID NO: 93226 - protein, 321 aa, Unknown
  Obtained from environmental sample
  DOMAIN (117)...(279): MatE
  misc_feature (1)..(321): Xaa is any amino acid
MHSAQIYFLVTALSYPFLALYTAAAALFRSMGNSKITMKVAVLVNILNVAGNALFIYGMGLGVGGAALSTLIGRAIAAFILFYFLMGNRPQAINLHGISKIKLEKDMIKRILNIGIPSGLETSMFQVGKILVTRIFTVFGTAAIAANAVSGTINSIGFMPGSGYGMGLLVIAGQYIGAGDYNGAKRYTRKILIIAYITYLVINVNVFLFMDQIAAFFKLSPEAHDMCLTFLKIHCITSTLFWCFSFVLPNALKAAGDARYVMIVAASTMWLVRVCSAYIMAFPLGLGPVGVILAMGADFLFRGIFFGARWFSGKWMEKRVI

SEQ ID NO: 93227 - protein, 474 aa, Unknown
  Obtained from environmental sample
  DOMAIN (365)...(441): S1 RNA binding domain
  misc_feature (1)..(474): Xaa is any amino acid
SKQKADAKLFWKNLRQAFSEHLAVEGVIESQVKGGFDVNLGAGVHAFLPVSQSDIQKVEAPEKLLNLKSRFYVERLYSDGKINIVVNRRKCMEEEHDTKRKAFFENTPIGSDITGVVKSFTSFGAFIDLGGFDGLLHINDMSWGHVTRPKDYVKKGQEIKLKVIRIDNKEKRINLSLKHYTDDPWVHFEEKYHVNDIVKGKVTKLTEFGAFIELEEGIEGLAHISEFSWIKKIQKPQDMVKPNDVVECMILGYDLQAGRVSLGLKQVTANPWDNIEERYAVGTRLTRKVVKITNAGAFIQLEEGIDGFLHCDDISWTKKIKHPGSELSVGQEIEVMVISLEKENRNIRLGIKQLSEDPWRSFSETYKPGSPVEGEIASITDFGIFVRIPGGIEGLIHKTNLTESREENPDDALKKYKVGDKIKAVVLEVQGDKQKLAFSIRDYQKKVQREEISRYMAEEESGGSTFTLGDFLKS

SEQ ID NO: 93228 - protein, 464 aa, Unknown
  Obtained from environmental sample
  DOMAIN (1)...(76): Glycosyl hydrolases family 2, sugar binding domain
  misc_feature (1)..(464): Xaa is any amino acid
LGSAESYAIIYVNGLLAGAGKDTRLPSEYDITSFLVEGENTLCVKVVRYSDASYIEDQDQWWYGGIHRSVYLYATDVYYIKDIKALPGLVETKGDGACGVLDFSVTLGGKLPISQCCGNVPVAKKPESPFTVKYALYPFILPKDGKNAGELAAKLAEGKPLAEGELTLACDYRVNSNTTEGQIRLENPKIWSHETPHLYVISVSLFRDGRHIESSAFCTGFRNIRIERRELLINERPVLIKGVNRHEHDEKTGKTLSTEGMMRDITLLKTHNFNAVRTCHYPDDERWYELCDRYGIYLLDEANIEHHCFYDQLCWDTVWAYAYAKRIQRMVERDKNHPSVIIWSLGNESGDGANHDMGAAWIRRYDPFRPVSYEGAVRLKRNQGPIGLDSLNHSKNLTDIVCPMYPEIETITDFVKNIEDHRPLIMIEYSHAMGNSNGSLSDYWKAIESHHGLQGGFIWEWIDH

SEQ ID NO: 93229 - protein, 268 aa, Unknown
  Obtained from environmental sample
  misc_feature (1)..(268): Xaa is any amino acid
MVNRSDTENLPGRESVENIVRGLEELLFPGYLENVHSDNGNLVRTTNDKVNQLAGKIIHEVEKSLVFSARIGVLNCGHGGCRAAAALVTDDFFEELPRIRALLAKDLEAAVRGDPAAMSTDEVILSYPGFQAITVHRMANFLWTRNIPLIPRMMNELIHTRTGIDIHPGAQIGESFFIDHGTGIVIGETTIIGNNVKLYQGVTLGALSVKKEESGRKRHPTIEDDVTIYANATILGGDTVIGRGSIIGGSVWITQSVPQGSKIYLKKE

SEQ ID NO: 93230 - protein, 265 aa, Unknown
  Obtained from environmental sample
  misc_feature (1)..(265): Xaa is any amino acid
MASTQKSIAQTSTYRSAVEAILKDEQETLIAIRNNDPDAAFKRLGLVDSMLNLASNYIVIDGIVQSVLKLKNEESLNEARKALYKSIIYLEEIVSNFIDAPYSDYEEQLAQIDTVTPAERYLLIRKMGLAIQLLKNAYGDNTKWKWTFVEIEGRYATVAKNIINLKDILINSDFQSEHYEPTVRHLALIKKLLSQAADRYREKYELSTNRIDDFKLGIIYLAALRRIYILTGDQGEAVNTKKKLDIWKVKLATDTEKQEKLKNEL

SEQ ID NO: 93231 - protein, 266 aa, Unknown
  Obtained from environmental sample
  DOMAIN (12)...(225): Cytochrome C biogenesis protein transmembrane region
  misc_feature (1)..(266): Xaa is any amino acid
MTEGLSFSLMLVFTAGLLSFLSPCVLPLIPSYLSILGGLGIDKETKESARFHLIFSAAGFVFGFSIVFITLGILVSKTFFLMGGISKYIHWAAGIIVIVLGLNVIFDFLKFVNYEKRPFLQKWMKPGMRGTLAAFIAGAAFGTGWTPCIGPILTGVLLMAAQDGRTGTAVFYLAVYSAGLAAPFLLAALFLDFFLKRGSALRKHLPLIRRVSGIILIIIGLMILTGKYSSLNILIQRATLSYIYWAEDKALPFRLLANVLSWLQNF

SEQ ID NO: 93232 - protein, 231 aa, Unknown
  Obtained from environmental sample
  DOMAIN (58)...(90): Ankyrin repeat
  misc_feature (1)..(231): Xaa is any amino acid
VFFCVFTVILPLAVSCIGTRKSTPTENISPVWGLLKKGDDSARNYFQGEIDINAADPGGRTPLFYAVERKDAELVNFFLSHGANPNVIDGDGQTPLGLCIKNNDSKTAKILAENGADIHKPIPFSENNTAAILALETNPTLFSALLNPTTINSTDASGKTILHKAVMVGNMNAVTEILTAASSSTALINKKDNDEENSLDYALERADSRTHISIAEQLILAGGYCDNPVFT

SEQ ID NO: 93233 - protein, 209 aa, Unknown
  Obtained from environmental sample
  DOMAIN (132)...(148): KWG Leptospira
  misc_feature (1)..(209): Xaa is any amino acid
VYDYNWLHAKGKDKRHKEYNPICYDWLGKKNRKKWVMIKEGWRIVNNPRPEGEKKFVEFEDGLALIMDYEVIPYTNIDGEIMYDIDFIWKFIDKSGKVVLVPEIYFNGKFFKISFADKFSEGLVAVMHRNGLWGYININGETVAEPKYIYASTFKNGFASVYDKDGGWILINNKGEYVRNLDMPFNWESRKQKNPFRRRLQPQAYKDSL

SEQ ID NO: 93234 - protein, 325 aa, Unknown
  Obtained from environmental sample
  misc_feature (1)..(325): Xaa is any amino acid
MRISPKIDMIPIVHGAEMFARETRRLCSENKYDCIAVDISPVFQDDLAEAVDELPLISALIAYRQEIYGGLGNAYGSVGIDVDKEDDEDDDLPFCYYIPIDPCDAMIEGVRQARQRRVPFRCVGTPTLRPPIPMLSMPDEYSVEKIGFDAYSLLCRKAVKDMFQGGEVGVVNNDNDQLRSQLKSIFTLCGETINADMNIVADNLHKLCRQYDNILAIVHISRFDAVMMRLNDESIRRDDTDAASVEQPYEIIKRYINPDHLYFALSELPFVAAKSQLERQNPFATPMDPTDAVKDLFIDTRENYYDNREQTLHLSPVRIQAALTY

SEQ ID NO: 93235 - protein, 309 aa, Unknown
  Obtained from environmental sample
  misc_feature (1)..(309): Xaa is any amino acid
VIVETDVRGLRFIAGDTEIPGTANLKTPQLKALVTQLLALENDTDVLILDLGAGSHQSILDFFLLSGQGIVVSAPTVTAVLNAYVFLKNAVFRLMSNSFHRNSKVGKYLEKLRTEGTHKLHIPKILPEIEKIDPAAYEKFKTRLDNLHPRLIMNMVSEPKDAELAAKIRHSCEEYLDLKIEHLGIMYRDAAQDAALASQMPITIYKPKSILSQAVYRIADKILESGEDTFIPDPNQIEASFQEAGLEAEIDFENKMDYIGELLHSGTLTQGDLIETVKSQQFEISKLRKEVNFIKKKLSKAIEMGYVPK

SEQ ID NO: 93236 - protein, 591 aa, Unknown
  Obtained from environmental sample
  misc_feature (1)..(591): Xaa is any amino acid
MMTSMTDPMRKALSEAMDQPSRIAGSLDTSFRNIQVAAGATNEEMEVMRRELLAIGGQAIGGPEAVASAFEDVAGGISDASKRMAVMSAAVSLAEANQADLAMSTNAMVNVMNAWNLSADQAAIAADVLTQTSLMGVGRLDDFAGSISHISALAAGAGIGLDELGASFAYVTTKGLDAGQAQKQFKGIISTLLSPSENLSKLYASLGIESGQAMLQQYGLAESLVILKNALGGDEQAFGNLIGSAEAATVALALTEDAYVDFAGSFADGMGKVTEAARSVQLESIEAKMARLDSVSRSLQAQVGQDINNIKGHFIDFKFGFLSNIVSPLMNSPVGGVLSKVTAFTGMAAKSVLDFGSGAMNAAAQMTTLAANIKNAGGIAKMFQSGIGLAGSGLKILATPLRVAGGGILNLGKSIIGALPAMGSYIASMWASVAPTLAATWPILAIIAGVALLAAGVYLLIKNWSKVGAFFSGLWGKVTGAFSAAWNWIKNLISGASDWILGAVAIFFPFIGIPALIIKHWDAIKGFFSGLWDGVKGMASNAWEGMKGKAGQFFDDIKQGWARNFEVAGKAWDGIKGIASGAWDGMKGMAG

SEQ ID NO: 93237 - protein, 153 aa, Unknown
  Obtained from environmental sample
  misc_feature (1)..(153): Xaa is any amino acid
MRREKIREIKRYRSVYILLVIPLIFYIIFKYIPIWNGQIAFKDFMPGDGVLGSKWIGFKHFNTFIKSFYFTELLRNTLFYSFGKLLISVPAAIILAVTLYESLNRKLAKLVQTLAYLPHFLSWVIMYGILLALLAPGDGIINDIIKLFGGKPV

SEQ ID NO: 93238 - protein, 424 aa, Unknown
  Obtained from environmental sample
  DOMAIN (248)...(273): The GLUG motif
  misc_feature (1)..(424): Xaa is any amino acid
SSATVEYCYNTGNVTGTSSAVGGIVGNNANNCTVQFCVSLGARVTGTSNVGRVAGTVPGLGNNRARADMKIGASGAEATVSGNGSSSNGASNSIGTAQTSFYLSWDSSIWNISGDMTIGVNLATLKTNTQSPTPTLPAEYLVPGTAENPFLVATEADLRKVGTETTTGGWTLSASYKQTANITLTSAFTRIGTFTDTGKFSGTYDGDGKTITGLTITGSAYQGVFGANSGTLKNMTVTGTVTNTGTGVNNSTGGIAGVNQGTIDNCSFSGTVNSANANQIGGITGYNYDTVINSRSGATVSGVTSVGGIAGQNQGKIENSYNTGNVSGTNQVGGITGANSGTGSNIRIRNSYNTGDITATTTSTANAGGIIGMNQSSSTVEYCYNTGNVSGPASVGGIVGNNASGCTVRNCVSLGAKVTGTSTQ

SEQ ID NO: 93239 - protein, 300 aa, Unknown
  Obtained from environmental sample
  DOMAIN (1)...(300): Inner membrane protein CreD
  misc_feature (1)..(300): Xaa is any amino acid
IILLLLIPVAMIRSLIGERSNRADEVEGSIMEAWGSQFILYGPVIRIPVVGREEVRTKTERDGEKVEIVTRNYALWITPKNVDINADFSAQKKRRGIFSVALFSGNVSLSGDFSFERAKTELKQNQIMYPEQAEIVIGLATQKGIRKIIKADWNGSELFFKPGNRNFSVDFSGDKKSIGYNIQSVGGNGVNALSPFNTNGINTFDIQFAVQGGKAIRAIPIGETTHVRIQTDWSSPSFQGGFLPVNYTLSESGFDAEWEISYLSRSIPLCWMSDDKGDDDASRKWKNEYFGVDFFKPLDH

SEQ ID NO: 93240 - protein, 63 aa, Unknown
  Obtained from environmental sample
  misc_feature (1)..(63): Xaa is any amino acid
MYCTKKVIDDLVWVGANDRRLALFEGVYSVPTGVSYNSYLLLDEKPYCLILSIKRCGRDSWKM

SEQ ID NO: 93241 - protein, 628 aa, Unknown
  Obtained from environmental sample
  DOMAIN (215)...(362): Glycosyl hydrolases family 2, sugar binding domain
  misc_feature (1)..(628): Xaa is any amino acid
MGQLAISPLFNNGMILQHGISVPVSGESSPMAMITLSFRGKTYKARADNGGKWLVLLDSVSPGGPYSMEISTETDAISIKDIYAGDVWLCSGQSNMELPMRRVKDDFPEEWDVPNPLIRQFSVTQECEFSGPRQRLSGGHWTKACADTLEEFSATAWFFAGQIFKTYNYPIGIILAAWGGTPAEAWMSADALAAFPEKIALGKKFADTAFKDSLIREKQAFVETWNNELAAADSGLKQSWQKPETDISAWDEIFLPGNFARADSAGKNGLDGFCGVIWLCREFEVSESFAAVNKTRDAKIWLGTIVDADTVYINGAEVGNTGYRYPPRKYRIPAGLLHEGKNRIVIRVTCVNGQGGVTRDKPFRVFSEKGCVELAGTWKYRIGVKTPPCPEAFFFQRQPMGLFNATIAPILRFPLRGVIWYQGESNDGNPDDYEVLFKAVIQDWRNKSGQETLPFLFVQLPIFGSPTENNEAASWAIIREAQSAALSLPATGMAAGIDLGEWNDLHPSNKKEVGRRLFLAAERVVFKNRNAPSSPMCREVKLLGSRLFLTFDNCDSGLIAHDMPYVSIVADGKLLRMPVEIEKHDTLSVDLSSVKKPEKILYAWANNPKDRQLYNCEGLPFIPFKMDL

SEQ ID NO: 93242 - protein, 115 aa, Unknown
  Obtained from environmental sample
  DOMAIN (60)...(106): Bacterial regulatory helix-turn-helix proteins, AraC family
  misc_feature (1)..(115): Xaa is any amino acid
MPKPGDLLESVLNEIEKRIKEDINADFLAEKTGFSSVHLQRLFKFAFKQPLGAYIRSRKLAASLESILSTNLKLIDIALEYGFEYEQSYLRSFKQEFGVTPGSVRKTSRIVTVTP

SEQ ID NO: 93243 - protein, 321 aa, Unknown
  Obtained from environmental sample
  misc_feature (1)..(321): Xaa is any amino acid
KDALIQRGKTAGEAPETNINNTIEELWEEVWNGKLSADSWEPVRRAVESGFSQTERSEIQAEGRTSGAMSGIEPSVRERRAFRVPRAIRERWKSGTPVRGLWFSLASDSPLDEQSLLEEEELNRERVRLLLDRWGILTRPLLEREASALSWARLLPTIRRMELAGELVTGRFFAGVVSLQFASPRIVSELEEAEAERCIYWMNAADPASPAGLAVDGIIHSTGRDASAIRRTASSRLCFRSSELLAVSNRSCRELEIFIPPDDPDILIALEFVKISRTRKVHRENKIIIEKINGASAASSAYSEALASHGFVKDRGRLVLW

SEQ ID NO: 93244 - protein, 359 aa, Unknown
  Obtained from environmental sample
  DOMAIN (223)...(342): HemN C-terminal region
  misc_feature (1)..(359): Xaa is any amino acid
MDPYIDAVSADIADQINLFNVNNIPSVYIGGGTPSVLGAKRITRLLASIKTLLSNMNAPPVEFTVEANPESADEAFLQACVEGGVSRISLGVQSFCEASRKAVRRQGSITRLEDDLALAARYYPLAFSADLITGLPFQTETVIMEDIKALLSFPVAHVSLYSLILEPQTPLGKAAKQGAVSLPPPDEADEFWIAGRDLLERSGYRQYEVSNFCLPGKTCAHNIRYWRMENWLGAGPAASGTVINDETGAGKRFTYPADIENYIRMPRPRINHAITEELGREDLIKETMLMGFRYCEGPDKVLFKQRFGREIEDMIPKTIALWSKRDFFQTGQTLKPSKQGMLFINGFLRDAFSELTINN

SEQ ID NO: 93245 - protein, 496 aa, Unknown
  Obtained from environmental sample
  misc_feature (1)..(496): Xaa is any amino acid
LFWRYMDKLIIKGAREHNLKNIDLELPRDKLIVVSGLSGSGKSSLAFDTIFAEGQRRYVESLSAYARQFLGRMDKPDLDYIEGLSPAISIEQKTTHRNPRSTVGTVTEIYDYYRLLYARIGIAHCPVCGREIREQPVDSIIESILQMPAGTRVQLLAPVIRGKKGEHQKIIEDARKAGFARARIDGVPVELDESIKLDKQKKHSVDIIVDRLVIGPDIRSRLAESVETALQTSDGLLLVLSRNPDSSSKSETENFFSQKNACPDCGVSIPELQPRLFSFNNPFGACPSCSGLGSKLEFDPDLVIPNPSLSFNEGGIVPYNPDSAWHHSRFESLAKHYKFSLDTPLKTLPKKTMDAILWGSRDEIKVRYNNREGTGHFEYQSRFPGVLEDLKRRYLETQSPGVKEWLEKFMSQKHCEDCEGKRLKPEVLGVTVAGKNIWELSSLSVTDSLKFFEAVKFNKNEKKIAYQILKEITARLGFMRNVGLDYLSLERKASTL

SEQ ID NO: 93246 - protein, 765 aa, Unknown
  Obtained from environmental sample
  DOMAIN (446)...(720): ABC transporter
  misc_feature (1)..(765): Xaa is any amino acid
DESIKLDKQKKHSIEIVVDRIVIEQNVRSRLAESVETALQTADGLLLVLASDEGKNSEHFFSQKNSCPDCGVSIPELQPRLFSFNNPFGACPSCTGLGAKLEFDPELVIPDPSLSFNEGGVVPYNPDSAWHRSRFASLAKHYKFSLDTPLSKLPKKILDAILWGSKDEIKIRYDNREGTGHFEYQSKFPGVLEDLKRRYLETQSPGIKEWLEKFMSQKPCEDCGGKRLKPEVLGVTIAGKNIWELSCLSVTDSLNFFESVKFSKNEKKIAHQILKEISARLGFMQNVGLDYLSLERKAATLSGGEAQRIRLATQIGSSLVGVLYILDEPSIGLHQRDNQRLIDTLLHLRDLGNTLIVVEHDEQTLRTADHIVDLGPGAGVHGGRVVAQGSPQEVMQVKESLTGQYLAGTLTINIPAERRQGSGNCIKLKGVSEHNLKNINVDIPLGLFTCITGVSGSGKSTLLSDVLYPALANRVYGSNHPEGSYKDIKGAELIDKVIDIDQSPIGRTPRSNPITYVGGFTAIRDIFASLPESKMRGYRPGRFSFNVRGGRCENCEGGGTIKIEMNFLPDVYITCDVCQGKRFNRETLDIRYKGKNIAEVLDMTIEEAAEFFAPIPQVARKMQTLLSVGLGYIKLGQSALTLSGGEAQRVKLALELSRRSTGSTLYILDEPTTGLHFADVKQLMDVIQRLADQGNTVIMIEHNLDVLLQADHIIDLGPEGGDKGGQVVATGAPEQVAACAASYTGHYIGEMIAREKKKRKQSGRK

SEQ ID NO: 93247 - protein, 274 aa, Unknown
  Obtained from environmental sample
  DOMAIN (62)...(246): ABC transporter
  misc_feature (1)..(274): Xaa is any amino acid
MMEENIEPTAESALLLPPPAELSALMPVHAELERHTLGVTNIYKRFGKKEVVRGVNFTMCNGEVAGLLGPNGAGKTTIFYMIVGFYRPSAGFVSMDDIDITVKPMYRRARQGIAYLPQEASIFRKLTVEKNIWAILESRRDIDKEAKKQRLEALLDEFGIARIRKQFGYTLSGGERRRTEIARALATEPKFLLLDEPFAGIDPIAVYEIKQIIRRLAEKGIGILITDHNVRDTLEITTEAFIIAEGSIVARGGRDEILANEMVREVYLGSEFKM

SEQ ID NO: 93248 - protein, 178 aa, Unknown
  Obtained from environmental sample
  misc_feature (1)..(178): Xaa is any amino acid
LGGLMYIDTIMEEIIKQWRAKRSNDCYRALTPEEIAQLERQGDTASNWDEVRVANTGFDADKVRGCCFDGQVLIGATFNKDRLSYGNVSLKTGLYNSHFRNVFIGDDVAIHNLLFCVNQHISDSVLIFGVNEISSSDKATFGMSVDATHRYPIEVINENGGRAALPYPGMTCTEACLW

SEQ ID NO: 93249 - protein, 47 aa, Unknown
  Obtained from environmental sample
  misc_feature (1)..(47): Xaa is any amino acid
FGVLTTDTVEQAIERAGTKMGNKGWEAAQSLIEMVDLHRALHTKKGK

SEQ ID NO: 93250 - protein, 727 aa, Unknown
  Obtained from environmental sample
  DOMAIN (4)...(152): Peptidase M16 inactive domain
  misc_feature (1)..(727): Xaa is any amino acid
FFLTIIFFKIEGGKECAPVNKTERWNEPKKFTVPCPADGEAKSTIFLSWLCSDVTDVYESIALAALTEILLGHDGSPLTRTLIESGFGEDITPVSGLEGEIRETLFVVGLKGVSGDLQQMSQKIEKLIMDELNRLVTEGIPPQETEAAVLSMEFSQREIRRSGGPFSLVWMRRSLRSWLHGCKPWESLLLLPSMAKIKENLAADNRYFEKLIKKYFLDNPHRALVILEPKKDFLQKQDEELSLRLADTEKNMSKEAREKIIEKAEELEKIQSEADSPQALAAIPHLSRNDLSVETDIIHRRQEDLSGIPALCHDLYTNGITYADLAFPVDILPEDDYPWLPFFSRAIVSVGLPGMDYGEVSSLLARTVGGFNAVLHTGSAAAGTDKLLRTASGLMDLSGRDWLIFRLKCLDEKIAPSLDITLRLIREADFSDLDRITDLVLEMKNEVSSSLAPMGHQYASARAGRGNSLCKKTEEIWQGLSQIEFVHRLAGYDAATIAYKLKYLLEKISGAGLIANMTGLALKTAGEEISQRFARFGAPKPRPALSRAPALLEKAEVFASGSLQIGFAARTMNSAAFDTKEQIAEMVLAHSLSTGALWEDIRMKGGAYGAFAQSDTLDNCVSFATYRDPNPMRSLETFSAILNNSAYGECDEDELVKNIIGCYAKETYPKTNSEKGKMDFSRFLAGMDESYRKRRIERLVSISAADIKAAFSSLGKRPRDGLGNYRG

SEQ ID NO: 93251 - protein, 352 aa, Unknown
  Obtained from environmental sample
  misc_feature (1)..(352): Xaa is any amino acid
YEDVDWNKHQSILTNISGNTNINFHIDHTSGLFNNTVTLSGNGTWREFSYLNEEKYTNPLTGEVDEEAMEKKRKEQYSLTNYATSYAYNGTLKPFYTDPVFAQTNLQYSFRGTLVKSKKFTDGDGPELTPQWGEWVKEDLSKDILGLNSHRITTNLAANIRNKDQSISASAELPPLDGLINANATFRVWITESIFKYSMEKKETDTEWQIKPFYITETLKFENVGTFTHNMTYTPRSDTTTPEEENKITYLNSSLSLWNNSFTTSYTMTWIQKSVFIPDNPDSPYEGGKWEKEGGKELLPKDLKFSYSRSFPASRYFNDRFELSYNINTSLNFDLQEQQVQLSIYSGCYYGR

SEQ ID NO: 93252 - protein, 445 aa, Unknown
  Obtained from environmental sample
  misc_feature (1)..(445): Xaa is any amino acid
LSVLRLESLKLDHNELTKIPKWLGSMTSLKELDLSGNEGLTFIPHSFKRLCNMETFNINETFLRRVPGFIREYKNLKELFIGGLYWDYFGSFLERLIGFFLPPITIPKWIGKLSNLEYLYIGRWVKKIPESLCLLRNLKSLDIICDQIKTLPKSIGGLLSLKELTIEGDLEELPESFTDLVSLEKLELSGTGAEDDSRFKKLPESFGNLKSLRELKLSRLCMEELPDSFGNLLSLERLSICYCHYLKSLPESFGKLLSLYELSIYSSSILSLPESFGKLSALEKLDFSHMEFKTLPESFGDLQNLKYFITYGGNLSFLPESFGNLASLREIDFDNSKILRFPDTLGGLKSLKSFNLEQGQELYEVKPEKDTENDSDDRQKDNNIYLPESFGSISSLEDVCITGHLAALPESFGNLRSLKRLTLRLWVALDYHKKDGGNYMGPSAH

SEQ ID NO: 93253 - protein, 72 aa, Unknown
  Obtained from environmental sample
  misc_feature (1)..(72): Xaa is any amino acid
VNKLKQKLDVCKAIAFATIKEYLAYRSHMMVSLFVGPVYFIVQYFIWTAVYGGSETIRGFEYLQMIRYFGIT

SEQ ID NO: 93254 - protein, 434 aa, Unknown
  Obtained from environmental sample
  DOMAIN (99)...(361): Peptidase M16C associated
  misc_feature (1)..(434): Xaa is any amino acid
MGELRRLAAEGIPKGEIEAALLFIEFSQREIKRSGGPFSLVWVQRSLRAWLHGSRPWESLLLAPSIEKIKQQLAKDSRYFESLIQKYLLENPHRALVTVEPQKDFLPKQEAQLAEKLARTEQSLSDADRQLIIDKTAALEKIQSEGDSPEALASIPHLSRKDLSPEPEIIPRELEDLTGLPALCHDIFTNGISYIDLAFPLDTLSREDYQWIPFFTRAVISVGLPGMDYAEVSSLLARTVGGFNVGTHTGSAAGKGSPVIKTPSGKFNLVGRDWIIYRLKCLDEKTATSLDLALRLISEADFSDLRRIHDLVMEMKNGARSSLAPNGHHYASVRASRYATASTQTDETWNGITQLLFVHRLAEMDTAEIAAKLNNLRDAIASGGLIANLAGSESALKTNGRLVAERFKNFGPPKKPAADKMAPAGKVPGAVPAP

SEQ ID NO: 93255 - protein, 181 aa, Unknown
  Obtained from environmental sample
  misc_feature (1)..(181): Xaa is any amino acid
AELLIHESVHATVYLKGQAQFNEELAEFVGSEGARLYVASRYGAASAEYRNMLADQADNKRYVSFIQGLTRELNELYESGKSREEKLSEKEIIIEAAKERFTAEYEKIFSGEGYRGFLNMPVNNAYLELYRLYYTEDSYIAGLFANSGKTLPEFIAAAKSIPKKGNGREMLAQALQIGSGE

SEQ ID NO: 93256 - protein, 262 aa, Unknown
  Obtained from environmental sample
  DOMAIN (1)...(209): Pyridine nucleotide-disulphide oxidoreductase
  misc_feature (1)..(262): Xaa is any amino acid
DYNCKLLADTTVTAIEAAEKKVVLQDGRKISYDKLLVATGSSPFVPPFEGLDTVTNKHTFMSLDDADGLDAVLAEDKRVLIIGAGLIGLKCAEGILKHVKHITVVDLAPRILSSILDDEGAKLVQGHLESKGIEFRLAANIKKFSFNEAHLESGETIGFDILVLAVGVRPNTALLNGIAKIERGIVVNEKSETTAPDIYAAGDCTQTLDVSSGQNKVMALLPNAYMQGECAGINMTGRQRALRQGDTHERHRVFGTAHHYGG

SEQ ID NO: 93257 - protein, 399 aa, Unknown
  Obtained from environmental sample
  DOMAIN (180)...(373): Calcineurin-like phosphoesterase
  misc_feature (1)..(399): Xaa is any amino acid
MRIEIPELCLVALVGASGSGKSTFAKKHFKATEVLNSDYFRALVSDDESDQSATEAAFDSLYYVAVKRLERGRLTVIDATNVQPFARKKIIELARSHDVLAVAIVLDIPEGLCLERNRLRLDRTIGPHIVKNHTRDLKRSLRALQKEGFRYVHILHGQEEADSVEIVRTKLWNDKRDEAGPFDIIGDIHGCYDELTELLKNLGYAVDREAHTAQSPSGRRAIFLGDFCDRGPANAAVLRLVMNMAESGVALCVPGNHDVKLLRKLRGSDVRLTHGLDLTVKEMEQEPQWFIDKTIQFLDGLVSHYVLDQGKLVVSHAGLSEKFQGRSSGRVREFCLYGDTTGETDEFGLPVRLNWAEEYRGRALVVYGHIPSAEAQSLNNTICIDTGCVFGGKLSAYRY

SEQ ID NO: 93258 - protein, 309 aa, Unknown
  Obtained from environmental sample
  misc_feature (1)..(309): Xaa is any amino acid
VILKTDLPAKNVNQGFLQGSLLKETISEQPESKYKRVAKFLILIGSEQAAEILAELDPEQVNEISKEIALTKIIKPEERDEIFKEFHLLFSKPYSLSGSSRGGIETARRILYAAKGPEKGEALLNKAVPESRENLFSFLEEFSPEQIVMILKTETDQTAALILSRLSSKLSAGTISKLPAKQKAEILKRMAHQREISPEILEQVSAALKEKVRNIAGGANSIEINGMQTLAAILKQGDYSFGDRIINELEKENPEVGKNLKDKLYTLDDVINTIDRSVQEKLSTMTEREIAVLLKSRKQEFCEKILSCV

SEQ ID NO: 93259 - protein, 667 aa, Unknown
  Obtained from environmental sample
  DOMAIN (1)...(170): Peptidase M16 inactive domain
  misc_feature (1)..(667): Xaa is any amino acid
ANCRVFLAGNIPTEKQLSFLNEQFFSVIPGGKACDTIQKTKRWSEPKKFHIPCPADNEKKSTIFLSWLCSDVTDTNENIALAALEVILLGHDGSPLKRTLIESGIGEDISPVSGLEGEIRETLFAAGLKGIDGDVQEKGKLVEELITGELQKLYNEGIPAEEIEAALLSIEFSQREIRRAGGPFSLVWMCRSLRAWLHGCKPWESLLLNPAMAKIKENLASDKRYFESLIKKYFLDNPHRALVILEPKEDFLAQQDAQLAKTLEDTGKNMSKEERRNIIEKSKNMEEKQNETESPEALAVIPHLSRSDLSTEIEKIHRRNEDLQGVPALCHELYTNGITYTDVAFPVDVLSPDDYFWLPFFSKAIVSVGLPGMDYAEMSSLLARTVGGFIAVLHTGSAVKNTPLQLQTASGNFDLSDRDWILFRIKCLDEKIAPSLDLAMRVICEADFSDRRRINDLVLEMKNEINSSLAPMGHIYSSGRAGRFSSRSKNVEEKFSGISQIEFVQQLARYDTGEIIKKLQYIREKIIKAGLIVNVTGNALNVAGTEIAQRFNRFGPPLPRLSVEIGAGTQTTQSPEVFTSKSLQVGFAALALNSAPHDTLEQVAEFVLTHQLSTGALWEDIRMKGGAYGAFINSNSLENCVSFATYRDPNPLRSLDVISFIFKDTTY

SEQ ID NO: 93260 - protein, 687 aa, Unknown
  Obtained from environmental sample
  DOMAIN (233)...(540): Penicillin binding protein transpeptidase domain
  misc_feature (1)..(687): Xaa is any amino acid
SQYFFGHSAREITLAESALLVIQFSSPTHYNPLNNPNQAMNRQRVVLDKMIELGYTTSEEAEASFNDYWDNYDYTRASVSAYYNRVDAAPWFSEYVRRELDQRMYGSMDYYRDGYTVNTTLNMKHQEAANKYMEEGIKKANVEYARSSGTRLVDAERTWLPVIDLLSLYFNLDQIHSTSDAQNEQKALSRYTKTINPVLDMAALAFGIPEIRTLTGVGFANLKTSTEQNVVEGTLISIENDTGYITAIVGGSKYDESNQLIRATQGNLQPGSAFKPLYYSAAIDSRKFTPSTVINDLPIVFYNEDGTPYMPLNFLGRWNGSVLVFDALAQSMNVASIRVLDGIGFDAAIDRASSLLGYTDQDDIRRRFPRVYPLGLGIISTSPLRMARAFSIFANMGREVTPIAIRTIEDRNGKIILDIEREVRQEARRKGNAIQVVSPQNAYVMTSMLRKTVERLGGTLYNPSGWGSKFTFKDANGKTFKMPMAGKTGTPQNWSDAWTIGYSPYYTTAIWFGFDKPGNSLGLTLTGSTLAGPVWADYMREIHQGLPYRDFPRPATGLIDATVCIKSGLLKTPSCSEGVTLTFLEGTQPVYFCEECGSTRGFDAFRYIEINPMFYDAFDFVNDLKMPVLDEAFLREIEEDIRRSQASLTVSRNTDPDTLPALNLPTLNLDLIENSPQPVPEPNMKTI

SEQ ID NO: 93261 - protein, 279 aa, Unknown
  Obtained from environmental sample
  DOMAIN (59)...(279): Glycosyl hydrolase family 26
  misc_feature (1)..(279): Xaa is any amino acid
MGKDELGMRNKPWLENQRMKFKKLFLIPHSSFLILFLLFLVSCPSQPDPTEPPPPPKDVTDGMSPNAKRLMNYLTDMYGEKIISGQMDTAWTTNLSMDMIARVYADTGKYPALKGFDFIDLSSSWAGYGQDQIDEAIEWWEGKNRMNGAAPAQKLLPDKPDIHGIVTFCWHWKVKNSTSSVIDFYTRNTDFRIPMSGNKLDTESTAFKQTIKPDLDKAAALLQQLKDKDIPVLWRPLHEAAGGWFWWGASGAKPCIALWEYMYNYLTNDKKLDNLIWVW

SEQ ID NO: 93262 - protein, 189 aa, Unknown
  Obtained from environmental sample
  misc_feature (1)..(189): Xaa is any amino acid
MDKLLLMILAVSFSACSSTHVRSGQEQNIRMQNFMAKLRESKTVSVVALGGSITTGHQAQPPDTAGWAGLVNVWLKEKARESGCAVEFHNSGASGTDSAFASMRAGDHALAYNPDLVIVEYAVNDQWLNSRVRRRSFEGLIRRLLDNSPKRAVIIIALNEKGGPDKSTFREQLEIGRHYNIPVLAWADW

SEQ ID NO: 93263 - protein, 320 aa, Unknown
  Obtained from environmental sample
  DOMAIN (63)...(177): PCRF domain
  misc_feature (1)..(320): Xaa is any amino acid
MNERLNSLLKRYEELNLLIQDPQLVKDQNRYRETMKEHSRLSEIAEIQGSIEGLEKQIIGAKTLVQEEKDQEMKELAREELKDLETKLTENKDKLKFLLIPKDPLDEKNIIMEIRAGTGGEEAALFASDLYRMYLRFAESKGWKFEIMNSNDTELGGIKEIVFSITGNNVYENMRYESGVHRVQRVPATEASGRIHTSAVTVAVLPEADETEIDIKTEDLRIDVMRAGGPGGQCVNTTDSAVRITHLPTGVTVHCQDEKSQIKNKAKAMRILRARIYEMEEAKAAAQRAEARKTQVGSGDRSQRIRTYNFPQNRLTDHRI

SEQ ID NO: 93264 - protein, 69 aa, Unknown
  Obtained from environmental sample
  misc_feature (1)..(69): Xaa is any amino acid
MWVVDGRNKANVAITIGHSIINRTSTVDVGSLMLHYGGGGHRKVGTCQVDYGEADKVINDILEKINQQS

SEQ ID NO: 93265 - protein, 134 aa, Unknown
  Obtained from environmental sample
  misc_feature (1)..(134): Xaa is any amino acid
MADARLAQAGGGGGAAKSRFGNVNDLFIGVGVIAVVVMLIIPLIGWMLDILMALNLIFSLLVLLTVLYSQKPTEFSLFPTVLLVTTVFGLALNVSSTRRILTKGAHFDGELIKFFSDFVVGGNSGNNIGIVVGF

SEQ ID NO: 93266 - protein, 233 aa, Unknown
  Obtained from environmental sample
  DOMAIN (1)...(198): FlhB HrpN YscU SpaS Family
  misc_feature (1)..(233): Xaa is any amino acid
MLIIGGVAYFLIKSDLNKLVNLHQAGVWLGLTTVASLAIRLIIICAILLLLLSIPDILFQRCFFREKNKMSRQEMKEEMKMYEGDPQIRNRIRSRFRELLKQNIAEAVPRADVVITNPTHYAVVLEYHLETMSGNGPMVTAKGADEAAARIRKLAQENGVPMVENKLLARNLYKEVEVGDYVPQAYLTVVATILVKVMHINELRRKAKAQEAAQAAQAAQAAAEAAEIYGAGA

SEQ ID NO: 93267 - protein, 416 aa, Unknown
  Obtained from environmental sample
  DOMAIN (299)...(416): GGDEF domain
  misc_feature (1)..(416): Xaa is any amino acid
MLSGEKYRWDRVVGGTAPIDDSLRELPITSAIRRWVPIMWEDSCISLKRSEFKEDEAEFLSPRGVMSILIVPVLTEGELWGVVTCHDNTKERDFDKDCTAMLRSTARLCVSTIIRAEKTKSVNLAMEALERREKMSDILNKVSIIFLSESKKIAEDTMAEGVRLIADIAEIDRLILCRNHIAADKLHASEVYRWDRGSGGSTDVTGIFVDVPYDLLIPDWEEYLSKGKHLNGPSKTMSESASLALLSFKVLSAAVIPIHVNNVFWGFALFADMKSERYFKDDIIEMLRSASFLFANAFIRAEVDYDALTGIHNRRFFDENMKRVISSLSRSGSLLSMLMIDIDFFKRYNDTYGHLEGDKSLKIVAETLSKSITRSDDFVVRYGGEEFAIVLPNTDENGACIIAEKLLANIMECNIP

SEQ ID NO: 93268 - protein, 292 aa, Unknown
  Obtained from environmental sample
  DOMAIN (1)...(292): Aldehyde oxidase and xanthine dehydrogenase, molybdopterin binding domain
  misc_feature (1)..(292): Xaa is any amino acid
ARVRGYGSPQAYTASEQIVDELAEKAGIDPFEFRYRNVYRPGDTTGTGNTFDVFPMVQLMDMMRPKYLEALERAKKESKPGKKRGVGVTCGGYNVTGNPDDYAEVHLELNPDGTVTNYNAWEDQGQGGDVGMLVLTHEALKPLGLTPEQIIIYAGDTGRCPNTGPAAASRSHFMAGNAVIDAANQMMDAMRKEDGTYRTYDEMTAEGLPTKFEGAYSTAGLCNSLSPNTGQGNPTPAYNFAVYLAEVEVDMQTGKTEVLKMTVNADVGVIGSRQAVEGQAYGGVAQSIGFAL

SEQ ID NO: 93269 - protein, 220 aa, Unknown
  Obtained from environmental sample
  DOMAIN (125)...(220): tRNA synthetases class II (D, K and N)
  misc_feature (1)..(220): Xaa is any amino acid
MEAMKRTIDCGCLRKADAGRTVILNGWVHRKRDHGGIFFINMRDRYGITQVTVDTTGSQAGLADICAELRNEFCIAIEGTVRSRPDDMVNPAMATGEIEVLASKITILNRCEVLPFQIDDETNAGEDLRLKYRYLDLRSSAMQDRIRLRSEVTFAVREWMTANGFYEIETPTFIRSTPEGARDYLVPSRLYPGKFYALPQSPQLYKQLLMVSGLTNISNC

SEQ ID NO: 93270 - protein, 156 aa, Unknown
  Obtained from environmental sample
  DOMAIN (38)...(152): Response regulator receiver domain
  misc_feature (1)..(156): Xaa is any amino acid
IKAAVTLVDEMSAENSKNFDQLKEESEKFKVNSADEKKKIIVIDDEATVLTMTKSVLSNIYDVTAVNSGQEALKLFFQGYTPHLVLLDLTMPEMGGWDTFIRIRDLTKLHKIPIAIYTSSDDAKNKTKAQEIGAVDYIQKPCKKDQLLNRIERILR

SEQ ID NO: 93271 - protein, 395 aa, Unknown
  Obtained from environmental sample
  DOMAIN (57)...(370): Amidohydrolase family
  misc_feature (1)..(395): Xaa is any amino acid
MNPICLHNGTVMTSFAAMEHCAVFIEDGRISDVFSEKRFEQKRFDSNTQIIDVNEAIIAPGLIDTHIHGFGGRGTEDSSAESIIEMSRLLAQYGVTAFNPTLYPMEKERMLEAVKAAVSAIGKEDGAQIMGLHLEGPFISPERLGVMKAGTVQSVDLAFMEQLWKAAEGRIVNMTVAPELKGMRELALFCLKKGIVLQAGHTEAEYENMVEGMQAGILHSTHLFNAMSSMDHRNPNAVGAILIHSEMSCEIIADNFHIHPDLLQLLLRDKPIEKIVLITDGLKPTEQRESPFFANGEEVVFHDGAFHRVSDDVIAGSGLTMIRGIQNLVSSGFSLVDAVKTATINPAQVMRYARQGALIPGKLADITVFDRDFKIRLVMIGGKIIEGKENADSYS

SEQ ID NO: 93272 - protein, 293 aa, Unknown
  Obtained from environmental sample
  DOMAIN (33)...(99): His Kinase A (phosphoacceptor) domain
  misc_feature (1)..(293): Xaa is any amino acid
YIVAAYARDLREHKRMLQEINDAAEEAKKANQAKSDFLARMSHEIRTPMNAIIGMTELALRDDNLTASAREHILTVKQAGSNLLSIINDILDLSKIESGKLEILPVNYSFSSLINDVISIIRMRIIDTPIRFAVKIDSAIPAELIGDETRIRQILINVLGNAVKYTEKGFVSLSVYGEFDEDSTVNLVIEISDSGIGIKQEDIKNLFDVFAQFDSLRNKRIEGVGLGLAITQNLVKMMGGSIGVTSEYGIGSTFTITLPQEYRYQEPLATVRDPQEKNVLLIYERRELYADSI

SEQ ID NO: 93273 - protein, 338 aa, Unknown
  Obtained from environmental sample
  DOMAIN (14)...(338): Protein of unknown function (DUF1703)
  misc_feature (1)..(338): Xaa is any amino acid
TQTRTARGIWGRRMIDVNKKTLPIGESFFDSMIENGYYYVDKTLLIRDILDRKAKVTICTRPRRFGKTLNQTMLKNFFEDTTQTDGKDTRAQFRNLKIEESGERYMEHQGKYPVIFLSFKEAESKDFHETCGVFKEMLSEEFRSHRYVTEKIGDAVDLKKFESISSGDGDISPYKGSLKFLSKCLEDYHGRKTIILIDEYDVPLQKSWVYGYYEDMIGFIRPLLSSALKNNPHLQLAVMTGCLRVSKESIFTGLNNLAVISIFSSDFSEHFGFTQNEVDAMLSYYELSGKTQVVRDWYNGYMFGDTEIYNPWSCLNVVQSWRTNINERPKTYWANTSS

SEQ ID NO: 93274 - protein, 269 aa, Unknown
  Obtained from environmental sample
  misc_feature (1)..(269): Xaa is any amino acid
VMPKKILFDFITLQDNIINGGMLYTQRILYEILNNEVIIYGLYDGDLIINERTKAIAEKHNITLLNIRDEKITETINGLYIDTFFIGIAQRYNFFNLCGLKCKIIIVCHDLGDKSLEYFKIPQSEPLKIFVEKYTIKRKKSKIKRILTFFLYPLILFRRSVLRYIGRKKVPDYTNLIKLIQLPNVFVVTDSEYSKRSIQYFLGSSKNEINVFYAPISNEFFGKREWVDKIRIDGKKYFLLVSVDRCYKNVILFLEQWEKFCLLTNNEYY

SEQ ID NO: 93275 - protein, 88 aa, Unknown
  Obtained from environmental sample
  DOMAIN (1)...(84): PTS HPr component phosphorylation site
  misc_feature (1)..(88): Xaa is any amino acid
MIEKNVTVINKLGIHARPAGSIVRTATGFKSKVELVKDGNAADAKSIMNVMMLAASKGTVISVRADGEDEEAAVDAVISLFENKFNEE

SEQ ID NO: 93276 - protein, 224 aa, Unknown
  Obtained from environmental sample
  DOMAIN (7)...(190): KR domain
  misc_feature (1)..(224): Xaa is any amino acid
LNTEKKVLVTGASKGIGRAIALAAAEAGYQVIAHYNKGKEATESLQNEILQKSGNVELIQFDVSNREECREKLDQWTEKNGALWGIICNAGITADDSFPAMSGENWDAVLRTDLDSFYNVLHPLTMPLCRKKRGRIITISSVSGIMGNRGQVNYSAAKAGIIGATKALAVELASRSITVNCIAPGIIETEMIRNVPMDIVLPSIPMGRTGKPEEVAALAVFLLS

SEQ ID NO: 93277 - protein, 107 aa, Unknown
  Obtained from environmental sample
  DOMAIN (13)...(48): MerR family regulatory protein
  misc_feature (1)..(107): Xaa is any amino acid
MNNKEILSDEILTLDEVAKYLKVSDRTVYEWAQRGEIPAGKIGAVWRFKKVELEQWVNARLLLSKGVSRSDSIDPQAIISPERVVFLDYSSKREALLSLVDNISTAP

SEQ ID NO: 93278 - protein, 189 aa, Unknown
  Obtained from environmental sample
  DOMAIN (42)...(150): Peptidase family M23
  misc_feature (1)..(189): Xaa is any amino acid
VKKHPEFFVLLILMLGFPLFSIDWPSASGAIRRNFGWNDQGLPSLGIAFDTDEQVKAADTGEIFFSRREGDIASRLPSPFGAWTALDHGDGIVSIYARMDDKIQNAADGAAAGRVEKGSVLGEAGISGWTNRKGFYFQLFDRKERRWLNPALIITPPEDQRPPEVMSVRLRNEQGQLINPYQTYNISQG

SEQ ID NO: 93279 - protein, 319 aa, Unknown
  Obtained from environmental sample
  DOMAIN (5)...(245): 3-beta hydroxysteroid dehydrogenase/isomerase family
  misc_feature (1)..(319): Xaa is any amino acid
VCNLDKLTYAGNPANLAGLEKSVPGRYRFVRGDIGDASLVAALFAGQSFDAVINFAAESHVDRSIVDSAPFIATNVAGVQTLLSAARAAGIPRFVQISTDEVYGSLGPDDAAFTENAPLAPNSPYAASKAGADLLVRAFHETYGMHTVITRCSNNYGPYQFPEKLIPFMLRRAARNESLPVYGDGGNIRDWIHVEDHCLGVYLALTKGRAGAIYNFGGHAERTNIDVVHTLLKILGKSVDLIRFVQDRPGHDRRYAMNYSLAEQELGYAPHWDFPSGLAATAEWYAQNAAWLDGVESGAYRGFIQAWYGDRLKDGRVAL

SEQ ID NO: 93280 - protein, 57 aa, Unknown
  Obtained from environmental sample
  misc_feature (1)..(57): Xaa is any amino acid
MDFPLHKAIGGARAGFADAVGVALGLYKVMIPIIIVVKVLVELDLIRYLAMPLAPLM

SEQ ID NO: 93281 - protein, 474 aa, Unknown
  Obtained from environmental sample
  DOMAIN (1)...(195): Pyruvate phosphate dikinase, PEP/pyruvate binding domain
  misc_feature (1)..(474): Xaa is any amino acid
RMLGFHGPSNELHHEKEEPLPKKKTAEEYMDYYAKYFPKGFFDNAETHLMIALSEISRLLKMDEQNNEDTAIVIQPMVYGNYSKESCSGYLFTRNVVTGEKKLQGSYFTGKFNEIGETGHEINKIDASYLKQLEKIAGVLEDKFKEIRQVRFTIENGKLWLIEQRLVDQKSTQSDLKLLLDLQKRKVVDAAYVVKAIDPLRLNEILHPVINPASVKEFKSWKGGIAGAPGAAIGRVYFSTAALLDAKKMAIQQGEKVNFILCLESSFAEDVKAIEESVGVLTAEGGYSAHASVVARQYGKVSLVASELKIKGTKAILGELSFSEGSVITIDVPFYGESKAYLGAAELIEPDPKGSGLLDFIDITKSFVKEFHVRCNADTQRDAKLALDFGAEGVGLCRTEHMFFKADRINVFRDMLMSDDKKERQKVLNKLQVMQRDDFYSIMKVMAGKEVTIRLLDSPLHEFMPHSADEVQGY

SEQ ID NO: 93282 - protein, 1197 aa, Unknown
  Obtained from environmental sample
  DOMAIN (766)...(852): Alpha-2-macroglobulin family
  misc_feature (1)..(1197): Xaa is any amino acid
MAWEYETRSQWNNRIYQSSSWLTVQVTDIGITTRYAYNKVLVWATMLSTGAPVANARVELLEGNTVVRQGTSNAQGLALFEFRDGEFVSRFTDLEPYYGLSDWSKGFRVRVIQDGGAMAGGDQAEFVPNNSHNIWRFPVQASVSPFEAEKDRALVFMFTDRGLYRPGETVTFRGIDRNLSRGRFFPYEGNYSIEVSTGGRNAPVIASLGGKTTESGGSHGSFTIPVNLDPGRYVMRYKRLEGGGQDYAITFMVANFERLRIEASLKFPDLTYYQGEKISGRLSASYLSGGGLSGAPYTYYWSREPAGFNPGGNWRYWRFGPETYDGRYFAASGEGSLGPDGSADIAHNVGVDGVEGVTYRYRLEASVQDAARQEISVRSAAIVHPASFYIGSRLDTGTLKAVDSASEKSSSYFLSSGSPATVSWALLTPEGTPFEQSSDNRDAPEINFKLIRYEWKQSRQAGIGGRINLYWERVEETIMERSFRPGRREFSGVIPFTPTTSGEYEVRLSSKDSLGRSAQTRYSFYVTGSGWALWGRGDSDSITLRPDKSSYAPGETAKLLVQSPLPKGKYLLTLEREGILEEKIIELDGSALTIDVPIKESYIPIVYAAIASYTVRSGPPTHTYYEPDLDKPKGLFGLTSLFVDNENRHYTIDIEASKSVYRPAEQAEVTLKVSQNGKPAPGVEMTFMAVDRGVVDLIDYHVPDPLAFFYNPDNFPLGVRGADSRSLLIDPVTYSLSDLQGGDEEDNSKMEERKDFRPTAVFEPYLVTGADGTVKVKFNLPDSLTTYRCTAVASGLSDFGIAEKDLRVSAPLTAVAALPRKLRWRDTGTVSLILTNLENTAVEAKVLAETETINGGVWDTVIEIDGVKEKTVKINPGATAEVSFMAAALGAGESRIIFTLQSPSVNERIIKTLTVDRPVLYETVTAIGSLASDNPFIEEGVVLPSLVPEGTGSLSVLLSSSRLALLKEAVRYLLDYPYGCLEQKTAQLLPLVAFADRLETFELDSPVKNPKKVIEDELALLAKSQLSEGSFPYWPGGKYGDRYVTLRVAHIIFLARQKGYTVPDAFNTQALTKYISENDFSSTVFKEDPFLKGYSLWVRAMYGARIGAEISAFMRRGDELGISGWGFAGLAAMELGLNDLAISARDRVRRFIRPGTRTLDLTDTYERRGNIWGYDADRYAIATMLYQALSPADDMTT

SEQ ID NO: 93283 - protein, 450 aa, Unknown
  Obtained from environmental sample
  DOMAIN (3)...(358): Pyruvate phosphate dikinase, PEP/pyruvate binding domain
  misc_feature (1)..(450): Xaa is any amino acid
MDNRIHFFSQKDVIPSKIQSEKLGIRGRQANEFAELGFPILPGFILDTDIASDIKPDDIKNDVQAMLDKCAAIVGKKFGDSENPLLLKVVISSNLAITTYPTLHNFGLAKPTIDGFAKWVGKDFAAHEVIFLIRGMLKIEERIKELEAKTVEMEEISENLKIVDRMLGIQGPSNELGKKEEPIPINKSPIEYMNEYARFFPMGFFGSAEQQLLVTLSEISRMFRMDDQNDTDTAVMIAPMVYGNYGKDSCAGDFNSRNVVTGEKALQGNFNRQRFNESGASGQPIDKIDPAHLKELQRIAWTLEDKFKEIRQIRFTVENGKLWLIEQRLVDQKSTQADIRLLMDLASRKIIDPSQVIKSIDPLRLNEILHPVIDPASIKELKGWKGGIAGAPGAAIGRAYFSTDGLLDALKTAQQKGEDTRFILVLESSFAEDVKGIEVSAGVLPRKAAI

SEQ ID NO: 93284 - protein, 265 aa, Unknown
  Obtained from environmental sample
  misc_feature (1)..(265): Xaa is any amino acid
ITSSTKSNTYGWLGAFPQLRKWVGDRVVKDIAEFAYQIVNEKYESTLGVDRTDIEDDNLGQYRVLAREMADEFERFMNRNVAALITGGFTNICYDGQKFFDVAHPVYPNTDGTGEATEVSNIIGTGNGSPWALVSLLGSLKPFIAQQRSQPEFDEITDTKNDSVFMTDKYMYGIRYRGSFGYGLWQQAIGSKLALSEANYQAARGKIQSLKRDGGDPLGIVPTHLVVGPSNEAAARKIVEAQFLANGASNIYYRTAELVVIPHLA

SEQ ID NO: 93285 - protein, 126 aa, Unknown
  Obtained from environmental sample
  misc_feature (1)..(126): Xaa is any amino acid
METTGSLFLSLNIEGAEIPKRVQIVPSGATVKGRDGREWKKPDPKLLALNSNKNLQALVIDENHSTDLSAPKGGPSPAFGWMRNLCADETGAIWADVEWTELGLNALSKKEYRFISPVFVHNKEGE

SEQ ID NO: 93286 - protein, 390 aa, Unknown
  Obtained from environmental sample
  DOMAIN (5)...(152): Resolvase, N terminal domain
  misc_feature (1)..(390): Xaa is any amino acid
MDGKLGIYVRTSIEKENMSIPQQKKLGIEFSKKHSFEYIIYEDIGKSGYNDDIENREGLQNLIYDIEKKIINKIWISENSRLSRNESVSIFLSRIFQKYNIIIYENGKEFDLNNPQSKMINSILSTISQYERTLIVNRTTRGFHFHINSGNRSYSEFYGYKKIGTDEKGYSKWKPVNSELEQVKYCFEKYLQGNSVKSIIQDITKNIPNGTIIHKWIRILRHFEYTGNSFNTEGLKIYNQFKKCQLESLSELNDNKYYVSSNCYPIKIVSVENWIKTVEKLQGYKKIYKDRMRRTDKEILTGIINCPICNLRYYFCKDKKYSYLKHSPNSKCHQSPKSFNTKNMNDLISVFYFYYFLVYDDTKILIEENQKIIKLNLSEIKDKISSVSTD

SEQ ID NO: 93287 - protein, 306 aa, Unknown
  Obtained from environmental sample
  DOMAIN (32)...(305): Serine hydroxymethyltransferase
  misc_feature (1)..(306): Xaa is any amino acid
MSNNPVAAYLAAVSPDKINTNLLAYLCNLTEISKVTPEIASSIVKELENQRKRVKLIASENYCSIAVQLAMGNLLTDKYAEGVPSHRFYAGNENVDAIEALAAQEACNLFGAQYANVQPHCGADANLLAYWAILSTRVEKSALEKWNETNLYNLTEAQWKELKSSLGNQRLLGLDYYSGGHLTHGYRNNISGRMFDVHGYSVSEKDGLLDYDLIEKQALELRPLIFLAGYSAYPRKINFKRMREIADKAGAVFMVDMAHFAGLVAGKVFTGEFDPMPWAHIVTSTTHKTLRGPRAGFVLSTSEFAE

SEQ ID NO: 93288 - protein, 463 aa, Unknown
  Obtained from environmental sample
  DOMAIN (134)...(445): Poxvirus D5 protein-like
  misc_feature (1)..(463): Xaa is any amino acid
MREAIGDESVFLRIAEFKNGLIQFTDSTNAMRLIKEHGRDIRYNVAWKKWVVWNGKYWEIDEGSVLVHEKGLEMVRNIYDELLKTADYRERIDIEKAAMMSESVRRRKAFVEAATWISALRIRTDELDSNPWLLNVKNGTVDILSGEFREHRQEDMITKIVNVDYDPNADCPMWKKFVREIMDYKADIIKFVQTAAGWSLSGDISEQTMFILYGTGANGKSTFLNTIMYILGDYATATPTETFMKKTGDNFSNDVARLRGTRFVTTTEVEQGRRLSEPLIKKITGNDEMTARFLYGEFFNFTPTFKIYMATNHKPVIKGTDHGIWRRIMLIPFTTTIPKEKQDKSLEEKLKNEASGILNWLLEGTLRWRREGLAAPAVILNATDEYRGEMDVIGNFINERCIKKPDVTIRIRELYKAYSDWCDDNKEHAVSERFFTMRLKEMGFVQCRTAEARYWSGIGLPDK

SEQ ID NO: 93289 - protein, 286 aa, Unknown
  Obtained from environmental sample
  misc_feature (1)..(286): Xaa is any amino acid
MAEIDVGNFNDTTPAAPAGRVNVQWQRDGSNFSANVPAQSAPDLSGVVPTTRTISTTAPLTGGGDLSANRTLAISAATSAGPVWDGSPGSVVYAADANKTSRDKAATPAGVAAQIVAALADYTPGGGGSGGSFSRLFQEISSSSTWTPTSDGIYLFIAIGGGGGGGAGGPTPATGTTVGGGGGGGAAVGMVITALWITTSDIVSITIGAGGTGARTSAGVETPATAGGNTIMSFTWLSYIATAYGGGKGDTGRGPTATHDGMGGNGGMGNGGANGQNGQAGIVYTP

SEQ ID NO: 93290 - protein, 294 aa, Unknown
  Obtained from environmental sample
  DOMAIN (1)...(294): Serine hydroxymethyltransferase
  misc_feature (1)..(294): Xaa is any amino acid
MAVQLAMGNLLTDKYAEGFPGHRFYAGNENVDAVEALAQQEACKLFGAEYANVQPHCGADANLLAYWAILQTRVEKPLIEKFNAESGIQNYNLYKLSDSQWKELKTAFGSQRMLGLDYYSGGHLTHGYRYNLSGKLFDMYSYSVSRETGLLDYDQLEKQALEVRPLILLAGYSAYPRKINFKRMREIADKAGAVFMVDMAHFAGLVAGKVFTGEYDPVPWAHIVTSTTHKTLRGPRAGMVLSKAEFAEALDHGCPLTMGGPLPHVIAAKTVSFREASTPEFKHYAQRIVENCRD

SEQ ID NO: 93291 - protein, 271 aa, Unknown
  Obtained from environmental sample
  DOMAIN (227)...(259): Ankyrin repeat
  misc_feature (1)..(271): Xaa is any amino acid
LVIGYNVKINDISPVFDLIGLKILILYSPKRIAPEQIKKLKNLERLESSFILDKNLLNILSNLKHLKRIKVLYPAVKDVSPLYKIPGFEKIEYHWDLNYVMEYYSIVEDYFDPPVKAIDVIKQLLEAGADPNKKSEERTYFGRGGATNYYLETEITPLMRSRDPELTKLLIKYGAKVNEVDEYGRTALMISSFFDGVEESYEIKEGKNIIGKILIDNGADKNIKSYTGQTALHFAVIGYNIASIRMLIENGANVNIKNNKGLTPLMATMIY

SEQ ID NO: 93292 - protein, 607 aa, Unknown
  Obtained from environmental sample
  DOMAIN (436)...(601): GGDEF domain
  misc_feature (1)..(607): Xaa is any amino acid
MLAVGISIGTVTTQMRVSRKATHDRYASQAEIAVRLAASFVSAKEIDFYLKTLEEDDNYHKLLDILKSIQTMSGMTYIFVTQITDDGEFFVFDTDPDDDTHMELGSFSYWVESGIDSTLQPVLLVGKKPTPYISYTEWGFFLTVREPIYRYDGTTAGYAGANFYMGTVLADQANSLRTNIIVTIFVFVISLAVYFLIVYKLVAAPLRTLTFNVGRLSAGEVLPLVLASRENEFSLLEETFSDMSKRNAHSKKITDVLTRTAIIFLSQHERAFDDTMTHGLKLFCDALNLDSVSVWRNSHRQNELHMSQIYRWDRESGGTTKPLPGMEDVAYTKFAPRWEWLLAEGKYVNGPTRLLPEAAKLKPFGIVSVFVEPLFINNTFWGFTLFGNHRDERYFDDDSIDVMRSAAHLCINMVQRTEMENAILNAEKNTRKLKIEADKAYYDPLTGIYNRRFFDANMKRLINSLSRSDSLLSMLMIDIDFFKRYNDTYGHVEGDKCLKIIVQTLFKSITRADDFVARYGGEEFVVVLPNTGEQGAQYVANKLLVNIRNCNIPHVKNDAADYVTISVGVTTGKVIHTQNADDFVKKADELLYKSKQGGRDRYSFETL

SEQ ID NO: 93293 - protein, 77 aa, Unknown
  Obtained from environmental sample
  misc_feature (1)..(77): Xaa is any amino acid
MATNLEVTDEAVRFDFLVGYDTRKTLEGIVPVVFTSPVSVNTERPLEVLGKIILSDDKMKIMLEGEGIHQSGRLENK

SEQ ID NO: 93294 - protein, 378 aa, Unknown
  Obtained from environmental sample
  DOMAIN (27)...(296): Rad51
  misc_feature (1)..(378): Xaa is any amino acid
MAKSNDSEKSRVNPNATSEEKAKALEAARLQIEKQFGAGSLIKLGTHDAASGIEVVPSGSILLDEALGIGGYPRGRIIEIFGPESSGKTTLALHAIAEAQKLGGNAAFIDAEHALDPVYAKNLGVNIDDLWVSQPDNGEQAMEITESLVRSGAVDVIVVDSVAALTPQSEIEGEMGDAQMGAQARLMSQALRKLTATIGKSRTILIFINQIRMKIGVFFGNPETTTGGNALKFYSSLRLEVRKTETIEVSKDADAIGNRVRVKVVKNKVAPPFRKTEIELMFGKGISATGSLLDCAVKYDIIKKSGAWYSYNDEKIGQGRDNTREYLEQRPDFAKELELKLRKIIFPDREFPQFKTEKVKAAKEPKPAAEPKQDGGVQ

SEQ ID NO: 93295 - protein, 503 aa, Unknown
  Obtained from environmental sample
  DOMAIN (47)...(113): His Kinase A (phosphoacceptor) domain
  misc_feature (1)..(503): Xaa is any amino acid
NPITKRTYRNTDRYIEWQNGRIVHIQYSVDVTELIEAKELAEQRNRSKNQFLSRMSHEVRTPMNAILGITEIQMEKETLSSDTKEAFGEIYNSGYLLLSIINDILDLSKIEAGKLELTPSVYDVPSLINDTVHLNIVRYDSKPIEFILNIDENIPSKLYGDELRIKQILNNLLSNAFKYTDRGEISFSVAVKYAPQEARDITLMFSVSDTGQGMNGEQLDKLFDEYTRFNTEANRKTPGTGLGMNITRHLVDLMGGEISVESEAGKGSTFTVRLPQGIVDAKVLGRETAESLMQFRVDKAERNKKGPRIVREYMPYGRVLIVDDVQTNLYVARGLLAPYGLSVETATSGFEAVDKIKSGATFDIIFMDHYMPKMDGIEATKIIRSLGYTHPIVALTANALAGQAEMFMENGFDGFISKPIDIRQLNASLNKLVRDRYPSEVVEASRQQLLKINMAKSVAEVKQSDSDSELAAIFARDAEKALAKLKSIHAYAYRRTDDIRLYV

SEQ ID NO: 93296 - protein, 355 aa, Unknown
  Obtained from environmental sample
  misc_feature (1)..(355): Xaa is any amino acid
MNLKARLKRYHDTGKSIRPPETNSTAIRNRETGNSSALWPGWTPVGFDWILKRERICDLAFPLGSGFPKSLATLVPDLFRFGRIPRPEELLFFDLETTGLSGGAGTIAFLAAFGRFTASKNGNASLAVTQYLLLDYPGEADFIEMAVAEFSPAGDSLPLVASYNGKCFDSQIIKNRCLLNRIHPPEYYQADLLHPSRRLWKNLLSDCSQATIEVQILGLDRTGDISGAMAPEIWFSFLRDGDDAASTAALLSVCDHNARDVAGLATLFLALGKIASDPFKSRDIFRFDDKALALFWWKAIKKHPLFFDGDESYVKTAFSLLETAAKDGSPQAAIVLAKDAEWRLRDIKLALYYTN

SEQ ID NO: 93297 - protein, 526 aa, Unknown
  Obtained from environmental sample
  DOMAIN (1)...(181): ATPase family associated with various cellular activities (AAA)
  misc_feature (1)..(526): Xaa is any amino acid
TTVARKLGALFQAMELLPSDHIIETDRTGLVAGYVGQTAPMVKEMCDKAMGGILFIDEAYTLSSGGGGDFGKEAIDALLKRMEDDRGNFVVIAAGYKNEMQNFIQSNPGLKSRFTHELELEDYNPDELNAIFMSMAKDRGNKLSKDAEIAAKEAIADIHRKKGKDFANGRTMRNLLDDTVRKMAARTAKLPEAQRTVEALSTITAEDIPYEKPKIKTTEEILAELDGMIGLAKVKTAVRQLIETISMQKEREEKGGAAAKIQAIHLCFYGNPGTGKTTVARKLGALFQTMGLLPTDNVLEVTRADMVAGYVGQTAPLVNKVCDKALNGILFIDEAYDLCRDSYDSYGNEAVTTLLKRMEDDRGKFVVITAGYRKEMDDFLQSNSGFNSRFTHFLELDDYNPDELFAIFASMAKSNGYKLSAGGEKRAKEVIAEIHRTRGKDFANGRSMRNLLDDTIRRMPERLASLTQAERTVEALSTITELDFHSEKKEERTVNEILAELDAMIGMTDIKRTVREIANKIQIQKE

SEQ ID NO: 93298 - protein, 370 aa, Unknown
  Obtained from environmental sample
  DOMAIN (22)...(112): OB-fold nucleic acid binding domain
  misc_feature (1)..(370): Xaa is any amino acid
MENFKRTVNCGELRKAAAGKTVILNGWVHRKRDHGGIFFINLRDRYGVTQVTVDTTGSQAGLAAGMAAVCADLRNEFCVAVEGTVRTRPDDMVNPSMATGEIEVLASNIVILSRCEVLPFQIDEESNAGEDLRLKYRYLDLRSTAMQTRLRLRSEVAYAVREWMTANGFYEIETPTFIRSTPEGARDYLVPSRLYPGKFYALPQSPQLYKQLLMVSGFDKYFQIARCYRDEDARGDRQPEFTQIDIEMSFVGRDDILAVTEGMLVHVFKKTLGVELPAQFPRLSYEDAMTQYGTDKPDLRFEMLLQDFSPYVEAGGFQAFKDALSQQTGAVKALVVKGQAGYSRTQIEELEAHAKIYKAKGMAWMKVAAN

SEQ ID NO: 93299 - protein, 225 aa, Unknown
  Obtained from environmental sample
  DOMAIN (8)...(225): Tryptophan synthase alpha chain
  misc_feature (1)..(225): Xaa is any amino acid
MNRYEEAFKKAKARRESALIPFAVAGDPGPDVFLEVIKAYVDGGADVLEIGYPFSDPVADGPVNQRASQRAIKAGLNHPLFFSLVKEIRSFTDIPIGLLTYANTIHHLGAETFCKKAERAGIDSILTADMPPEESINLDAQMHKHGIGRVYIVSELTPDDRMRYIGNHVDSFVYVVSRPGVTGADTALSASVKATLKRLRCATNKPAAVGFGIATPSHVREVTEA

SEQ ID NO: 93300 - protein, 467 aa, Unknown
  Obtained from environmental sample
  misc_feature (1)..(467): Xaa is any amino acid
MSDRVIWDRLIRETPVYSNDMIRVGDNSEIDLHVGDNKLTINENTLLRLSHDKDTGEFRIDLTSGSIGLVTSPEGGGVVLNIMGKQMKANPGTALNAVSGNDGVALQVSKGSAIIAEGGETREIGAGTAVTMDSEGAIRSEPAVFVIQPKPNALYRKSADETLNIIFSWNRINFQPDEKLRLEIAEDQNFIRSVRTLNGLNDSAQAALTAGLWNWRITYNGDAKRAILASGRFTVTDAEELELLSPAKNRQFFTESEPPVLFFQWSQMEDVSHYIAEVDVTPEFRNPVIKKQTAAESFSDSSLGEGIWYWRVTPVFSQTNESGVTASRSSSFRIIKDNGQQTPSLVFAEETPQPPENPSPLPIQTQAPPVQFLPAPAERRPAEGYSIGIEELKQININFRWSAVQGANGYILTIYQETGDERQQIVQMGPEKRTSWSTAIKTLGRGNFIWRIEAVNVGRNNIIEQHG

SEQ ID NO: 93301 - protein, 154 aa, Unknown
  Obtained from environmental sample
  misc_feature (1)..(154): Xaa is any amino acid
VSKNTTSNIYKARKIFSLALIYIEFIIVAIIVIYPLLWVVGSSLNPVNSISRPSVLPSNPTLDNFRDLIVKTKFANWYRNTLYVSVLTTIFTVFIHSATAFVFARFRFKGRKAGLLTVMILQMFPSFLGLMALYMVALNFGMLNNLNMLVIIYI

SEQ ID NO: 93302 - protein, 272 aa, Unknown
  Obtained from environmental sample
  DOMAIN (37)...(271): Binding-protein-dependent transport system inner membrane component
  misc_feature (1)..(272): Xaa is any amino acid
GLHACRSTLEDPTKSGTWRGFETFINVFRIPIWGTTFLKILVWTVVWAFVATFSSYVFGLFQALLLRTKGIRFVKFWRGIFILPWAVPGIVSMMIFRVMFNQEGALNQIMLESGLIKTAIPFLSDPTWAKVALFIVNIWLAFPYFMALISGIMTTVPDELYEAAQIDGANTIQQFRSITLPFVLASTAPQILMSLTFNFNNFNLIYFLTGGGPPSSTLQMAGSTDILISWIFKLTLDQRMYNYAAAMSIFIFVIVASVSGWNLMRTRAFKED

SEQ ID NO: 93303 - protein, 595 aa, Unknown
  Obtained from environmental sample
  misc_feature (1)..(595): Xaa is any amino acid
MESSFQTHDSTASFYFVRPRLINLYREAVKYPLVVVCAGAGYGKTSSVHDFLREYAVTTIWIQLSERDNVGARFWENYMHSISKLNKTLAESISKIGFPDTKEKLHHYKALINDYAVVEKRVLVIDDFHCIEDEAVLRFMEEGFFKNMLPGSTIFLISRSLSRLNVAGLFYRDQIFNVSENDLRFTENELSRYFRRVGVSFQTDSLREIMQDTEGWAFAINLIARSSQKAPGYGGYVRNAMKQNIFRLLETEIWDEFQEQMKNFLVRLSLIDHLSVDLITELAAGDEALISGMEKQSAYIRLDSYINAYLIHPLFLEFLTTKQTLLTEEQKRETYTIAGNWCDRNGFRIDALSYYEKIRDYQSIINMFFKLPLQVPLDFSRSAGAILDHAKPEEFYKVEFFAEMHLRTYMCQGPLQKSLELVKYYESKFLELPDDNNIKKRTLAWLYISWSFIRGLMSLTDEVYDAEIYLKKAGECVSTSVDPGKISPHCPAVWIICVGSSRKGALEEYIDAITRGEKYLSRSNLCGFMAGKIELARGVLEFYRGDMGQAETFTALALKKARENKQFGIVHRALFYSLRIAAAQGNFTRAEQALK

SEQ ID NO: 93304 - protein, 456 aa, Unknown
  Obtained from environmental sample
  DOMAIN (175)...(245): HAMP domain
  misc_feature (1)..(456): Xaa is any amino acid
MKIRFKIILVVLPVVILALCIAQEASFFAAQSGLMRMAQSFFLFKTSELKKYAEGQWNLLLENNFSGRAEMVEAAKKSLLLYEQSIILGETEIILALDDEGRIAMSTSPLHISQVESENIIKILKEEKEGLYSAYLGGTERVFTAFHFTPFSWYILLTEDKDSFYRDANKIRFQTTIVLAITLVLTTVLLIFFALHLTNPLKRVVDTMSGITSNGDLSSRVEVEYDDETGKLASTFNLMISELEKAYAQIKRYAFDAVLAGKKEQRIRQIFQKYVPKDLIDKFFASPESMLVGENRTLAILFSDIRSFTTISENMAPDDLVNSLNRYFSGQVDIIMNRNGIVDKYIGDAIMAFWGAPVKHDDDAMQALLSGLDMIEAVKSFNDNQKKLGKPEFRIGIGIAYGTVTVGNIGSERKMDYTVIGDMVNLASRMEGLTKTYHAEILISETLHDALLKRRK

SEQ ID NO: 93305 - protein, 70 aa, Unknown
  Obtained from environmental sample
  misc_feature (1)..(70): Xaa is any amino acid
MKRYCIKCRSGRIEYFDIISETDNELMIRLYRITDGSEKIIEETMSRDLFNMCTKTGYIYELELDTAVVA

SEQ ID NO: 93306 - protein, 180 aa, Unknown
  Obtained from environmental sample
  DOMAIN (1)...(180): Domain of unknown function (DUF323)
  misc_feature (1)..(180): Xaa is any amino acid
MGSPASEVGRYDNEVRHSVTVSSFYMGKYPVTQKEYQEVMGTNPSSFKGDSLPVETVSWFDAVEYCNKLSQKEGLSLAYSISGSGDNRTVTWNSNANGYRLPTEAEWEYACRAGTTTPFSTGSNITTSQANYDGNYPYNNNAKGTYRRTTTAVGSFSPNPWGLYDMHGNVWEWCWDWYGA

SEQ ID NO: 93307 - protein, 539 aa, Unknown
  Obtained from environmental sample
  misc_feature (1)..(539): Xaa is any amino acid
NDRTKEAAKAAYDEMMGMANKIDGIYQRAGGKMAELEAINSRGQQLAALNKFSKLRGSPINYERFGNEYLLLIDEDGIPRVFAPVGRGTWSPISSPECLYEKITSVDGGGADSMAGFVLTERGGRRKHYDGNGLLIGITELNGDHVDIVRSANGKAAKIRGPHGNEWTVEYSGEFISAINGPEKIKVQYGYSGDNLVSVQDKEGDTGNYDYRQDRLSEIVKPDGSAIKLEYGYNSSGGVQLVTSTTHEEGASEKFDYNPSQKMTTYTNHSGVITRYWYDDKHRTIREEHSDGRVKTFAYNGSGLLERETLNGFEVRYSYDWRGNVAEKQYADGKRENWQWSGNDQLLKYSDRDNVVTEFSYDDRWNCIEAKRDGQVIYTARYDQQNRLTVSREGNRSEIKFEYDDRDFISSRNITINNKAIREDWKYDALGRVLKYTDALGRVWEYAYYARETIERTPLGLERRYEYNNRKDLVRIVEKDLATGEERESKYVYDKRHLLIEEIDGAANAVKYTYREDGELIKKEQGPWYLNTDMKLEEG

SEQ ID NO: 93308 - protein, 224 aa, Unknown
  Obtained from environmental sample
  DOMAIN (119)...(156): RHS Repeat
  misc_feature (1)..(224): Xaa is any amino acid
MVFEYGYEVGGRVSKVTRGKTGTNKKYTEDYGYRWQGWNEERTVTVSGAGTTAYRLDLWGRITAITNAVGDVFSRTLNGAGNALREQASSGGFYEYRYDSLGLPYQAGREGEQAVQVKYNLDGSIAEMTDRAGIVTRYAYDGRGLLVGEITALGEQRYYYDEAGRLIRQETVSRNSGPYRTDWNYNDSGRTVTVTAGGIYFETLYLNAWGEVIKQADGEGNERR

SEQ ID NO: 93309 - protein, 500 aa, Unknown
  Obtained from environmental sample
  DOMAIN (394)...(432): RHS Repeat
  misc_feature (1)..(500): Xaa is any amino acid
MVTIIGAGTTAYLLDPWGQVTEVTNAVGESSSRTLNGAGNVLREQASSGGFYEYRYDALGRLYQAGREGGPAIQARYNLDGSIAEKTDRLGKITQYAYDGRGLLTKETTALGEQRYFYDDAGRLTRQEIASRNSVTYRSDWNYNDSQRTVTVTAGGIYSETLYHNAWGEVIIKTDGEGNEIKYEYDKAGKLIKSIDAYGRATSYSYNELGKIAEVIFADNVAEDYEYDHMGNLQEIRDAVGISWTGEYDQAGRLSKETGRPGIDREYKYDAIGRIVEVKSGGEVVERYSYSNRGREAVFTDGAGKDFTLQKNAFGELTGEVNRLADSQRYAYDSEGRITANTAYSGKQTRVEYRDDEGITITTYSDGKQSLIERDMLGNIIRAANETGTIRYKYDAGGKLIEQNDEGAGEITRYVYNKSGQRIRMQSGNRDIIYRYGKNGELLKVTDNSQRLEVSYEYDSRGREIRRVYGNGVRQETLYDQIGRTSLIRETDFRGALLRA

SEQ ID NO: 93310 - protein, 465 aa, Unknown
  Obtained from environmental sample
  DOMAIN (162)...(302): ATPase family associated with various cellular activities (AAA)
  misc_feature (1)..(465): Xaa is any amino acid
SQEDGIVPPIVEKISGDTAQLINSVETLVEKQPKIYGEAAQVFFSSAASKIIAKAETEAASLKDEFVSAEHILIAIAASDGKAAELLKKAGVTKNAILGALKQVRGNTRVTDQNPEEKYKVLDKYCRDLTALARQEKLDPVIGRDEEIRRCMQVLSRRTKNNPVLIGEPGVGKTAIVEGLARRIVAGDVPEGLKGKKLLALDLGALIAGAKFRGEFEERLKAVIHEVQASEGGIILFIDELHTLVGAGAAEGATDASNLLKPALARGELRCIGATTLDEYRKHIEKDAALERRFQQIYTAEPSVEDTIAILRGLQERYEVHHGVRIKDEALVAAATLSNRYITSRFLPDKAIDLVDEAASRLKMELDSRPTELDKLERKLLQLSIEKQALTREEDTASQSRLGKLEKEIADLSAERDAMNARWEKEKKDVQKIREIKQQIEELKIEETRYEREGDLAKAAEVKHG

SEQ ID NO: 93311 - protein, 216 aa, Unknown
  Obtained from environmental sample
  misc_feature (1)..(216): Xaa is any amino acid
MPYLINRENSYKEIRDYYGGIYNTVLLKDVVARKKISAPDVLEKVVKFLAGNIGSLNSTKKIADTLTSFGRKISVNTLESYISALIDSLLFYKVSRFDIKGKEYLKTIDKYYIADLGFRNYLLNNERNNFGFVLENIIYLELLHRGYKVSVGKIGQKEIDFVAISELGQVEYYQVALSIRENDVFEREISALMDIKDNYPKFLLHLDPDPDSVHKG

SEQ ID NO: 93312 - protein, 214 aa, Unknown
  Obtained from environmental sample
  DOMAIN (14)...(213): Lyase
  misc_feature (1)..(214): Xaa is any amino acid
MKSQKQNKSGMWSGRFENGMAKSMMDLSFSLDVDKELLEEDIQGSLAHGKALVEAKVLSQQEYSKISGALQSILSDAKKGKNIWKSTDEDVHMAVERILTEKIGLLGKKIHTGRSRNDQVATDFKLYMRNRTKDILDSLLKLQKTIYNLAEKHAGRLMPGYTHLQQAQPIQFSHYLMSLFFALERDKKRFCNLLSLHSECPLGSGAIAGSAFAY

SEQ ID NO: 93313 - protein, 434 aa, Unknown
  Obtained from environmental sample
  DOMAIN (30)...(146): Histidine kinase-, DNA gyrase B-, and HSP90-like ATPase
  misc_feature (1)..(434): Xaa is any amino acid
VVDVVNFRVEEKKQKFTVHIDSAIPPTLIADDQRLAQIITNLVGNAVKFTPEKGFISLNTKFIGEENDLCTIQIDVRDSGIGISEEQQKNLFKSFQQAEADTSRRFGGSGLGLVISRNIVEMMNGKMWVNSELGKGSTFSFTIQAKKGNQTRQRLLADGVKRENLRILAVDDDPDILMYFKNIADQLGVFCDTAGSGDEAIKMLEQNGGYNIYFIDWKMPGMDGIELTKKIREHSTDSGHSVAIMISAVEWSVIEDKARKAGVDSFLSKPLFPSTVADLIDNCLGVEHEKKEEKEEKQEINGLFAGRRILLAEDVEINREIVQALLEPTQLEIDFAENGKEAVRKFNEAPDKYDLIFMDVQMPEMDGYEATRRIRAIEADLNKDKPEPVRVPIVAMTANVFREDIQKCLDAGMDSHVGKPLDFDEVINRLRNYW

SEQ ID NO: 93314 - protein, 635 aa, Unknown
  Obtained from environmental sample
  DOMAIN (572)...(629): Bacterial regulatory proteins, luxR family
  misc_feature (1)..(635): Xaa is any amino acid
MQDTEGWAFAINLIARSSQKAPGYGGYVRNAMKQNIFRLLETEIWDGLPEQMQVFLTRLSLIDHLSVDLIAGLASGDEGLISGMEKQSAYIRLDSYINAYLIHPLFLEFLGTKQELLTEEQKRETYAISGDWCARNGFKIDAISYHEKTGNYQAILQILAGLTTQIPRDIAKYAAVILDRAPDDEFDKVEFLADMHLRTYICQGFLQKSLELVKYYEAKFLRLPEHDIIKNRTLTRLYICWTYIRCLMSVTDDVFDFDAYIEKACKYMNEADSGKLDIYYPGAWINFAGSSRKGGPEEFIAVITRNQAHIQKSYMKGFMAGELELARGELDFYRGDTSSAEPHIALAVKQARAEKQFGLMHRALLYALRIAASAGNFILMEQTLKDTKAQLDEVEYVNRFFDYDISLSWYYCFLGQMEKAVDWLKEDFLTYSHAASIDNFANQIMARLCYAARNYSPLLSYIEEMKRRESFLFGRVEMLAMEACIHYKLKDKEKAFAVFEEAYKNAEPNCLLMPFIEMGKDMRTLAAALLKESRKVIPTSWLEDINHKSATYAKRRSHIIAKHTQSGGGTGGIALSPRETEILNDISHGLSRAEIAVARELSINTIKMIINKIHYKLGAENLADLIRIAVEKKLI

SEQ ID NO: 93315 - protein, 297 aa, Unknown
  Obtained from environmental sample
  misc_feature (1)..(297): Xaa is any amino acid
IQPGVTDIRIEIELRLYQLHLAEIKEKEKARAGLAREWRGAEIKPLSGTKQPLDAASALSMSRAAFAERNYFDAHWLAVLAGRLAIEGSPEVAASARLATDAWNQIESQAPSVREERMHSLYQLKLSGYQAMNSSDWIAAYYIFQELLTITPDDPDAKNFLAACERGLKDYTFFIDEMQVSVGEILTGALFSLPAQNGRAILRFSSLSTLKDFAYGMGLEFMEFDVFSRPYVSLRAPYGKLLPVNVNGKDKVMVITHALDRDSKDISWESEWLVGSSKNPVIILDVSYEDFLLLATV

SEQ ID NO: 93316 - protein, 258 aa, Unknown
  Obtained from environmental sample
  DOMAIN (142)...(258): Glutamine amidotransferase class-I
  misc_feature (1)..(258): Xaa is any amino acid
MTGYLETLTDQSYYGQIVLQTFPLIGNYGVIPPDFESDSIGARAYIVKHPCATPSNFRSENALGAFLKERGIIGMYGIDTRALTKIIRNNGVMNGKICAVPPSAADRAEAKAYSIINPIKTVSSLKVTKVPPAPGKIQRRVALLDFGAKRGIAAALAARGCEVWIFPCDTPAPEILKIKPDGVMLSNGPGDPADPGNAGIVDTIRTLERSGITIFGICMGHQLLACAKGYSTRKLKFGHRGANQPVKETKTGQVYIQA

SEQ ID NO: 93317 - protein, 519 aa, Unknown
  Obtained from environmental sample
  misc_feature (1)..(519): Xaa is any amino acid
LPLLGPWLRYEGPISLSRIAGVFGLSVAAVEIAVNALAEVEELVCDMRLAGEVSPLICDSRNLEMLLRLSRRKQRPEISERPAAVLVPFLALRQGLLAESNRGRGPHAEAQRTQRKEDTGNKDAQVGSALSAIKKLNACCAPVKLWETEFLTARCAHYNPEIINQEINEGRLVWYGAGKEKIGLCRPDDLELVSMNNVHKPKQKIHSEDGLLAQLINNGFFDRPRDFWEIKDAINAGMQQYITSKDCAEALWHEAWQGRLSSDSCEPLRRGIQFGFTIKNTETAELAAQSSSGSPRMPHIPRSLRDRWRNGAPVSGRWFSIVLADAENDAGLWDAFQPSPKGVEPELRGSPLDPLAKEGRNRDRVRLLLARWGILCRPLLEKASSGSSNSKSEPSPFTWSGLLPTMRRMELSGELVAGRFFAGINSLQFASPAIARELENAEAVEGIYWMNAVDPASPAGVNIEGLDPRLPDRLASSRIYFRGSQLIAVSNRNGKELHVFIAPDDPGLPALIDLIKSTH

SEQ ID NO: 93318 - protein, 442 aa, Unknown
  Obtained from environmental sample
  DOMAIN (84)...(290): Cytochrome C biogenesis protein transmembrane region
  misc_feature (1)..(442): Xaa is any amino acid
DASETNFDKISAVIERLGYKTLEGKSNSTVMQIVGMLVIILALFMLMRVFTTSKFAASFPLVQENMGYGMLLVIGLFTGVHCIAMCGGINLSQTLQENGESNKKNIYSLLLPSILYNGGRIVSYTAVGVLVGALGSVITPSLHFQGAVQLIAGIFMVIMGINMLGLFPALRHIIPRIPVKLQEKLSLVLTKNIDKQKTGRGPLVIGFLNGFMPCGPLQAMQLYALSTGSPIKGGISMFLFCIGTIPLMFTLGAAGSALSKSASGSKGHAFSRRVMQIGALLVAALGLVMFSNGWNLSGLANPFDKMASFKAASAQTSGEASGQTIASVQNGVQIVNSTLQPNRYPAITVRQGIPVRWIINAPPGSINGCNNRMIIREYGIQYAFKQGENVIEFTPEKSGRFRYSCWMAMIYGTITVLAEGESADTVQEPDTEPKPAGFQIPT

SEQ ID NO: 93319 - protein, 113 aa, Unknown
  Obtained from environmental sample
  misc_feature (1)..(113): Xaa is any amino acid
MEGISSTAQILIAIIPIVGIVMGSVVIFFYLLWNHRQKTLLIQAGQQKKEEFNLLSFSLLSGLLLSSVGIALTVLLIIIEGASYGLLGGIIPLSVGIGLLTHYAIKRGEKRNG

SEQ ID NO: 93320 - protein, 931 aa, Unknown
  Obtained from environmental sample
  DOMAIN (1)...(162): RNA polymerase Rpb1, domain 1
  misc_feature (1)..(931): Xaa is any amino acid
MGAEAIRTLLENTDLDELAAELRAKMIEKGPKSDKRLLKRIDIVESFRTSKNKPQWMILDVVPVIPPELRPMVQLDGGRFATSDLNDLYRRVINRNNRLKRLQVLNAPDIIIRNEKRMLQEAVDALFDNSKKKRVVKGASNRPLKSISDMLKGKQGRFRQNLLGKRVDYSGRSVITVGPDLKMWQCGLPTKMALELFKPFIMKKLVDKDVVYNIKKAKLLVEQETPEVFAILDEVVKEHPVLLNRAPTLHRLGIQAFEPVLVEGKAIKLPPLVCYAFNADFDGDQMAVHVPLTQAAQMECWALMLSARNLLNPANGKTVVFPSQDMVLGINFLTRIRPDGKRPGLERTKAIVGKGKANAQTGANALCEKCGKELREGWTACAYCGKSVGDPPRYSSVEEAYLAVETKALDWEAVIKVKVPKLPVWEKVGKKATIREDGLIETTAGRLVFNEEMPREIPFINYELKDKELRALIEYIFAEKGSWTTVKMLDAIKSTGYKYATVFGSTIGVDDIVVPKEKADMIEKANKEVEAIQKKFNSGHLSPEERKNRVIEVWQKTNEDLANILMKTLEADRNGFNSIYMMANSGARGSRNQIRQLAGMRGLMAKPSGDIIELPIRSNFKEGLSVIEFFISTNGARKGLADTALKTAEAGYLTRRLVDIAQDVVVNDDDCGTINGISYSAVKQGEEIIEPLRDRIVGRFTLERVKHPITGELIIDVNEEITEEIAEAIESAGVETVRIRTVLTCEAKYGVCQKCYGRNLATNRTVEIGEAVGTIAAQSIGQPGTQLTMRTFHIGGVATKASEESRIILKYPVYIRDVAGTHITLDNGHLLFTRRGHAIVNKVMREFKIEKGDNLVAVDGKKINRGDVIIQRGGQDIVSPEIAYAMILKNQDEETLYLIGPEQKIEIRNGSDFEAQIGTVVEAEKSIATFD

SEQ ID NO: 93321 - protein, 276 aa, Unknown
  Obtained from environmental sample
  DOMAIN (1)...(276): Phosphoenolpyruvate carboxykinase
  misc_feature (1)..(276): Xaa is any amino acid
MIKILVDAGLGTPLKKRPHSYLFRSDPSDVARAESRTFISSKNKDDAGPTNNWRDPVELKETMRKQYKGCMKGRTMYVIPFSMGPVGSNIAKIGVEISDSPYVVVNMHIMTRVGTKVLDVLGKDGFFVPCLHSIAKPLGPGENDHGKWPCEPDVEKKFISHFPDSDGPFRYEIWSYGSGYGGNALLGKKCLALRIASVLARDEGWLAEHMLILKLTNPQGKVKYIAGALPSACGKTNLAMLVPTLPGWKVETIGDDIAWMKFGADGHLYAINPEAG

SEQ ID NO: 93322 - protein, 162 aa, Unknown
  Obtained from environmental sample
  misc_feature (1)..(162): Xaa is any amino acid
MLNQAIQKENFSPEVINYIKELETNHAQRIRELETIHKQSYQQLYNKYLTVKEQYDLLVYKRFVRSAEQLLADEKQQPLFTEETEQPETNEEKPLELQTVKSFTRKKNGGRKPIGANLERRPRVIDIPESEKTCACGANLTRIGEETSEKLVITPPHIYVDQ

SEQ ID NO: 93323 - protein, 222 aa, Unknown
  Obtained from environmental sample
  misc_feature (1)..(222): Xaa is any amino acid
FEETWRRLNLYSKSRGINRFLALRLVLEKIRDGDIGPLRDFTEKSETLSNASLQLWMKERPDLLLGDIMRWSLRADKLFEEHTQGLLPYANVEATLKVLAEKADIMVVSSASGRGLVKDWSFSGLTRYTALLAGQEAGSKSKQLRMGAGGKYPPEKILMIGDAPGDLEAARSIDALFFPVIPGKEEASWIRLREEGLDRFFAGTFKGEYEDALIREFTAVLE

SEQ ID NO: 93324 - protein, 51 aa, Unknown
  Obtained from environmental sample
  misc_feature (1)..(51): Xaa is any amino acid
MIEYNIVSFGGVGDGVSDNSDAFQTALNTIKDAGGGIMRVGRGIWRTGPFE

SEQ ID NO: 93325 - protein, 120 aa, Unknown
  Obtained from environmental sample
  DOMAIN (44)...(115): HD domain
  misc_feature (1)..(120): Xaa is any amino acid
MTPEEIAQSLIDINPGLDRELLIKVISFVIDAHEGQMRKSGEPYIVHPIAVAKILANLKMNSAVIATGLLHDVVEDTKYSIKEIQETFGTEIAEMVDSVTKISDIQKGIDRTAQTFKKFL

SEQ ID NO: 93326 - protein, 402 aa, Unknown
  Obtained from environmental sample
  DOMAIN (1)...(387): TCP-1/cpn60 chaperonin family
  misc_feature (1)..(402): Xaa is any amino acid
TEETSHVASVSANNDIEIGKTIADAMDRVGKDGVITVEESKTMDTTIDFVEGMQFDRGYISAYFVTDRDTMTTVYEDVYILIHDKKISGMREMLPLLEKVAQSGKPLLIIAEDVDGEALSTLVLNSLRQTLKTVAVKAPGFGDRRKAMLEDIAILTGGQVITEELGMKLENTELSHLGKAKTIKIDKDNTTIINGGGKAKEIKDRIAQIKVQIEDTTSSYDKEKLQERLAKLAGGVAVINVGAATEVELKEKKHRVEDALSATRAAIEEGIVSGGGIALIQAALALDKADTNSLTDDEKVGFKIVKRALEEPIRQIAENAGLDGAVIAERAKAEKKGIGFDAAKMEWVDMMKAGIIDPAKVTRSALQNAASIASLLLTTECAITDIPEKKEAPAMPGGGMGG

SEQ ID NO: 93327 - protein, 330 aa, Unknown
  Obtained from environmental sample
  misc_feature (1)..(330): Xaa is any amino acid
MKFTMRTTLNTIRFRRLIVSCILFALCVSALWAGGRKDKIETVTAEGGEIWQNDFDVTMRKKGLCNFIVYAHDRAGNEAISGAFNVKIDPNAGLPAARVVYPENNAVVRQNINILGVASGRYGVEQVSARMDDSDFITVSGTEYWNQPIDFTDIPDGKHTLYVQAVDIKGIPGPVGKVDFILDTTPPDIELSSHKVGDIITGAVTLKGAAEDPNGIKIIEYSYDGENYFLLSGKKKGTTTLEFSLPINTKKIPDGPIVCYLRAVDTTGVATVKPYLFFVTNSGPELEVYSPVPGEDVFKTFFLSGRAYDKTGLSALYYEWGKIREDIEMR

SEQ ID NO: 93328 - protein, 359 aa, Unknown
  Obtained from environmental sample
  misc_feature (1)..(359): Xaa is any amino acid
VRLLEGQVSDDTPDADGTVRACAAVLLSDITIECPAYGELSIDGNGKFPTAAAENRPVRTGIALDIGTTTVSARLVDLDTTTALDTISELNDQRPFGADVISRIGEAKSGKTGELFTLINRQTERIIKSFKHRWDISKIEKLAVSANTTMLHLFLNVDPSSMGELPFTPVFLEEKKLKGEALSLSVEDVTVLPSISAFIGADISAGLTALDILDVARAPGPSFFIDVGTNGEMALCNRGVIYCCSTAAGPAFEGAEISCGVGGINGAISGVKLAEDKTAGLALTTIGNVPPVGICGSGLVDALAVMLKQGIIDETGSMPGPAKEFILAPGVSISGRDVRQFQLAKSAILSGIKILCKNA

SEQ ID NO: 93329 - protein, 346 aa, Unknown
  Obtained from environmental sample
  DOMAIN (1)...(341): Glycerate kinase family
  misc_feature (1)..(346): Xaa is any amino acid
VKIPLADEGKGTARAITEAAGGKFIEVTVKNPLGKKIKAEFGLIKKGKAAVLDMASASGIELLKQAELDPMKASSYGTGELIKAALDSGAKELIIGIGGSATNDGGIGIISALGFKVLDENGKPVGQGGQALAKIASVDVSGADKRLKDVSVKVACDVTNPLLGPNGASAVFGPQKGATPQMVKTLDAGLGKLARAWIRAGLAKDMEQSGDGAAGGVGAALRICLGAKMESGALLVMRYAGFFDSLKSADLVITGEGMTDGQTAGGKLCSVVARESRRAKVPVALLSGGIGGDAGSLLASFDYAVSISCGQIGLDAMIKDSRRDLSLAAENLIRAIQIGKKITNNK

SEQ ID NO: 93330 - protein, 537 aa, Unknown
  Obtained from environmental sample
  DOMAIN (159)...(224): His Kinase A (phosphoacceptor) domain
  misc_feature (1)..(537): Xaa is any amino acid
MAGDRRKKIVVVDDNPENLDSIKNILQDIYMVYPSPSAEDMFELLEHVKPELIILDVRMPGMNGYDAIEKLKSSDKFREIPVIFLTSMDDTQSEMKGLQLGAVDYIHKPFVTPLLLQRIKIQLSIVEHQWEIVDLLEVKTQEVKLREMAEQAAQEASHAKTNFLSRMSHEIRSPLNAVIGMINIATDENDIDSIKLYIGKADNAAKHVLGVINDILDMSKIEADKLDLSNGEFDFGKMMANIVDVTGIRAREKHQQIVVNMNPNIPSFVISDELRLSQVITNLMTNAIKFTPENGKVTLSAEKLEEKDGDITIKIEVADSGIGISPEQQEKLFQAYNQADSSITSKFGGTGLGLVITKRIIELMRGAIWIESELGKGAKFIFTIKAKKGNENKISAESDKNEFDFKNYSILIAEDIEFSRLILAKYLEKTGIAIDFVNNGKEAVSTFKENPDKYNLILMDINMPEMNGIDATRLIRAFESELKDAGNSHKETTIIAMTANVFKEDIEKFLAAGMNDHVAKPIVPKKICEKLKKYLDS

SEQ ID NO: 93331 - protein, 567 aa, Unknown
  Obtained from environmental sample
  DOMAIN (356)...(562): Beta-galactosidase trimerisation domain
  misc_feature (1)..(567): Xaa is any amino acid
INVLAIGVFSWSMLESDEGIYNFEWLDQCFDRLYKNGQKIILATPSGSKPAWLSEKYPEVCQVTADGIRQPHGGRHNHCRSSVKYREACVRINTRLAERYGTHPALILWHVSNEYNGIPCFCPQCLAAFRDWLRKRYETLDSLNAAWYTAFWSHRFTSWEQIFPADPSIHGLMLDWQRFTSDQTIDFFLAESEPLRRITPGIPITTNFQMPDVGLDYHKFAGYVDIISWDNYPKWHCAPDDGHEAIKAGFFHDMCRSYLGKPFLMMESGPGANSWQGISKKKKKGMHLLSSIQAVAHGSDSVQYFQWRQSRGGQEKFHDAVISHLGTDDTCIFREVAETGSVIKKLSAVAGTDTKVQAAVVYDFQNGWALGNAQLQRNTGKNYQKECIAQYGAFWKAGIPCDVIGPEYSDFERYRLIVFPMLYMLSEKTAEKIRAFISHGGVAVATYLTGIVNESDLCYTGGTPGNLTDVFGLAVEETKTIAFYEAPEFLMNGNNWKATHYADRIRLCGAKALGVFTSSFEELPAVTACEYGKGTAYYLCTRTRQAFIDWFYRELCKKHGVDSCFCG

SEQ ID NO: 93332 - protein, 608 aa, Unknown
  Obtained from environmental sample
  misc_feature (1)..(608): Xaa is any amino acid
MSNFILNLIHRPEMVPEYAEKVTGHGKKEDIGAKSLLTESLDIFKLQQSIAHKNGLKTTIQMTYASLFNAEAVQTAKDDNRKYGDEIALSLLGLPCNEFREKYKTKDFCIWMFSMEDKKAIVDDVFGKFYEIFGFYPASTGSYYMDAELINYIKEKYPQVICAIATCWEEGPKAYRTCNNSWYTLFDGGPWNPWIPSKQNTHAPAANENEDSGIVAIPHLSRDLLACFDGNGSNFGTHPQNVLRGMIYKDGEYPYLFNLIDQYRHLEKYNGGEAYNMVFVGPGWMNKAGRWEVPFELSVKSYEDCLAYYGKLKKEGHCVDMTMAEYAGYYRSKKTYTTPECALWKDILYGSEKQLFWYCDPFMRTCVDMNQGGALIDLRPYAAKINWPVGIGTKHVQDASYPFLVQSMYRAGFFTHYAGEGTIRSLKIHYNGEEADLCLCRTKAKFSQSGNTRRLTLDPVEIEFSDLRLTVQTVYDFEAGTSAIKTIRKILNMSKPAEVEFDEYITACYGTTEYPEDMTCVTLTVKGAEGEKVINYNYKCREVKTACAVCASAEIGAINTRVDFEPSGDAEAYVREGYAFSPMFTLGLKKKISDGGEFVSWLRLKKAK

SEQ ID NO: 93333 - protein, 423 aa, Unknown
  Obtained from environmental sample
  DOMAIN (201)...(341): ATPase family associated with various cellular activities (AAA)
  misc_feature (1)..(423): Xaa is any amino acid
MDYEKLTIKAQEALNEASSIAQKGDHSQIEAEHILLALLRQEDGIVPPIVEKIGADTKKLISSVEALVEKQPKIYGEAAQVFFSSAASKVIAKAETEAASLKDEFVSAEHILIAIAASDGKAAELLKKAGVTKNAILGALKQVRGNTRVTDQNPEEKYKVLDKYCRDLTALARQEKLDPVIGRDEEIRRCMQVLSRRTKNNPVLIGEPGVGKTAIVEGLARRIVAGDVPEGLKGKKLLALDLGALIAGAKFRGEFEERLKAVIHEVQASEGGIILFIDELHTLVGAGAAEGATDASNLLKPALSRGELRCIGATTLDEYRKHIEKDAALERRFQQIYTAEPSVEDTIAILRGLQERYEVHHGVRIKDEALVAAATLSNRYITSRFLPDKAIDLVDEAASRLKMELDSRPTELDKLERKLLQLS

SEQ ID NO: 93334 - protein, 473 aa, Unknown
  Obtained from environmental sample
  DOMAIN (49)...(116): His Kinase A (phosphoacceptor) domain
  misc_feature (1)..(473): Xaa is any amino acid
SFSGREISLLGGVMVVFSFIAAIIATEMIAKAYAKDGELLTAAERASEAKSAFLANMSHEMRTNLNAIIGLTELELENNAGLKKGTEMSLEKVHSAGMSMLEIANDILDISKIESGRLELVPVEYNLPALISDAINLNMVRIGSKPVKIVLDIKEDLPVTLYGDEVRIKQMFNNFLSNAIKYTNSGFIILSIRCEKDENSNGSIWLVCKVADTGIGIKQKDIGKLFKDYSQVDRETNRKIEGTGLGLAITKELADKMGGSVDVESQYGMGSTFMFKVRQGFVSKDTIGRITAEELKANEYNCGRRAINISINRAYIPYARVLAVDDMDGNLEVIRGMMRPYGITVDCVNSGQGAIDVVKNGKIKYNAIFMDYIMPEMDGLETTRIIRNEIGSEYARTVPIIALTADAVAGSAEMFLQNGFHACISKPINMKEMNSVINTFVRNKEYETGEERRTRVLQDIDQVTCNSCLTVPA

SEQ ID NO: 93335 - protein, 91 aa, Unknown
  Obtained from environmental sample
  misc_feature (1)..(91): Xaa is any amino acid
LAGLDNGINFLFDDTEKSLEIVNKLPYNPLKNEEQMKKLEENGIQFSHTIEEQIGGQIKAGFILKALYEDHDNYGMLKDYIPTYIATKAIK

SEQ ID NO: 93336 - protein, 305 aa, Unknown
  Obtained from environmental sample
  DOMAIN (43)...(157): Response regulator receiver domain
  misc_feature (1)..(305): Xaa is any amino acid
MGGSIWIESEPEKGSTFFFTIQLKRGTNEKHRLLSSDINSKNVRILAVDDDKDVLLYFNEIAQGFGLTCDTALSGEEANQLIKQKGDYNIYFIDWKMPGMDGIQLTHEIKTRSKENSIVTMISAAEWSVIVDEAKAAGVDKFLSKPLFPSAIAEVINECLGVDQQQAEKSQAADIVGIYAGRRLLLVEDVEINREIVLTLLEPTQLEIDCAKNGAEAVRMFSEDPNKYELIFMDVQMPEMDGYEATRRIRSLNTSNGKTVPIIAMTANAFREDIEECLAAGMNDHIGKPIDFEKVIEKLCAYLPQ

SEQ ID NO: 93337 - protein, 353 aa, Unknown
  Obtained from environmental sample
  DOMAIN (148)...(261): MMPL family
  misc_feature (1)..(353): Xaa is any amino acid
MRKLYTYPWLIVAITALITVFFAFQLPHAELENNNLRFVPPDDPALKTSQWIDRAFGSSFFILVGLERQYGTVFDREFLERIREYTQAVQEISVVREVSSLLSADYITSDGDAIVVEKLVGDDFSGSPEEIAELKRRLLSWDMYERALFSDDFTATQILIPLSIKSDEAGLSEVTETFMRIRDIARETFAGYATVYVTGMPVISATINEAMNADLKLLLPLVILVVLVVLFFSFRGLTPVMLPLLTVVIAVIWSVGAMPIFGVKLSVISTVLPVILVAVGSAYGIHIVTHYLHDRGSKPMSNREHRELVIESAMKIRKPVFLAALTTFAGFSSLIFTSVAPIREFGYFSSLAS

SEQ ID NO: 93338 - protein, 1072 aa, Unknown
  Obtained from environmental sample
  DOMAIN (307)...(525): Bacterial extracellular solute-binding proteins, family 3
  misc_feature (1)..(1072): Xaa is any amino acid
MINSRKIINIILSVLFISMTVSSCGKSTASQISKHTEPATLTSFRDVPGITEDEIKAIENLQKNIDHLVYGSTLSTEVFLSDDGEIGGFVAMFCDWLTTLFGIRFQPAVMEWGDIFAQLETGEVDFSCFTPTEERLKMYFMTDPVAVHSLKIMRIEGSPPLDEIALTRQVRYVFLENSAAIKMVIDTFQAGTYEIIPAMDYDSVYQLIKSGDADAFIDYNVGEAAFDAYDDVAIEDFIPLTFNKMCMAAVNPDLAPVISVVTKALRNGGIQHVNKLYNEGHHNYIRNKFLRSLTAEEKAYLQNTSVVPVTAAPWFYPLDYYNKFEKRWEGIAFDVLDEVTELTGLSFELVNSPDASWAEVFQIFNDGASICLDLIASPERLSRYLWSKYIYLSENYALVSRYNFPNIGISEIQYAKIGLIKSTAWASMFQNWFPEAANTTMYDSQDEAFQAMDRGEVDLVMAGTNALFALTHYYEFSNYKANYVFNSTIDYVIAYNKSEQVLLSVIDKALAYVDLKTISKRWESKTFDYQSKAMREQRPWLIGAICLSLGALILILLFYRKNHLIKKQLEIILNNVESGIVIIDAETRKIMDINPFVTRLYGGDRDKIIGQSCKILFCTEEGCPILDYQRSLDHSERQFKTAGGEIIPVIKSVSKINYNGRPALLENFADISYLKEAEEAKSASEAKSRFIANMSHEMRTPLNAITGMTTIGKTADNMERKDYALDKIKDASAHLLGVINDILDISKIEANMLELSPAEFDFENMMQKTVTVINFRVDEKQQKLSIHIDSEIPQTLIADDQRLAQVITNLLSNAVKFTPEKGLITLDAHCIKVEEDICTIQISVTDTGIGITDEQQKLLFKSFQQAESSTTRKYGGTGLGLAISKSIVEMMGGKIWIKSGPEGGSTFSFTIMAKKGKTAETNAHNAGGGLQADGTANINGLFTGRRILLVEDVEINREIVLALLEPTQMEIDCAENGVEAVRMFSETPDKYELIFMDVQMPEMDGYEATRRIRAAEGKLRLEGHPQRIPIIAMTANVFREDIEKCLEAGMDSHVGKPLDINEVLDKLRTYLR

SEQ ID NO: 93339 - protein, 132 aa, Unknown
  Obtained from environmental sample
  misc_feature (1)..(132): Xaa is any amino acid
LQVVRRYKTTLEAVMENVNRNHKNSVFSSLFSNPDVLRELYSAIEGVTIPPDIRVDINTLSNILVMKQINDVSFLIDNRLVVLIEHQSTINKNIPLRLLEYVGRIYEKIIDREKKYQKNLVKIPRPEFITTA

SEQ ID NO: 93340 - protein, 588 aa, Unknown
  Obtained from environmental sample
  DOMAIN (11)...(152): Histidine kinase-, DNA gyrase B-, and HSP90-like ATPase
  misc_feature (1)..(588): Xaa is any amino acid
MYIGRLGDGSNPDDGIYVLLKEVIDNGIDEFIMGNGKLIETVVKDIDKPGKAMVKVRDYGRGIPLGKLVECVSVINTGAKYNDDVFQFSVGLNGVGTKAVNALSAHFRVIAIRSGEFAEAIFERGKLKSERKGKLKDPLKDGTMVEFIPDPEIFKDYVFNPEFIEKRVQNYAYLNAGLTLAFNGKKFISNRGLYDLLQEETGSDGLYSLGYYRGKHSANGQLEIAFTHTNNYGEEYFSFVNGQYTSDGGTHLSAFKEGFLKGIQTFYKKDYRSEDVREGTTAAIAIKIKSPVFESQTKNKLGNSDIRAWIVQETRNAVEDWLHKNPEASKKLEHKIAANESLRTELNAVKKEAREAAKKIALKIPKLKDCKYHLDDGQDGEASTIFITEGDSAAGSIVSSRDVMTQAIFALRGKVENVYGKKRAAIYKNEELFNMMMALGIDNDIEGLRYAKIVIATDADFDGFHIRNLLLTFFLSYFEELVTAGHVFILETPLFRVRTKKETRYCYSEKERDEAAIALGAQCEITRFKGLGEISPKEFGQFIGEDMRIVPVSVNTLKQVPQVLDFYMGKNTPERREYIMKNLIEDAG

SEQ ID NO: 93341 - protein, 279 aa, Unknown
  Obtained from environmental sample
  misc_feature (1)..(279): Xaa is any amino acid
VIYRKLGKALLENSAYNDFTYSFREQADALSSKLESLENRIMELEAKEGGNVFTWIGKSAQGLVLKSFLSKAQESQEQLYHNIGERYINRDKESSGRDEGITEGEIASLKGEIDKMLEVSRAAMSELSSLKDERRMISAGFGLDGNPQKQIQNLKNRISEIRDNLRNLYRTFGAQAAGIMDAEILPERKYFIDTIVTAEDGEIIGRAVKMNQTVIEYEINISKLAASLAIDEENAKIEKYQRSIEDKNNRIDELKRAIDDLEENVRDSQAYIQELKKKL

SEQ ID NO: 93342 - protein, 53 aa, Unknown
  Obtained from environmental sample
  misc_feature (1)..(53): Xaa is any amino acid
VYLSDIYTVSANLAGIPAMSVPCKVPEGALPVGAQLMAPKWREDLLLRVGSAI

SEQ ID NO: 93343 - protein, 209 aa, Unknown
  Obtained from environmental sample
  DOMAIN (101)...(207): NlpC/P60 family
  misc_feature (1)..(209): Xaa is any amino acid
LVLVTILGAVPVNVGAALMMIVKRCFCIGLCLFTLILVGCAPSVRYISERPVSQPDSLPSGKQKPVEIGGDTLQPGRQAVSEEAKWTPQQRLERVVSSYIGVPYKYGGTTRNGFDCSGFVSTVYREVYGISLNRTSQAMWNNGVLVTLSAARPGDLVFFKGGTFGTIDHVGIYVGLTRFAHASTKSGVTYGNLKDTHYARRFAGVRRMF

SEQ ID NO: 93344 - protein, 226 aa, Unknown
  Obtained from environmental sample
  DOMAIN (6)...(185): Prephenate dehydratase
  misc_feature (1)..(226): Xaa is any amino acid
LTAPTIVFSGARGAFGELAARQYFGEGADINPVLGFDAVFGAVKHKKADFGVIPIENTCAGSVYQNYDLLQNSRLYITAEVFLQVNHCLLAKPGTSVDAVRRVLSHPQALAQCAGFLKRHPRMKQVEADNTALAAKAVSEDAHADTAAIASSRAAADFGLEVLAPNIQDRDDNTTRFLVVSRDQSTKGSAPRKTSIAFSLKNTPGALFKALGVFALRDIDLFKIES

SEQ ID NO: 93345 - protein, 597 aa, Unknown
  Obtained from environmental sample
  misc_feature (1)..(597): Xaa is any amino acid
MKTNIFQLIETEIWDEISERLQTFLIRLSLIDHLSVDLISLLTECDETLIAELERQNAYVRRDSYVNAYLVHPLFLEFLRQKQGLLSEDQKQKTYAIAGDWCRKNGFRIDALSYYDKTKNYQGIVSLLGELTTQIPQDIVNYAAAILDRAPENACYNIAFFADMHLRSYICQGLLQKSLELVKHYEAKFLKLPDNDIVKKRNLTRLYICWTYIRCLMSVTDDIFDYDIYTEKACKCVHEADSGKLDINYPGAWLSYAGSSRKGSPEEYIAAITRNQAHISQSHLKGFMAGELELAKGELEFYRGDTSSALSNIILAVKQTRACKQFGLMHRALFYTLRIAAAQGNFAQTEQVMQETKAQMDEVEYINRFMDYDISLSWYYCFLGMPEKTVDWVKEDFSFFTHPGFIENFKNQIKARYCYITRKYTPLLVHIDEMKKRESFLFERIEMLAMEACIQYKIKNKRKAFSIFLEAYENALPNGILMPFIELGKDMRTLTAVALKQSGGKIPKLWLEDVNRRSASYAKRRTHVIAEYKKAYGITDGIVFSPREAEILTDLSHGLSRVEIAASRGLSVNTVKMVINMLYTRVGAENPGRPNPN

SEQ ID NO: 93346 - protein, 274 aa, Unknown
  Obtained from environmental sample
  DOMAIN (1)...(231): EAL domain
  misc_feature (1)..(274): Xaa is any amino acid
MSLAQERIIAYFQPILSADTKDVYAYEVLGRYTADDGVVKSLGPFFAAPDISHQEALRLDRIVRRYGIKKYAEEKRGEYLFINIRLAWLPAFAEHPEEMITLQLVKEFGISPEKLVIEITEEEYNASEEYLRAIVHYKRAGCRIALDDYGKSASNIDRLAKLQPDIIKINMDYIHNSEKSFHYREYLRSLASFADAVGIEVLYEGVETPRQFEFCESLKGNYYQGFFFALPQPSMSYAVIKGSRPSVPHSLDHARASTDAISLRSSISKGTVQT

SEQ ID NO: 93347 - protein, 1313 aa, Unknown
  Obtained from environmental sample
  DOMAIN (184)...(443): BadF/BadG/BcrA/BcrD ATPase family
  misc_feature (1)..(1313): Xaa is any amino acid
NKCASGTGEFLKQQLARMDMTLDDIDRVPDTAKVYPLSTRCSVFMKSDCTHRLNKREATKNDIVLSLSDVMAVKVIDFLKRAKVTSGRVVLSGGITLNRHIIRFIREKAPQIEFIIPETAPVFEALGASILALQSGSRLPQAGKLLRQNDVRFGVLGALRDWQNKVKFFNKPDGKVRSDRSYILGVDGGSTTTKACLVDLKTDEIAASFYGRTHGDPVKALKECLANIQEKVINDTGGKNIDIRLVATTGSSREILGVFLETPGVYNEIIAHSVGTTYFDKEVETIFEIGGQDAKYVLLKNGVPIDYAMNEACSAGTGSFLEESASGDLSIHSAKDIGHIALDANAPCKFGEHCSAFINSDIRKAVQQGAGRENITAGIVCSIVANYLNRVVGNRTIGAKIFLQGGVAKNPAVPLAFAMLLDKEILVPPSPELMGCFGVALLAKRKNADGLLAEKSIVIDDIINRDIGYERVFKCQSCENFCSIQVLNVNNNKYMFGGRCNKYTNMRKKVVDVPVFDYVEKRQKMLFEEYAAPKTLPSGYSKKFSVGIPRALSTHTLYPLYSWFFHELGIKTYLSTEVAHEGVARAESTYCFPAEIAHGAVQDCLDKNADYVLLPHFRDMPSYEEKVHANFCPITQGLPYYIEKAFPDVDKNRWLPLVVSFKYGEGKALELFCEMTKRLGVGENDTKTAFDKAWAKQQEYFKAIQKMGVEALEEARKASRPIICTLGRPYNAFTPEANMGIPRKFTTRGYSIIPFDILPFHDEEIFPNMYWYYGQQDMKASELLKKEDNIYIAFITNFSCAPDSFILHYVKWLMGQKPFLVLELDSHSADAGIDTRVEAFLDIIDGYRAKKNEIEAERYDNGWRFITEKLSSGKFDLRIDNVKTGEKVPIVGNKRVKVLLSNMGNISTEYMGAAVRSLGINAEAFPVATSKTVQIARAHASGKECVPSHLVLGSALEFFFSEKYRKDELYLLFVPITTGPCRTGQYYVYYENLFRDLHLENVVIFILSSDNSYTELGSEFSKQMWIGLVLSDYLKDIQCSLKACAVDPAKAQEEYEKSWRRVMHAVEHNPKNLWKELKHVARDVKRIPLKRKVTGCPRVLVVGEIYVRRDDFAVGELIDLMSERGIVVKVAGISEWIHYLDYMREYSLNKLIKLRPRGKRMFSVPWKKLKTLQIEKWWKHHIEKKTLAILKPTKLIPETPHDMRHIMSFTREHFVNLELNSEIAVSSGSAAAAMDAGYSGIVNISPFACLIGRVIEGLFTPWARERNYPILSVEVDGNLLPPNIVNKLNIFMVNVLRFKGGNDLSSLVDGASS

SEQ ID NO: 93348 - protein, 478 aa, Unknown
  Obtained from environmental sample
  DOMAIN (273)...(362): GAD domain
  misc_feature (1)..(478): Xaa is any amino acid
VTFLDLRDQYGVTQIVLHVEYKSGKETVITVSGIVKKRDADTINPKIATGTVEVHAETLVIQSKAVRALPFEISDSKNTREDVRLSYRFLDLRNPEVKKNIFLRSKVISFLRAKMEELGFTEFQTPILTSSSPEGARDYLVPSRKHRGKFYALPQAPQIFKQLLMVSGFDRYFQIAPCFRDEDSRADRSPGEFYQLDFEMAFAGQEDVFRVAETVMYGVFTAFSDKTVSPAPFIQIPYAEALLKYGTDKPDLRNPLVITDLTGFFADVEFQPFKNIPVRGIVAKRAAFQSKSFFEKMLAFAMEIGMKGLGYISIQEDSSLKGPIVKFLSAEKQDKLKKDLCLEKNDTLFFIADAPDRVNSLAGQIRTALGSQLNLIKKDSFEFCFIVDFPMYGISEETSASREAAASEEAGKVEFTHNPFSMPQGGLEALETKSPLDILAWQYDIVCNGVELSSGAVRNHLPEVMAKALKLRDTPRLT

SEQ ID NO: 93349 - protein, 137 aa, Unknown
  Obtained from environmental sample
  misc_feature (1)..(137): Xaa is any amino acid
RIAAELEEAEDERGIYWMNAADPASPAGLAVEGILTRAEHTAHAIRRTASSRLCFRGTELLAVSNRSCQELEIFIPPDDSDIVEALEFVKISRTRKVHKENKIVIEKINGASAALSAYSEALAVHGFVKERGKMILW

SEQ ID NO: 93350 - protein, 797 aa, Unknown
  Obtained from environmental sample
  DOMAIN (314)...(509): DEAD/H associated
  misc_feature (1)..(797): Xaa is any amino acid
MALASGEVSCVVATGSLELGIDIGNVDEVILAGSPISAAIALQRVGRSGHTVGAASKGWLFPFHGIDLLQAAALSGAVEERELEETESIENPLDLLSQIILSFCAEKDQNEDELFQTIRGFFVYRKLSREAYDGVVRMLSGSYEDTRLRELKRRLFRDEETKTLSAAPGLLPLLYTSSGVIASRGHYSLRLAPGTEGAGTKIGELDEEFVWERRLGDIFDFGNRSWRITAIGSEAVEAIPISTGADYAPFWTGESTYRSSVLSRRILEILEGYYPKGWTSLKAERMLDCFSDEAKKALEDFLLSQWSLQNGLPLPGPSFIPIEIIDDPDRGDAYLVIFHSFRGGAINFPLSLALARDLEAQFNLRVDGAGNDNAVFIRLPRSIDEDPAVIIQESLRRIAEGGTGEERFKERLESSGIFGAAFRESSERSLVLPHSPFGKRMPLWITRQKSKTLFDAVRRYRDFPVTAEAWRTCLNDQFDMKGFATLLEDIGSGALSVDFFTTRQASPFSKELTWAETNALMYEYDERPDLTDSGPSLSDKVIAEALGNAAARPPLKADLVEDFCSRLRREIAGWAPDDELTLCEWVKERIAIPADEWERLLQCVTAELLDAIHNDKSLGGKLEYFGQGNSENAVVVHREWAKKWKENDRKKLAEDCLGQWLRYQGPVPLSKIAGVYGLSIAEAKEVILLFSDSEQETLVSDVTVEDAGKDLVCDRENLELLLRLSRRKRRPEIKEKPAALLVPFLAKRQGLIRTALEADSGRPWERLAGIAAQAKLWEAEFFPCRLSNYSGELLTGR

SEQ ID NO: 93351 - protein, 975 aa, Unknown
  Obtained from environmental sample
  DOMAIN (196)...(270): Helicase conserved C-terminal domain
  misc_feature (1)..(975): Xaa is any amino acid
IRVETRSGDTPQAERRRFLSMPPSILALTPESLGIILLNPRGRQILSTVRCVILDEIHAALGSKRGCYLSCQVDRLSLVAGNFQRIALSATVKPPEAAANLVGKKIHIVSPEEKSDRRSKEIQFKVIFPESEGKPYSGETGVERYGKRYTELIKFVLGRIRSNDKKAAILVFTDSRRRAERISFLLNKTAENEAEFSGRPVAYCHHGSLSKEVRREVEIALASGEVSCVVATGSLELGIDIGNVDEVILAGSPISTAVALQRVGRSGHAVGMTSRGWLMPFHGIDLLQAAALSGAVEEREIEETESIENPLDLLAQIILSFCAEEDQNEDELFQTIRGFYVYRNLSREGFDGVVRMLSGSYEDTRLRELKRRLFRDDETKTLSAAPGLLPLLYTSGGVITSRGLYSLRLAQGVEGAGTKIGELDEEFVWERRLGDIFDFGNRSWRITAIGSEAVEAIPLLTGADYAPFWTGESTYRSPVLSRRILEILEGYYPKGWTSLKAERMLDSFSEEAKKTLEDFLLSQWSLQKGIPLPGPSFIPIEIIDDPDRGDAYLIIFHSFRGGAINFPLSLALARDLEAEYSMRIDGAANDNAVFVRLPRSIDGDPASTIQESLRRLSEEGKGEERFKERLESSGIFGAAFREASERSLVLPRTPFGKRMPLWVTRQKSKNLFDAVRRYRDFPVTAEAWRTCLKDQFDMKGFAQILEDIGSGALSYDFFTTRQASPFSKELTWAETNTLMYEYDERPDLTAGGPSISDKVISEALGSAAARPPLKAALVEDFCSRLRREIPGWAPDDELTLCEWVKERIAIPTDEWEKLLQCVPVELLDAIHSDKSLGGKLEYSRQENSENSVVVHREWAKKWKGSDRKKLAEDCLGQWLRYQGPVPVSKIANAFTLSLTEAKEVILLLTEEETLVPDVTIEDTGKDLVCDRENLGMLLRLSRRKQRPEIKEKPAALLVPFMARRQGLMRSTPQAE

SEQ ID NO: 93352 - protein, 183 aa, Unknown
  Obtained from environmental sample
  misc_feature (1)..(183): Xaa is any amino acid
RQIDLNVKTGAQTGVYWKILAIRLADRGMHKDALEAFERALYYKADDPTIFYLTGESASVAAASTLGFNSNSIAERERYQNLAESAYLRAIELDPTYAKPRLGLGILYAFDMDRPADAALQLDRYLQIMPNDIRGMFVLARAYYMNGENDRAIDLYNRIINRSKDPKVKAEAQNNIEIVRNLM

SEQ ID NO: 93353 - protein, 487 aa, Unknown
  Obtained from environmental sample
  DOMAIN (9)...(485): Phosphoglucose isomerase
  misc_feature (1)..(487): Xaa is any amino acid
MAGGLSYSYAAKAVDDKVLKLLQSLADEQELIGKYKALLDGEVINTGEKRKVLHQLSRGEQGKPVIENGKNIGEFYRKELQRFCDFAEAVHNGKYKGSTGKAFSTVVQIGIGGSDLGPRALYLALDNWAITEGKKKLNAKFISNVDPDDASAVIASSPLEQSLFVLVSKSGTTQETLSNELFVKDKLQKAGLDSSKHMVAVTSETSPLARNPAYLDSFYIDDYIGGRYSSSSAVGGCILSLAFGPDVFKEFLSGAAEADKMALEPDILKNAALLDALIGVWERNFLNYPSTAVLPYSQALSRFPAHLQQLDMESNGKCVNRDGKPIAYSTGPVVFGEPGTNGQHSFYQLLHQGTDIIPLQFIGFRESQRKDDGVIDGSTSQAKLKANLAAQITAFANGKSDSDGNKNFPGGKPSSLIYGERLTPRTLGALLAHYENKVMFQGFVWNVNSFDQEGVQLGKVLAKKILTKTEAGSGDKVLDAYSGLLGL

SEQ ID NO: 93354 - protein, 145 aa, Unknown
  Obtained from environmental sample
  misc_feature (1)..(145): Xaa is any amino acid
ERETKQVRAQAAIFPDETGRNFLKVFLIPFVKRVTNEGSTVITDDFKGYSALDSDEEPYTHLTINHSAKEYSDGNGIHTNNIENFWSILKRGIIGVYHKTSSKYLQHYVNEACYRRNNGNNMSAFNRILKRSVMPQANYAWKVVF

SEQ ID NO: 93355 - protein, 498 aa, Unknown
  Obtained from environmental sample
  misc_feature (1)..(498): Xaa is any amino acid
MLGEGNREAGLAIRKQFASAHARDAALAALAAYWRGKQSRLRVNTPNVNMNTMINIWTLYQSEINVKFSRFASFIETGGRTGLGYRDTSQDAMCVVPSNPKKCRERLVQLLKALVSEGYGLHLFEPEWFEEKKETGFRNPTLGAVADRKSRIHGVENACSDDALWLVSSITEYIRETGDAAFAHMVLPYANAEAAPDSVYEHCKKILNFSRRMTGSHGICQGLRADWNDCLNLGGGESAMVSYLFLWALDNFVRLAEFLGKTEDAAAYRTIHEKTAEVCRKTLWDGKWYLRGFTGKGRPIGTDADAEGKVHLESNTWAVIAGSDDHQRKMQAMDSVEEYLGTPYGLMLNAPAYTVIDDDVGFVTRVYPGLKENGAIFSHPNPWAWIAECILGRGDRAMDLYNRLCPAAWNDKCETRKAEPYSTCQFITGKNHPAFGEAHHPFMTGSGGWSYFAAVQYILGIRPDFDKLVVDPCIPAGWDGFDAVRCFRGVEYRITVRN

SEQ ID NO: 93356 - protein, 415 aa, Unknown
  Obtained from environmental sample
  DOMAIN (151)...(237): PPIC-type PPIASE domain
  misc_feature (1)..(415): Xaa is any amino acid
MDSENYGYMGYQIWREAYEAAAVHTAVLQEMKKAGYTAPVKKVDRDVAALPQFQENGRFSSTLYNRMDNNSRLSLWRQVQEEIAEKHFRSDVTGLLKPGAEAEFVGKMESPQRSFRMTVFDVDAYPEEEYEAYARDHSDLFRSVQLSMVTVSSSEREARQVLNTIKNGETTFEDAARAHSKDMYADRGGDMGMKMFHELSVDIPEEETRDIVISLAKGDYSDVIKTAAGWFFFRCEEAAQEADLSDPAVMEKVKSYLRNFERGRMENWAIEKAESFIALVNESDFYEALSLQKLQSRSFGPVPINYGNVELFTTLQSQSVPELAGSAENENFWKAAFSTPVGTPSQWIVQGSNVLVLFPVEEIEAEASKQETVASNYSAYWLDYMIGQSMRQFFMNSPKMEDKFMDVYFRYFVGN

SEQ ID NO: 93357 - protein, 1339 aa, Unknown
  Obtained from environmental sample
  DOMAIN (322)...(733): Alpha amylase, catalytic domain
  misc_feature (1)..(1339): Xaa is any amino acid
MVKFQLKLDKLEKKASIWAKNRKVRMEFHIDRDMRQKYGLKDSLFSLTGNVFLADMKQTRELAAKFNAKQDPNHPERFIKAGHLYAMGLIDEILHYVIALYREEVQPDAFETALDRLETNIGGKQTDALLTSFSEQFPPRPVYRGEKKVPEYLKSKEDGESCRALSVEETMMLSLANLNPAFNPFKFLFDDRDLSKKTVYPNAIEELKEHFKTLPPFGPDGMNLWDLLRSPALASPDSLFGQLEYIRKHWGAFLSKFMARLLMSLDVMNEEDKPSFMGPGPSEVLTFAGLDEYERFSPDQEWMPKTVLIAKSTLVWLFQLSQKYGREINRLDQIPDEEIEILARRGFTGLWLIGLWERSQASKIIKQWTGNPEAAASAYSLNDYDIAGELGGWGALANLRERCMRRGIRLGSDMVPNHTGIDSKWMIEHPDRFLQLPYPPFPTYNYNCGNLSGRDDITVQIEEHYFSRNDAAVVFKRIDNRTGDTRYIYHGNDGTSMPWNDTAQIDFLNPEAREAVIRTIIGVCQQFSIVRFDAAMTLAKRHIQRLWYPVPGSGGAIASRAEHSISTEEFNKRIPNEFWREVVDRCANEAPHTLLLAEAFWMMEGYFVRTLGMHRVYNSAFMNMLKNEENAKYRATIKNTMEFDPEILKRFVNFMNNPDEETAVAQFGKGDKYFGICTLLVTMPGLPMFGHGQIEGFEEKYGMEYRRSYRDEEPDGYMVERHERDIFPLMKRRYLFSGSENFRLYDLYCGGSVNESVFAYSNRVKTGHGDERALVFYNNSYYETSGWIKVSDPPIPCHEGTRRDSLSEALLIHGEDRYFTLLREQKSNLWYIRSSKAISENGFFVGLKGYETQVFLDIYEVEDDEKGRWARLNNDLEGRGVSDPLAAIKDIFLGELYYHFMEMFKPEIVEKLCALKDKNSAAGDIKEDAGEFFITASFFMDGANGSYDEWAVFDEEGVKRKFSMISNDDILLEFNSFLERMMIIREMLQKPDCPFLKSLKERTDEGKKLCAIVMSYGLLYMLRMVIGKEAEGRHASDLAFTHWDLGRKLREIFIRNGISENEAWRIIDIERVVLNKTALLDNPLLQKGGKFDAAEFAALIIDENYLDADFRRILGINIFEDVAWFNKEGFEDALFYTSLFFLVEGSVKISMKERIDRIVKIYEVLIKAEEKSEYRFDNLMEYLVALSEKGKGKRSKSKEQRAMSKDEKIGGKDAEKPAKTKSVVKTVVKKADKTIAKPKAKIATKPEAKKTGAAVKAKPAKAKKPAKPAKTVKAKVSKVKTEKPKPKAKAEKTKPVKAKIKVKAEKAKPKVKAKPVKLAKSAKIKAKAKPDKAKSGKGK

SEQ ID NO: 93358 - protein, 173 aa, Unknown
  Obtained from environmental sample
  DOMAIN (75)...(171): Domain of unknown function (DUF303)
  misc_feature (1)..(173): Xaa is any amino acid
LAFGQSNMEGQNWNGSSLAYGSDVLPTKYKQNVDKRFQVMTAVAGTYKLASGTENRKQGEWYTAVPPLLRNTLGLSPVDYFGRTLVAGISDPNIKIGIIAVAVAGSAIEGLEKGNGANTYFSSQQDFMKQIAAIYDNNPYNRLITLAKEAQKVGVIKGIIMHQGESGAASGNA

SEQ ID NO: 93359 - protein, 310 aa, Unknown
  Obtained from environmental sample
  DOMAIN (1)...(278): Polysaccharide biosynthesis protein
  misc_feature (1)..(310): Xaa is any amino acid
VRFILRERPNWNIVNLDALTYAGNIENLKDLENNPHYKFFKGDITNEQDIFAAGDLLPAGKPDAIVHFAAESHVDNSIKNPGVFVRTNVEGTLNLLKYAKEKSIRHLQVSTDEVYGTLGSTGYFTEDTPLAANSPYSASKAGADLLVRAWHETYKLDTVITRCSNNYGPYQFPEKLIPLAVTNLMQGKKIPVYGKGLNIRDWLHVEDHCRGILLALEKGESGRIYNIGGSNEWKNIDIAKELVKIMKMDETKIEFVTDRLGHDLRYAIDATRIRKELGWEPRYTFSTGLPETVKWYVENEAWWKPLKAKG

SEQ ID NO: 93360 - protein, 67 aa, Unknown
  Obtained from environmental sample
  misc_feature (1)..(67): Xaa is any amino acid
MEDILDVYTRKHDKNCPLVCVDEFSRQLIGEVRTPIPAEPGKPERFDTEYKRNEAVEFISFGGFIKS

SEQ ID NO: 93361 - protein, 312 aa, Unknown
  Obtained from environmental sample
  DOMAIN (199)...(270): HAMP domain
  misc_feature (1)..(312): Xaa is any amino acid
MNLFKNASISKKLIMLLVVFILGYSIFGLVAFSTLITLRIHGKLYNQIIMSKDLIADVLPPPSYIIESYLDVLQAAEETDPAKMDYFFKELKRLQADYEERHQFWINEPLLEQGALRDAMLKGAYDPAIKFYNIIFSQFIPALQNNNRGYARKLAHGELKTLYETHRKSVDQVVLGATEKYEKAETIAGIAVRQDTKLLFTIAFVVIAIAIILSLMIRSSIVKPIVKVTNTLRDISEGEGDLTRTIVINSKDEVGHLALYFNKTLEKIKNLIITIKTQTTTLTSVSSELSSVSMLLASGAEETLAKAIQLQV

SEQ ID NO: 93362 - protein, 343 aa, Unknown
  Obtained from environmental sample
  DOMAIN (224)...(247): 4Fe-4S binding domain
  misc_feature (1)..(343): Xaa is any amino acid
DYTGTLQRYLGWSAKIQLIPAVLAGNIAIIAGLVLATALFGRVYCSVVCPLGIFQDVISRIAGVGKKNRFSYRPPKKPLIILRYGLLAAVIVVCMVIGVGIAVIDPYGLYGKMVSQILGPVYKWGNNIFAYFAERADSYAFYRADIWLTGAGALAAAILTLAVIGVFAFKSGRGYCNTLCPVGAFLSIFAKISPYAQMINKEKCNSCGLCAKNCKAGCIDPVKKEIDMLRCVSCCNCLGMCPNGAMSLTPRNPFGAAKSVSSPKVEPAKFASDGLGRRGFISGAILLALGLVTRSAARAFDGGLIPLEDKKSPARSTPIIPPGADNARNFGKRCTGCQLCVSV

SEQ ID NO: 93363 - protein, 382 aa, Unknown
  Obtained from environmental sample
  DOMAIN (2)...(373): Aldehyde dehydrogenase family
  misc_feature (1)..(382): Xaa is any amino acid
MILAANSRDVDRARANGMKQSLIDRLMLNEQRIEDIVEGIEIVIKQDDPVGKLKAGWTLPNGLFVEQVSVPMGVAAIIYESRPNVTVDCATLAYKAGCSILLRGSSSALESNRALVTAIKMGLESGGGIPDAVALSDQAKPGSHEDVDEILAARDWIDVVLPRGGRELIQRVVQNARIPVIETGEGNCHIYVEPSADMDKAVEIIANAKLQKPGACNAVETLLVHRDALAALMPPLAVRLAGKAELRCDAESKAAVGAAAGGGITLKDATEEDWATEFLDFILAVKTVDSCGEAIAHINRYGTKHSEAILTNDLQSAEQFRAGVDAACVYVNASTRFTDGGEFGFGAELGISTQKFHARGPMGLEALTTIKYLISGSGQVRG

SEQ ID NO: 93364 - protein, 254 aa, Unknown
  Obtained from environmental sample
  DOMAIN (181)...(254): tRNA synthetases class I (E and Q), anti-codon binding domain
  misc_feature (1)..(254): Xaa is any amino acid
MRMKAGEFPDGSRVLRAKIDMAHPNMLLRDPIMYRILHADHHRTGDTWCIYPMYDYAHGECDSIEKITHSICTLEFDVHRPLYDWFIEKLEIFPSHQYEFARLNLTYTIMSKRKLLELVKNSYVSGWDDPRMPTICGIRRRGYTPESIHLFAEKVGVAKRDNVIDLSLLEWCIREDLNKRAQRRMAVLNPVKLVITNYPEGKTETIDAANNPEDESAGTRPVIFSRELYIERDDFMENPPKKFFRLALGQEVRL

SEQ ID NO: 93365 - protein, 272 aa, Unknown
  Obtained from environmental sample
  DOMAIN (12)...(182): Archaeal ATPase
  misc_feature (1)..(272): Xaa is any amino acid
MAEKHVIRRVYLKTLEDMRDKNLIKVVTGARRIGKSTLLTQYRDALNAKSPDAPTLSINFDEPEYRFLAEKGWKDVYDFISLALHSEKMNYIFLDEIQNIPQFEKLLEGLFVHPKIDLYITGSNAYLLSSELATLLTGRVFEINVLPFSFSEFLEFNGNTENTDRAFVNYLNYGGFPEAVKLANVGESYSFRYLQSIFRNIYENDIKPRYSIHSDISYREIVDFLADSVGSPMSPRNIAKVLANSGKKIDHKSVSKYISTLIDSYIFYRASR

SEQ ID NO: 93366 - protein, 262 aa, Unknown
  Obtained from environmental sample
  DOMAIN (38)...(118): mce related protein
  misc_feature (1)..(262): Xaa is any amino acid
MGITAAQKFRLGVFVIAGMAILSAFIIIPIGMKMSQHQKTYVSFFEGESLQGLEQGAAVKFNGVAIGTVQRVTYNVEDINKMKVELSVMESFPMRVDMYATTGLIGITGLKYVEISGGSNEAALLKPGGEVPTRSSLFASVGEKAETLIEKVETLLNHLNTVTDPDSLRSVKVVMDNLAGLTGDARVVFNSVGDAVPAAVRIIDTVQLAVSEIHKITRDVKELTDTLKTGVNGADIPAIMARADSTVTAVKTLTDNISLMVL

SEQ ID NO: 93367 - protein, 221 aa, Unknown
  Obtained from environmental sample
  misc_feature (1)..(221): Xaa is any amino acid
MNKRIIFFISLLIISGLIFCACISNGKGGEAPSPVIEKEDETPISVDFPEGTKEFHVYLAFGQSNMQGPGQIRPQDKEGISERFKIMGVVAGRYAGESRAKGEWYRAVPPLIIPDTGLVNYLGLNIGLTPIDYFGRTLINGIPKDITIGVIAVANGDMALAAFHKTKGDDYYKGKNTLSGRPSQTEMQGMSRYRGAGYKNMYDAIIQNAKLAKRAGGIIKG

SEQ ID NO: 93368 - protein, 285 aa, Unknown
  Obtained from environmental sample
  DOMAIN (9)...(245): haloacid dehalogenase-like hydrolase
  misc_feature (1)..(285): Xaa is any amino acid
MEPDSAHNLKILALDLDDTLLRSDLTISYRTRNAIRQAAQMGVTVVLASGRVYAAMDDFSRLLGLHEKPGYLICNNGAVILETHTGNIVYEAKLPKETVLAVCDLADAEGFPLQMYDNDIIYVSRFNEYSNIDQRTTGLRQVVVENFKDMLVDSCCKLIIPGDPEHIKHMEVIIRTYLGHSLTLFTSHPYFLEITPKDIDKGTALARVADILKVKQEQTIAIGDSMNDEAMIRWAGIGVAMQNGDERVKSIADLVTEHTNDDDGVAEVIEKYFPIKNEQKEGDSQ

SEQ ID NO: 93369 - protein, 471 aa, Unknown
  Obtained from environmental sample
  DOMAIN (205)...(365): ATPase family associated with various cellular activities (AAA)
  misc_feature (1)..(471): Xaa is any amino acid
TRFDNMNLEDLLGYLHSLLGSIKIDNLNIDGFNYEKEYVFERNKDNCFVKKIKEYDLNEGSIILMIIFCHNFVQNDSELIKADNLYDEMREIAGFSETRRIQNRLKSGKHKVVEKGLIQFDCQDGMADTEHFRLTEKAKEEFLADINFAEKAKHNGKNIIPADKITEKNLYYSDKIKDRINELTELLGESNFSGIQKRLTEKGMRTGFACIFSGPPGTGKTETAYQIAKKTGRDIMLVNIADTKSMWFGESEKRIKSLFDRYRGIVKSGGLAPILFFNEADAVLGKRRELSQTRQGPDQTENAIQNIILQEIENLNGILIATTNMAVNLDKAFERRFLYKIEFEKPNTDSKIQMWRNFIPELDENEASKLAVKYDFSGGQIENIARKNTVSYILKGINSNLSILENFCILVPNSARGIVMTSTDSYLGYFFDDVMKSPLQIGMVYCFWTTFEIPRACLLPQTFEKIRQSKN

SEQ ID NO: 93370 - protein, 279 aa, Unknown
  Obtained from environmental sample
  misc_feature (1)..(279): Xaa is any amino acid
NDRVTERKIDGASLVGSFASQLDHRKFDIIDNYSAAVHLLALNNAAAPLDDVRVRKAINYGIDVQGIIDGAFFGNGFPSGSPIIPGLYNYYDASLSYPYDPNTARSLLAEAGFDNIRKLTLDITVPSEYTMHVDTAQVIVSQLEKIGVAASVKLVDWNTWLSDVYRGHNYQATVISLDSQIVSARNFLARYRSDNSGNFICFSNADFDRVYDAILTETDEVKRKHLYLEAQRIITSNAASVYIQDILYYKVFRAGAYDGVKNYPLLVVDFSAIYGIKKN

SEQ ID NO: 93371 - protein, 318 aa, Unknown
  Obtained from environmental sample
  DOMAIN (95)...(313): Binding-protein-dependent transport system inner membrane component
  misc_feature (1)..(318): Xaa is any amino acid
LNFILRRIVIALITVFLVSIFCFLAFSVIRGDPASFLAGINSSQEQLSMLREEMGLNRNVVIRYLDWLSGFLSGRTGISLSFRGEAVSSLISQRIPVTITLAILSLFFILLISIPVSLLTVNREGGILDGIVNFLTAAGLSTPNFFMGLLFIFFFGFGLKLFIPGEYINYNENFFGFIRCLCFPALAIAIPNAAILVKFLRGSLFAELRSDYVIMARSKGAGGLYILSRHVLKNALLPAVTIFAMIIAEVFSGSIIIEQVFTIPGIGRLLITAISSRDYPLIQSLMVYIAFIIITANTLADIAIMIIDPRIREAKDIR

SEQ ID NO: 93372 - protein, 258 aa, Unknown
  Obtained from environmental sample
  misc_feature (1)..(258): Xaa is any amino acid
MAVGRQDYKERKEEKIATYKRRARKSSILANQESDHARKMGDVIPLGQPILVGHHSEGSHRALLKRIDGAQRRASEAYEKSEYYEGKAEAAEKNHSISGDDPEALERYQKKLAELEKAQEYMKNVNRAWRKGKAALVALGLPEDESERLANETKRPCPRWMLGNNSAEIRRVKEKMETLKKLDTMTVENIKFNGGEMVINLEINRVQIIFDAIPAPEKRALLKSNGFKWSPKEMAWQRQRTINGINAAKRLIEQHFSS

SEQ ID NO: 93373 - protein, 283 aa, Unknown
  Obtained from environmental sample
  misc_feature (1)..(283): Xaa is any amino acid
LDDYKGESGNGEDKYGFSALPGGYGSMGYFLEVGDRGSWWSVHKYDSDLALTRGMGSRFGAIIYGEEDNMDELRKLRSIRCLQDTLTSTKEMPDEPIEPKCPNAQQQKGLLTDTRDCKTYKTVKIGEQVWMAENLNYAAKNSRCHRDSVAYCDKYGRLYRWETAMKACPSGWHLPSEAEWEALAEAVGGKETAGKYLKATSGWNNDKGESSNGTDAYGFAALPLYGRDYGIWWSTKERLRSFALYWGVHYSSEGMGDGNEVKSSLLNVRCVQDTPAPTQGSVE

SEQ ID NO: 93374 - protein, 367 aa, Unknown
  Obtained from environmental sample
  misc_feature (1)..(367): Xaa is any amino acid
MNGGQIGSIVRPNKANGHATSGNDNGGGGVYVTKGGTFNLNEGVIGGDGRDCNIAEDNGGGVFVLGTLNLGNEGIIKGNTAKKFGGGIYFSGTDFTMNGGTIGEQGSPNIAESDVPTGGGGGVYFTSNTATQNNYKTFTMKGGTICYNESDKTGGGVCVYYSNFNMSGGAINNNKGRSGGGVFTLDVKFSISDGTIEGNTASYNGGGVNIYGSNSTFDMSGGKIKSNKAEDTSSTTVNGGGVFINSGTFNMSGTALIEGNSATNNGGGVYLNSGTFNMSGDAIIQSNSTLNYGGGVYVNKDGIFDMSGGYVYGSDHENPNLMNKANTNGGYAIYVNEGGDAHYSGEYLSSGATIFGDRWSATCCEIS

SEQ ID NO: 93375 - protein, 417 aa, Unknown
  Obtained from environmental sample
  DOMAIN (26)...(309): Putative modulator of DNA gyrase
  misc_feature (1)..(417): Xaa is any amino acid
MTRQETAFYALEALKKAGAGKVACKVSTGRKDEFNVEANKFSLLRTLFNNELSIKAIKDGRKGVIGINKLDKDSVNEAVANCIAMTKSALPDEAEDIAEKGENKSFDQTCGGPNMDKLFSRTKEFVDQTGSEFPKIVLEGLISDFNSVETTYVNSNGVEFNSSSECYDIQTMFSAKDGGKSSSFNGYFARIASLDTPFMELDMHRQLLDGSSKSLNPRMVDGKFVGKVLLTPACHDMIWYALFNFLSDAPLIKGTSRWKDALGTKVADSKLTFRTAPLNPLVVAGERFTVDGFESRDMDIIREGVLENFALTLYGSRKTGKPRALNSAFNNIEVAAGDKPLDEIIRGIDRGILMNRFSGGSPGASGEISGVAKNSFLIENGKVTDALKETMVSFDIINVLANISAISSERCRNGSIH

SEQ ID NO: 93376 - protein, 331 aa, Unknown
  Obtained from environmental sample
  misc_feature (1)..(331): Xaa is any amino acid
VERYKNLSSRVVRVNCLDIEKLLAVSDGADSHFYQPRSFVYVTMTSDTDDKIPVELFTAIGGFGRFNEVFSDPALLTEKLDKLYEQLMQKREGVYSSAGVKKCVLAPELAGMLAHEAIGHTVEADIVLGGSVAGNYMDKEVASELVSMVDFAHTAFGKPCPLPVYVDDEGTIAEDAILIEKGILKSYMHSKESARHFGVKPQGNARAFSFSDEPLIRMRNTAVLPGKSKLADMIAGVDDGYYLVKTGNGQADTTSEFMFSIEMGYEIKNGKIGKALRETTISGVAFEMLKTVDMISDDMVWECAGFCGKKQPMTVGMGGPAIRCDLNIGGR

SEQ ID NO: 93377 - protein, 83 aa, Unknown
  Obtained from environmental sample
  misc_feature (1)..(83): Xaa is any amino acid
MNKKLAIVICNWNKKDYVVKCVESVFASDFHDYDLIVVDNASTDGSAEAVAAQYGDSVRLIVNPENLGGSGGFNTGIREALKN

SEQ ID NO: 93378 - protein, 81 aa, Unknown
  Obtained from environmental sample
  misc_feature (1)..(81): Xaa is any amino acid
MSEVKLCVHRAADTIGGNCIEIAAPGGERILLDAGRPLDTPEDAPTPVPASLDIDGSVLGVLLSHAHPDHYGLLDVLPADW

SEQ ID NO: 93379 - protein, 258 aa, Unknown
  Obtained from environmental sample
  DOMAIN (88)...(218): ATPase family associated with various cellular activities (AAA)
  misc_feature (1)..(258): Xaa is any amino acid
MLNMTQARLQSCRAELGRCGLLDTRRSSDRLRLEDCLLPFWEASVNTEELFSRPLSGAALPLEAFHVAPEDAAHVKTLLERAGKAPVHILLYGAPGTGKSAFAHSLAQACGVKAWAVISREDDGDKNRRASLTACLHVAAGHAGAFVLVDEAERLLDTGRHSGFFGFFGPGGATKDKAWLNDFLERPGQRIIWITNHVEHIDPAVRRRFSFSIHFEKLGIRERTDIWRQVAAKHRVAQRLGDEQIKALARTYPVEAAV

SEQ ID NO: 93380 - protein, 295 aa, Unknown
  Obtained from environmental sample
  DOMAIN (1)...(252): Glycosyl hydrolases family 2, TIM barrel domain
  misc_feature (1)..(295): Xaa is any amino acid
MPELYDLCDEMGFLVMDEAFDEWEGCKNKWWQGHNVYPPKRQGYAEDFPQWHEEDLAAMVLRDRNHPSVIMWSVGNEIDYPNDPYVHPIFQQMTGNNDANKPAAEMQYNKNKPNMERLATIAANLVRIVKKHDTTRPVTLAAAFPELSSRLGFLEPLDVAGYNYKEQFYEEDHKRFPKLPILGSENSHSVAAWKAARDNEYIGGQFLWTGIDYLGEARGWPVRCSGAGLLDTAGNEKTAFFRRQALWLEKPVLYLVSRPKPTAKCPNSGEIQPWDFFRCWDYLPGEKREAACYTN

SEQ ID NO: 93381 - protein, 229 aa, Unknown
  Obtained from environmental sample
  DOMAIN (64)...(152): Mur ligase family, glutamate ligase domain
  misc_feature (1)..(229): Xaa is any amino acid
MTLNGFPGELKIRIPGKHTALNTAAAIALCSLLVKKEFGDEGGDGWNEERREGVRKELEEFSGSKRRSEILGEAGGILFMDDYGHHPTAVKTTLQGLKDFYPRRRLVISFMSHTFTRTATLFDEFASCFNDADIILLHKIYGSAREVYKGGVTGRTLFEKAKENYGERVFYAEEVEDGFELMKETLKSGDLFITMGAGDNWRLGKKLFEFFYKSEINNELVKKENGNSI

SEQ ID NO: 93382 - protein, 273 aa, Unknown
  Obtained from environmental sample
  DOMAIN (117)...(272): Radical SAM superfamily
  misc_feature (1)..(273): Xaa is any amino acid
MAEQKARRVIRKVLREQGKSCLIVTGCYAQMDKAAIKELDESQSGRLFIVPGEAKDRLLDLGPFLSGAAAGENPDLLRGLIASWLNSYEDSNKTDKTIDGAFRFIPEKFFSHSRAFLKIQDGCDRSCAYCRVSLARGKSRSLEAGEVLKQLQALEQREIAEAVLTGVNICQYRDQGMGLPELLEFLLEGTGVIRLRLSSIEPEPALFTDAYLNVLENKRIRPHFHLSLQSGSTTILAKMGRQYSPDDIEKIVGLLRRLRRDPFLACDIIAAFP

SEQ ID NO: 93383 - protein, 328 aa, Unknown
  Obtained from environmental sample
  DOMAIN (1)...(102): Glycosyltransferase family 28 N-terminal domain
  misc_feature (1)..(328): Xaa is any amino acid
MDRAIIEGAGIEFFGIPSGKLRRYFSLRNFFDAFKIAAGFFAARKILKKEGASLLFSKGGFVSVPPCAAASSMKIPVFTHESDFSPGLATRLNARFAEKIFLPYKESVAFFSGRAVKKTCVSGNPVRDEFAVADPAKGRAFLGLKDNDKILLVLGGSLGSREINDLVKVCLKRLTEFFTVVHQTGENNIENALKENERYKPYAYFRDEIPHVIAAAELILCRSGAGTIWECKSLNKPMVLIPFRGSATRGDQVENARLFEEAGAAICFIPENSGSSSAEKLSALIVSLAQDPEKLKFMAEAKIGGLSEGNAADFIAREIAERIRGKNG

SEQ ID NO: 93384 - protein, 293 aa, Unknown
  Obtained from environmental sample
  misc_feature (1)..(293): Xaa is any amino acid
MLFIRSVRKLLARFNPVLWEDEPKAGKISPLVNSLEEDIDALVFLFAQSSVDAGSVTKLTEEITKGAFKLHSEGMSETIPIGQIRRAAFWSRLAPASGGKCLVIENAHRMQEEARNSLLKLLEEPPVRLTVVLTAPRPLSLIPTILSRLRPYAFNSRDAKAEQEVIRRVFKADGYTGGIGPYIDSFLPVNLDTLEALAAFFAASVAYRAALLSKKQGRPLSGEVALLGKSSTPKAEAAGLGRPKEDTAAVINLIIEKAAKFEVRSLFSRFLSCLLAQVSLSAKSSGSPPSVSF

SEQ ID NO: 93385 - protein, 290 aa, Unknown
  Obtained from environmental sample
  DOMAIN (3)...(290): IMP dehydrogenase / GMP reductase domain
  misc_feature (1)..(290): Xaa is any amino acid
MKLGLTFDDVLLYPGASEILPAQTSIKTELGKIKLNIPIVSAAMDTVSTAPLAISLALQGGISVIHKNMSIENQAAEVRKVKRWESGVVLNPITLNADEPVSKAFEISAKQKLSGFPVVSKGKQLVGIITGRDLRTVTDRSMKVKDVMTKKLITASPKISLAKAKEILNTNRIEKLLLVDNKNNLKGLITLTDILKREINPEACLDSNGQLCVGAAVGTAADTLERAAGLVEAGVDMLVVDTAHGHHINVRNMVKTLKKTYPNLTLVGGNVATAEGVRELAKCGADVVKV

SEQ ID NO: 93386 - protein, 328 aa, Unknown
  Obtained from environmental sample
  misc_feature (1)..(328): Xaa is any amino acid
MGAAGGVLADQWLEFFVCESLEADVLAAKGQRRISKRSSNTKGEDNVISNGSGVVVNKGQAVLIIDNGRIAELCAEEGRYTYEQSSEPTLFYGSLGKGIIDALKNMGERFKYGGSPGKDQRIYYFNTKEIMGNKYGTPAPIPYLIVDPTMNLRLTISLRANGEYSYRMTNPALFYANVCGNVEENYTRDKIDSQLKSEIVTVLGPTLAKLGAGLEYHMIPAQTDKLAVLLNEALTAKWREGRGIEIVNFGIACAATEEDEARIKQLQTAAVMRDPTMAAASLVNAQSDAMRTAAGNTAGAMTGFMGMGMANMAGGMNSQGLFAMGQAQ

SEQ ID NO: 93387 - protein, 377 aa, Unknown
  Obtained from environmental sample
  DOMAIN (27)...(290): Rad51
  misc_feature (1)..(377): Xaa is any amino acid
MAKSNDSEKSRVNPNATSEEKAKALEAARLQIEKQFGAGSLIKLGAHNAASGIEVVPSGSILLDEALGIGGYPRGRIIEIFGPESSGKTTLALHAIAEAQKLGGSAAFIDAEHALDPVYAKNLGVNIDDLWVSQPDNGEQAMEITESLVRSGAVDVIVVDSVAALTPQSEIEGEMGDAQMGAQARLMSQALRKLTATIGKSRTILIFINQIRMKIGVFFGNPETTTGGNALKFYSSLRLEVRKTETIEVSKDADAIGNRVRVKVVKNKVAPPFRRTEMELMFGKGISAVGSLLDCAVKYDLIKKSGAWYSYNDEKIGQGRDNTREYLEQRPDFTKELELKLRKIIFPDREFPQFKAEKVKGAKETKAAAEEKQEEKI

SEQ ID NO: 93388 - protein, 320 aa, Unknown
  Obtained from environmental sample
  DOMAIN (1)...(319): tRNA synthetases class II (D, K and N)
  misc_feature (1)..(320): Xaa is any amino acid
MDLSLLQKRAAVIKQTRSFFDNKHYLELDTPLLCADLIPESCLEVFQTERLFPHGSRKESRSLWLIPSPEIWMKKIIAKHNVNVYQICKCFRNGESCGHLHNSEFTMLEYYTINANYINSLSLTEELFSHLAKDSAISVDNFERITVADAFAKWAGFDLFATAEEGPTAMELQAHKLGLTPMQGMTVPQLYDLIFIHSVEPQLKSQKPIALLDYPAFVPCLAKKAPNGRTTERWELYYNGIELANCYSEETNPQSVKDFFISEEAQKNKTAIVKHNVDHDYWKIFENFPSCSGVAIGLDRLIMALTGKTTIDGVLPFSGF

SEQ ID NO: 93389 - protein, 340 aa, Unknown
  Obtained from environmental sample
  DOMAIN (15)...(324): Pyridoxal-phosphate dependent enzyme
  misc_feature (1)..(340): Xaa is any amino acid
MTPNETEKAVGFHRSFPQYMMTPLVKLSHLAELFGIKGIYIKDESFRFDLNAFKVLGGSYAIARYIAKRLGKDIAEIDYDTLVSCETKQKLGDITFYTATDGNHGRGVAWAANRLRQKAVVFMPRGSSHIRLQAILNEGAQATITDLNYDDAVRLASKKASEDPNGVVVQDTAWAGYEEIPSWIMQGYGSMAVEAMAQLKEAGVERPTHVFVQAGVGSLAGAVIGYFTDLFPNNPPVMAVVEASSANNLYISSIAGKLVGLKGNLSTIMAGLACGEGNTISWEILKNHAKIFVSAPDWVASRGMRVLAVPVKGDEKVISGESGAGRWVCCLPFCGKKNTA

SEQ ID NO: 93390 - protein, 238 aa, Unknown
  Obtained from environmental sample
  misc_feature (1)..(238): Xaa is any amino acid
IDAGSGNSIARSIYVSGTDVYAAGQIFLQGRQYATIWKNGEAKRLNNGDNDAYAWSVFVSGNDVYVAGAEIMEQSVAMLWKNGSPQPLGDGSKYAIATSVFVLGDDVYVAGQQVNPQHKSVAVLWKNGAMQPLNDGSYDALANSVFVSGTDVYVAGWEENEQGTYVATLWKNGVSQQLADGSSQSSAESVFVSGRNVYVAGMDHSQEKFVARLWKNGKLQPLNMEPGTGYAYSVFVGK

SEQ ID NO: 93391 - protein, 136 aa, Unknown
  Obtained from environmental sample
  misc_feature (1)..(136): Xaa is any amino acid
TNSRPSGAFIDTEIQKTRDRGYSETILGRKRYLPEINSAIRTIREAAERTAINTPVQGTAADIIKVAMINLHKRMPDKWPQSKMLLQVHDELVFETPAESAEEFAQWAKGEMSKACELKVPLKVDAGIGKHWGEAH

SEQ ID NO: 93392 - protein, 382 aa, Unknown
  Obtained from environmental sample
  DOMAIN (49)...(252): Stage II sporulation protein E (SpoIIE)
  misc_feature (1)..(382): Xaa is any amino acid
MPDAKPISVPGDSNSSLLQNAFVEVGHFQLCKHNQNAPGDVFLSQKNPSDGRVITTLSDGLGSGIKAGVLATLTATMATKFISYNIPIRRVSEIIMDTLPVCSERGISYATFTLVDIAPDATVKIMEYDNPPYTFIRGEAVVEPSKEATAFERQDKSTGPKNDTRVLYSRFNAAIGDRLVFFSDGVSQAGMGTKRYPFGWTTAKAREFALGSVREKPEISARELARSIVRQASQIDMSKPKDDISCGVIYFRRPRDMLVVTGPPIRPESDREIVNIFSSFVGKKVVSGGTTATIIGRELNRNIRVNMKSFVKNVPPWSEMEGADMVTEGIITLGAVQAMLEKRQEIESNTGGMDAASRMIDLFLDSDRITFIVGTKINEAHQ

SEQ ID NO: 93393 - protein, 606 aa, Unknown
  Obtained from environmental sample
  DOMAIN (406)...(437): Putative Fe-S cluster
  misc_feature (1)..(606): Xaa is any amino acid
MTAAPLTPAKAPVYTELAKCQDCYKCIRKCPVKSIKVEKGQASILFDRCIYCGRCVVNCAARAKHYRHDVDKAKLPLADGRKTIVSLAPSFVSEFTDWKPEELIAALKKLGFAAVSETALGADFLSARIARDLAPLAASRASTGKPPLMISSACPAIVDYIQLYAPILAPYISPHASPLLTHARFLRSHYESEGGEKIAVVFVGPCIAKKHEADLRNTEIDAAITFTELRRWLDKEGVTPQTISFSMSPSALAACAFEPRRSAKGAFFPLEGGEIKAFSAYVAEAAKAERGYIHTISASGFPAVRRILEGFDPAALDEPVFLELLACPSGCVTGPGMSGAVPGVIRHTRLWDYARSADDTLDAETLSRLPLVDADYPMATLLDAPHTEQEISEALLGVGKYSLAGRLNCSSCGYDTCRDFAIGLLDGRAEKSMCASYMRELANKTANGLIKAIPTGVVIVDRDLKIIDCNVQFARLMGSEIEELFAISPGLEGADLRKVSPFPQYFQTIIDPSGPELAQTDVREGSKIFHLTVFAVEKGVTAAGVVEDITAPRVRIETTVDRARELIKKNVSTVQQIAFLLGENAAESEAILNSIIESYTVGEEDA

SEQ ID NO: 93394 - protein, 81 aa, Unknown
  Obtained from environmental sample
  misc_feature (1)..(81): Xaa is any amino acid
MDAITVCMGSSCFGKGNSSNAGFITGFIEKNNLQDSVEVSGCLCSGACARGPNIKINDKLISGISEQTVADVIVKELGLEL

SEQ ID NO: 93395 - protein, 1241 aa, Unknown
  Obtained from environmental sample
  DOMAIN (16)...(247): BadF/BadG/BcrA/BcrD ATPase family
  misc_feature (1)..(1241): Xaa is any amino acid
MYFCIILCWRWKVLHIGIDVGSTTVKAIVIQPDTKKILFSRYQRHNAYQSELVRTFLKEIVSQFPHEQFKIALCGSGGKAIAELIHAPYIQEVVANSIAVRNFYPQARVAVELGGQDAKIVFFYHDSVTNQLAVGDMRMNGSCAGGTGAFIDEIAALLRTPVEKFDSLAAGGTQVYDISGRCGVFAKTDIQPLLNQGAIIEDIALSTFHAIAKQTIGGLAQGLEIRPPVVFEGGPMTFNPTLIRVFAQRLGLKDTDIIVPQKAELFIAYGTALAINEDFLEQESGHDRLFSPEAALTSLAMYREIVLGNSTLQNINYFSNDAEKESFYARHKMQTINHDIVSHGIQRGDTLRVYLGVDAGSTTTKFVLIDEEENVIDSFYNPNKGEPLKVIRQALLDMHAKYTAAGVNLEIIALGTTGYGELLFDKALGADYHTVETVAHAAAAQKYIPDVSFILDIGGQDMKAISVSNGIVTNIIVNEACSSGCGSFLETFAETLHIPVNDIAETAFNAKSPAKLGSRCTVFMNSTIITEQKNGKQADDIMAGLCRAIVENVFTKVVRIANPARLGNKIVVQGGTLRNDAVLRAFEQYLGKFVVRAPFPGEMGAIGIALLTKREISENGYSSPHGPGDRTRFIGFDALKTFEYKQEANLLCPFCANNCNRTLLRFSNGQTWVIGNRCERGEVVGDPNDPAVREQVKNITGLMNAAPDMIKVRNELLFKDYKYTQLLPAKDITIGLPRVLDFWRSMPFWKVFWAALGYKTKVSRKSSRQLYEKGLQYVASDTVCFPAKLVHGHIQDLIESKVDRIFFPQINRLPPDNPEKGSTFTCPVLKGYPLSIRCSDNPEQKHNIPLDTPLCHWFSKKDMRFQLCRYMLETFNIPKKTTLAAIEQGEKALEEFNRALTDNGKKIIADVEREKKIAVVIAGRHYQYDEHINHNLSHYFTSMGIPVLTLDSLPSHGKIPLSKSRIEITNNNHARLLGGAIAAAQHPSLEYVDIYSFGCGHDAVYSDEIIRIMDEISGKAPLILKLDESDIAGPLRIRVRSFIETVMIRRKRKTHNAKPLGDPYAVKYTKKEPKKVLLVPNVSRAFCMVLSGALANEGYLVEPLPMGGLEAIAMGKKYVHNDMCLPVQIVVGEALLALKSGKYDPDKTLVGMAKVLCDCRLSNYMPLARKALDEAGYPQVPIVTTDMSDSKNAHPGLRFTNITYTKAMWSIIQTDAIEFLRRRIRPYELQKGETDKVVKTL

SEQ ID NO: 93396 - protein, 634 aa, Unknown
  Obtained from environmental sample
  misc_feature (1)..(634): Xaa is any amino acid
NIPLDSPVCHWFSDKDMRFQLCRYMYEAFNIPKKVTLAAIKQGEKAMEEFYGLMVEKGKKVLEDVEKEKKIAVVIAGRYYQYDEQINHNLSHYFTSIGIPVLTLDSLPNLGKIPLAKSRIEITNDNHARLLAGAIAAARHPSLEYVDIFSFGCGHDAVYSDEIIRIMDEISGKAPLILKMDESDIAGPLRIRVRSFIETVMIRRKIKAHNVKPLGDPYPVKYTKKEPNKLLLVPNVSRAFCLFLSGALANEGAIVEPLPMGGIEAIAMGKKYVHNDMCLPAQLVIGECLLALKSGKYDPDKTMIGMAKVLCDCRLSNYMPLARKALDEAGFPQVPIITTDIQDSKNAHPGRRFTEITFIKGIWCMVQTDAIEFLRRKIRPYELQKGETDKIAENAFVEISEGLTKRGIPGSNAAFKKAINDLCAVPYDRSKPRDPVFIQGEYYLTFHPGSNFEIENYLEKNGMEVIMPRMNTVYRHLFLQHTLAEMDEFKVRHSLYDSLYARAGNKFMDIAENYVNKIASKHPLYESEISLKEAAKYSDDIMHHSILSGESFLIAAHTLHNAEKGIRSFIILQPFGCLPNHICGRGVIKRIKETHPDIQILPLDYEPDVSFANIENRIQMLLMNVKNLKAGAVA

SEQ ID NO: 93397 - protein, 58 aa, Unknown
  Obtained from environmental sample
  DOMAIN (5)...(58): Ribosomal protein S8
  misc_feature (1)..(58): Xaa is any amino acid
MSVSDPVADMLTKIRNAGMAKHEKVDIPTSRLKLEIVKILKTEGYIKNFKKQIRKART

SEQ ID NO: 93398 - protein, 297 aa, Unknown
  Obtained from environmental sample
  DOMAIN (70)...(236): Putative RNA methylase family UPF0020
  misc_feature (1)..(297): Xaa is any amino acid
VNCFNAYGIVNGISSKKTNVKKFLAEYSTRCMLIPQMATYTLPVNEIDLLGLVYQSLYLEGDKNKKGLYYTPANTVAQLCKELDFSNGQSFLDPCCGSGSFLVNTPNTYPTQLYGMDCDPIAVMLCKANLIIHFKNYEFDPQVYCFDFLEEPNLFDIAESNEIKNKKFDYVFTNPPWGAAVQNTFSESNVSESSVCFLYKALDLLKKNGLLCFLLPEAILNVKTHRNIRLHLLNNYSLDKIQLFPDLFTGVATRVAALTVTNKKHSNFVTVCNGEKEHTIDVREYIKSSNYVFTLNN

SEQ ID NO: 93399 - protein, 113 aa, Unknown
  Obtained from environmental sample
  DOMAIN (15)...(113): Enoyl-CoA hydratase/isomerase family
  misc_feature (1)..(113): Xaa is any amino acid
MAERVSLTVDDAGIAHLAMRDKANKNLFSDDFIHELVAAIEQAETLRPKVMLLSGLPEVFAAGAEKKNLMDLCDGKVHVKDLVISERLVHASFPVIAAMEGHALGGGLVMAAC

SEQ ID NO: 93400 - protein, 456 aa, Unknown
  Obtained from environmental sample
  DOMAIN (133)...(169): e3 binding domain
  misc_feature (1)..(456): Xaa is any amino acid
MAHVLIMPRQGNTVESCIITDWKVKEGDLVTAETIVCEVETNKASFEIPAGAAGTVLKLLFAAGDDIPVLKPIAVIGVAGDDWKAVVGSQESSHKEHKGTETRREDEGGSICSSLYSSVSLCSLCEENSEIHISPRARNLAEKEALPLDAVLGTGPGARIIERDVAAALQNRPSLTVAAKSALAVPKVGSGIGGRVTTADIASPFPNEEGAITETPIKGIRKVISDRMFKSLAESAQFTLNASAQVTKLQEIRSRMKASDGFCGEIGLDKITVNDLVLFAVSRVLPRFPFMNAHKTGDTIKTFERVHLGHAVDTPKGLMVPVIRNANLLSLAQISAEAKRLASGCQNGSIKPDELSGSSFTVTNLGSLGITGFTPVLNTPEVAILGVCNIEMKPAAIPKGEANNCECACNCGFRLEPHIGFSLTINHQAVDGAPAARFLKALCDAVAHIDLLLAAG

SEQ ID NO: 93401 - protein, 413 aa, Unknown
  Obtained from environmental sample
  DOMAIN (4)...(325): Glucose inhibited division protein A
  misc_feature (1)..(413): Xaa is any amino acid
MQYDTIIIGGGPAGYLAAERLGHHKKKVLLIEEQHLGGTCLNVGCIPTKTLLNSAKLYVHAKEAEKFGVKAEGLSYDWSAIQNWKIDVVTKLRGGIESQLKRYGIEVINGRGEILSTPSGEKAAKVRVISPDGNIEHEGKTILLCAGSVPVLPPIPGAKGNPLLVDSTGLLAVENVPKRLAVIGGGVIGVEFAGLFSALGAEVTVIEMMDEIIPFMDKEQAPLFRRALKGVDFKLGCKVEKVEGAAVHYTDKKGKSEIKEADLVLMAVGRRPVTDTWGAVAAGVDYSPKGVTVDDRMRTNIPGIWAAGDVTGKSLLAHSAYRMAEVAVADILTGDHADSKTNRMRYNAVPWVVYGLTEAAGVGITEQEAEAKGIAILKSVLPMRVSGRFVAENTLMGQGAVKVIADANDRRIL

SEQ ID NO: 93402 - protein, 203 aa, Unknown
  Obtained from environmental sample
  misc_feature (1)..(203): Xaa is any amino acid
LSIASTSVRRPVLTLVLSAFIVLFGLIGLKQVGVREYPAIDPPIINVRTTYTGANAEIIANQITEPLESAINGIDGIRAITSTSRDEQSNITVEFNLGANLERAANDVRDKVSRAQRLLPEEADGSVVSKADANATAILVLSLGSNNMSLLELTDLGERVQERLQTVEGVAEIGMWGAKKYAMRIYIDPVRMAGYGLTLNIIR

SEQ ID NO: 93403 - protein, 482 aa, Unknown
  Obtained from environmental sample
  DOMAIN (136)...(322): Peptidase M16 inactive domain
  misc_feature (1)..(482): Xaa is any amino acid
LEHSVLCGSKRFPVKDPFQEMLKGSLQTFLNAMTYPDKTVYPVSSQVEKDFYNLVDVYCDAVLNPLLTENTFYQEGWHYDLENEGDAIGIKGIVYNEMKGVFSDFSSHVGRGITSKLFPDTAYFHESGGDPEHIPELTYGQFKDFHRKFYHPSNSFIFVYGNLPSEKTLKFIDERYLSGFEAQPVDSSVAPQPLWSEPRTVTMEAPASSEEEEGSASVVCSWIVGRSADPVDVFSASILSSYLLSTETSPLKRALVDSGLGEDLDDMCGFDADLAQGIFSAGLRKAQPQNAQAILDVIMNTLKNEAEKGLDGELIEGAVRQAEFSLREITNGHFPYNLRLADRCYRPWINGGDPFALLAFEGPLSVVKEGMKRGRFFEDFIQKNLIDNKHRLLAVVTASSEKGKKLEAQTEEHAARLTAGFTDGDKKRCLELTLALREQQSAPPSPEALATLPALAIGDLPREGKIVPSEEGSVGGVKLITH

SEQ ID NO: 93404 - protein, 672 aa, Unknown
  Obtained from environmental sample
  DOMAIN (613)...(672): Beta-galactosidase C-terminal domain
  misc_feature (1)..(672): Xaa is any amino acid
MEKQIKKVLYGGDYNPEQWPRETWPEDMRLLSLADIDILTINVFSWALLQPSQDEYDFSVLDAVIETVSKAGMKICLATGTAARPAWMARQFPEVLRVNTDGAKQKFGGRQGFCPNSPVFRKYSTLLARKLAERYGKLDNLIAWHISNEYSGLCYCEKCEKAFREWLKKKYKTLSALNTAWNTSFWGHTYYDWDEIVSPSHLSEEWPVNRTTCQIHSIDYRRFNSEVQLECCLAEYDVLKEITPQIPITTNLMGTFWDLDYFKWGKKMDFISWDNYPSPGTPYTRTAMNHALMRGCGDGKPFYLMEQTPSVTNWQPYNSLKRPGIMRLWSYQALAHGSDTVMFFQMRRSRGCCEKFHGAIIDHYASENTRVFRETAELGAELKKLGDSFLGSRLSSEAAVLFDWDNWWASTFSAGPTRDMNYIEEVFRFYDALARQNISTDIIGFETPLDSYKVLFAPILYMIKPGVAEKLTAFVNNGGILVTTYFSGMADENDLVTTKGYPGELRSLCGLWVEETDALPADQFNRLIINDGPLAGTWKADLLCDIIHPEGAQTIANYADDFYAGTPAVCRNSYGKGCVWYFGSRPEAALVDLFTAEICGECGIKPVFPRQEGIEATRRIKEGKEFIFVLNHNKSEAEIVIPFACKDLLIDKSFSADSRYTLSAAGVLILCK

SEQ ID NO: 93405 - protein, 360 aa, Unknown
  Obtained from environmental sample
  misc_feature (1)..(360): Xaa is any amino acid
AAAAGFTAHHNTDIWADTAPRDYWIPATFWVFGAAWLSLHIFEHYEYSLDRKFLQKYFYLLKESCLFFADYLVQVTDKAGEKRLVISPSSSPENSFLYNGETCSLCAGCEMDNQILRKLFEVTIHALEILKIADNDIELFHSIYKRIPEPVIHSNGTIREWNEEYEEAEPGHRHFSNLFALWPGGTITPDETPELAVAARKTLERRLAHSGGHTGWSRAWLVNFMARLRDGKTALENLDAMFKEFTLPNLFNNGPPFQIDGNFGALAGITQMLVQSRIRYEGESFTVLLDILPALPECWSKGRIKGVRLKGNLELDFEWQDRRLKYLVIRNNGKSAVTVLLRNDGGQRELLLETEENKIY

SEQ ID NO: 93406 - protein, 378 aa, Unknown
  Obtained from environmental sample
  DOMAIN (298)...(374): ACT domain
  misc_feature (1)..(378): Xaa is any amino acid
MGIDELNQEMDNIDDKMLKLFEQRMGLALEIEKEKKEKALPVSDTEHERKILYRLCEMTRPELSGYVKVLFSSIFEISRSHQKAQSHYDSAVKKLLDDTSAYIPEFPSRATVACQGVEGAYSQAACDKLFSPADITYFNSFEGVFQAIDGGLCRFGVVPLENSSAGSVNEVYALMNRYRFYIVRSIKLPVTHTLLAAPGAKLDDIKEVFSHEQAIRQCSRFLKSWNGVKITECANTAMAAKQAASSGRTDAAVISSRDCAELYGLHALSFNIQNTDNNYTRFICISKKLEIYPGAHKTSLILALKHKPGSLYSVLAKFYAHGINMHKLESRPISGQAFEFMFYFDIDTPVISEELKQVLAELEQETDMFSFLGTYQEF

SEQ ID NO: 93407 - protein, 277 aa, Unknown
  Obtained from environmental sample
  DOMAIN (176)...(209): Tetratricopeptide repeat
  misc_feature (1)..(277): Xaa is any amino acid
PFRADTSLTNLEAFILIALGRLDDASAIVNQVLQREPYNKEALFAAAELDIARGRAGDAVIRYRAAVSRYPDDRRLLVSLALVLGSLGDTDGARSYIERALLAHAGDYRVHYYAAYLASQAGRLADAVAHAEDALYYRPGFIPARFLLASLRYRQGRYEEAARLADELIFLNRDDSLSWYLKGVSYIRMGRFTEAQSVLTTAANINGDDEFIRTALEELLITRTRIEDPVRSRWASWHFARARTFRTGNQLEQALFEYRRGLRLNPYARDRREYAEL

SEQ ID NO: 93408 - protein, 267 aa, Unknown
  Obtained from environmental sample
  DOMAIN (73)...(258): ABC transporter
  misc_feature (1)..(267): Xaa is any amino acid
VTGIAQLLESAQQSLAGAERVIEMLDTPQSVKDSPAAKSIGQVKGQITFENVSFSYIQGVPVLEDVSFEVKPGQMAALVGATGVGKTTLSKLISRFYDPTGGRVCLDGHDLREITLESLRSNISLVLQDTFLFNGTIEENIAFARPDASIEEIKSAAQTARIHDDITRMPEAYQTQIGERGVKLSGGQKQRIAIARAVLCRAPVLILDEATASVDVHTEEQIQQAINDIAGSRTIVTIAHRLSTIRNADVIYVLKKAGLFNPALMPS

SEQ ID NO: 93409 - protein, 392 aa, Unknown
  Obtained from environmental sample
  DOMAIN (229)...(304): Hpt domain
  misc_feature (1)..(392): Xaa is any amino acid
MDGRIDVESEEGKGSTFKFSIMQGFVDDTVLGKEIAEKLRKFQYIDDKRAATQKIVRIDLSYARVLVVDDMQTNLDVASGLLRKYKLQVDCLNNGKAAVEIIREGQPVYNAIFMDHMMPEMDGIETVDRIRALGTEYAKKIPIIALTANAIHGTEKMFFAHDFQDFVTKPIDISEMDAAIKKWVRDVTRKEVVIAPEPSEEKQMTIEIPGVDTQKALSLYAGDTGIYLPLLRSYITNTPSTLEKLKAVSQENLKSYVINVHGLKGTSAGIGAEDVRAQALELEKISRAGDLQGVLAGNDKLIADAQVIVANVKKWLDKNDVQESKPRKKAPDRELLVKLRKSCESYDIDEVDEAMKELENAEYDEQGELVTWIREMVDMSKLGDVAKKLNGI

SEQ ID NO: 93410 - protein, 730 aa, Unknown
  Obtained from environmental sample
  DOMAIN (33)...(176): GAF domain
  misc_feature (1)..(730): Xaa is any amino acid
MGEENKVLSKHYAAMSGALNNFIEIFSANKDETFEATMAAGVNEMADTFRLDRLSIWRNEAMPDGLHGRQIFRWDRKSGGATMPTKGLDDIRYTDFSPRWERILSADEVINGPIKLMPEAPKLKPYGCLSILITPLFINDNFWGFALLEDLQNERWFREEDIDMLRSAAFMCANTVIRADMEREIDYAKKFNNAILDASPLGFTIFDENANVIDCNDTLAKLLNTSKTFYIEHFYKFMPEYQSDGSKSADKVVELVKRALNGEKLLLEWTLCTSTGELIHNEITMVRAMYKGKYVVLGYQYNLHARKMWEMKLADAKDLIELQLAKLNLVVKATKIALWDMEVIHDDPVNPNNAFFWSDEFRHMLGYTDENDFPNVLGSWSALLHPDDKGNTLNAFAEHLFDRTGNTPFDVEFRLMRKTGEYAFYRASGECLRDKDGNALRMAGALMDITENKIILLEKERQKEEAQAANRAKSTFLANMSHELRTPLNVIIGLTGLMMEDRHLDKSVTDNLIKISNAGSTLLSIVNDILDLSKIESGKLEITPDEYYMASILNDTVTLTLARIGEKNLKFHLNIDDNLPYKLYGDDLRVKQIFTNLLTNAVKYTDEGSVELNVRCERESDTVWINAAVTDTGIGISAEDMENLFLDYQRIDSKSNHHVEGTGLGLSITKNLVEMMGGKIKAESEYGKGSTFSFRIKQGFISEAVLGAEISDKLRNFCYTDDKRVVSQKL

SEQ ID NO: 93411 - protein, 412 aa, Unknown
  Obtained from environmental sample
  misc_feature (1)..(412): Xaa is any amino acid
MKAQKFNRGGGLQNETRFPFIYTALSFFIPVLIFGTVFALHKVYPFGSKHILLHDFNQQYYPFFSDLWHRLREGPIPPWSWKAGLGHDYLALMAYYMASPLNLPALIAPLAWLREALTLMLLLKIGCAGLFAGMFLRYAFKQTGPALPVFSSLYALCAFTLGYYHSILWFDSFALLPLVMRGLLALMREGKFRLYTVSLALAVFANYHIGFYICIFVALAFIGECIIQKPSPRDFFGKLALIAACSALAMGMSAVLLFPSFSALQGANIWVDSFPSKLELFNSFPALLGNFIAFTPPTYIYGLPNLYCGMASVLLAGLFMQSSKVSRREKAVLAALLVFLILCSNINALNYIINGFRFPVAYPSRFSFLISFMLVAAAYRAYLLAEKKNKRALISIGVSAALVLLAAALARR

SEQ ID NO: 93412 - protein, 185 aa, Unknown
  Obtained from environmental sample
  misc_feature (1)..(185): Xaa is any amino acid
MKEKIIIVGGYCASGKSVFSNKLSNLLNIPCFNKDVIKEVLGDGFGPENNMIELKGSAATFLLMLYIAEKTLQAHNICILESNFKQKEMDQIEILSEKYSCECLTFIFKGDFNILFNRYMKRDVSEKRHWVHNTEGEDLENFKESHLKHGIGETGIGKIIIRDATQFENIDYDELNNIVKEFING

SEQ ID NO: 93413 - protein, 121 aa, Unknown
  Obtained from environmental sample
  misc_feature (1)..(121): Xaa is any amino acid
MKYILWDFDGTLGYREGIWSGALYSVLLKNGIKDITIDVIKPYLTKGFTWHNSEKSHKELFGNKTWWEYYEDYFSNIFIELGIQKNISKKLSKEIKNEYMDLAKWHIYDDVIKTLELLIEK

SEQ ID NO: 93414 - protein, 84 aa, Unknown
  Obtained from environmental sample
  DOMAIN (2)...(69): Phd_YefM
  misc_feature (1)..(84): Xaa is any amino acid
MPAIRPSADLRNSYSEISDFCHKYREPVFITRNGEGDLAVMSIETYEAITGKQRLYRLLEEADNDVEKGNFLTEEEMDKEIDIM

SEQ ID NO: 93415 - protein, 297 aa, Unknown
  Obtained from environmental sample
  DOMAIN (235)...(284): HTH domain
  misc_feature (1)..(297): Xaa is any amino acid
DGELLEALKLTEGDYLLKAAVLLFHQDPERWCLGSYAKIGYFENDADLRYQDEINGSLISIADRIIDTIYTKYFKGLIRYEGIQRIDEYPMPRDVLREAVLNAVVHKDYSTGNPIHIKIYDDKVVIYNDCQIPPNIEPESLLTSVRSNPHNPLIANGFFRSGQIEAWGRGIEKMRRGCITDGLPEPEFTILPNVFIICFHIRNNNKALNNNEMVSDNQDNYFGLNFGLNFGLKKTQQKIVELMITTPEITAEQIAEAIGLTKRQIETDISKLKASGIVERIGVHRNGRWVVKQTGIS

SEQ ID NO: 93416 - protein, 469 aa, Unknown
  Obtained from environmental sample
  misc_feature (1)..(469): Xaa is any amino acid
SLKVCPLTLQDNRVSNVNVYNSASGGTVASCPNIRNIVIDKVYDEEGKFKQNFLIPLTSSDGYFLNTGKFYVSFTVHIDVEIQYKYELKDKLLLDFKNGSAEFDLDSFFGFIEGLLFTNLNDYNKPIIKSGSSFDVNGRRCYVNTNTTVSVLTPNFSCLMYLYAYWVDDDIVYEFSTAAPVWLPNRKGWYNGTKDNPGKRRALLKMIYINSSTPKFIFKTYLDENILPSGQSSDFSQFGVFTFDSDNNNDFNDLTSNKSPFYSLDGSSNPSSQSFSLDPGVYIIELKGAGGGNGSMNGGSGGSGGLVREIITLNSKTSFSSFTGSGGVNAPDATVSGTFKIITTKNYYSYSNPSPYDGGYLNKIPTITFVSSNLIINAIDVKIYVNDYLNSELNNSLSGGSGGGGGSGTFIYCPSGNYLLAAGGGGGGSGGSYITPGGAGGAGGAIGSGAGGGGSGSLSQSSSPFDTGD

SEQ ID NO: 93417 - protein, 397 aa, Unknown
  Obtained from environmental sample
  DOMAIN (83)...(360): PHP domain
  misc_feature (1)..(397): Xaa is any amino acid
LIFTEPQGEVIFSPLIPNLPEHAFLPGETITPFSKVYSDTYKPSLFSILSKKSLIINDLGIPILIIGKYDEFSKINCYNTFVIDLHTHSNISDGDFSPEQLIKEAAGQGLSAIALTDHDTINGLESARKAALGENIRFIPGIEINITWNGGKGVPGVGPGGEFHLLGLGINAPTGNFTSSIEGLLRRREDRSRKILDKMHELSIEATWEELLTAAEDGIKEETDEKSRLSTKEAGGRSLGRPHFAALLVKKKIVKSVNQAFARYLGVGKPLYVQKEGLDFDEAVALIRESGGIPVLAHPISLFVAWGRLPDMIKALQKRGLMGIEAWHPTAKPGSCRRLEELGKSLGLYVTEGSDFHGHVRPDRKLGYSSKSRKIEDSVLEAIPELFTKTIPFITES

SEQ ID NO: 93418 - protein, 224 aa, Unknown
  Obtained from environmental sample
  misc_feature (1)..(224): Xaa is any amino acid
VLLVLLVAGSLFAGGGGDKGGGGKTLIGIAMPETHVQRWVKDGASLKAEAIKRGYDAKDQYGNADQAQQNQQIQSFLTQGAKALVVGCINDGVGSVIAEANKDKVVVVAYDRIIPNSADYDYFITFNNFKVGVLQAQSIVDGLNLNAATAAAPKQITLFAGSPTDGNAFFFFDGAMSVLNPFIDKGVLKVVGPYPRLPPTAPISSASPLKTGRPPSPRPAWKTC

SEQ ID NO: 93419 - protein, 506 aa, Unknown
  Obtained from environmental sample
  DOMAIN (150)...(303): AIR synthase related protein, C-terminal domain
  misc_feature (1)..(506): Xaa is any amino acid
DLDESSEINACTVKIKAEFSNDVSEPWLLLFKNETHNHPTEIEPFGGAATCLGGAIRDPLSGRAFVHQAMRVTGGGDPSSGLQDTIPGKLPQIKIAREAAAGYSSYGNQIGLATGQVAEFYHPGFIAKRMELGAVIGAVPEAWVRREEPVAGDLLILVGGRTGRDGIGGATGSSKVHTGASVESAGAEVQKGNAVEERKLQRLFRKAEVSRLIKRCNDFGAGGVSVAVGELARGLEVNLDAVPKKYAGLDGTELAISESQERMAVLCSASDAEAFIKAAAAENLEAVIIAKVSDENESRLRMSWRGKTIVDISRDFLDTNGAPRTAKALLPKTNSKNINHGEYGVSRSKNNEDDISAGVLAELPAGVLIDNLERELVSLRSGSRRGLQERFDGSVGALSVLFPWGGSEQGTPECGMAALLPSLDKQSRTTSLMTFGYDPALMSLDPYTGAKGSIREALAKFACLGGDPFTARLSLQEYFRRPETPETWGAPAAALLGALEAQVSLG

SEQ ID NO: 93420 - protein, 256 aa, Unknown
  Obtained from environmental sample
  DOMAIN (3)...(249): Tetraacyldisaccharide-1-P 4'-kinase
  misc_feature (1)..(256): Xaa is any amino acid
MSPLRWLLLPLAPLYAIAVRARNRDFDANPEKAERVPLPVLSIGNLSVGGTGKTPMALHLAQELDKMGHKNVIISRGYRGRRNVDPMDVPPESNPSETGDEPAMMARRLGPNRVVVGRSRHAAALHAISSIPDAKLLIMDDGFQHRKLHRDIDLLLLDGIRKCGNGRLLPLGNLREPMTGAKRADALIVTRGSKANKDEVKKWWSEFGSGGPIFYVDFRIASARNAATGKRLTLPTELGPLFAFCALGNPACTLRR

SEQ ID NO: 93421 - protein, 258 aa, Unknown
  Obtained from environmental sample
  DOMAIN (191)...(258): Electron transfer flavoprotein FAD-binding domain
  misc_feature (1)..(258): Xaa is any amino acid
MILVFCETKDGAIRKPSLEALSEARRLAGDSGVAALFVGNDISGAEEAADFGADTTIKIESPTLSSYSSDLFASAISGAAKAKNATILLLAATSIGKDVAPRVAARLGAGLAADATALCMKDGKLQATRPIYAGKAMATVDFSTEIQIATTRPNVFALAKVPKKGAVETLPAPSDAFKAIVKEIIAKVGEKQDLTEADIIVSGGRGMKDGANFKLLEELAEAFGGVVGASRAAVDAGWGIPHSSQVGQTGKVVSPSLY

SEQ ID NO: 93422 - protein, 316 aa, Unknown
  Obtained from environmental sample
  misc_feature (1)..(316): Xaa is any amino acid
MFTVLITLAAAAATAKDTLTFAAVGDIMMGLNYPDNAPVLPPQDGALTFESVRGVLRSADITIGNLEGVLLDAGGWAKRCANPNVCYVFRSPERYVKHLVNAGFDLMSVANNHSGDFGDAGRAGTVRALTSAGIGFAGFDGTAESYVLEREGVRYGFVAFAPNIGTVSFHDLPKAKELIAEVRKKCDIMIVSMHIGAEGPRHSRITRNSELFVGENRGNPYAFARLAIDSGADMVIGHGPHVPRAVDLYKGKFIAYSLGNFATNTSVNISGESGYAPIVKIRTDRQGNFIDGEIISAIQHGERGERRPYLDPTGAC

SEQ ID NO: 93423 - protein, 264 aa, Unknown
  Obtained from environmental sample
  misc_feature (1)..(264): Xaa is any amino acid
MWLGEAAINMETVLCLIEEKISYVILSPNQATSYKRLSGGDWTYTNQAPIDTRRPYRVFPRTRDGAQLDGHLDVFFFNEGLSKAVSFDNLLQDSRTFGNSINQCYDNNYGGNQAVVIATDGETFGHHKPYGDMCLAYFFKHIAPEMGITPVNFGYYLSINPPEYEVTLGDAFGEGTAWSCAHGVGRWTRDCGCSTGGKPGWNQAWRGPLRNALRKLQSQIDFHFEARLATMFQDPWALRDKYINVMWEPSLVKTGEFLHTQCGG

SEQ ID NO: 93424 - protein, 298 aa, Unknown
  Obtained from environmental sample
  misc_feature (1)..(298): Xaa is any amino acid
SACPDGWHLPAGNEWDVLFIKAGGGNVAGNKLRAKIGWKDNEIMIKTPYKDYYNGSDDFGFSAKPGGRRNYYPSGFYNAGARAYWWTSVEHDNATAYVIFFDHLNSENVYGGEPFKGDGFSVRCLLGNPLPPQEKPQAKKSGGFDSLSQEKRRTKTSADGAFGTFTDARDGQTYKTVKIGGKRWMAENLNYETDDSWHYRDDEQYYSKYGRLYTWNAATTACPSGWHLPTAAEWNTLIITVGGTSVAGITLRAKSGWNEYRQAGKIKNANGNDDYGFSALPGGHRYSGGDFSNAGDMC

SEQ ID NO: 93425 - protein, 206 aa, Unknown
  Obtained from environmental sample
  DOMAIN (40)...(130): Divergent AAA domain
  misc_feature (1)..(206): Xaa is any amino acid
MNVYETIEELLNAPEGEHYEFKKAENRFDFQEALKYCCALANCGGGKFVLGITDKRPRKAVGSAAFDQPERTRNGLIEKLRVRVDFYLYEYKGKRVLVFEIAGRPVGLPIQIEGAAWWREGDSLIPMPPEVMRKIFSESGHDFSGDICPCATIQDLDNSAIKVFRLKWAEKSGNNSIKNLSLKQLLIDCGAMTENGVTYAGLILLE

SEQ ID NO: 93426 - protein, 89 aa, Unknown
  Obtained from environmental sample
  misc_feature (1)..(89): Xaa is any amino acid
MLENGTQAMAIEVKMTLRQLDIDDHIKRMEKIRKFADENGDKRQFIGAIAAINTDESSKNYALKKGLFVIEPSGEDVKVTKPEKEPRVW

SEQ ID NO: 93427 - protein, 613 aa, Unknown
  Obtained from environmental sample
  DOMAIN (151)...(220): HAMP domain
  misc_feature (1)..(613): Xaa is any amino acid
RSWYREILESVIAPSHVVWTKPYVDDIGTLSLMTTTGAGIFINGKLIGITTIDWQINDIIEKLININPTQNSFVLLCVPDKDYIISSVFTDNFTGDSLKSIPWDINSDHFTYNNKKYRRFGCYMDNGWLLSVQIPENEMFTQMTRQNIIFSTIMEISFALILILAYLLISRFINAPIKNLTKGVAQIELGNLDMKIDINSKDEIGQLAGAFNKMTTDLKHSIEENVHEREEKKRITTELSIAREIQVSLLKNNFMEFHARDEFDIFADMIPAKEVGGDLYDFFLIDNDNLAVVIADVSGKGIPASLFMVRTKTLINNISYDKSPEEVLEVVNKRLCENNEACIFVTAIFGIYNIKTGKFTFVNAGHNPPLIKKKDGYFEYIRTEPQLVLAIMKDTEYKEEEIILEKGDTLYFYTDGVTEAVNQGKEFFGEDRLKDALNKYRSSFPNDLIYNIKDEVNNFANGAEQADDIAMLALRINEDNQTERQISVNAEIKCLNRVLNFITAEIKKTGYEHEIQNKIEMASEEIFTNIANYAYADEGGKVKIAVSIIDGIKITFEDNGRPFNPTEYPAPDLEKPIKDREIGGLGLFLVKQVMDKVEYTRENDRNILIISKK

SEQ ID NO: 93428 - protein, 426 aa, Unknown
  Obtained from environmental sample
  DOMAIN (8)...(420): Nitrogenase component 1 type Oxidoreductase
  misc_feature (1)..(426): Xaa is any amino acid
MSNVIEQGRYTCAIGAMQSVVAIKRAVPILHAGPGCGDMIAGFFERSTGYAGGSTSPCTNFSEKEVVFGGIERLREIVANTYKVLDTDLQVIMTGCTSGIVGDDVDALADEFRGEGKPVVSVETAGFKCNNYEAHSLVVNAIIDQYVDRFSNENESRSEPNTVNLFASLPYQDPFWKGNLGEYKRLLEGLGLKVHVLFGPMSEGVEEWKRIPRANFNILVSPWYGKPIVDHLKTNYGQPYTWFPHIPIGANAAEKFLRQVLDFALEQNADIDRERAETFIKREREAYYEEIDNLATFLMEFRYGLPTHVHILHDAGYVVGLSKFLLHEVGIVPKEQFVTDNTPDKFKEQICAELASTSDKREIPITFEPDAGLVQEAVRKIKHSGRGLIIGSGWDKELAREKDYDFLSAAQPSPYRLVLTTRLRGF

SEQ ID NO: 93429 - protein, 404 aa, Unknown
  Obtained from environmental sample
  DOMAIN (4)...(367): Nitrogenase component 1 type Oxidoreductase
  misc_feature (1)..(404): Xaa is any amino acid
LEKPTQRKIYSTNLTEKETVYGGGVKLLAAIREVYERAKPKAVFVLTTCAAGIIGEDVESVCNEAEADIGIPVVAVFCEGFRSTVWTTGFDAGYHGIARKLVKPPRKRRDDMINVINFWGSDVFKDWFAPFGAVPNYITPYSTIESLAWSSEAAATVQACSTLGSYLGAALEQEFGVPELPTAPPYGIAQTDRWFRALGKLLKKEDVAERVIAEKRAEYLPKIEALKEKIRKYADGRTLTAYVTGGAAHGHALLSVLGELGIQAVGAAIFHHDPLFDNGEPDNDQLAQRVRDYGDVPNFNVCNKHEFELVNVLNRLKPDLLLARHGGMTLWGAKFGIPSLLVGDEHYSMGYEGLLKYGERILETLENDEFVKNLSKHAVNPYSKWWLSQQPNTFLQTRTRGIEA

SEQ ID NO: 93430 - protein, 236 aa, Unknown
  Obtained from environmental sample
  misc_feature (1)..(236): Xaa is any amino acid
VSETIRCPFCSAKYELRRERARREVKRARCARCGNDFSIVDAVSQLFGDLPPEEAPASPPAAMPSAEPEAAAATEPEVVVAESEAVTELDAVGEPDAAAEPEVVVEPETVTEPEVTTETEAAVELETVVEPDTVVETETATEPGTVAEPDPVIESVVESVVEAVVEAAAVTEAVPTPTLVQPQAAPEAALEVTTETTSFAPEDIRAAIAASMTGAPAEPPPAPPASQPPAPPVAPA

SEQ ID NO: 93431 - protein, 185 aa, Unknown
  Obtained from environmental sample
  misc_feature (1)..(185): Xaa is any amino acid
AKDSALFGEIRQPDTRYLAIPEVSSERRSYIPMGFLDKKIIAGNTLFTVAGADMYHFGVLSSKVHMAWMRKVCGRLKSDYRYSKDIVYNNFPWPSVTDEQRAKVEELVKGVLDARAQWPGNPLDALYDGSIMPRGLRKAHEALDRAVMRLYGFKKDVPEPEIVAKLMEMYRELSGQSTSSTLTTK

SEQ ID NO: 93432 - protein, 284 aa, Unknown
  Obtained from environmental sample
  DOMAIN (173)...(284): Thiamine pyrophosphate enzyme, C-terminal TPP binding domain
  misc_feature (1)..(284): Xaa is any amino acid
MKEEFSAYEKNILAGKGKKGIASGGVSYAYTREALAQFNCDCKTLKISTYPFPEKLALSFLEGLDEVLVIEELDPVIENELIHLCGLYNLHIKILGKRSGHVQIAGENSPDSAIKTIGEFLNIQPPKAENKTSAAPPPLPVRQPVLCAGCPHRASFFAVKEAAKGREAVFTGDIGCYTLGNAQPLDMVDTCLCMGAGITIAQGLKRIAPDAVHFAFIGDSTFFHAGITGVINAVYNQTDIIVVILDNSTTAMTGNQPHPGTGVTMMRAQTENMKGINTAGQALH

SEQ ID NO: 93433 - protein, 296 aa, Unknown
  Obtained from environmental sample
  DOMAIN (17)...(86): HAMP domain
  misc_feature (1)..(296): Xaa is any amino acid
VPEHDYHRERNSLLLDSVMFLLITVVIIIAVIYLAVGGLLRHVKYLVTGIGKIAEGNLDARIEGSYNDEFDKIKDAVNSMAADIKTYMEEKLQTERKLNESRISILLSQIQPHFLYNALAVISRLCDKDPAEAKKATLNFSNYLRANMNLLERSEPIPFENELKHTIGFLNLEKAMYGEALKVIYNIQTKNFTLPALTMQPIVENAIKHGIGKKEGGGTVTISTKETNSGYLVIITDDGAGFEQGKIADDGQQHIGINNVRLRLSAQCGGSLEIESKPGAGTTASIRIPKQEAQLK

SEQ ID NO: 93434 - protein, 292 aa, Unknown
  Obtained from environmental sample
  misc_feature (1)..(292): Xaa is any amino acid
GIAGIADGDYRAAEGRLYNVLVSAGQTVSVSIDLRKGVQGGEKGILSWDIQFPEDAQSAVMELLTLDGKLLAAEDLKAQPKGEMALNVGNYLVTLTLDGRQSRTEALYINGSMTSRIERGLFRVPAFNSVSELADFLSSFPANTADSPCDIILYGLNVETDFVQSGDSLGKLFGALKGKYVNLDMGACSGQVIPNTEFPHYNNRPDIGKITALKLPSELTSIGANAFTRCSGLTGITIPDSVTSIGAYAFILQRDNQRDHREQRDQHRVWGFFRLQQAYQRHHTQQRDQHRV

SEQ ID NO: 93435 - protein, 422 aa, Unknown
  Obtained from environmental sample
  DOMAIN (214)...(327): Peptidase dimerisation domain
  misc_feature (1)..(422): Xaa is any amino acid
MKEKIFEFIDSSSDLAVELETGLCKYPAVSPESGGEGELDKCEFLATWLKAHGINQLERYDAPDPRAKGGVRPNLVATIPGKDQSEHDPRFWVMSHIDVVPPGEASFWNSDPWKAVVAEGGVRSDGTLLGKRIIGRGVEDNQQGLCSSIIAALALVKQGITPSRTVKLLFASDEEIGSVYGLQWLIKNHPDLFHKNDIAIVPDSGCRSGAEIEIAEKSHVWATFTTKGIQTHAAHPEHGANAYLAGADLTVRLHFGLSEKFSDRNPLFDPPYSTFQPTKKEPNIPNVNTVPGEDAFHYDMRILPSVSVDDVFMEVDRIKAEVEARHKVTIDYKIDYRTESPPTLQDSPLVKFLSDSIKNVYKVETKTIGIGGGTFAAYLRKLGIDCAVWARFDGTAHQPNEYSLLENILGDAKVMALMMISG

SEQ ID NO: 93436 - protein, 326 aa, Unknown
  Obtained from environmental sample
  misc_feature (1)..(326): Xaa is any amino acid
MPNMGAMPIHHAKMDSRGMARIFTAIANGPYPVALAPEGQVSYTADAVPRLEPGVIRIGFQAAKQLAAKGLDCPLEIFPISVHFRFGSWGNFTLELLLKRIEKLCGLSGAGRKKMLFTERVKQCRDHILNVIEKRYQIAPDDSASFEERLDKVINIALETAERMLGVKAEGDFFARMYRVRQICWDRIFIPGVDNLEGMSVVERSSVDLNAGEAWYIARHMELVDFSWYFRIPLPTEETVIHKKVEYVQNLWDFASRSMGGAFNNRVSIFPRRVIIHTAPAINLSERLPSFVKDKKTEIALAMTDLEKAFLDCIAEANSFVNGRKK

SEQ ID NO: 93437 - protein, 229 aa, Unknown
  Obtained from environmental sample
  DOMAIN (61)...(221): Integral membrane protein DUF6
  misc_feature (1)..(229): Xaa is any amino acid
DLSLGLYVILTPIFGIFLGRSTGKATWIGAILTFTGLYFLSSSGPVTRINIGDVIIAFSAVFWAFHVLLIDALVKKSDPIKLSSGQFAFAGFYALIAAFLAEPFLSRWLLSIEGKYISTGLLAWKSFPALISGLASGEIPFSLVSGAIIPILYGGFASAGIGYTLQVVAQQYAPPAHATIILCLEGCFAAIGGIILLNEPAGIRTIIGFAFMLCGMLISQLELIRARHD

SEQ ID NO: 93438 - protein, 292 aa, Unknown
  Obtained from environmental sample
  misc_feature (1)..(292): Xaa is any amino acid
VNSLAFSSPLESPSWGFSLDLPEGYELSGGDRKDTFSFSHPDGASFEISVSHSAPGQRASYASVEDMSRDVKTKLNSSGDIELFEYRGKKAALLELAFSLQGAGRMSGWALCMELAQPNQTSANNASSSNPLLLAMAYGPAGKQGLEVLHLSALDSIAPEWADKLAPGPITEYSYPRENRVKTSIFGLDCEAWIFEEDAEAAQALIDREFQVLRRFQNSPDWKEAWIRFYRAIYRDSFERLVDIAFQLERKLNVPPLEDRDFANQALKWVQSFEYERDLFFSDFINLVSAAV

SEQ ID NO: 93439 - protein, 427 aa, Unknown
  Obtained from environmental sample
  DOMAIN (122)...(188): His Kinase A (phosphoacceptor) domain
  misc_feature (1)..(427): Xaa is any amino acid
SNYKGIIWSITNDGVITTCNGQYLRTTGIDPSTLEGQHLESIWLKDKYPDFVENVKKAFLEGTQDWMAELGESVLHSYTVPMYDGKGNVVGIVGSTDDVTEMARLQQDLTSAVESAQAANRAKSVFLANMSHEIRTPMNAILGVTEIQLQDATLAPGVQEAFSKIHSSGDHLLGIINDLLDMSKIEAGKMELMPAAYEVASLISDTVQLNRMRLESKSLEFELHVEENTPAVVVGDVLRVKQILNNLLSNAFKYTSQGGVTLSVFHETGSGADGSEASARTDSRVTLVFRVSDTGQGMTAEQMSRLFDEYTRFNRGAYRLIEGTGLGMGITRNLVGMMNGEITMESEVGRGSTFTVRLPQGTVCPQVLGRELAENLRQFRVDSAARMRRTQLVRELMPYGRVLVVDHAEMNIFVAYALLAPYGLTVD

SEQ ID NO: 93440 - protein, 867 aa, Unknown
  Obtained from environmental sample
  misc_feature (1)..(867): Xaa is any amino acid
CLVGRVKADAVIPDSAVFRVSISNPVRLFDNVLSHESLKEISTVPSLASAVSVIDVLRESPLAKNSLVHMAARGSIEAAQLSEPNAYVIVWDLGFFSPLLRIFPAFSGFFNIPNLYYVQSGKNSRFEYRMNDKTYFIGPYHNLLFISDSSEVFESRAYLHAKTDLAGKKLSDKSEKKQGFNALKPSSYDAALLLSPGFFNSLMSEQDSAIAAVLSNVDFDSPVEAGFSVHPQKIELRITASLSSRLAALKRLLEARSQAPGMAERLPASSQYATILSAGTLDELFQATGVFAGKDFEDTVKRTDNLSRTILGVSLEELLFSWSGKEFAVFGLEGRPHPVYAIQIADDRTRQAVFDRAFKSIALNENTRLNLDGVRIPRIEVPEFLQSLLRKWDMFLPSPYYTIYRDYLLASESAEALLAALRAMQRNDILPKTAAWRNIAGGRTAASAFSLYYSLDLSMPFFLRKNTALSGFLSLYRQGLVRLSFDKGQVDVSLALIPGSGSGVNFVNSFLVETRDRPNNRIYGSSDNSRIFISAGNTVISVNTADNSVSEMSGQDKLWIISADGTGNKNSVNAWVVSERGRVTLVNGDLEPAQGFPVLTGLRLSAAPTAYNGKLYLCDEDGKVHSVDANGAQKIWETTFTASLRSPPSFITAKAKTGEIQYAAVYPKSFFGELWLLDADGKLFPEWPAQLMRVDEDGFTANAGISFGSPILVSLNNQVHTAFVSQSGDFFIFDETAKALSPFPVILEGVFYVQPVFDGKFFWLVSAEGNLFRISPEGEVLYQSIPGFSAKEEGYITVFDCDGDKTPEVFFTGEGNALYAYTQNFRSLEGFPLPAWGKPHFIPAQGNKKAEIYGIGMDRRLYRWQFR

SEQ ID NO: 93441 - protein, 60 aa, Unknown
  Obtained from environmental sample
  misc_feature (1)..(60): Xaa is any amino acid
VQTPADHLDEEARIRDANDRPILRAAIMANADIILTGDKDFLESGIEMPLILTPAEFVRR

SEQ ID NO: 93442 - protein, 251 aa, Unknown
  Obtained from environmental sample
  DOMAIN (1)...(250): Inorganic H+ pyrophosphatase
  misc_feature (1)..(251): Xaa is any amino acid
MAALGLITWGIFGSVVSGLVVGVIIGQFTEYYTSDIYKPTQSIANQAKLGHATTIIEGISVGMKSTGFPVVCIAVGILLAFGFAGGFGNLSMGLYGVSFAAVGMLSTLGVTLATDAFGPIADNAGGNAEMSGLPPEVRKRTDELDMLGNTTAATGKGFAIGSAALTAIALLAAYIEEVKLWLGKIAASSNGTFKAGTVVFASSEKNLENYHFDSDLAIRIIDNGNRAINEDGTLVGLVAHNANISDFLVAY

SEQ ID NO: 93443 - protein, 78 aa, Unknown
  Obtained from environmental sample
  misc_feature (1)..(78): Xaa is any amino acid
MLTLSQIWFVVPASAIIALICALVFYKNLMKKPEGNQTMKDIAQYVREGAMAYLKRQYKTVSLVFVVLFFYLVVLAAL

SEQ ID NO: 93444 - protein, 303 aa, Unknown
  Obtained from environmental sample
  DOMAIN (40)...(154): Response regulator receiver domain
  misc_feature (1)..(303): Xaa is any amino acid
GRIWIESEIGKGSTFIFTIQLGRGKEEKQELLPDVNLKDVRILAVDDDPVILSFFTEVTQRFGISCDTAVSGKKALELLEQNGGYHIYFIDWKMPDIDGIELVREIKARRSGNSVVTMISAAEWGAIAKEAKAAGVDKFLSKPLFPSIIVEVINECLGVNKQQIEEAQAADINGIFAGKRILLAEDVEINREIVQTLLEPTKLEIDCAENGVEAVRIFSKAPFKYDMIFMDIQMPEMDGYEATRHIRTVEAKLRQQIPIIAMTANVFKEDVERCLEAGMNGHIGKPVNFDELIGKLRYYCGGT

SEQ ID NO: 93445 - protein, 346 aa, Unknown
  Obtained from environmental sample
  misc_feature (1)..(346): Xaa is any amino acid
LLGSQIESMNDEALAKAVTESDVFAKLSPRQKARIVTTLRNNGNTVGFLGDGINDANAMKAADVGISVDTAVDIAKESANIILLEKSLSVLVQGVIEGRKTYANTIKYIKMTASSNFGNMFSVLAASAFLPFLPMLPLQILVLNLIYDISCLTIPWDNVDFEFLRRPRRWDASSIGKFMIWIGPTSSVFDITTYILMFTYICPLMVPHFIKSTFGVDIGLESCNWNTLDTLKNLLNPEQIKKAKEFFASLFNAGWFVESLWSQTLVIHMIRTPKLPFIQSRASWQLSSLTTLGIATGTIIPFTLLGDKLGMAQLPYAYFPWLIGTIFAYMLLATLMKNIFVWRYKE

SEQ ID NO: 93446 - protein, 75 aa, Unknown
  Obtained from environmental sample
  misc_feature (1)..(75): Xaa is any amino acid
YAINAAWSDFLLPYLTLRNSGLETVMVRLFQFRGSRANDVEILRGIVFAIIPPIVLFFIFQKHITGISLNAGIKG

SEQ ID NO: 93447 - protein, 210 aa, Unknown
  Obtained from environmental sample
  DOMAIN (16)...(209): Glycosyl hydrolase family 65, N-terminal domain
  misc_feature (1)..(210): Xaa is any amino acid
MTKSADTYLLCDPWSIIEEDWHKERNLVSESVFSLGNEYMGVRGYAEEGCGADSLRGSYFNGIYEECDIGKSYKGIITKTHFMVNAVDYLYTGIRAGDETLDIAACDIRNFRRILDMRQGSLFRTFDWHTKKGPVIHVEFTRFLGMENAHEAFQKLQFSVTGGDTCISVVIANSFNTSHGWDKKNYWNLLRRDWFDNGAAIQGQTVRTGQ

SEQ ID NO: 93448 - protein, 177 aa, Unknown
  Obtained from environmental sample
  misc_feature (1)..(177): Xaa is any amino acid
MLYGFKTFNTSTGNFTLSQIANGSVSIPVWVTSTASENLVKYSGNGSGGCVVAIVNTGSGSINDDPYQPIAQKLFSSVSFTNGGATRAWSAGENCGGGNPPGGGGEPSNPSDFTYTETETAVTITGYTGSATSVNIPASINGKPVTTIGKEAFYSSDVAGDLTSIIIPNIRETTRFT

SEQ ID NO: 93449 - protein, 410 aa, Unknown
  Obtained from environmental sample
  misc_feature (1)..(410): Xaa is any amino acid
MLYIIEVKKLDAQRILNTLREGGSIASSLEYFEPRQAQLDLMELVIRCFNENAIGAAEAGTGVGKSFAYLLPAMHFAVETGERIVVSTATITLQQQLFGKDIPLVKDAIKAKVKAVLVKGRGNYLCRRRLLDSLREPELSGSDEQEQLEDISRWAETSKGGGREELAFVPLEQVWSRVCSDTELCMGKACPEQSRCFVLALRREAAAARILVVNHHLLFADLAARREGAGYEAAAVLPPYSRVVIDEAHTIEKAATSFFSKEFSRIGILHYAGRLYRKRRAKKSGLLVRFCSLLAEGDDSLKTLAAALDDIRKAAGELDRPGLDLCGMDGVFRFSPSRGEGAESALFPPLLALRKKLLAFTARAREIIELLPENDTDDPSAAGAFTSVWELKSVLRRSDGIADICSAFTN

SEQ ID NO: 93450 - protein, 157 aa, Unknown
  Obtained from environmental sample
  misc_feature (1)..(157): Xaa is any amino acid
MNNTNYTFLSSRTGEIVPAIIHKDGSSHPLHSMIDPIREAERLVSTIPKDIGFIIFLGLGGGFAQQIALAETSAQITVIDFDKDGIKELLSSKDYSPLLNNPRFSFLTDFTFDEIKKYILENYNPALHGGIKVIPLRTRTDNDERFNKARRRIQETV

SEQ ID NO: 93451 - protein, 153 aa, Unknown
  Obtained from environmental sample
  misc_feature (1)..(153): Xaa is any amino acid
LGYIIPALRERFKESKILVLHIENFKEESLQNVYSLTSLDTEEIYKFLETHIQKINAEHIKIIEWRPSLNYFKDSYVKILSAVTAFLKRADAEKRTTAVFGKRWIKNFFKNIGNINHTLLYRQMKNPVIITGSGPSLEQALPVIRKAQDNCLI

SEQ ID NO: 93452 - protein, 200 aa, Unknown
  Obtained from environmental sample
  DOMAIN (5)...(102): Uncharacterized protein family UPF0004
  misc_feature (1)..(200): Xaa is any amino acid
MGKMKFFFETYGCQMNIAESAALAIAARESGWLEASGFEEADLVLINTCSVRTTAEQRVFGRLAQYMALKKKRAFTLVVAGCMAERLGEKLKKDFAVDYVIGTSARSLFSLILESVEKGTAFAETAEKPAFSFSSFHHENLSPFRSFVPIMHGCNNFCSYCIVPYVRGREISRDPRSILDEIRLLGRQGVREITLLGQNV

SEQ ID NO: 93453 - protein, 324 aa, Unknown
  Obtained from environmental sample
  DOMAIN (144)...(309): Phage integrase family
  misc_feature (1)..(324): Xaa is any amino acid
LTLTGDYVQNRDTMRLAEICRTKRELQVVSGEWGILDPGSDKKTLYLFAKEMADSGKYAVRINSVLQYLEKYPGGKNIQISRINKKWVENFQDYLLKHLSRNTARNYILGICQVLNKAVHENIILKNPGHDVEIIKKQESERVFLNIEEMQKLANIEAKTDLEKDIKRAFIFACYTGLRVSDLITITWGNIEHNPPQIVKSQKKTGVRVYIPLHKTARTVIDDNALHDNGELIFPWLKVIKNNRNLYLTKWADRAGIGKAIGWHTARHTFAVKSLESGADIYTVSKLLGHTDITATQVYAKATDKMKREAVNALPEIIVEPPNG

SEQ ID NO: 93454 - protein, 274 aa, Unknown
  Obtained from environmental sample
  misc_feature (1)..(274): Xaa is any amino acid
MAQEILAKHVPFYQVVMLVFFALPQVIAMSSPFASLMGTLITVGRMSSDNEVLIILASGLSYRMILIPALAVGIFISVVSFFTNDVLLPAGNIQLSKLYRRILVSTPELELESNSVKRFKDTTIVTGPVEGATIGNILILDRTIDGERRIILAQDAELKDGGREGLSLDLSNAFTQSSKEVVRNDYDYAFTDFLRYWVPQSDLIQAISSVAPNQMSSTDLRKAIAVKGVELGDRLDEQYAKCLASALDLEESLRAGPPESAWNRRERNLEALKK

SEQ ID NO: 93455 - protein, 188 aa, Unknown
  Obtained from environmental sample
  misc_feature (1)..(188): Xaa is any amino acid
MKDLLLPPLFSDGMVMQQGVAFPIRGYASSMVTVTFLGKTYQSQADADGKWQVILDPVQAGGPFTMEIESAETRVCIKDIYSGDVWLCAGQSNMDHPMQRHRDNYQEEWTAQAFPPIRQFKAPYEWDFSGPREELSGGGWTVATAETLHEFSVVAWVFRQKPVRKIPSSHRPYLYRLGRNTHRSLDEP

SEQ ID NO: 93456 - protein, 502 aa, Unknown
  Obtained from environmental sample
  misc_feature (1)..(502): Xaa is any amino acid
MKKASKADKVVEGHKDLGANYGRGLYKQLQETIEQVEKLTTEIREIKSSHQMETASLKTEIESLRKENTALKAENQKLKAIINKDSGNSSKPPSSDAFKKIFNSRKKSGRKPGGQTGHPGSAPVLFENPENIINHKRERCGCGGTVAYGEGYQAKQIVELEIKAKVTEHRSYTGVCGSCNATVKNDMPLQDTITYGETVKAFVAMLGSEGLVSINRIKAMLYEITGGAIALSEGTIVKWNKELSGKLASFIEKMKEKLLTQPVLRKDETGIRIAGSLQWLHVLSNEAYTLYFSHKKRGNEADKEAGILPAYSGVLVHDHLKGLYSFTCGHAECNAHILRYLKSAAEINKCAWAVAMIAFLVEANNIVKEHKAKNIPALDNALLAECYAGYDKILEQGRLEFFQGGKKDYNSEDMKLLRRLKEYKREHLRFLSDFQVPFDNNLAERDLRMIKSKTKVSGCFRGNEGGTVFANIKSYTSTLRKNSRNIFNGLKNAFLGLPFSWA

SEQ ID NO: 93457 - protein, 256 aa, Unknown
  Obtained from environmental sample
  misc_feature (1)..(256): Xaa is any amino acid
LAPFIERIKEKLLTQPVLRKDETGIRIANILQWLHVLSNEEYTLYFSHKKRGNEADRETGILPVYSGVLVHDHLKGLYSFPCGHAECNAHVLRYLKAAAETNKCAWAAAMTALLVDANNTVKDHKAKNIPALDDAVAAKYRARYDEILEQGRLEFLQKEKKDNNSEGMKLLRRLKEYKSEHLRFLSDFQVPFDNNLAERDLRMIKSKTKVSGCFRGDEGGTVFANIKSYTSTLRKNARNIFNGLKNAFLGLPFSWA

SEQ ID NO: 93458 - protein, 432 aa, Unknown
  Obtained from environmental sample
  misc_feature (1)..(432): Xaa is any amino acid
MGIGLLKAHLEAFDAIGAGIKDERQEGYNKQYEYADAIKGAYGVFFFQHPSMLDYQERLKKKNERSNTETILRVNKIPSNNQITRLLDDINSETFAPVFEQGLETAQRYKGLDQYLVLDGRYRLITLDGVWFYQSENIKCGHCLQQQLKDGQTMYYHDMIATALVKPGFQTVLPLVHEFIRNEDGKEKQDCEREAAKRWLKGNAERYRWLNPVFLGDDLYSNYPVCTAIMEKGMHFIFTCKADSHRWLYDSIDSGCMKWKTVGKWTGREHLEYRYWRHNGVEIREEQPTLSVNIFSLEIWNREKGKATYRNNWVTDLDVDEKNIQEMTECARAGWKIENEHNKVLKHHGYHLEHNFGHGQENSCEIYAVLNLPAFQMHGILLLLDEEYQKARASVRRLDEFFGGLRLIFSRFLFQTWEDFIGFIVQDDEPDG

SEQ ID NO: 93459 - protein, 303 aa, Unknown
  Obtained from environmental sample
  DOMAIN (12)...(270): Cell cycle protein
  misc_feature (1)..(303): Xaa is any amino acid
MDDLRRKNSLDFTLLLTAVALWVIGIFLVYSATYIHDSGPLAGIYKQQILWVVMALLIVILIISIPARYISKGAYAFYGMSLVMLVLAIATGSGVSAKGAERWIVVGGLKIQPSEFAKVGLLLALAKRLSERPVSLYNLPTLIVPVSLILVPFALVLKQPDLGTAMVFCVMALPMFYWSSLTLLDVFYVVSPLISLLLSAIPLLLTFNTGESWGVFEAVPWGLFFLVVVILLYIFRAPLYIWIGVIVGNITTATVTTVVWGSVLKDYQKMRITSFMNPQADPFGSGYQVIQSKVAIGSGHISA

SEQ ID NO: 93460 - protein, 88 aa, Unknown
  Obtained from environmental sample
  misc_feature (1)..(88): Xaa is any amino acid
MQAADLSPVKRRPCWHIQRDMNILLDGRVLNCREDLAALKENTELWGNAFSDDLSHIWEKGAALYNAHCKAEYPGICALCDEYYTYNF

SEQ ID NO: 93461 - protein, 340 aa, Unknown
  Obtained from environmental sample
  misc_feature (1)..(340): Xaa is any amino acid
DSPCLLSSEEDLKSRTWDFIVLDRYKTSRKEFEFFSSLAPVIGIDEGGSFRNHFDFLIDLLPSARRANEEAKPNIFSPALLSLPRNRRPVDKGETAPGFRILISFGAEDSAGLGIAAARSLSGFLAKTPTKKPLEVTLVSPIPPHDSQGETEELFGITVLRRIPYLSERLAEYDLLVTHFGIGAFEAVYARLPVILVSPGLYHERLSRKAGFFSLGIGTGAAGRLGKLAFSLAHRTEGITSKPDILKTIERKSREIADRYGLWEDQKETIVSLLCRVSPRSPLACPVCEKPRAVAVLARFPEESYRQCPHCGIIYLTRLGEPPIEYEKDYFFGDTKNSTA

SEQ ID NO: 93462 - protein, 441 aa, Unknown
  Obtained from environmental sample
  DOMAIN (213)...(248): UvrB/uvrC motif
  misc_feature (1)..(441): Xaa is any amino acid
MNSQGEVRGTSRLDSLKAVAHDAPRLPGVYLWKDEEGRIIYIGKAKSLRDRLSSYFSGEKDPKTAVLVRRAASIETIIVASEYEALLLENTLIKQHSPRYNIDLKDGKTYPVIRITNEEFPRIFRTRRIIEDQSLYYGPFPNVQGVDAMLDLIDKLFPLRKCKTIRSALRKRRDPCMYYHIGRCMAPCCGKIAPEKYRRHVERVQRLLSGETEPLIIELTEKMHEAAKALQFEWAARIRNAIKAIEDLVGEDSAVVDFDPESRDYIAWAAEGVLATFTVFSMRGGKMTGRELYRTRSAAEEGESLELFITTYYDPTRPPPPKIYLQPGTSTAAVMHNDSLMNWFKTQWGHEPELIQPEEKHHVAILAMARQNALEDIRKRLKERGAGPALDELARVLQLPGRPERIEGFDIAQLDGKHPVASLVSFKNGIPDKKNYRYFKL

SEQ ID NO: 93463 - protein, 507 aa, Unknown
  Obtained from environmental sample
  misc_feature (1)..(507): Xaa is any amino acid
ADNLENIPPDSTATNIQDTLEEKEPAGGRLSPEERQRAELEIKSSTMPELAVWCRLLGLSESGTKEELAKRIRDHFGMPEPKNNNENRKIINIESAQSTEYFTVDVIDEDYARLKGDVRLVLHDKEDIHKIKADEVLFNRTRNIITAKGKVEYIKEKGDTTEIFRGENITVNIDDWDSVFLDGDSEKTLSSENTAYRFEGTVISRSYDDVMILNNARISNANNDEALWSISATKLWLLPGSDFAIFNMVLKVGEIPVLYFPFFYYSADDPIFHPVIGYRSREGGFVQTSTYILGRPKGDTTEQISITKILGSSADMEKEPNGIFLRSTGKKATNTDENSLKLIADYYVNLGAYAGIDFSAPKLGFLNSFDFSAGAGFSRTLSMIGGNYTPYAPKYDGSVEWNNSNLFSYTVPFRYRMKTQSSFRGTYGGFSLSVPFYSDPFIDRDFYQNRSEAMDWVNMIQQGAERIDDDTRQDIGPYTWEISGNLSPSTGFLSPYISSLSLSSLST

SEQ ID NO: 93464 - protein, 332 aa, Unknown
  Obtained from environmental sample
  DOMAIN (118)...(322): PhoH-like protein
  misc_feature (1)..(332): Xaa is any amino acid
MERLQISVGAYLDDSITIVLDDRDLLPGICGANDGNLKVIEGSLGGRIAARGNEICLEGADVDAVRRFRMLMDNLIALVKEGENPSPEYVLALTGAGNPAGSPAEEEAFIHIPNGFGRVYPKSKNQAAYIRGMRNSDISFGIGPAGTGKTYLAVAQALSLVLSKKMRKLVLTRPVVEAGESLGFLPGDLVQKVNPYLRPLYDAMESLIPYEVIHRMEEARSIEIAPLAYMRGRSLNECVIILDEAQNTTREQMKMFLTRIGEGARAVITGDVTQVDLPKRQESGLLHAISVLSGVEGLAFSWLHTDDVVRNPLIKKIIQAYDDNSNNNELKN

SEQ ID NO: 93465 - protein, 485 aa, Unknown
  Obtained from environmental sample
  misc_feature (1)..(485): Xaa is any amino acid
AVFIFNPRDECIKTIYAPNSIAFGDTQFAPYRIGVDPRGSMYIIGEGVYDGIIHLSNEGEFLGFFASNKTTLTFIQLLQKIFFTERQKQGLLDRLPLTFSNVFVDSRGVVYSTSMGRDIARAGQAIKKHDMAGRNMLKTATTMSITDIAVDRYGNIFTTSTEGWIQVNSGDGEEIFFFGSGHLSNEDIAGWYTNLVSIAVSSQGHIWALDGEKAFLQSYTPTEYTEAIYRAQRLFNEGHYVEAGKEWNNVLRFNQMSVLAHNGLGKSFLYQEEYENARYEFFVAGNRGYYSQAFWETRNIWLLGNIPYILILFVLFFAGSFVLKLADKNQILKTAIKKNIHTLMNAKYIDTTLFSFSIARHPMDSFYYLKKKQKGSLPGAFVNFVFFFLAYMVYQTSKGFIVQFIEIEDMDFNVIIGGFIGIYILFVFCNYLVTSINDGEGNIDDIFKLVSYSMLPISVALLAVTLVSHATTENETFLLVFMLIG

SEQ ID NO: 93466 - protein, 180 aa, Unknown
  Obtained from environmental sample
  misc_feature (1)..(180): Xaa is any amino acid
MQIKKILFVNKRLKTASDGVYALALLLPYGLLFSVFIAIPIAVAIYLSFTYFDLVQAPTFAGLYNYVTLLTQDTVFFKNVLPNTIQFALIVGPGGYVISFLMAWMLAQIQPAPRTILALLLYMPSLAGGVFIGVLWRTIFSGNQSGYINAILLNWNLIQTPIQFLQSPKFLMGIMILVSL

SEQ ID NO: 93467 - protein, 92 aa, Unknown
  Obtained from environmental sample
  misc_feature (1)..(92): Xaa is any amino acid
MASTESKLPVTPAANTVHEEPVGLYYGGFVMIGMAVGAFSGFMIGGGQEEFLAGGWIDSIIGVVTGLFIGVGLGLICHAHLLSKRGKSHPHH

SEQ ID NO: 93468 - protein, 375 aa, Unknown
  Obtained from environmental sample
  DOMAIN (1)...(302): Sodium:solute symporter family
  misc_feature (1)..(375): Xaa is any amino acid
GLSRLFEMAFHVDFIYCIIGMAVLTAVYVVIGGYFATAANDFIQGIIMLIGIVAIIGAVLGSNGGLINALAKLAEVKGNNVNNVPVPGIFTSFFGPDPLSLLGVIILTSLGTWGLPQMVSKFYSIKSEKMISKGAIVSTFFGLVVAGGCYFLGSFGRLYDNPNIRNPSGAIVYDAIVPAMLSKFPDFMIGIVIVLVFAASISTLSSLVMASSSTLTLDFLKGHVIKKMSEKKQLVIIRMLIVVFIIISSCIAVIQYKGGISFIAQLMGVSWGALAGSFLAPFLYGLYWKRVTKPAVWCNFIFSTALMILNIFFRSSFPALLQSPINAGAFTMIAGFVIVPVVSIITKTPDKTSVDRCFSCYEETVSVKVRDDLGN

SEQ ID NO: 93469 - protein, 332 aa, Unknown
  Obtained from environmental sample
  DOMAIN (1)...(332): Glucuronate isomerase
  misc_feature (1)..(332): Xaa is any amino acid
IQKPELSVKSIFEKFKLHAVGTTDDPVDSLEYHRAIAEGTAPIGKIETKVIPSFRPDRALNIEADGFAAYINELSKTSDTTIKFSDDILTALEKRLDFFISLGCKSADHALEYAPYTITSGGHIEKIFRRAMAGKKITNEEASAFKTKMLILLSNLYTQKGIVMQLHLSSIRNINMKILSQVGENAGADAVNDSILSKTLAALLGHMELPKTILYSLNPKDYYPLATIMGGFQEAGIEGKMQLGSAWWFCDHRDGMEEQIRVLANLGMLPAFVGMLTDSRSFLSYPRHEYFRRIMCNLIGKWVENGEYPNDMIKLEKIVRDISFGNAKKYFK

SEQ ID NO: 93470 - protein, 95 aa, Unknown
  Obtained from environmental sample
  DOMAIN (24)...(95): Mur ligase family, catalytic domain
  misc_feature (1)..(95): Xaa is any amino acid
MKFRELLTVSGINVTADGGSGDPVISDIVYDSRNVKPGSLYVAVPGTKVHGDTFIESAIKNGAAAVVSENSQDQLSTPWAKVLDVRGALGKLGIA

SEQ ID NO: 93471 - protein, 498 aa, Unknown
  Obtained from environmental sample
  DOMAIN (374)...(431): PASTA domain
  misc_feature (1)..(498): Xaa is any amino acid
MPGKEPRDGADLYLTIDVNLQKIVQSVLKQTVESLNAKGAMCIVMDPRTGKILAMANEPSFNPNIYSSYSLADRQNKPISLIYEPGSTFKAVTASVALQEGAYSEGDLINGNNGAFEIYGEQIRDDTPQGQITFARALAVSSNVCFAQIANGFKNERFYRYVRDFGFGAKTGIALPGEEGGILHPVNNWSGRTRVTMAMGYEVSSTFLQMMLAYAAVANGGVLLTPVICERIEKKNGTTAESATVRPVRRVVSEETARRLRKMMQGVVETGTGKQAVVPGIPVGGKTGTSRKSEGGGYTRQRHWSSFIGFLPVDEPTLLCGVVIDEPAGGTGGGAAAAPAFRKIMSLALAHPELEFSDKILKPTATQDSQSLKIKLPDFSGRKTATATAQLDSMKITFRVVGDGKVVRHQTPAAGSFAGDRIGEVVLFTDETQPVSDGAVRVMPDGIGKELRDAFNIFNAKGIPIYAVGSGKVLKQSIAPGEIMNKAVVCTLYCERKK

SEQ ID NO: 93472 - protein, 352 aa, Unknown
  Obtained from environmental sample
  DOMAIN (50)...(149): Penicillin-binding Protein dimerisation domain
  misc_feature (1)..(352): Xaa is any amino acid
VAPYKARVIAVAVFLVIFFLAVAGKLFTIQILESGKHALNSKMQAQKRRIINARRGDIYDRRGRQLAVGVPGRLALGLDVLGVEEAEGKAVLQRVYPMGEVAGPVLGYVGKDGYGLGGAEFIFDHYLRGEDGWEIVLRDGKQRTYRKIGLPGKAPQDGADLYLTIDVNLQKIVHAVLKQTIESLNAKGAMCIVMDPRTGKILAMANEPSFNPNIPSSYSLADRQNKPISSVYEPGSTFKTVTASVALQEGAYAETDLINGNNGVFEIYGEVIRDDTPQGQITFARALAVSSNVCFAQIANGFKNERFYRYVRDFGFGAKTGIALPGEEGGILHPVNTWSGRTRVTMAMGYEI

SEQ ID NO: 93473 - protein, 147 aa, Unknown
  Obtained from environmental sample
  DOMAIN (29)...(143): Response regulator receiver domain
  misc_feature (1)..(147): Xaa is any amino acid
MVKSDYAEILTMTEKLRTAMIDLTMLSKKKVLVVDDEEPILVMTKGMLGEDYNVTTINSGKVALDLFLQGYTPHLILLDLYMPEMGGWDTFLRIRNISQLHRIPIAIYTTSEDPKDKAKAKELGAVDYIHKPANKKEMLQRVSKLVG

SEQ ID NO: 93474 - protein, 90 aa, Unknown
  Obtained from environmental sample
  DOMAIN (24)...(90): GTPase of unknown function
  misc_feature (1)..(90): Xaa is any amino acid
MQISAVNFALGATSIKQVPKDGIPQIAFLGRSNAGKSSLLNALFEKQIVKTSNAPGKTRELNFFLVQNSQNDSFYFVDLPGVGYAKVSIT

SEQ ID NO: 93475 - protein, 427 aa, Unknown
  Obtained from environmental sample
  misc_feature (1)..(427): Xaa is any amino acid
MKLKTKELDLHFDFDNGNYYRLEKIIKRISRVRETVIKINLNGQDDLKIIPSVIGKCVLLEELDVSNTPITKIPDYVFSLPNFRSLSCGCDNLILSPAFFRNAVKLEKLQLRINKGESISEENFSLIGTLKNLQELELEIFHGDSLERKPLRLPESFASYPALKKVKISSIFSGSKQQPFDLAEAARILASCPCFESLSLSNLSVGEGQRNLSLLTGLKELELEDLSFVGNPFQSIASLRKLEKLAIYEDRHINTITELPDIFGNLSELRKFVIVNNFVRAIPPSLYSLEKLEHLEITGAGISSLDEKIGKLHSLGRLILENNMLEKLPEEAPDRPRLTALNIARNNFKKEEITKIRSKLKPRFKSGEKIQFSTKEQGHEQEVKKLLVMNKSTFADEEAYYNQCLAAVCEEPFSVGYIDTEKISSLN

SEQ ID NO: 93476 - protein, 169 aa, Unknown
  Obtained from environmental sample
  misc_feature (1)..(169): Xaa is any amino acid
VIDSRGNRAYLSQLTVETENLDPGNGTGIDYYGGPVKIQARLFPQALPSEPENYSREAVIRVSLKGLDAVQFETSIGGDYPPGPEENLRKWHAVRVRGKSARFISILEPFEKDRIIVSAEAKNQDTVKVSLTDGTVQIINISGLEDPQPGISVQFTERQNGVEITESSI

SEQ ID NO: 93477 - protein, 139 aa, Unknown
  Obtained from environmental sample
  DOMAIN (89)...(138): ribosomal L5P family C-terminus
  misc_feature (1)..(139): Xaa is any amino acid
MDKNYVPRLKKIYKDQIAPELFKEFNYKSNMQIPKLEKIVVSMGVGEALQNKKLLDAAVDTLTQITGQKAVKTKAKKSIANFKIREGQEIGAKVTLRGTVMYEFFDRLVNVSLPRVKDFHGISQNALTDTEIIRSEFKS

SEQ ID NO: 93478 - protein, 87 aa, Unknown
  Obtained from environmental sample
  DOMAIN (14)...(82): Ribosomal protein S17
  misc_feature (1)..(87): Xaa is any amino acid
MTGQVKSKKKEFIGIVKSDKMEKTIVVSIETLTLHPLYKKYIKRSKKIKAHDEKNEAKIGDRVRVIECRPISREKCWKLVEILERAK

SEQ ID NO: 93479 - protein, 93 aa, Unknown
  Obtained from environmental sample
  DOMAIN (3)...(83): Ribosomal protein S19
  misc_feature (1)..(93): Xaa is any amino acid
MSRSVKKGPFIDKNLYKKVLELSKSGERKMIKTYSRCSTIIPEMVGGTISVYNGKTWVPVYITENLVGHKLGEFAPTRIFRGHSGSDKKAAAK

SEQ ID NO: 93480 - protein, 95 aa, Unknown
  Obtained from environmental sample
  DOMAIN (5)...(95): Ribosomal protein L23
  misc_feature (1)..(95): Xaa is any amino acid
MIQYEDILIEPVLSEKANHLREEGKYVFKVAQSATKPQIKEAVRKLFNVHPISCTTMVVGGKPKRQRYRQGYTSTWKKAIVKIPKDEKIAIFEGV

SEQ ID NO: 93481 - protein, 95 aa, Unknown
  Obtained from environmental sample
  DOMAIN (5)...(95): Ribosomal protein L23
  misc_feature (1)..(95): Xaa is any amino acid
MIQYEDILIEPVLSEKANHLREEGKYVFRVAQSATKPQIKEAVRKLFNVHPISCTTMVVGGKPKRQRYRQGYTSTWKKAIVKLPKDEKIAIFEGV

SEQ ID NO: 93482 - protein, 277 aa, Unknown
  Obtained from environmental sample
  misc_feature (1)..(277): Xaa is any amino acid
MAAKKQELTTQIVDISSSMRSIVGYLDDTNSWLASVGESQEVFTKMMNDPKIESLVENRKDRVQQLYGSISNTGNAMIDDACREHLTFNLLYKLNTILLNAIPFGIALCEIEWEKKGALFVPVNFIPIPRTAVKFPQGGSYGVPHLSSLNKPLDDPYKFIIHRNEKGDGNVWGTPALRSCYWPWKFKQLGFRFWMQAAERLGVPSILAIFETKNAEEAEKTAGKLTKILSDMRSGSSGAFANIKEIKVVDGAIKDFETIVKVCNEEISYGITAQSLM

SEQ ID NO: 93483 - protein, 319 aa, Unknown
  Obtained from environmental sample
  misc_feature (1)..(319): Xaa is any amino acid
REAPAELAVMSDEEAKKMENDFKAMESTESAEFKKFQKKLVERQILLEERDYFNKREKRVIKTFGSRPFTLELPDPEEEAFRMKAYAALEKTVLEREERAIEAELDRLFSSPPKADTSAEDARLAQIERNRVEMEKRFKEALANVNSEVDGFRREEERKRLEEEKRKRLEEERRRLEEERRRIEEERRRKEEEARREAERLREIERQRLEEERRRKRFQGYYYHTSHNGMLTAELRIGPSQAECQYHCSVCGHANIVYSVSINGDNITLTGGRKRGDYCSFQEYKLVENYQGTVNSSGTILSGYWYNNGISVPIVFYKL

SEQ ID NO: 93484 - protein, 429 aa, Unknown
  Obtained from environmental sample
  DOMAIN (60)...(317): Protein tyrosine kinase
  misc_feature (1)..(429): Xaa is any amino acid
METKVIDLPSGGGTQILAGGSTAETSANFTGGLLQIHEQVAGWEVTGKLGMISGEADIYIVQKDGQKGVVKYYRSVTKPKTEILEKLKRLNHPDIVNIYDFGQYNDRFYEIMEYAEGGALDTRNADGSYRYLPLSEEKAEGICKEIINSFKTCHEKNIIHRDIKPANIYFRTLEIEEIEGREEKKTIYRGDDVVIADFGISSVMDDTEQLHKTRTGSRTTGYAAPEVLSGIIGPKMDYYALGITLWELLSGKDPFTLDNGKRRNDAHLIRDTIEGRIADDILSKEPRVSQKMERLIRGLLILDPEHRWGYDEVTRHLAGETVDLYQEAKKAWIFCIGDIECTTLEELGSAIMENREASKKYIFRGLLGSVLEKHYPEISKQIVQIAEETSAANDHDNGILKVVYLLNPGLPLKIANGFKMQNLDDLVFL

SEQ ID NO: 93485 - protein, 344 aa, Unknown
  Obtained from environmental sample
  DOMAIN (22)...(280): Protein tyrosine kinase
  misc_feature (1)..(344): Xaa is any amino acid
VSDESHAPLPPERIGTYQRVGDSPLGTGGMGVVWLYRETGISSREVAIKFIRLDENLELNKANLIKDIKALDALPIHQNIITMHTVLEEQGNIALVMEYVPGGMTLKRVIKDYPRGLPISLASEILIGILSGVAHAHENGVIHRDLKPDNILMRYPRVGTQFGRNSVKIVDFGISKVRRDGTKRFSTIVAFTEAYAAPEQINSEETGGFTDVYAIGVVLYEMLAGRKPFEGKTAEIITGHCFKPPPPIHRSDIPSGIKNLLDKALRKDPADRYQDAIEMLAEYQAFDRMGELGISGSRLGMQRPGVATTHSGTKPQTTDDNKWDAGVADPEDDDRTIISGEKNK

SEQ ID NO: 93486 - protein, 128 aa, Unknown
  Obtained from environmental sample
  DOMAIN (54)...(90): CheC-like family
  misc_feature (1)..(128): Xaa is any amino acid
FLKPTTPAIKGVAVLVGLAGDVEGRVLFDMTKDTALSVAGAMNGGEVFAVFDEMPKATIQELANMITAQAVTKLHDLNFKFDLTPPALFTGENMEISTKFDLEALVIPLDLGNGGRIEVNVAIREKAK

SEQ ID NO: 93487 - protein, 362 aa, Unknown
  Obtained from environmental sample
  DOMAIN (11)...(204): PHP domain
  misc_feature (1)..(362): Xaa is any amino acid
MPTKTLKEICGCIHLHTTFSDGGCDYGAIIEAAGSDGAGLDYICVTDHDNLGGLHAGFNGLRDNGVFVLVGYEHNDEQHQNHYLAFGVDETAYGLTDPQKYVDAIKSMGGIGFLAHPAEKRDHIKSLPPYPWTRWDVEGFDGIELWNQISDWMERLRGWHSLTRLFSPNKKIGNAPPELMERWDALNRQRFVSAIGGVDAHSRKFKRGPFSCVVFPIEVELRGIRMHLFVDEMDWYNASKAGGTLISALRDGRGFMSNFSRGDAKGSKIVLIDGNGAVRYPGRCDPDDPSGAAEPAFPMKIKVELTHKAKIVLIHNGQPVLSTKAKSAEWEVSEKGIYRIEAYRGAGAWIYSNPFPIGGYPL

SEQ ID NO: 93488 - protein, 242 aa, Unknown
  Obtained from environmental sample
  DOMAIN (50)...(241): Protein kinase domain
  misc_feature (1)..(242): Xaa is any amino acid
MSTERMNDNQGTARMDAGTARMDGNKGGGVTTATVVFASGQTVVLNSRNCIIDSTISGSTGEAVVYKVIIDGKPYALKLYKPNMPLSDTAKKVITKIKDNPRDRIVKIYDFGKYNEQDFEIMEYAEGGTLDQYLKSNGAIHDTTKIKNIVKMIVEGLEQLHGGYKVIYQDLKPENIYFRDMNKTSLVLADFGISSIMAGYDEEVEVTASITDLYAAPELAHKGNRNEVMVTPAVDYFALGIT

SEQ ID NO: 93489 - protein, 425 aa, Unknown
  Obtained from environmental sample
  DOMAIN (38)...(291): Protein tyrosine kinase
  misc_feature (1)..(425): Xaa is any amino acid
MDAGTARMDGNKGGAATTAGVVFASGQAIALNGKNCVIDSMISMGSGEAIVYKINIDGKPYALKLYKPNMPLSDTAKKVIAKIKDKPRDRIVKIYDFGSYNGQDFEIMEYAEGGTLDQYLKSNGAIQDTTKIKNIVKMITEGLEQLHSEYKVIYQDLKPENIYFKDANKTSIVLADFGISSIMAGYDEEVEVTASITDLYAAPELAHKGNRNEVMVTPSVDYFALGITMFELWLGEKPFKTVKATQRDYLIAEEKVDFPIDMPDDYAAVIRGLIRPQRKDRWGNEQVRKWLKGEALAVESRTSQKASAAYDPLEFSNTESATSPKELAALMEKYHDIGKTCLYDGIIKEWLKKAGNLRLYNELQNIMSRYASDKDAGLYSAILALDPERPFKSRSGKICKTTEDIADAIMAESAYYMEDLKKPNA

SEQ ID NO: 93490 - protein, 178 aa, Unknown
  Obtained from environmental sample
  misc_feature (1)..(178): Xaa is any amino acid
MKKTGFIVVAFLLCGAMVFAVGSRQPGASAGSYHIGIATETVSQAEDDFRGAEELIKRYGSVAQGGIIQHVTYPDSFMDQMEVTISQITGLATDPLMKAIIVMNAVPGTSEAFRRIRERRPDIMLFAGEPHEDPLVIQKAADLALSCDFINRGYTIPWAAKQLGANTFVHISFPRHMS

SEQ ID NO: 93491 - protein, 100 aa, Unknown
  Obtained from environmental sample
  misc_feature (1)..(100): Xaa is any amino acid
GQFGHGHSPTGSASAGLGEFAKRVLDGKAKFDSTADLYAALGEFTPGAKWNGGMYIDAATGVRARNQLLIYMDTYIMGKGFLPSTAQTVPEKYYQIKFQQ

SEQ ID NO: 93492 - protein, 368 aa, Unknown
  Obtained from environmental sample
  DOMAIN (165)...(361): Predicted permease
  misc_feature (1)..(368): Xaa is any amino acid
RGIIDRYMELGTGHLQVFSFAGAEGLEGAVGIIRGIDGVRGVWLEQRGMGVLVGKKGKTGASIRAIEPSFWEEQEYLKLIDGTVGLETDRQMLLGESLAASIGAETGDTVRLMTILAGDNGRNIPRVTPFTVSGIVSSGYHELDALWCIITDGGGRRILQPENSSSSLIVKVENPYNNVDAMAWPLYANLDAGFSVYTWKDLMRSQYSSYESTRQLLLLIMALIVIVAAVNVSSATSMLVIDRQRDIAVLKVTGADADGVAGIFLWGSFLTGLCGAIIGIAIGLLLGYFINPLIRSLENFFSFFSGLAGGSEVKILDPGFYLETIPIVIDWFAVFLIGCFTILCSVAASWIPARRAGGLKPMELLRKH

SEQ ID NO: 93493 - protein, 444 aa, Unknown
  Obtained from environmental sample
  DOMAIN (42)...(440): DegT/DnrJ/EryC1/StrS aminotransferase family
  misc_feature (1)..(444): Xaa is any amino acid
MFESMTKSQAAEQILESVREYHKTFMEKPPYRPGDRIPYAARVFDEREMVNLVDSALEFWLTSGRYTDRFEAQLAEYLHVPYCSLVNSGSSANLLAFMALTSPLLGDRAVGRGDEVITVAAGFPTTVAPILQFGAVPVFADVAIPQYNIDVTLLESALSPKTKAVMLAHTLGNPFDLKAVRDFCRANRLWLIEDNCDALGSTYDIDGVAKFTGTVGDIGTSSFYPPHHLTMGEGGAVYTSDPLLHKIIRSMRDWGRECVCPSGKDNVCGRRFDRQCGELPSGYDHKYVYSHFGYNLKATDMQAAIGCAQLEKFPSFVQKRKHNWRRLYDGLKDLSDKLILPEPAPNSDPSWFGFLITCREGVSRNGLVKHIEGNNIQTRMLFAGNLVKHPCFNELRKSGKGYRIAGTLDNTDRIMNDTFWIGVYPGMNDEQIDRMIDVIKDFKC

SEQ ID NO: 93494 - protein, 105 aa, Unknown
  Obtained from environmental sample
  misc_feature (1)..(105): Xaa is any amino acid
VDEIVVFDPLDKKEIREIAAIQTRGLIKRLSDMKIETRIDDAALDLIAQKGYDPVYGARPLKRVIQREIETPVSRMIIAGEIPDGGTLKIGVNEGRLNFVAEAGG

SEQ ID NO: 93495 - protein, 315 aa, Unknown
  Obtained from environmental sample
  DOMAIN (63)...(299): Caspase domain
  misc_feature (1)..(315): Xaa is any amino acid
MSNEQLTINNEKRAMSVNLRLLLVSLLLFGLCWNVSAQRRGGDNETGAVEIADGQRVATQGKQWAIFIAIDDYREWEPLLNPVKDAKELKEILVNNYIVNEVRELYNKDATLIRIRQLFIDLQDQTGPDDSVFIFHAGHGVNEAKTRTSAWIPYDGGENNLAQSNWLSHLQVRSMLGSVKARHVFLITDSCFSGDFLNPSRGGAANVISYPAAYDKVSRQAMSSGASEVVDDVSEFAARLKNTLLRTEIPYITPDYLLYQIKEAKTTTPLGTIPILAAIPDVGHQIGGSFLFFRKDPKQDLPEPTAQDDKIIPVY

SEQ ID NO: 93496 - protein, 197 aa, Unknown
  Obtained from environmental sample
  misc_feature (1)..(197): Xaa is any amino acid
VFQAVDALGLGDHRIELEYGKKRLPVRVIKLELDSKETETLITSLTDTRYGVEDFKWLYFKRWPVETKYDVIKKKLEIENFSGKLVDNIRQDFYATMTLANIAADFYREAQADVEDEQERKENKYQYQVNVNHEIGVLKDRLVKTLIEKDDRKRSAMFDEILNLLKKRLIPIRPNRSLPRAAFPRRVKFHHNHKSNC

SEQ ID NO: 93497 - protein, 275 aa, Unknown
  Obtained from environmental sample
  DOMAIN (27)...(165): Bacterial flagellin N-terminus
  misc_feature (1)..(275): Xaa is any amino acid
MRINNNISAINTHRQMGIHVDEVAKSMERLSSGYRINRAGDDAAGLAISEKMRGQVRGLAMASRNAQDTISMIQTAEGALAETQDILQRMRELSVQSANDTNTDADRAELQAEVTQLRYEIDRIANTTEFNTRKLLEGSAKGVADEVQGTARYNNNSRITIDSIKSNAMMESVKTDKSWAFDGAYMLIKTNQTFNGGDPVYDPSDYKLVGPDGTIYSFRSMSADTKIKASELEPGTILADGGAVNLIEKKGVALSSVITAPGDLLVIGEHITDHE

SEQ ID NO: 93498 - protein, 258 aa, Unknown
  Obtained from environmental sample
  DOMAIN (9)...(256): D12 class N6 adenine-specific DNA methyltransferase
  misc_feature (1)..(258): Xaa is any amino acid
MSHYSPLRYPGGKAALSSFLSTIISNNGYTNFNYAEPFAGGAGAALELLFSKKVSKIFLNDFDYHIFSFWKSIIEYTDLFCEKIKNVPLTVAQWKKQKKIFDNYLDYSIFEVGFATFYLNRTNRSGILNAKPIGGYNQQGNYKINARFYRKELIERIIKISTFRKHIVISNMDALCFLSKLNNKKNVFVYLDPPYYKPGPKLYFNYYMHNDHKLLSEYILNKIRYPWVLTYDNIKEITELYYSQKSFILKWLQRKFSK

SEQ ID NO: 93499 - protein, 444 aa, Unknown
  Obtained from environmental sample
  DOMAIN (1)...(325): DNA topoisomerase
  misc_feature (1)..(444): Xaa is any amino acid
EKFSVPTEKGVITSLVKDKKTIPPPQLFNLTTLQKEAHKKYGYTPERTLEIAQSLYEKHKCLSYPRTPSRVMGDDNVALVQSIYDKLKSFYDCEVIANSEPSLISNANKRLFNSAELQDHHALIPLAPHPRDLDGDPHLNDTEVDEVNIYSLVFDRFFTVLMPPYVYNSIAIDVDISGHKFMGNGIEVINTGWKTVCEKDSDEDDSPEDYSGLVQGNEYKVVSLKTLSKKTEPKKHYTFASLLQLMENPRGDDGKHLTGLGTPATRGAILQKLVDRKYVALKGKNILISDDGNFLIENILKNDELAAFISIPETTRWEEQLHDNTSAFIEGIKDFVRGAVKNTGMDTYQHEKKSLGKCPVCGTGDIYEGNNNYYCSNYKASPPCKFVIWKNICQAFVTHSDVQALLAGKQTKVKKCVSPKTKNVFNAKFKLVAGKVEFQFEEKK

SEQ ID NO: 93500 - protein, 200 aa, Unknown
  Obtained from environmental sample
  DOMAIN (2)...(132): Toprim domain
  misc_feature (1)..(200): Xaa is any amino acid
MLILTEKPSVAKAFADALGVARKDNFYENSEHCIVNALGHLLEDYSPEDYDPALKKWSLEGLPIIPEQVKYKAVDKTKAQLAVVKSCFTRYKNAPFLLATDAEREGELIGAEILDYVGFTNYSGAKRFWVSEALTPEVIKKGIESAKPLAEYKSYREQGFTRQFADWLVGMNLTRLVSLKTNKTLHFGRVQTAVLGAVYA

SEQ ID NO: 93501 - protein, 188 aa, Unknown
  Obtained from environmental sample
  DOMAIN (1)...(188): FGGY family of carbohydrate kinases, N-terminal domain
  misc_feature (1)..(188): Xaa is any amino acid
VLFTVDIGTSSVKSAIFNYDGKCLSSASFPLSDDVNADCSLWIKAFGDCCNKLGNIKIVEAIVISGNGPSLVPVLGEPKSGKDGLTVPADKVRPWLDRSAVKYQEEVSEVMGGFVDACFFLPKILKIKNEETELYRRTKTFLGIPEYLAYALTGEARSVFPSDGFDRWFWNDAVLKKLSLDADKLPPL

SEQ ID NO: 93502 - protein, 438 aa, Unknown
  Obtained from environmental sample
  misc_feature (1)..(438): Xaa is any amino acid
VTLGTIYSDMYRYDEGKYWYEKAIALGAGARSFIAVAHYNLSILESRFYRYDLSMDEANSSIDAQNRASGFLARGELRMRRLDLEEAHGDFETAREIDRSPLAKVNLAQAYQISGRLEEARLYALDCLKAGDQSWMAYYGIDPVRYKRDIHEILYKTYSGLEKAGRFQPWGTAGGVIRSAVKSISYRFYYNVHRKLYQKYSLASGDAYDTRDANGFPPLEKYIQYYNAFETYPDRAIVYLRKAREFEIVVIPESAGSYYLEESVLRKDTSLAARALDALDPVWERDLTATCHREFALRGSASSAEDLFALNRGALLQAGISLPLEIRFNNANEVGAAGGAGKRKEKTFLRALARAGFVQTANTSRIVFYTPPAPSRFSLDITINAAPSSGGFTVFCELRDSEGVVKPLRHAIPLRSMSRADISTFARTLSGLVFRVEG

SEQ ID NO: 93503 - protein, 132 aa, Unknown
  Obtained from environmental sample
  DOMAIN (7)...(126): HEPN domain
  misc_feature (1)..(132): Xaa is any amino acid
MDKQAELRQWLEIADNDLAYAEFASKNMWPVPYGIICFHCQQAVEKYLKRFLVMNDIAPPKIHDLQELLKLCAAIKPQFSTIYEECSVLSGYAVQTRYPNEISVEKHDMDKALLYAKSVREFIMPLADEKDL

SEQ ID NO: 93504 - protein, 267 aa, Unknown
  Obtained from environmental sample
  DOMAIN (17)...(223): Cobalt transport protein
  misc_feature (1)..(267): Xaa is any amino acid
MKYMIRELYTLEQLSGGRSCVHKLHPTAKLLVTMFFLLAVASFDRYAFERLVPYIFYPALMMALSETPYSMLLKRILIALPFCLFAGITNVIFDRAPAFAIGAVAVSYGTLSLFTILFKMYLCVMAVLLLVSVTPLAEITDAMRRLRVPGIFVAIFEMTYRYIGVLLAEAYSMHTAYILRSAGGKGIAMRDMGSFVGQLLLRSIDRADRIYNAMKCRGYAAHTTRRDRRKIGRQDVAFCAVVCLFCAAFRVININALIAGIIEGVSK

SEQ ID NO: 93505 - protein, 449 aa, Unknown
  Obtained from environmental sample
  misc_feature (1)..(449): Xaa is any amino acid
MPVFFVILLVLFNVFPVYSLDLPISKISDDSLVRLKIKDSWMMEAPVRVLSQYARRETLETGERVEIRTTEGREEFIVHVSRELMRGTSAENRIGTGQFPGWIQGSWMLTRRKDNGDGTQIKIFLRSDQQTFIQFHRFSQDKCLMDAVVYGGFVAHSVPVAVPFERLYTMQLNDILRLVENKFPIRYFEPDISNYKETITFITQVRSRIKGLRFVDDGAIDENGKFVFIETLQPQPSNLQGFNCSGFTKWLIDGILRPVTGARLSIPPLKAPFGKRGSSFTAKWEKERDVFFGLDWIRNLASEANGTLRTSSHRALEEFEIRRDDFAYVLVNENRSFVVHSYPGFLSEAGYGVEGLHPLLYTLAIDEPFCFYLAAVNKEFDNPSSPRGTPRLRQYFHVAALVPYFDENGFFKIVVFESAEETSFSDFRKRHSGRHVNLVKIPISPTFDP

SEQ ID NO: 93506 - protein, 278 aa, Unknown
  Obtained from environmental sample
  DOMAIN (3)...(278): Glycosyl hydrolases family 38 C-terminal domain
  misc_feature (1)..(278): Xaa is any amino acid
TEFLGPEGIVPLIVDDESDTWTHLISSYRGAIRKMNLESYTLVSQGEVSAEYELVYKLLNSMVILRVILNGDLGTLDLKTRVIWNERHRLLKLRINSAFKNETFVSEIPYGAISRAADGREWPVQRWACLGSGTCLGVVNDGVYSASAEDGSLDLTLLRSPIYSHHETQHPRPDIQHRYVDQGESEFRVQLRPMQNEGKDHLSRYALELNQKAVYVIESAHPDRPEGAKAAPREHSYCSVKSPEGKMSSVLITVIKRGEDNDGWIIRAVEGVGEKTTR

SEQ ID NO: 93507 - protein, 265 aa, Unknown
  Obtained from environmental sample
  misc_feature (1)..(265): Xaa is any amino acid
MLLVYGLGDHGGGPTRRDLERLTDMITWPLFPTIKFSKYHTYFDTIKPLKNSFPVLEKELNFIFSGCYTAQSRIKAGNRLAEAALYESEALAALLPGGKIAPELFEEPWRDVLFNQFHDILPGSGVPDTREHARGLFQETLARANSQKGLTCYAIADMVDTSAVKGGRSIREAESEGGGAGYNVEKGYGVASVERGTGLRRGYLLLNTTEERSEVASLTMWDWPGDPGALRITDSSGKLLSFQVLVNNVAFWNHLRTELAVECTI

SEQ ID NO: 93508 - protein, 258 aa, Unknown
  Obtained from environmental sample
  DOMAIN (2)...(239): Branched-chain amino acid transport system / permease component
  misc_feature (1)..(258): Xaa is any amino acid
KMHFLPGHLHWITALTAAMLAGALWGAIPGLFKAFFNVNEVIACIMMNYVGTYLANFLITKTIFDSLKNQSMRVADTANLPKLGMDHVFRDGFIVSSANSGIFLAIIFAVLIYIILEKTVFGYELKACGFNRESAHYAGINERRSIVASMVIAGAMSGLGGAMLYLAGSGKGITVVDVLAMEGFNGIPVALLGLNNPLGIIFSGLLVAYLNVGGFNMQLYKFAPQVIEIIIGVIIYFSAFALLLKGFITSLRKRWGKP

SEQ ID NO: 93509 - protein, 448 aa, Unknown
  Obtained from environmental sample
  DOMAIN (3)...(410): Family 4 glycosyl hydrolase
  misc_feature (1)..(448): Xaa is any amino acid
MAKFAFIGAGSFGFTRTLVRDILTYNAFKDAVIALMDIDETRLDYITRAVNKIIKAGNYGAKVISTRNRAEALEGADGVLCTILNGDVDVWRYDIEIPKTYGVDINVGDTRGPAGIFRALRTIPVMLDICKDIEKYCPNAVFLNYTNPMAMLCRAMQTEFPKLKISGLCHSVQGTASMLAHWIGALDEDITYTCAGINHQAFYIDYLWKGKDAYPLLREAMKNPQIYNEEQVRNEMFLLLDYYPTESSGHNSEYNAWFRKRPDLIEKFCIHGTGWNPGAYAYILNEYQSRKGTWRKEIEDWLDEPTVDLNRGHEYAAYIFNAMFGDKTMFKFNGNVLNRGLIDNLPQGACVEVPVLASPHGFEAIRVGKLPNQIAALVHTSSVCEEMAVEASLSGDPRKVYQAIAFDPLTSAVLGIPEIKEMTVKMFKQNEGYLPQFKLRITNLDKKC

SEQ ID NO: 93510 - protein, 269 aa, Unknown
  Obtained from environmental sample
  DOMAIN (20)...(186): Conserved hypothetical ATP binding protein
  misc_feature (1)..(269): Xaa is any amino acid
MKSYQEHIRNFCIIAHIDHGKSTLADRIIEKTGLVSQRDMREQFLDNMDLERERGITIKLQTTRLRYHAVDGQEYIFNLIDTPGHVDFTYEVSRSLAACEGAVLIVDATQGVEAQTLANVYMALDEDLEIIPVLNKIDLPSSRPEEVKLEIEEIIGIEAAGAPLISAKEGIGIEDVLEAIVKKVPPPSGDADGKLKALIFDSYYDNYKGVVTYTRIFDGSVQKGDIIRLMNTKKKYEVTEVGTYCPKPAACEELKAGEVGYICASIKQV

SEQ ID NO: 93511 - protein, 57 aa, Unknown
  Obtained from environmental sample
  DOMAIN (1)...(54): GTP-binding protein LepA C-terminus
  misc_feature (1)..(57): Xaa is any amino acid
VRAYRKDVTAKCYGGDISRKKKLLEKQKEGKKRMRQFGVVEVPQEAFTAVLKYDDNK

SEQ ID NO: 93512 - protein, 485 aa, Unknown
  Obtained from environmental sample
  DOMAIN (21)...(485): TCP-1/cpn60 chaperonin family
  misc_feature (1)..(485): Xaa is any amino acid
AKQLLVNEEARHKLLAGVEQISRAVKVTLGPKGRNVLLDKKFGAPTVTKDGVSVAKEVELADPYENMGAQLLKEVATKTNDVAGDGTTTATVLAYSLVKEGLKSVAAGMTPIELKRGIDKAVEIAVAEIKKNSKDIKDKEEISHVASVSANNDNEIGNTIADAMEKVGKDGVITVEESKTMDTTIDFVEGMQFDRGYISAYFVTDRDTMTAVYEDVFILIHDKKVSSMKDMLPLLEKVAQSGKPLLIVAEDVDGEALSTLVLNSLRGTLKTVAVKAPGFGDRRKAMLEDIAILTGGQVITEELGMKLENTELSHLGKAKTIKIDKDNTTIINGGGKNKDIQDRIAQIKAQIEDTTSDYDREKLQERLAKLAGGVAVINVGAATEVELKEKKHRVEDALSATRAAIDEGIVSGGEIALIQAALALDKADTAGLTDDEKVGFKIVKRALEEPIRQIAENAGLDGAVIADQAKKEKKGVGFDAAKWDG

SEQ ID NO: 93513 - protein, 85 aa, Unknown
  Obtained from environmental sample
  misc_feature (1)..(85): Xaa is any amino acid
MPLLKVSDESIRQAAAVLVQGGLAAFPTETVYGLGGDAFNPLALARIFEVKGRPCFDPLIVHIAAGETLEKIADLSLLDTQAREH

SEQ ID NO: 93514 - protein, 209 aa, Unknown
  Obtained from environmental sample
  DOMAIN (2)...(187): haloacid dehalogenase-like hydrolase
  misc_feature (1)..(209): Xaa is any amino acid
MLKYLLFDLDNTLYSCHYGLEKNVSRRIFEFASALLGIPPEEVRRQRMEAKKQYGTCLEWLMTEQRFTDVETYFAAVHPPGEADALVPDSELRDFLSGIPIPKAVLTNAPREHADLVLDKLGISDLFTHIIDVRQCNFLGKPRREFFEYALRTLGVNIDEVLFVDDHPFYVEGFIALGGKGILLDEDNFHTDYTQPRIRELKEITRYID

SEQ ID NO: 93515 - protein, 349 aa, Unknown
  Obtained from environmental sample
  DOMAIN (1)...(334): Protein of unknown function (DUF1016)
  misc_feature (1)..(349): Xaa is any amino acid
AAVNYAMVEAYWLIGKRIVEEIQQGEHRANYGDQVIKNISKALTAEFGKGFSERSIRQYRQFYQMFPKLSIRRTLLAVSEKPAKTKTNLANSVRQINPPALEYALNWSHIQRIMRVSNPEARTWYLRETVEQSWDFRTLDRNISTQYYERLLMSQVKKPVIQEMLSKTGKYQKNRLEFIKNPSVLEFLGLPGNTGYSEKILEKAIINHLQQFILELGKGFAFVERQQLIRTDTSDYYIDMVFYNYILKCFVLIDLKTNRITHQDVGQMDMYVRMYDELKRNESDNPTIGILLCSETDKDIARYSILKGNEHLFATKYKLYLPTEEELRIEIEKEKEFIRLQLEESKSDT

SEQ ID NO: 93516 - protein, 95 aa, Unknown
  Obtained from environmental sample
  DOMAIN (2)...(95): Protein of unknown function (DUF503)
  misc_feature (1)..(95): Xaa is any amino acid
MIVSMIQIIFEIPDIANIKEKRRVIKSVLEKMKKRYHLSAAEVDLNDSLSFAQIGGALVSNSKTFGESVLQKAFDMIEKETNVRIQDMKIHSEEF

SEQ ID NO: 93517 - protein, 204 aa, Unknown
  Obtained from environmental sample
  misc_feature (1)..(204): Xaa is any amino acid
MKFLRRAIIVILIFIPFYAFGQEEAPVEVNEREATTELNIDDLRRRITGEARQELMSASLGSSDVSLFATGSWKGDLQLNFGLSNSPLGIGFASPQTPLLYQQEVDLTLSLWINNRWFVEANFVDDSAQNTYCAGYQGKPGEFLQYAGVGNAGLDFPSFPYLDLGGDSPYSFGFYGRFGTNNIDIHTLVRYDAAVREEKTFSGD

SEQ ID NO: 93518 - protein, 78 aa, Unknown
  Obtained from environmental sample
  DOMAIN (6)...(73): Phosphopantetheine attachment site
  misc_feature (1)..(78): Xaa is any amino acid
MDELFEKMKKLIAEKLEVDEGKITLEASFRQDLGADSLDTYELVYAIEEEMGINIPDEKANEFETVKDAYEFIKSQQK

SEQ ID NO: 93519 - protein, 159 aa, Unknown
  Obtained from environmental sample
  DOMAIN (1)...(157): D-alanyl-D-alanine carboxypeptidase
  misc_feature (1)..(159): Xaa is any amino acid
LSKAAVLIDAHTGALLYSKNPNEEIPPASLTKLMTMHIVMNEIDAGRASWDEIVPVTVQSWARSQPPRSSLMFLAPGQIVTLRELMLGMAIPSGNDAAVAVALRFAPTVEDFASIMTSEARRMGLNVTRFTEASGISEYNMTTAEEFAFFCRQYVRLHP

SEQ ID NO: 93520 - protein, 153 aa, Unknown
  Obtained from environmental sample
  misc_feature (1)..(153): Xaa is any amino acid
VDYLRHGTTTLFAALDVLNGKVIGDCKETHCSKDFIQFLKKVDKACAPKKALHIVADNLSAHKTKAVNDYLESMPGRFVLHFIPTHSSWLNLVERWFAEITNKQIRRGSYESVTQLTKAIKGFIKNWNKSGRSFKWTKEPEEILAKIKKAKSF

SEQ ID NO: 93521 - protein, 212 aa, Unknown
  Obtained from environmental sample
  misc_feature (1)..(212): Xaa is any amino acid
MRKLILTTAAVAAAIAGAFAAEPSFGTFTDTRDGQTYKTVKIGKQTWMAQNLNYQTESGSWCYMDSASYCKQYGRLYDWNTAKTVCPKGWKLPFREDWDSLGQAVGGKKELVDDDSRGRIYWDGAAKKLKSKSGWDGSGNGTDDYGFSALPGGRRNTDGGFRNIGKRGYWWTATGHGSGFAFSRYMYHVKEYVDEDFNFRNEGFSVRCVQDL

SEQ ID NO: 93522 - protein, 485 aa, Unknown
  Obtained from environmental sample
  misc_feature (1)..(485): Xaa is any amino acid
MRKFLTPQAVIITVVVVVLALFFLLAGKQNADFSAKYAGYDLSGASTGRTNTYSRYLERYANIPNGKNDIPVNLFSYSSSSGVSALENFEGEMRALQTDEAGFVEYKINVEEEGLYNIFIEYFPLPSRGITIERSFIINGEIPFLGADRLAFQRVWGDAGPNRFDNQGNEIRAQQIEKPQWESAWFSDSLGFITEPYVFYFQKGTNVIRLQGINEPMAIRSLSIKAPVSGINYRDYIAKQDLFQYQNSRSNIQLKIQGERAVRRSDPSLYPNYDRSSGATEPPSVARIRLNMIGGERWRVAGQWIEWEVDIPEDGLYRLSVKGRQNYNRGFVSNRTVLINGQTPCRELSAIPFTYNNKWQLITLRDGEKKDFMVFPLNRGVNTIRLQATLGDMGAILNVMEESVFRLNGIYRKILVLTGTEPDVYRDYRVEYVYPEVIEAMALESKILYKLVDDLTRYSGERSAQAAATLTLARQLELFVRRPEK

SEQ ID NO: 93523 - protein, 106 aa, Unknown
  Obtained from environmental sample
  misc_feature (1)..(106): Xaa is any amino acid
EIENDFAPIKEKFIDKNIPVIMGECGAVLQLYPDDPAKEQQARQSRREYLPYVFGAAKKYGLVPIYWDNGSVKGDGEKFGLFDRLSGKPNSSESDALIKLMISAVK

SEQ ID NO: 93524 - protein, 437 aa, Unknown
  Obtained from environmental sample
  DOMAIN (89)...(408): Cellulase (glycosyl hydrolase family 5)
  misc_feature (1)..(437): Xaa is any amino acid
LRPEVMQKRFIYSLYIAVILWSAVSCASGKTAAVTSITADKAFEYTPVVSDAVNNYPEEPMGGKSALDYLRSEKISAGWNIGDTMDAWTGLIDQEGNLALIESGESVGWGNPRLNQALFNGVKAAGFNIVRIPITWMGSIGSAPDYHIDEGFLKRVAEILGYAKNAGLKTIINLHHDGVTDTKRGDLGWLAVRKASRNQDEFNRVTSQYVRVWKQIANYFRNYGDWLIFESFNEPHDGSWGGGGQIGQFITINKWNQFFVDTVRSTGGNNESRYLMVAAYCNDRGKLLSAGFMLPNDKASDKLIVSFHYYDPYEFGIQGSRTSWGSSADKQKTENDFAPFKEKYIDKNIPVIVGECGAVLQLYPDDPAKEQQARQSRREYLPHIFGTAKRYGLVPIYWDNGSVRGNGEKFGLFDRTSGQPNSSESDTLIKLMISAVK

SEQ ID NO: 93525 - protein, 243 aa, Unknown
  Obtained from environmental sample
  DOMAIN (132)...(203): HAMP domain
  misc_feature (1)..(243): Xaa is any amino acid
VLLTTPIIDNVTKELYGFIGTRVDIAPMQEYIRNLAPYETGQAQLISPGGIITASQDPEMLGKNFHEAGEELFGPGGLEMIDRTLETGVPTFARYHGNIIANYPVKVSGTKTNWGLSVEIPFAEQRQMQNFTIFFAIIMVIITAIIVYVIVNTSLKPLINVSLLLKDISHGEGDLTRSIPEKGNDVITDISRHVNQTLVKIRNLVINIKKEAGILFEIGGDLSKNMSNAAAAVHEINANIQSI

SEQ ID NO: 93526 - protein, 215 aa, Unknown
  Obtained from environmental sample
  misc_feature (1)..(215): Xaa is any amino acid
MKNNPDPQGDVAALPVPKATLSSPQSPVYFNRDISWVDFNGRVLEEGLRKDLPLFERFRFLSIVSSNFDEFFMVRVAAIKRARQAWLTPLLLTNSAEDTGPNPVEQLKVVSQKAHAMYSRLYACLMDEIFPGLAKKGLKLVSPDSYTVPQMDYLESYFIREIYPILTPLRIEEDKPLPFFESRCINAAFLLIPDEASAMEQERIVMVQIPSSLSR

SEQ ID NO: 93527 - protein, 203 aa, Unknown
  Obtained from environmental sample
  DOMAIN (4)...(202): Type I 3-dehydroquinase
  misc_feature (1)..(203): Xaa is any amino acid
LAKICLCLTAKTIQKDLEILKKYRKYTDMVELRVDCLDPDERLHIRSFPELADLPAILTIRRDSDGGYFTGGEGARVKLLARGLAFAEADRRKNFAYVDIEDDVDVQSLEEAARTFGTKIIRSYHNTEGIINDIPLKIKSMRRTGDEIIKMALKTNSTGDVVKVYRAAKECTFQDKTIVCMGQYGFYSRILCEKFGSFMTYSS

SEQ ID NO: 93528 - protein, 340 aa, Unknown
  Obtained from environmental sample
  DOMAIN (70)...(194): PAP2 superfamily
  misc_feature (1)..(340): Xaa is any amino acid
METSYIQMFSAENLQTIPGILLWGIEVIRVIQRLKNPALTAVLKLITELGTDKFYLPAILFIFWWIDEKKGFRLGILMLLSAWINTVLKSTFKQPRPFNLDPSLGLAYEGTYGAPSGHAQYALSFWVPMAAWLAGGKPGRKRIVVWAAAIFLVLLIGFTRLYLGVHFPTDLLAGWSVGAIILLLMYVLSPFFIKHLSGQTRSQNILAALAALVMISLYPGDRTLPAIFLGFYIGYNIMKNKFPFCGQSEIKERKLFVMLSRCLIGMAGLVVIYYVLRLLFPGEGSLFSYIPFWSQTSPFYELGHFIRYGLLGLWASAGAPMIFQRMGLSFAVSNSEEQKK

SEQ ID NO: 93529 - protein, 297 aa, Unknown
  Obtained from environmental sample
  DOMAIN (43)...(122): Biotin-requiring enzyme
  misc_feature (1)..(297): Xaa is any amino acid
VVQSIVDASGSTSEASPVAQIYAVNTIPAASGQIRDYLALSGDIIASSLVDTYSDAAGKVSRLYVSVGSKVKKGDPVAAVDPSRPGMEYVASVVRAPVEGTIIALPAQLGMTVSQAVPLARISGGAGLETRLYVAERFISKVGLNQPCEITLDAYPGEIFRGSITEISPTVDTTSRTMEIRVGVENPGSRLKAGMFAKVRVITETKENVVKIPASAVVNRFGEQYVFSVDKTNPQMPVARKRVIVPGIVIDGVMEVRQGLAPNEDVVVRGQTLLEDGSRVNVIEQLAPLGATPLGAK

SEQ ID NO: 93530 - protein, 279 aa, Unknown
  Obtained from environmental sample
  misc_feature (1)..(279): Xaa is any amino acid
MVVYTSFSGAGPEEVERSVTRVLEAALSGVSGLESVTSTSSKGSCMVIMRFNYGTDLAESSNSVRDALERVRNYMPSGAGTPTIFKFDPAIVPIMGLMVTGNRSAEELREMAKDVIVPRIEQTPGIATASVSGGRDKIVRVEIPQSRLEAYGLTITQIQQMLATQNMQTAAGSITENGLSYILTTMGEFTSLDEIRNTVISYKGGGVSGGQVEMPRQIYLRDLADVYENYRDENSVVYVNGQRAVMMTVQKQSGKNSVQAAKDLRDRLTRMTSELPPDI

SEQ ID NO: 93531 - protein, 776 aa, Unknown
  Obtained from environmental sample
  DOMAIN (683)...(754): Bacterial flagellin C-terminus
  misc_feature (1)..(776): Xaa is any amino acid
MRINHNLTAINTHRQMGISELDGSKSMEKLSSGFRINRAGDDAAGLAISEKMRGQVRGLSMASKNSSDTISLIQTAEGALAETHSILQRMRELSVQSANDTNTDKDREELQAEVTQLKAEIDRIGNTTEFNTKKLLEGSATGVRDEIIGNMRLNNNSSVVIDATKEKGMNASIGNDKSWAFDGAYMLIKVNQTPDAEGNRIFKAEDYNLIGPDGNVFKFKTYTPDTKIKSSGLEAGTIIAEGGETLHLTNATAGGAIKGYTNWPKDASNNPLPSVVIGAELTENELTSVEGGSVLVAGSNFTLRTAGSAVTIDNSMTKNAPGITTITLGAGDRIELTVATGSTPAIVEVGQSITLDNGTVLKNNGSGNVSIENGSLTLGGSGDALDSTSSSGNVKDFTIAAQSTLGDDSKVKVIDLNLVLASNLLVDSGAISTNVTIGNSTKITFGEVSHIETGSVFAKGTYIDTVGTADWSLKIEVKGKEVEVKWDAGAKVLTVGGEMVAAGKSITLEDGTVLTHKATLGAPTTATGDMFIQLGSIKTAEVITSSSGLGAQLNNFLAAKDSTLVAGSRLGSILNSTVKLMAGTVITEGDADKTFSGSVTFAAGGKNFQFSANTGNALATRYYDLKVQDSMTFIFSKYDPPSSQLNDSLMSQIGANSGQTTFLSINDMRCKALGVADVDISTKWGAATAIETVNNALQKVSHQRSLMGALQNRLEHTIKNLDTAAENLQAAESRIRDVDMAKEVMEFTRTNILQQAAQAMLAQANQQPQSVLQLLR

SEQ ID NO: 93532 - protein, 510 aa, Unknown
  Obtained from environmental sample
  DOMAIN (27)...(177): Bacterial flagellin N-terminus
  misc_feature (1)..(510): Xaa is any amino acid
MRINHNLTAINTHRQLGISELDGSKSMEKLSSGFRINRAGDDAAGLAISEKMRGQVRGLTMASKNSSDTISLIQTAEGALAETHSILQRMRELSVQSANDTNTDADRAELQAEVKQLKAEIDRIGNTTEFNTKKLLEGSATGVRDEIKGTLRVNNNSSVVLDANKEKAMYNSIANDKSWAFDGAYMLIKTNQTYDASGSPVFRSDDFGLVGPDGSVYKFKAYTPDTVVLANGLDAGTIIAEGGQVENIVKAGAIGSDMILGQTLTEKELKSVGSGSILASGSIIDLIDDGTGKLAVGGTSGVKEIISTKGILELTTTAGLVKVEAGKSITLDDGTIIKNHGGGKISIESGSLTTTGDIDNTVATSFTIAAQSTIASASETLQDDTDIVVASNILVSNGTIATNVTIGNSVNLTDKDVNKLAANSTLAKGSTIEMLQSGVNSIKIEVMGKEVDITYDATNGILKVGGEMVAAGKSITLEDGTVLTHSSTLDAPSTANGKIFIEQGSVTLAK

SEQ ID NO: 93533 - protein, 91 aa, Unknown
  Obtained from environmental sample
  DOMAIN (3)...(86): Ribosomal protein S20
  misc_feature (1)..(91): Xaa is any amino acid
LAKKISSAEKRHRQSEDRRMRNKTTKSAVRTSVKKFIALAQKKDVPSSEAALKDMVKKIDTASRKGIIKKNAAARKKSRMQRQFNTLKKAQ

SEQ ID NO: 93534 - protein, 313 aa, Unknown
  Obtained from environmental sample
  DOMAIN (56)...(290): Periplasmic binding protein
  misc_feature (1)..(313): Xaa is any amino acid
EGTESPEENIIFESKLRVTPCTPWLIFLILFIGCHAEKSREVIDRSGKTIKIKTQINRVISTAPSNTEIITDLGQAHKLVAVDRHSANVTGIPEGLPLLDFFYPDAEVIINLEPDIIIASGHNPTGTGEDPFKLLREMGISIVYITMSASIDEIYNDIAFIADILQVQKEGERLINSMKTQIDEVSRMTANTEKKTTVYFEISAAPDMMTFGKNSYINDMISVIGAKNIFEDENWLVTPGAEAVISRNPDVILTNVNYIDDPIAEIKSRPGFNHINAVKNNRIYQIDTDSSVRPSSRIILALRQMSQAVHFEY

SEQ ID NO: 93535 - protein, 73 aa, Unknown
  Obtained from environmental sample
  misc_feature (1)..(73): Xaa is any amino acid
MGKVDQLVTSLQKLQTKRGALDKQIADAEKKLIGEVKAAAKAAAPAKKTAAKKPAAKKPAARKPAAKKPAEGE

SEQ ID NO: 93536 - protein, 152 aa, Unknown
  Obtained from environmental sample
  DOMAIN (1)...(126): GGDEF domain
  misc_feature (1)..(152): Xaa is any amino acid
SIIIIDVDHFKDFNDTYGHLAGDRVLETLAITIKQGVRLGDVPSRFGGEEFTVLLPDTNREPAWTVAERLRVMVETMKVTWEPPLPQVTISLGVFTFNNATEITANEVIRRADKALYISKELGRNRTTVWGNGLLSRVQHLEEESKLKPAKP

SEQ ID NO: 93537 - protein, 139 aa, Unknown
  Obtained from environmental sample
  DOMAIN (1)...(135): CheR methyltransferase, SAM binding domain
  misc_feature (1)..(139): Xaa is any amino acid
ILKARYPTAHIKIWANDNDIMAVSQAPNMTYNLEDVPEYCKPYLVQGKNGYSFNQTIKDSIVFEYHDIINENTIPEVDMILVRDVISFLDAETQTRIIADFSEKLKNHGIVILGRNEELTGVIWEAIADDPVSAFSHNA

SEQ ID NO: 93538 - protein, 158 aa, Unknown
  Obtained from environmental sample
  DOMAIN (83)...(119): CheC-like family
  misc_feature (1)..(158): Xaa is any amino acid
MRVEYINPFVESAYAVLKEVLSIEVKRGEIYLKPTSMSIMGVAALVGLAGDVEGRVLFDMTKETALFVAGKMNGENFTVFDELGKATIQELANMITAQAVTKLHDLGFKFDLTPPALFTGDNMEVSTNLGEVEALIVPMELDAPFKIEVNVAIRERVK

SEQ ID NO: 93539 - protein, 401 aa, Unknown
  Obtained from environmental sample
  DOMAIN (39)...(105): ATP synthase alpha/beta family, beta-barrel domain
  misc_feature (1)..(401): Xaa is any amino acid
DDPGGFAEFEQEMKNDLETLERSYSHQGNFMRGIEYKGLNRIEGPVVVTSRSRNVGFNEVVAIFDKDKGRRLGRVVDLSEDYTAVQVFGSTTGLSADHSRVEFLGEPMRLRVGPGLLGRIFNGLGEPVDGYGDIFSSNCLDINGLPINPYARTYPRDFIQTGISAIDGMNTLIRGQKLPIFSGNGLPHNRLAAQIVRQAKILHGSELGEAEQFVIIFCAMGVKYDVARFFLDDFERSGVLANVVVFLSLADAPTLERLVAPRCALTAAEYLAYEKNMHVLVVMTDMTNYCEALREVSSIRGEVPSRKGYPGYLYSDLASLYERAGKINGSSGSITQIPILTMPNDDISHPIPDLSGYITEGQIVLDRELFQRGVYPPVAGLPSLSRLMKDGIGPGMTREDH

SEQ ID NO: 93540 - protein, 482 aa, Unknown
  Obtained from environmental sample
  DOMAIN (343)...(474): ATP synthase alpha/beta chain, C terminal domain
  misc_feature (1)..(482): Xaa is any amino acid
FVPDPALAAKLAAGEKVPAFPGLLLGTVKETESVTCKIMVPTSGKPSAHVGSITELSPEAELMVSSVVARTSEGEEITLSHWWPARIPRPSAERLSPDTPLITGQRVIDVFFPISKGGTAAIPGGFGTGKTMTQHAIAKWCDADVIIYIGCGERGNEMTDVLTDFPHLIDPRSGRSLMERTVLIANTSNMPVAAREVSIYTGVTMAEFYRDMGYHVAIMADSTSRWAEALRELSGRMEEMPAEEGFPAYLPTRLAEFYERAGRVSTLSGAEGSVSIIGAVSPPGGDFSEPVTQHTKRFIRCFWALDRDLANARHYPAISWTDSYSEYAEEVRPWWERVNAIWAVVRNQCLELLKSDQKLTEIVRLIGPDALPDEQKLVLVTSDIIKDGYLQQNSFDEIDMYCVPAKQIRLLELIMEFHERARTCIKLGAPLTKISVLGLKEGLSRLKSTVRNENLGEFDTFAAKMRSQLEELERSYRTREVL

SEQ ID NO: 93541 - protein, 395 aa, Unknown
  Obtained from environmental sample
  DOMAIN (2)...(330): Aminotransferase class-III
  misc_feature (1)..(395): Xaa is any amino acid
LFINRADGSRIYDVDGNEYIDYVCSWGPMILGHNNAAIREAVTAAAQRGMSFGAPTEAEVKLAEKIISFAPGVEMVRMVNSGTEAVMSALRLARAYTGRQKIIKFEGCYHGHADSMLVKAGSGALTLGEPDSPGVSEKVAGDTLVAAYNDLAGVEELLKKNDVACVIVEPVAANMGVVLPKDGFLNGLKELSGAYGTLLVFDEVITGFRLCKGGAQEYYGVEADLTAYGKIIGGGMPAGAYGGGEEIMSLVAPSGPVYQAGTLSGNPIAMAAGLAQLTALENQDVYDRINKMGERLADGLSDIVKRLRLKACVNRAGSLVCLFFGIESADDYTSVKRADTGLYAKYFHGMLDNGVYLAPSQFEAMFVSGAHTESDVDETLDRAERVVESSSAHDI

SEQ ID NO: 93542 - protein, 448 aa, Unknown
  Obtained from environmental sample
  misc_feature (1)..(448): Xaa is any amino acid
VPVLYPGNFSITLSGKNDNKPSIKIHSIEFKERWFGFLSLRDRAPNGGAPNGGAPNGAGRSFTSPFVTMITRSGESGGSSTWEINPPENFSVPAGFYPVISAELLPGKDAAFDAGNFHLELLPSLTRLSVPAGLLSPGIRPLTLKGERIDSLRQSYATLPPFPEPVTADPGLVLSWPVENWRDKRYEVFRWENFPSLLIFDFADYAMQDRMLKRLAFFVEKKGFRGRLAPDSEIAELHAWNAHDYRAEDLARFFQAVRTSQFSLLAEERELERILFDAGIIGTTGGTITAGEGGIVSVSRESNASLRALFMAHEGFHGIFFIDADFRDFTRRRWQQFPAAAKRFIVSYFNYQQYDTVDEYLLVNEFMGHVLQQPVSQAGRYFGVTLPSRLETSWRKQDLPPKDEASGSWPVLAEAFTREAQAFSDYAANRWGLAAGRVSLVTVKRSEK

SEQ ID NO: 93543 - protein, 381 aa, Unknown
  Obtained from environmental sample
  DOMAIN (33)...(381): Dehydratase family
  misc_feature (1)..(381): Xaa is any amino acid
MKLRSLTTIEGRNMAGARALWRATGTKENEFGKPVIAIANSFTEFVPGHVHLQQVGRLIAEEIRKAGGVPKEFSTIAIDDGIAMGHSGMLYSLPSRDLIADSVEYMANAHCADALVCISNCDKITPGMLMAAMRLNIPAVFVSGGPMEAGRATLSGGKEVHLDLIDAMVAAANPDVSDDDLKKIEDSACPTCGSCSGMFTANSMNCLTEALGLSLPGNGTIVATHTERKKLFEQAAKLAVELCDKFYAQNNSSVLPKSIATKEAFENAMRLDIAMGGSTNTVLHILAVAHEAGVNFTMKDINELSRTTPCLCKVAPSVSHIHIEDVHRAGGIPAILGELDKAGLLNSNVNSVHSVTLSEYLDKWDIARKSASQEAWNASSR

SEQ ID NO: 93544 - protein, 523 aa, Unknown
  Obtained from environmental sample
  DOMAIN (1)...(520): Dehydratase family
  misc_feature (1)..(523): Xaa is any amino acid
SLPSRDLIADSVEYMANAHCADGLVCISNCDKVTPGMLLAAMRLNIPTVFVSGGPMEAGRATFSDGKEVHIDFIDALIASANPNVSEEDMKKIEDAACPTCGSCSGMFTANSMNCLTEALGLSLPGNGTTLATHTERKKLFEQAAKLSVELCNRFYNKDDTSVLPKSIATKEAFENAMRLDIAMGGSTNTVLHILAVANEAGVNFTMKDINELSRSTPCLCKVAPSVNYIHIEDVHRAGGIPAILGELGGAGLLNLNVNMVHSPSLGEYLNKWDIARSSASPEASERFLAAPGRKFNLEAYSQNTKYPSHDLDREKGAIRNLANAYSKDGGLAVLYGNFALDGCVVKTAGVDSSIWKFTGPAVVFESQEEAAEGILNRKVKKGDVVIIRYEGPKGGPGMQEMLYPTSYLKSMGLGKECALITDGRFSGGTSGLSIGHVSPEAANKGNIALVKNGDVIEIDIPNRAININITNEELETRRKEMEAKGEKAWKPIARERQISGALKIYASLATSADQGAVRISTL

SEQ ID NO: 93545 - protein, 96 aa, Unknown
  Obtained from environmental sample
  misc_feature (1)..(96): Xaa is any amino acid
MSEPSGHRPFALRRLHLTLAEAIVLVTYTAVVLLTSLQVFSRYVFGNSLPWTEEMARYCFMWLIYVGMVLALNRGTHASVDILSARCSGKAKIMAQ

SEQ ID NO: 93546 - protein, 231 aa, Unknown
  Obtained from environmental sample
  DOMAIN (1)...(230): tRNA synthetases class I (I, L, M and V)
  misc_feature (1)..(231): Xaa is any amino acid
WDCHGLPVENLIEKELGLNSKTEIEQYGIAKFNEACRASVLRYVKEWRQTITRLGRWVDFDNDYKTMEPPYMETIWWVMKSLHEKGLLYEGHYILPYCPRCATVLSNHELNLGGYRDVHDPAITLKFKVKGSGVQGSGFRGDVYFLAWTTTPWTLPSNLALVLGPDIDYVLIEALTGPRTPNPEPRTYPYYILAEARLPAYFKDSAEYRIVWRKKGCDLLGVEYEPLFPYF

SEQ ID NO: 93547 - protein, 596 aa, Unknown
  Obtained from environmental sample
  DOMAIN (332)...(552): Methyl-accepting chemotaxis protein (MCP) signaling domain
  misc_feature (1)..(596): Xaa is any amino acid
MSRETGQIVVIASAVVQQTMDLLNGPNGRVVNMSDPVPIRNLGKDTYAVTITVPIINSRKEVVGAVIGRLDIGMIQPLVEKTIKDLDEVTSAVIYSDNGFILANYLPEFIGKQIDSETQYGKQLNDVKTAIKNAKEWEGTELDPELHTNMVMAIANIPIGASPTTWSVMIGTTESYILKDVNALRNFVIILVSIALIIAVVIIYLVLGSTTAPIVKVADTLKDISEGEGDLTRTIAVSSKDEVGDLAMYFNKTLEKIKDLVLLIKKQAGVLSEIGADLSGNMTETAATVNEITSNIQSIKGRVINQSASVTETNATMEQVVANINKLNGHVENQGRNISQVSSAIEQMVANINSVTKTLVSNASNVSMLKEASEVGRVGLQEVAADIQEIARESEGLLEINSVMENIASQTNLLSMNAAIEAAHAGEAGKGFAVVADEIRKLAESSSEQSKTIGNVLKKIKSSMDKITKSTEVVLARFEAIDTGVKTVADQEENIRNAMEEQGQGSKQVLQSVGSLNDLTRQVKSGSEEMLNGSQEVMKESHNLERATQEITGGMNEMASGADQVNIAVHNVNEISVKNREGIESLIKEVSKFKVE

SEQ ID NO: 93548 - protein, 353 aa, Unknown
  Obtained from environmental sample
  DOMAIN (1)...(162): Uncharacterized BCR, COG1636
  misc_feature (1)..(353): Xaa is any amino acid
MLEPQPNPTGVEPEVRGSPLDEYGLELFLRSVGTETGMPGRCGICYRLRLERTAAFAAEHGFNAFSTSLLISPYQRHETIQHIGEELAAQYGVAFLYRDFRPLFRKGQAAARAQGLYMQKYCGCIFSEKERYEKSQIPSPHSTISSSPVPSPQSLVPSIFQRLALLTGPDVLEKLNHTNVLIFGAGGVGSWCAEALVRSGIGKIGIADYDTVNDSNINRQVQATYKTIGRSKVEVLKQRLLEINPDCEVKVWAKIFSKETAAEFGMEKADYAIDAIDTFPHKLDLIEYLFNAGIKFFSSMGMACKIDPTYIKTGSIWESRGCALARLVRQRLRTRGFTGEFTVVYSDEPPVNP

SEQ ID NO: 93549 - protein, 220 aa, Unknown
  Obtained from environmental sample
  DOMAIN (27)...(163): Bacterial flagellin N-terminus
  misc_feature (1)..(220): Xaa is any amino acid
MRITFATVNRNVQRNLSRRYSNMVNLQEQLATGKRLRKASDDPVDVANAIKLRAKEAEFGQYKRNIQDGLALMGVGASAMASMNEILHRARELAVQAANGTYNDSDRLYMQQEVDQLFRQMMSVVNSQFKGSYIFNGTNGNVPPYKIASSGSELVDYENRTMATFGTVFARKADGNEWNTPNIPDPAVVTAATHASRVPNPDTLYVNYTTSNLRIGDKVQ

SEQ ID NO: 93550 - protein, 127 aa, Unknown
  Obtained from environmental sample
  DOMAIN (5)...(35): Flagella basal body rod protein
  misc_feature (1)..(127): Xaa is any amino acid
MMRSLFSGVSGLQNHQTRMDVIGNNIANINTTGFKRNRVNFQDILYQQLQGAARPTAELGGVNPKEVGLGMSVASIDTIHLQGSMQSTGQGTDLAIDGQGFFILDNAGKQLFTRAGAFSIDETGLMV

SEQ ID NO: 93551 - protein, 669 aa, Unknown
  Obtained from environmental sample
  DOMAIN (12)...(243): Glycosyl hydrolase family 3 N terminal domain
  misc_feature (1)..(669): Xaa is any amino acid
GRLIGWGYPNTTGGMNACTGLRAPASPRVFPQAIALAATFDDDLVKQVMDAVSDEARAKYNGAIMQGNRGQYWGLTFWTPNINIFRDPRWGRGQETYGEDPYLTARMGIAVVRGLQGNDPENLKLAACAKHYAVHSGPEKDRHTFNAIVSKKDLWETYLPAFKALVDAGVESVMGAYNRTLDEACCASNLLLKDILRGRWGFKGHVVSDCWAIRDFHQYHKITNTPEESAALALNAGCDLNCGCTYPMLTVARKKGLVSEETIDAALTRLLRTRFKLGMFDPPNSGKYGKLGRKVINCEKHKQLALKAAEKSIVMLKNDNKLLPLDSGPKVITVAGPAAANAHALFGNYYGVSPRFVTILEGLADKVKDAFGIDLNYRQGCLMYGDISKSNVVYGEANVSDVVIAVMGLDGAIEGEEGDAIASDSNGDRMAIELPPWQLKFLKAVRAAGKKIVLVLTGGSPIAFPEDLADAVVFAWYPGELGGKAVADIIFGDTVPSGKLPITFPASTDQLPPYEDYSMKGRTYRYMTEKPQYPFGFGLSYTTFRFDSIKLSDARAGYVVKASVTLSNTGKRDTDNVVQIYVSKEKRAENDPIASLRDFRRVHIKAGKSVTVDFELPRSAFETVNNEGVSEYLPGSYTIIAADAAPVPVAKEKGAPAFVSANFNFKADK

SEQ ID NO: 93552 - protein, 121 aa, Unknown
  Obtained from environmental sample
  misc_feature (1)..(121): Xaa is any amino acid
MQNQNNISFIGNPFPLEEAEERFRELRKAGTAPFKLTIPWAAIEHEGAGIYDEAYLAYLRKILIAADKEGISVFIEPDKDSQSVPSWAVKDENKDNYIAAFKHAQRRLKNCKAVAGWGDVN

SEQ ID NO: 93553 - protein, 445 aa, Unknown
  Obtained from environmental sample
  DOMAIN (246)...(441): Penicillin binding protein transpeptidase domain
  misc_feature (1)..(445): Xaa is any amino acid
MYMGPGTYGVEAASKYFFGHSAREISLAEAALLVVQLSSPTRYNPLSKPNEARDRQRYTLDRMIHFGYATKEEAEASFNEYWANYDFTRASMSAFYHRDDKAPWFSEYARRELDRIMYGSMDYYRDGYTVYTTLDLRHQEAADKFMAEGLTKANREFNRSKGRSNVQAERIYVPIVDLLTLTFGLNDIHKTSSAQNEQKSISRYTKTVNPIVDMAALAFGIDDLKVITGAGFGELKDKTERNVVEGALISIENQTGYITAIVGGSKYDESNQLIRATQGNIQPGSSFKPLYYSAAIDTRKLTAASLIYDVPVVFHNEDGTPYLPQNFRGEWKGSVLLYDALSHSMNVPSLKILDAIGFDAAINRAAELFGISDREQIRKIFPRVYPLGLGIISASPLRMARAFAVFGNQGREVTPIAIRYVEDRTGRVVLDPEKELRQQQKRAGN

SEQ ID NO: 93554 - protein, 409 aa, Unknown
  Obtained from environmental sample
  DOMAIN (40)...(209): Transglycosylase
  misc_feature (1)..(409): Xaa is any amino acid
VRILEHVNKKRLIIGGGAVVLLLAFILSLPDPLFDVPYSPVLFDREGNLLGAQVASDGQWRFPGSEKVNEKFTLALIETEDRRFRHHSGVDFFAVVRAAYQNIRGKRIISGGSTITMQTIRLARGARKRTFFEKITEAYLAVRLEVGNSKNKILALYCANAPFGANVVGLEAAAWRWFGRSSNDLSWAEAAVLAALPNSPALIHPGRNRETLKAKRDSLLNKLFKKGYFDEETLALSVAEPLPGEPLPLPRIAPHYLDRLVLEAKKTFSLRKTAAFVTTIDRGIQLRVTDILNRASDRFALNGIFNGACVVLNTQTGEIAAYVGNTNTGHAPDVDIASSRRSSGSLLKPFLYAAMLDSGDILPSSLVSDIPTRIGSFSPENMSRNYLGVVPADEALARSLNVPAARSLR

SEQ ID NO: 93555 - protein, 450 aa, Unknown
  Obtained from environmental sample
  DOMAIN (154)...(236): Helicase conserved C-terminal domain
  misc_feature (1)..(450): Xaa is any amino acid
IALRDGEGAAAQDVVMDEFHYYADRERGVAWQVPLLILKKSRFLLMSATLGDTTFFEDELGKLTGRKTITVKSATRPVPLDFSYAETPLALTLEKLVKDQKAPIYIVHFAQSEAADSAQDFTSLNLCTRDERAAIAKEIDGFKFGSPYGPEIKRFLRQGIGLHHAGLLPKYRILVEQLAQKGLLKVICGTDTLGVGINVPIRTVLFTKLCKYDGEKTAVLSARDFHQIAGSAGRKGFDDLGFVVAQAPEHVIENLKLAAKAAGGGKKYVKRQPPAKGYAHWDEKTFERLLQAQPERLQSRFNVSHGMLLNVLSREGNGCAAMRELIANCHETEKGKAAHRRRGWQLFRALLEKHIVEFSAEGHGLSVNVDLQEDFSMNQALSLYLLEALPLLDADSETYAFDLLTLVESILEDPEAILRKQLDRIKAKKVAELKAEGMEYDQRMEELSKL

SEQ ID NO: 93556 - protein, 421 aa, Unknown
  Obtained from environmental sample
  DOMAIN (131)...(218): FKBP-type peptidyl-prolyl cis-trans isomerase
  misc_feature (1)..(421): Xaa is any amino acid
MLGEYIKSLQIPGFRKGKVPQEVLERKFGDALKQDALGRIAENALKEVFSDENMPRNERPLPYSTPEIQNELKLDFEQDLEISVVYDVLPDVKIGSWKGLKVEYPYAEITKEDIDRELEIIRERNTVVMDRDNDAAAKNGDVVTINYQMFDEDGSTPSDLKRDDFVFTLGSGTNVYQFDSEIEGMKKGETKEFEKKYADDFSEAALAGKTRKFQITLTALKEKKLPDLDDDLAQDVDEKFKTLDDLKNSIKEKLEKILETRLRSVKTNELLKSIMENTPVIIPESMIKAEVEGRLSRLARYYNTNAEALIQMMNAGEGHDEIEKEWRETAQKALHSRLIMETLLEEQKIEITDDDVEKEIERIADENGTEVSEIKKHYDDQALIYLKEEIKEQRLIDIMFTENTMKPGKKENYLDFISNNS

SEQ ID NO: 93557 - protein, 216 aa, Unknown
  Obtained from environmental sample
  DOMAIN (1)...(191): ATP-dependent protease La (LON) domain
  misc_feature (1)..(216): Xaa is any amino acid
LPLRDLVLFPQTVIPIFITFKPGITALEEALKHDNRLFAACLRKHEIGLAADEPWNYGTVVRIIQHLKLPDSSYRVIFQCEYRGVIVSNVQQNNFSTVKVEPLKITGLNEPLSSEDSALMRNVQKSFAQYAEFSKKIGTDTLTAVEKTEDPERLANLVCNATHLKSEKKVELLAYTDTRERLLAILETLEFENEIYGIQKNISGKVRSKMDKRHRE

SEQ ID NO: 93558 - protein, 90 aa, Unknown
  Obtained from environmental sample
  misc_feature (1)..(90): Xaa is any amino acid
MKGIGQDFNDFLKKQSIYDEVNELAAKKLITYQLEKAMQEQKLTKSFIAKKMKTSRVAVDNILDPAFNTSIDSLERFAHVLGKKLTISLS

SEQ ID NO: 93559 - protein, 64 aa, Unknown
  Obtained from environmental sample
  misc_feature (1)..(64): Xaa is any amino acid
MLKDGKGGTKTLTGLNFEEKIDFIDWFKDPSYKDVLDYINSVNCHYKFNELPLAWHGLPSGKNK

SEQ ID NO: 93560 - protein, 523 aa, Unknown
  Obtained from environmental sample
  misc_feature (1)..(523): Xaa is any amino acid
MDESLEEISPNEETVSGSPREVVYNEKYPPEFFDFIIIDECHRSIYNIWQQVLDYFDAFLIGLTATPDKRTFGFFNENVVSEYSHEQAVIDNVNVGYDIYLIETEISKKGASIPKQVVERRERLSRRKRWEQLDEDVVYSKNQLDKDVVNPSQIRNVIKAFRDGLPTMFPGRQEVPKTIIFAKTDSHADDIIQIVRDEFGEGNDFCRKITYSVDKADSVLSNFRNDYNPRIAVTVDMIATGTDVKPVECLLFMRDVRSRSYFEQMKGRGTRTLDKDSLRKVTPSAANNKTHFIIVDAVGVTKSIKTDSRHLERKPDVSLNELMMSVAMNSRDEDIFLSLASRLTRLDKELTAEEQSKYAENSGGITLRKTVQRLLDAFNDDVIEERARKENNLSAEDTVTEEQIQETKKAMTEEAAEPFYLPAVRTFVENARKAHDQIIDTVNIDHVNVSGWDTQHSENAQKVIARFKDFINDHKDDIIALSIIYNQTWKNRPLTLDMIEELYSCLQKPPYSLNTPLLWQAYE

SEQ ID NO: 93561 - protein, 353 aa, Unknown
  Obtained from environmental sample
  DOMAIN (41)...(326): Branched-chain amino acid transport system / permease component
  misc_feature (1)..(353): Xaa is any amino acid
MKQKHGLTDSNLLFLIAVCIFVILYALAIAFLGGSFHRVQGFADLLNNNAALIILTCGLSIVMVGGGIDISVGGVIAVVTAACAVYLDSGGGNVGISLLIVLGIGLAFGLAQGFLVAYLEIQPFIITLAGMFFARGMATIITKYSHAVKLESFIALKDTKIEIEALGYTAKSGKLIPVTIDIGVIVALVVVLVVAFVLKWTRFGRNLYAVGGNSQSALTLGINVKRTKFLSYLMCGFLAGIGGFVFLLKAGSGYSQHAMFFEMKAIASSIIGGTLLTGGVGNIIGSPVGVLALMTIDTIVRASGITTGGREYLQDITTGAMLFIALILQSVVLSRRGKGSIKQMIPKWLNFRR

SEQ ID NO: 93562 - protein, 322 aa, Unknown
  Obtained from environmental sample
  DOMAIN (26)...(289): Respiratory-chain NADH dehydrogenase 51 Kd subunit
  misc_feature (1)..(322): Xaa is any amino acid
MSKINKLLSKNAHFDPLSVDDYVKAGGFEALKQAAAMKSEDIIAEVKAAKLLGRGGAAYPAGSKWEHLLHIPETPKYIVCNADEGEPGTFKDKLILDKLPLKLLEGIIIAGLTFRAKAGYIYVRGEYRSIQKRLITAIKNTRDAGFLGINILGTGLDFDIHVISGAGAYVCGENSALLNSTEGKVGRPRIKPPHLAEVGLFLKPTLVNNVESLTHIPAIIEMSGDEHLKIGHPDSGGTKLICLSGHVKNRGVFEIPLGKLTLREIIYDPELGGGVPSGRKLKFFHLGGQSGPIGGPDLLDTVYSYTDLRKAGLGVGSGAIVV

SEQ ID NO: 93563 - protein, 258 aa, Unknown
  Obtained from environmental sample
  DOMAIN (153)...(180): 4Fe-4S binding domain
  misc_feature (1)..(258): Xaa is any amino acid
MSHKPDPNKSVNLTIDGMAVTVPEGTKILEAARKANVEIPTLCDHPDLCRRAVCRICVVECDGKGKLLTACANDVWEGVKIVTNNSRIISIRKTIIELLLANHPQDCLNCPANTDCKLQSLARIYGIRETPFGHGAVNREAVNRQPVSADNGLVRDMDKCVKCGRCVEACQEIQTVRAINSSYRSVNYRIATAYNQPYADSPCVFCGHCETVCPVGAIYEQDQSAEAWAAINDGGRNTAVQISKKSCAELSKALAFRR

SEQ ID NO: 93564 - protein, 198 aa, Unknown
  Obtained from environmental sample
  DOMAIN (7)...(108): Protein of unknown function (DUF1156)
  misc_feature (1)..(198): Xaa is any amino acid
MIPKECKRLAEIDFPLTAVNAACVEENNRKTRVESGHISLLHSWWARRPLSACRSMLLALLLPDPCDENCPLEFKTSARQIFGTSIKIGPDDKDLQKALFDFVAKIAPWDSFTTAGNISTAQELIKAAYGTDPHVLDPFSGGGSIPLEAQRLGCEVTASDLNPVAWLLLKIALEWCGRKGMELSRLFDKWSAWVLKKQ

SEQ ID NO: 93565 - protein, 328 aa, Unknown
  Obtained from environmental sample
  misc_feature (1)..(328): Xaa is any amino acid
METTGSLFLSLNVEGEEIPKRLMVVPSGATVKGRDNREWKNPDPKKLALNSNKHLSALVIDENHSTDLSAPKGGPSPAFGWMKNLCANELGEIWADVEWTELGLNALSKKEYRFISPVFLHNKEGEIACIVRAALTNSPNLDLPALNSERLENKNTEVSMNKTLLVALGLPETATEEEAIAMAKSLNAAKNATAPQTDKTPVDLTAYAPRADLNAMEVRAVTAEKQLADLNAAQLKKDAETAVDEAIKNRKIAPASREQYLALCATRAELEKIKNILSTSPAIIAEPQASAAVAPQSGSVSLNADQTQLAKSLGYTPEEFAKIMEESK

SEQ ID NO: 93566 - protein, 285 aa, Unknown
  Obtained from environmental sample
  misc_feature (1)..(285): Xaa is any amino acid
MLTLKTFKKFGLKADPFSGDVVKTEDVYLTEDTRFIAEYILQTAKAGGMIALIGESGSGKTTIRRYALDRMAAGNEKIRVITLRCVDKTRLSTNAICDAIIGDCSAEMPRRTMEAKARQVERILTHSSRAGWSHVLMIEEAHDLNVSTLKYLKRFWELEDGYKKLLSIVLIGQIEMKAKLDEAKNWEAREVIRRMEVLELEPLGSGEEIAKYLDIKFARLGKNRLDIINDSGCAALAAKLRRQTRTQQIYSVAYPLLINNWCMKAMNSACELGAKCVDAEVVNAL

SEQ ID NO: 93567 - protein, 246 aa, Unknown
  Obtained from environmental sample
  misc_feature (1)..(246): Xaa is any amino acid
MYETWVDRMKAAETNAEHKAVVSDMCRMFAISDSKAYKLLKENGWDSGRAKRKDAGSSSVDNELLTAIGNMVKQCIRKNGKATLPVNVARSILQSRGVDVPVCDSRLRELLRQNHMAVADGKIPTPHQNMRSEYPNQVHQADPSVSLLYYTPGGGQKIISDSEHYKNKNFFEGDKKKCLRYVLTDHYSGSICVRYYETAGETAANMYDFLLYAWGQKKYNTYVFHGIPELLIWDCGTANIARATTN

SEQ ID NO: 93568 - protein, 340 aa, Unknown
  Obtained from environmental sample
  DOMAIN (64)...(340): Aminodeoxychorismate lyase
  misc_feature (1)..(340): Xaa is any amino acid
LANKKKKKIVKSLIHLFTVLVALVIIFVPILIGVVMYFNAPLHQDDRAITLTKNDAIKYTDDGYLINIRNGESSQSVGLRLERTGLIKNRYFWNIICRLDKSFIKTGSYKIIMPASQIEIYRILISGQEVLYKVTVPEGVTLSKSARLIEEAGICPADEFILAAKDSSITAKYLIPNVTMEGYLFPDTYLFPAEYPAEMVVTTMADNFFNNLQKINPSILSMDPKELNEKIIIASIVEREYRVEKEAPIMAGVFYNRLRINMAIQSCATIEYIMTEIQNRPHPSVLLFSDLEINNPYNTYIKPGLPPGPISAPGITALRAAFYPEKTNYLYFRLKTRQAE

SEQ ID NO: 93569 - protein, 92 aa, Unknown
  Obtained from environmental sample
  misc_feature (1)..(92): Xaa is any amino acid
MGDWWPSIEEYTPGIDKQKWLELLKNPKIFDDDSLAIMKRMLDLGGAATCKQLSQKYGETVTFYNFGSVRLARRILKETNCAVLPDEKNENS

SEQ ID NO: 93570 - protein, 478 aa, Unknown
  Obtained from environmental sample
  DOMAIN (88)...(201): CBS domain pair
  misc_feature (1)..(478): Xaa is any amino acid
MFNESYSYDDVLLLPGYSEVLPKECNIQTVLCDDIRLNVPVISAAMDTVTEEKLAIAIALEGGAGVIHRNLPPEEQARQVANVKRFLNWIIESPITVLNDAYVRDVRSLTKTYGVSGVPVVDGNGKLKGIITNRDLRFCRDDSLPVVKVMTEEVIVVEGEPTVEKARDKFAEFRIEKLPVVDNEGRLKGLITVTDMEKHENFPNAATDKTGKLIVGAAISPQDYDVRLPLLVKARVDFVVLDTAHGDSKNVMESIRKIKKEYNIPVIGGNVATKEGTKKLIDAGADAVKVGIGPGSICTTRVVAGIGVPQFTAVWECAEEASKSKIPVIADGGIKFSGDITKAIGAGASVVMIGNLFAGLKEAPGNEIIFDGRIYKEYRGMGSMGAIADGSGDRYQIGKDEEPVPEGIEGRVPYKGELRTYLNQLVAGLRKGMGYCGCKSIPELNKYRRFVKITAAGLRESHPHDITITQEAPNYSPS

SEQ ID NO: 93571 - protein, 60 aa, Unknown
  Obtained from environmental sample
  misc_feature (1)..(60): Xaa is any amino acid
MEEAMSDFAPTPYPHEVELQNLVAVLECTSREMIPKKFQKLPRTKIINDIQELKTLLGER

SEQ ID NO: 93572 - protein, 602 aa, Unknown
  Obtained from environmental sample
  DOMAIN (82)...(235): Magnesium chelatase, subunit ChlI
  misc_feature (1)..(602): Xaa is any amino acid
NGWLIEKDVIPSMDKNQQARLERSASVTDEDFKTIKAEDLPLKNKPKTADEILSELDGMIGLAKVKTAVRQLIETISMQKEREEKGGAAAKIQAIHLCFYGNPGTGKTTVARKLGALFQTMGLLPTDNMLEVTRADMVAGYVGQTAPLVNTVCDKALNGILFIDEAYDLCRDSYDSFGNEAVTALLKRMEDDRGKFVVIAAGYRKEMDDFLQANSGFRSRFTHFLELDDYNPDELFAIFASMAKSNGYKLSADGEKRAKEVITEIHRTRGKDFANGSSMRNLLDDTIRRMPERLASLTQAERTVDALSTITEADFPSEKKEERSVNDILAELDAMIGMTDIKRTVREIANKIQIQKEQEEKDGTKSAGEGNNIVITGNPGTGKTTIVRTLGALFKTIGLLKTETVIEVNGNDLKGSYLGQSKDKVNEKCDEAMGGILFVDEAYVLADTQRGGAADQYAREAVEILMTRLENDRTKFVGVVAGYEKEMQIFLDTVNPGMRRRFKHYLSLSDYSAEELFAIFSSMVKKAGYTLTPEASDAAKAAITGMYNNKGPNFGNAGEIRVFFEKTTSRLATRLAALSKEERSDKLKTIEACDIPGKEGGA

SEQ ID NO: 93573 - protein, 183 aa, Unknown
  Obtained from environmental sample
  DOMAIN (96)...(125): Helix-hairpin-helix motif
  misc_feature (1)..(183): Xaa is any amino acid
PEYELRRVYYSAFIPVGVPGGGGVPDSRLPEIPGLAMVHHAPPRPFLLREHRLYQADWLLRFYKFAPGEILEGDDGFLETGLDPKTAWALRHLDFFPVEVNSADYDELLRVPGIGAKTGRRIIETRRSRSLSFENLLRLGVVLKRARHFITASGAFIERPENPGRIRRLLSDEDYLQPELFEF

SEQ ID NO: 93574 - protein, 380 aa, Unknown
  Obtained from environmental sample
  DOMAIN (29)...(375): N-acylglucosamine 2-epimerase (GlcNAc 2-epimerase)
  misc_feature (1)..(380): Xaa is any amino acid
MLSKQEAERMVKNNILPFWQGMADRGNGGYYGEADFHGKINKSAAKGCILNSRILWTFSAAFRLFKDDTYKECAALAKDFLTAAFLDKEHGGLYWLVDHTGKALDTRKQFYNIAFGIYALSEHYSAVGDKSSLELAISLFDATERYGLDPSTGGYIEARNREWQSIADSRLSAKDLNCPKSMNTNLHVLEAYTNLVRVSKDERVRKALETLLRITFDKIVNSNWHFELFFDMNWRSLVNDISYGHDIEGSWLMYEAALAIGDEGLISKAKQTALAIAEVTYTTAIDHHNGGLFSACNAAGYIHSKKEWWPQAEAVVGFYNAYELSGDRKYLEAADGIWSYIQNHFVDHAHGEWHNELNLDNTPDAGMPKAGFWKCPYHNA

SEQ ID NO: 93575 - protein, 171 aa, Unknown
  Obtained from environmental sample
  misc_feature (1)..(171): Xaa is any amino acid
TPAEKSEIKEQIAFYKNHRKTFQYGTFERLPVMGNRLKNKTIWLCSGEKEAVAGFFQTQAGAGEEPDILRVCGLENEALYRVATRPQRLYINRFGGLVKHLLPVTLNPSGFILRTVNRHYALTDCVETYECRGSLLSSGIQLNNQFTGSYYNNKTRLLGDYGSSLYTIERM

SEQ ID NO: 93576 - protein, 122 aa, Unknown
  Obtained from environmental sample
  misc_feature (1)..(122): Xaa is any amino acid
MQDNSIRNRFTFGLGTIGRDMVYSLVSMYLIFYLTDVINLPTGTLWWVAGIILIARIFDTLNDPFMGFIVDNTNTRWGKFKPWIAGGALLSATLTVLLFTDFGLKGGAYTVVFAFLYLMWGI

SEQ ID NO: 93577 - protein, 258 aa, Unknown
  Obtained from environmental sample
  DOMAIN (15)...(166): RNA pseudouridylate synthase
  misc_feature (1)..(258): Xaa is any amino acid
MKTSPLFTIIFEDETIIAVNKASGISVGGDRWDESKERLDKLVAEAAVLSANKLFTVHRIDRETSGLVVFAKDEAAHRRLSLAFEGRDVKKRYIAVVHGRPSWQEMTCDLPLVPNGNKQHQTIIDKYQGKKSLTCFKFLGSAGNLSVLEVFPETGRTHQIRVHAAALGFPVVCDSLYGKDKPVLLSAIKKNWRGNLLEERPLLARLGLHAAELSLPSSQTLCAPLPRDMTALIKQMKLFHLTIEPFPKPGRTVGTQFL

SEQ ID NO: 93578 - protein, 75 aa, Unknown
  Obtained from environmental sample
  misc_feature (1)..(75): Xaa is any amino acid
VSLDFEQGGDIAKNLFSLYTWFNRELMEANIGQDVQRISGVRNLIEELRSAWQRIVVTNAAETANREIVGLNIAG

SEQ ID NO: 93579 - protein, 240 aa, Unknown
  Obtained from environmental sample
  DOMAIN (17)...(233): ATP synthase A chain
  misc_feature (1)..(240): Xaa is any amino acid
MNALEIRTIFTFLLFNIEIPITETVIISWAVMIILIIGSLILTRRLKEVPAGPQTLVESAVEFLDNFAENQFGPFAKYLGPYMGALFLFLLLSNILPVLSPLALKAFGREFIPPFEIRPPTRDINVTAALAVISILLVFVCGFAARGFTGWFKKLLRPIPFMLPFNIMEYGTRLISLALRLFGNILGGYVLMGMIENLLPVALPVVLSLYFDFFDGLIQAAIFVFLTSLYIGEAVKVNEE

SEQ ID NO: 93580 - protein, 541 aa, Unknown
  Obtained from environmental sample
  DOMAIN (61)...(177): Vault protein inter-alpha-trypsin
  misc_feature (1)..(541): Xaa is any amino acid
VKSLKSYLTFAAAVILLAALWLLVVSGDVKKQDTRQEAVTSDAISSQTKPPIFKIDGEKNSNVYLQSLDIQVEVTGIIASTRYTMVFKNKTDSILEGELTFSLPDGRNVTYYALDINGKMREGVPVEKARGTQVFDMIKHRQIDPGLLEMTADNNFHVRIYPIPANGTRTISIGYEEELTIEKKLMFYRLYLAYPYSLEKFSVTATVWKSGVIPLVPKSDNEFRFKKDGENYVASFTQKNYRPARPFIFALHMPPNTPQVVMWPTPGSNYFLASVSPNLEPRKKRWDNDLAIIWDVSLSGSQRDLKREMETLDIIFAEKKNANACLYFLNNKLKKIVNKNTANGEYTVTDGNWDGLKNILKTAIFDGGTDFSQINLNEITGNEIIFFSDGISTLSDVDFLKNATVNRPIHCVVSSTKTDYSAMKLIAGKTNGKFVNINALSSERLKSEVLNETLRFLGAEHGSAVREVYPSIATPINGNFSLSGISETGDAELTLLFGFGSKVEKRIEIKLDAKSVGRRGNVYKLWAQKKIAELDLTTRRT

SEQ ID NO: 93581 - protein, 69 aa, Unknown
  Obtained from environmental sample
  misc_feature (1)..(69): Xaa is any amino acid
MRKWTVDDSRELYSIKGWGVSYFDINEKGNATVSPLKEKGPTIDLVEVMRDLSRKDLATPVLLRFPDIL

SEQ ID NO: 93582 - protein, 148 aa, Unknown
  Obtained from environmental sample
  misc_feature (1)..(148): Xaa is any amino acid
MIECLAQATVALPQTLPHSARLEHWLNKGFNADMNWMASTAETRKHPANFNGKSYNAAWVALWKYPRALQKKHEPIAAYAHGKDYHISILKELAKQVEGQPFVDSLPIAERELATMAGLGFIGKNTMLINPKFGSAFFIGGILFNKWL

SEQ ID NO: 93583 - protein, 316 aa, Unknown
  Obtained from environmental sample
  misc_feature (1)..(316): Xaa is any amino acid
MTFNEKMHSPLWIFIIYMIVSCSVIMIFRFVFPGSAVPVLIFSHDWRLIQGVLELFNLFPALVFSTLVIPFGIVSFEEDYPSFSQVFFKRFISSVLIAVFAAVVYGAIFFFAYPLVKNYEGNLRYKGDMYHIAKENAHLKCKTGDWVEASQFLAVCDQVWENSPELTDIRTEIELNLYQLYLAEIEGKIKARAELSREWRGAEIKTLSGGGQQPLDAVKALAMSAVAFSERRYFDAHWLAVLAGRLAIEGSPEAVTAARLASDAWNQIESQSPSVREERMHSLYQLKLSGYQAMNNSDWIAAYYIFLELLNLTPDD

SEQ ID NO: 93584 - protein, 271 aa, Unknown
  Obtained from environmental sample
  DOMAIN (105)...(266): NAD-dependent glycerol-3-phosphate dehydrogenase C-terminus
  misc_feature (1)..(271): Xaa is any amino acid
SLFLLDTLKKILAVKSIREGETCIAVLTKGFLPTANGPKLIVETMEDYLPGFYQHSLVYISGPSHAEEVSRGKITGLIAASENAKNSIRFRDLLKSPGLFVYSSFDVHGVQAAAAAKNVIAIAFGMLDAIRSIGGSDMFGDGTDSLLLAAGLNEIQLLGKALGATHPETFTSIAGIGDLDVTCRSIYGRNRRFGREIIEKNILEPYKDLDDLITRIKEIGYLPEGVAAAKYTRILAEKHKLKMPVSIGLCRLLNRELDPYEFVRNFFEDLR

SEQ ID NO: 93585 - protein, 299 aa, Unknown
  Obtained from environmental sample
  DOMAIN (1)...(87): SRP54-type protein, helical bundle domain
  misc_feature (1)..(299): Xaa is any amino acid
VFEKLTGKITDALRFVTGKSSISEKNIEDAVEAIKMALLEADVNLRVVRRFVNSTIEEAKGEKVLRAVDPGQQFVKIVHDKLVSFLGDADPSSRALKLRGPDVISTILMLGLQGSGKTTSSAKLALRLKKEGRKPMLVACDLVRPAAMEQLAALGGQIGIPVHKEDGAKDSVKVYRNALAWANQNMIDTVIIDTTGRLQIDEPMMQELSRLKDASNPDEMLLVADSMTGQAAADIAKTFDEKIGLTGVVLTKFDSDTRGGAALSLKTVTGKPLKFTGTGEKPEDFEPFHPDRLAGRILG

SEQ ID NO: 93586 - protein, 225 aa, Unknown
  Obtained from environmental sample
  DOMAIN (152)...(209): Sigma-70, region 4
  misc_feature (1)..(225): Xaa is any amino acid
KIARTYMTTDIQFMDLIQEGNIGLMHAAEKFDYKKNVRFCTYAGWWVRQFIIRYMTNKHRMVRLPHRKEEILRKVQRTFHSLSQTLTRQPRTEEIAGELGIPVKDIDFILNMSYGILPLEMDNGREDYAATMEIHEDYTYCPERNLFRQFYHESARRCLDKLKDRERKVISYRYQLEDDKQYTFKEIGVKMDLSPEMVRQIELKALAKIRRHANELDYYDYQEAI

SEQ ID NO: 93587 - protein, 361 aa, Unknown
  Obtained from environmental sample
  misc_feature (1)..(361): Xaa is any amino acid
MSQIAATSIMAGKPAAQVFVLQPDWALSLYRQNLLYPVSDNNQVDLKKTTPVEWNTAVTNTFTFNKKIYAFQAGYGDSHHAAVLVWNKRLFREAGLDPNLPYDLQKNGKWTWAEFLKLCKQLTRDTNNDGKIDTYAMPRDLSTEILDAFVGGNGAMYVDRDPRNGKLINVTNKPAFVEAVQFFLKMREEKVMMEKPQGAAWNWHIPAFNDGKVAMRIDQHYIATGDLQNMKDDWGIVLPPKGPKSKNYVVFTDENVMVVPATYNKDQVDAIMWAVQAWLTPVDDNWKAPLLQIYRDRRAIDETWGYIRDPKYNQWKHHLHVPGLNRGGIAWEIWFHDGEASQLIEAVTPQWNALIMDANEY

SEQ ID NO: 93588 - protein, 76 aa, Unknown
  Obtained from environmental sample
  DOMAIN (7)...(66): Chorismate mutase type II
  misc_feature (1)..(76): Xaa is any amino acid
MDLQELRKKIDEVDDDLVRLFQQRMDVSAEIARYKKENNLPVHDPAREREKLYKLSFKQTPEENHILLRYTPCFLS

SEQ ID NO: 93589 - protein, 415 aa, Unknown
  Obtained from environmental sample
  DOMAIN (99)...(204): Shikimate / quinate 5-dehydrogenase
  misc_feature (1)..(415): Xaa is any amino acid
LKRRFGLLGEKLSHSFSPQIHAELGDYEYLLYEKKPEEIDDFLRNGNFDGINVTIPYKKTVIPFCAELSDTARLTGSVNTIIRGKDGALSGYNTDFFGVSYLMSKAKINPAEGKTLVLGSGGSSVTVQAVLKSQNSREIVVISRTGENNYENLEKHSDAKLIINTTPVGMYPNNGVSPIPDLKIFNKCKCIIDLIYNPARTELLALAQDAGIPAFNGLPMLVAQAKKAAEYFTDTDIANEEIEKINSMIARQSLNIVLIGMPGCGKTSVGNALAKKMRREFIDTDKLITQAAGKPIPEIFADNSGSTTGEEKFRTLETSILRDICKQSGKIIATGGGVVTREVNRHIIRQNGIVVFRERDISLLSVKGRPVSQRDGIEALAAARLPLYRSWSDFTAQGQNIEQTAADIKKHFEEI

SEQ ID NO: 93590 - protein, 493 aa, Unknown
  Obtained from environmental sample
  DOMAIN (23)...(174): Anthranilate synthase component I, N terminal region
  misc_feature (1)..(493): Xaa is any amino acid
MYKPSLEEAKRIAETGQYRVIPLSTEMYADMVTPIDVIKKLKNVSGHCFMLESAEDTKNWGRYTFLGFDPTMEITCLNGVMNINSNNPNETKSFNTDNPNKHIQEILDSRKSVKFDFLPPFTGGLVGYFAYDYAKYCEPSLKLDAADEERFNDVDLMLFDKVIAFDNYRQKVILIANINADNIESEYKKGTAQLESLKNLIKNGQHEKTPQACVKSDFKALFTKDEYCQMVNRAKGHIKEGDIFQVVLSNRFDADFEGSLFDTYRVMRTINPSPYMFYFSGSDLEIAGASPETLVKLHDGKLFTYPLAGTRPRGKDDDEDSALERELLADEKELAEHNMLVDLGRNDLGKISKFGTVKVEKYMSILRFSHVMHIGSTVSGEINEGKTGLDAINAILPAGTLSGAPKIRAMQIINELERNKRGIYGGAVGYLDFTGNMDTCIAIRIVYKKKGKVFIRCGAGIVADSNPESEYQECVNKSKAAQNALMQSSGGID

SEQ ID NO: 93591 - protein, 353 aa, Unknown
  Obtained from environmental sample
  misc_feature (1)..(353): Xaa is any amino acid
MHINKTYERQGKIDLNRLFTAHDCTEKIRAMQKDVAANIERFKKSAGEENEPDMDIGQYCFEPYECEYRTWCWKHIPENSIFDISGLRKNKKFDLYKRGLINCKQLLESAEKLKPAVRMQAEAIVYNKQPEINRKPIRSFIGALRWPLYFLDFETFQEAIPPFDGLRPFMKVTFQYSLHIQETPGAVPEHREFLAKEGIDPREELAERLCNDIPKNVCVLAYNMVFEKGCIEDLALLFKKRGKKEMAAHLMNIHGNIKDLMKPFKSRDYYSLELDGSYSIKVVLPALCPDDPELDYNKLDLVHNGAEAPSAYAELAGKSPEEQERVRSALLAYCRLDTLAMVKILEKLREMSD

SEQ ID NO: 93592 - protein, 383 aa, Unknown
  Obtained from environmental sample
  DOMAIN (1)...(66): MgtE intracellular domain
  misc_feature (1)..(383): Xaa is any amino acid
SDHQQIIVEALTDTEIGEIMNKLFVDDAVDFIEEMPANVVNRVLKNVQPEKRKLINHFLQYPDDSAGSIMTTEYVDLREDATVREAFDTIRSTGINKETIYNCYVIRRDRLLVGAISAKTLMLAKPQERIGDIMDTNLFFAHTTDDQEAIAEQFKKYSLLAMPVVDKEQRLVGIITVDDIVDVIVEESTEDIEKMNALAPSDDPYLKTGVFRLARNRIIWLLVLMLSATITGIIISDFENGLAALPILVAFIPMLMDTGGNAGSQSSTLIIRGLAIGEISPKDIIRVIWKEVRVALVCGLALGIVNFIRIYIMNGQNLMLCVTVTLSVCCTILIAKTVGCVLPLVAKCLKIDPAVMAAPLITTIVDAVSLIIYFLFAKAILGL

SEQ ID NO: 93593 - protein, 393 aa, Unknown
  Obtained from environmental sample
  misc_feature (1)..(393): Xaa is any amino acid
VSQKESYTGSMEAVLQARLNGETLFHFERPRLNSLFMEAVKYPLVVVCAGAGYGKTSAVHDFLEKYEATTAWVQLTDLDNDRAHFWETNVHAIGQINRDLAKATNKFGFPDTKEKLNYYATLMQKHTDLKRRIIVFDDFHCIDDPLIIRFMEECILFKMPPGTSVFLVTRSTPRVNLAGMIYRDQIFDISENDLRFTEGELAQYFHSRNNSIKPESLREIMRDTGGWAFAINLIARSYQKAPGYGGYLQSAMKTNIFQLIETEIWDEISEHLQAFLIRLSLIDHLSVDLIFLLAEEDEALIAELDRQNALVRRDSYVNAYLIHPLFLEFLRKRQGLLSEDQREKTYAIAGDWCSKNGFRIDALSYFEKIKDYKSIIFILFGLPAQIPDEISRY

SEQ ID NO: 93594 - protein, 376 aa, Unknown
  Obtained from environmental sample
  DOMAIN (207)...(293): Hpt domain
  misc_feature (1)..(376): Xaa is any amino acid
GKDVADKLRRFRYTDDKRIAIKRLVRLNLSYAKVLVVDDMQTNLDVAAGLLRKYKMQVDCSDNGREAIEKIRIGLPIYNAIFMDHMMPGMDGIETADKIRALGTEYAKKIPIIALTANAIHGTEQLFYEHDFQAFISKPIDIMELDSVIRKWLRDEEKEKELGTNAYITPENSPEDEKTANLTIDIPGVDTEKGLLLYGGDKKIYLSLLRSYVFNTPVNLSKIKSVSKDTLSGYVIAVHGLKGTSAGIGAESIREAALKLEDLARTGDFNKVLELNSKLISDTEVVVESVKTWLEGYDALNAKPVQKAPNPEVLARLRQCCEKFDMSGIDKAMAELESTDYEEGNDLIKWLKDKIVISEITEAAAKIAQYEKELKK

SEQ ID NO: 93595 - protein, 403 aa, Unknown
  Obtained from environmental sample
  DOMAIN (35)...(387): Phage portal protein
  misc_feature (1)..(403): Xaa is any amino acid
VNIFERLLPNHKRQKSGGSLGAKSFANSSFSLSDDDFNSNLYIDPFTDNYLRSAWVNIAVNILIRNIARADFILERDGIEIKSGSLYSLFHRPNEHLSRFDLWKETAGWWFIEGEAFWWFGPDYGGGLPKQLYILNPRKLQLEGEGLDVRDSVTNKRRRWFYNAGAELVPIFSDELIHFKDWNPWNPLRGVNPLVSLSFELEQDYFANKANSTLLKNNAIPQGLLKTEQTLRPEEADQLERRWESKYGAVKAGRKIAVLGKGTEFKPVTFSPDVIKLFELKRWNLYTILAKYGIPPRVANISDKSTALSGKDTAEQHSAFWKYTLIPILRQFEQILETQFFIRLGIKERGVFDLWDIPELQESEDQQSKRDIAEINAGIKTINDVLKERGKELKPWGDVWHRP

SEQ ID NO: 93596 - protein, 99 aa, Unknown
  Obtained from environmental sample
  misc_feature (1)..(99): Xaa is any amino acid
MRFYLKWLNKYERRNDENEPIGIILCTKASRKQIELMELDKSGIAVEEYWTNLPPKEEFERKIKEIFIEARERLERKKSLSKSKTQKQLDYFYDSKDAE

SEQ ID NO: 93597 - protein, 85 aa, Unknown
  Obtained from environmental sample
  misc_feature (1)..(85): Xaa is any amino acid
LRLKNTQINENSLFTHISKIIEKRKNKAGMYTNREVTLMYWEIGHYISSVVLGEERAEYGRKIVTTLSSQLVKKYGQAFDIHNIR

SEQ ID NO: 93598 - protein, 319 aa, Unknown
  Obtained from environmental sample
  DOMAIN (110)...(240): RNA pseudouridylate synthase
  misc_feature (1)..(319): Xaa is any amino acid
MRVENKKNFNHRGHGEHGEHGGRRKKEVNLLPLRETPCNSVVNILPEKPVRLQVYLAHAGIASRRAAEEIIAQGRVSVNGVVISGQGSRVFPGDKVLLDGKEIQTESCQVYLALNKPPGFICSSSDPQGRPLAIELLPGEIRERLYNVGRLDFMSCGLIFFTNDGEFAARLGHPRSGLEKEYMVEATGHIPDALIDAFEKGISIEDVYYKAQLIERLGSRLIRVVLIEGKNREIRRVFSHFHLHPFRLRRVRIGPVKLEELEEGESRPLRKFELEALKIRNEELGIRNKERQENGRNSRKPIPHSSLLIPNSPKGSMTW

SEQ ID NO: 93599 - protein, 178 aa, Unknown
  Obtained from environmental sample
  DOMAIN (38)...(103): S1 RNA binding domain
  misc_feature (1)..(178): Xaa is any amino acid
MAHVEVVSPSHGGADTSPVKEENIQTQLQEEYLKSLDQLEEGQLVDGNVIQVTDDHVFVDVGYKSEGKIPISEFAEIPKVGDSISVILITKENKRGEVIVSKQKADAKISWKNLRQAFQDHSIVEGVIEKQVKGGYDVNLGAGMRAFLPISQSDIQKVDKPEKFLGQKSFFHIERLSC

SEQ ID NO: 93600 - protein, 218 aa, Unknown
  Obtained from environmental sample
  DOMAIN (62)...(212): Cytidylate kinase
  misc_feature (1)..(218): Xaa is any amino acid
MVIAIDGPAGSGKSTIAKLLAQKLKDREGKGFTYINSGNLYRAITLGCLRSYITPNDSTRALEYAKNANIAYDGDKIVLDGEDVTSLLHSDEIDKWSAPLSAIVPIRHVVNGIIRAMSKGFNSVAEGRDMTTVVFPDAEHRFYLDASAEARARRRFDQGVSKLNLEEIKEAIMQRDAIDRNKKEGSLAIAEGVEYIDTSGLTINQVYAILEERISKEN

SEQ ID NO: 93601 - protein, 235 aa, Unknown
  Obtained from environmental sample
  misc_feature (1)..(235): Xaa is any amino acid
VISGDFHANAKGELNYISENALLEKYKEPLYKKINYHIILGDAGFLWPENEEAENLNFLKLAKRPFPVLYVLGNHDPVLGRHDLPEVDMGIGEKVVLVNKDNPFTAYLKRGKIYNIENHKFLVLGGALSIDKIYRVSGRSWWKQEYWSDEEKTDIFLLLEKENNFDYVLSHTGPSRINKIINNFNAAFTPKFKDEVSVLNERIDGKITCSSGFAVIGIKTYTTTMKTEKKDINIC

SEQ ID NO: 93602 - protein, 409 aa, Unknown
  Obtained from environmental sample
  DOMAIN (1)...(347): Serine hydroxymethyltransferase
  misc_feature (1)..(409): Xaa is any amino acid
VDAVEALAAEEARNLFGAEYANVQPHCGADANILAFWAVLATRIENPLLEKYGETNLYRLTDEQWKELKKELGNQRLLGLDYYSGGHLTHGYRYNISSRLFDVSTYSVSKETGLLDYDVIEKQARELKPLILLTGYSAYPRKIDFKRMRQIADSVGAVFVVDMAHFAGLVAGKVFTDEFDPVPHAHVVTTTTHKTLRGPRAGLILSTKEFAEALDKGCPLTMGGPLPHVIAAKEVALREASKPEFRDYAKRIVDNCQALAAACIKNGLTVLTGGTDNHLFLVNVHVLGLTGRQSESALHECAVTLNRNSIPFDPNGPWYTSGLRIGTAAVSTLGMGKAEMDELGSIIALVLKNTSQAPDAKDASKKSKAKYIIDEKAKAEALDRVKKLQDRFPVYPELDLKLLKEAFVE

SEQ ID NO: 93603 - protein, 305 aa, Unknown
  Obtained from environmental sample
  DOMAIN (131)...(292): Bacterial transcription activator, effector binding domain
  misc_feature (1)..(305): Xaa is any amino acid
MLKPYDLLENILLDIESGIKKNINASVLSKKYGFSEGHLRRLFSFAFNQPIAAYIRSRTLAASIYDLLETDTNILDIAGEYGFEYEQSYIRTFKREYGITPGDLRKTGQVVQIKPPLHLFADRRLDNGILFGPDFVMVPQFHVIGKRHHLSFNDMRTEPLLAKQFMDNERKLIKKAVNPNVFIGLSCNINIKEGQFDYLPSVQVENLKNIPLGLSGETFETSMCARFRYLGQHGYSGITGNIVSMMSNAVGNFAQDENIKYVLISDKTNFVMIDDNLYDGTYCEIEWYTPVSEKSTHSILIENSF

SEQ ID NO: 93604 - protein, 366 aa, Unknown
  Obtained from environmental sample
  misc_feature (1)..(366): Xaa is any amino acid
DAAGDGLPIREHPDNGARRVYRLKLGEIIKVLTRVEGVEAVGATGDPLPGEWYRVLTEDGITGYCFSYRLKLFDHTGGSLAAIVQDQQEPEDPNLDRLLSRTWSADSYGTMVSTGKIDINELSHHWFFDPGQDTGIAVIKTKDLELSFEYVKIRSTGTQSWRFEGTPLQMNLRSDTTLAVQFTGENGVLRTLLFVALPSSVDDIILQETARREELFRAIYEHGPIYSSSNYGILIFSEDGRFSWSGNYLLVPQVISASALGSGVLDMRLHVSDVLSSRYDGAFTMRFDGIGGIGTTTDFIYAIDPQGLRMEYVPETSLDGVTVVRRASSPVVVYFFKNDIQDDSASLFPDFEVEDDDSEYNFELLN

SEQ ID NO: 93605 - protein, 91 aa, Unknown
  Obtained from environmental sample
  misc_feature (1)..(91): Xaa is any amino acid
MAKINMKTPLVEIDGDEMTRVLWEVIKNKLLLPFIDLKTEYYDLGLANRDSTNDEITVKSAEAIKKYGVGVKCATITANAARQKEYNLKHL

SEQ ID NO: 93606 - protein, 69 aa, Unknown
  Obtained from environmental sample
  DOMAIN (5)...(69): Heavy-metal-associated domain
  misc_feature (1)..(69): Xaa is any amino acid
MTEITLSIGGMGCDACCTRIEKALLKLNGIKSASVNLADQKAAVAYDPDILQLSSIKEAITDEGYEVTE

SEQ ID NO: 93607 - protein, 562 aa, Unknown
  Obtained from environmental sample
  DOMAIN (83)...(140): Threonyl and Alanyl tRNA synthetase second additional domain
  misc_feature (1)..(562): Xaa is any amino acid
LVAIGPSIENGFYYDFQFPAREGSHVPISADDLPKIEAEMKAIIDSRVDFVRVEVSREEALKRFSGEPFKQELIKNLPEGEAISIYENRDAEGKVRWSDLCRGPHVQNSREIHSGAFKLMSIAGAYWRGDENQPMLTRIYGTAWENPKDLKAHLAFLEEVEKRDHRRLGKEMEIYSTHEEAGAGLIYWHPNGGRMRVAIEDFWRREHYRNGYEILYTPHIGKSWLWETSGHLGFYKANMYSPMKIDEQEYIIKPMNCPFHIMIYKTKGHSYRDLPLRWAELGTVYRYEPSGVLHGLLRVRGFTQDDAHIICTPDQMESEILEVLRFSLSLWKVFGFKDIKAYLATKPKESVGEQSRWDAALESLRKAVDAEGLAYEIDEGGGAFYGPKIDLKIKDALGREWQMTTIQFDFNEPERFDMTFVDADGQHKRPYMVHRALLGSLERFFGVLIEHFGGSFPPWIAPEQIAVIPVAEGFNEYAKKVTAELKAHDLRVSVELGDDRLNAKIRDCQNRKIPYMLVVGQREADEGTVSIRLRDGKQLPAMKVADFAKYALEKIESHSIEL

SEQ ID NO: 93608 - protein, 384 aa, Unknown
  Obtained from environmental sample
  misc_feature (1)..(384): Xaa is any amino acid
LLFGCSSIPAPSGPVVIPEDFAGIVHAGQTNTPQEYALLDRMGASWLLTTFYWSRIEGQEDRWNFVDYDTYVDTAKAAGKKIIGVLAYDVSWIHKDGKARDYIPPDKVYLFLNYVRRTAEHFKGRVDAWCIWNEPNFTFWKGSRDEFLSLSRQAADAVREVDSEVTLLSGAFNRGIFGLPTAYIKGLFESGAMNKADAVAFHPYELNPNRTVRLFLEFRARVAKYGFEDRIWLTEVGYPTGGWYPTAVSEKKFPTYIVKTFVGLAISGAKKILWYQLRDPLKRSKNNSENYFGLVRSDVDYTSKGAEAFRLCAVYLSGAAYRPELPLRKNLPNSFRSFYFERPSGERTLVLWKDGRAINLMLRGSENDYTRHDIVTGNAETMPA

SEQ ID NO: 93609 - protein, 384 aa, Unknown
  Obtained from environmental sample
  DOMAIN (120)...(342): Methyl-accepting chemotaxis protein (MCP) signaling domain
  misc_feature (1)..(384): Xaa is any amino acid
ADCQVADTLKDISEGEGDLTRSITVTSKDEVGALALYFNKTIEKIKNLVLIIKKEATNLNNIGNTLASNMTETAAAINQITANIQSIKGRVINQSASVTETNATMEQVIANINKLNSHVENQSRNVSQASSAIEEMVANINSVTNTLINNSANVKTLQEASEVGKTGLQEVAADIQEIARESEGLMEINSVMENIASQTNLLSMNAAIEAAHAGEAGKGFAVVADEIRKLAESSSEQSKTIGNVLKKIKSSMDKITKSTENVLSRFEAIDLSVKTVSDQEENIRNAMEEQGEGSKQVLQNTGSLNELTEQVKSGSHEMLDGSNEVIQESNNLEKATQEISNSMNEMASGAEQVNIAVHHVNEISGKNRDAIIVLLKEVSRFKVE

SEQ ID NO: 93610 - protein, 383 aa, Unknown
  Obtained from environmental sample
  DOMAIN (34)...(344): D12 class N6 adenine-specific DNA methyltransferase
  misc_feature (1)..(383): Xaa is any amino acid
MSDQPFYLDIDKKICSVNEKSEKNEYLTQQLITYIGNKRTLLSFIGDGIKKVQKRLHKEKLKMFDVFSGSGIVARYFKQFSELLIVNDLEKYSTIINECYLSNENELNIFSLRKRYFEIIEGIERNPKKGIISELYAPINDKNIKPNERVFYTSGNAMYIDTARQIIEKIPRKEQKYFLAPLLSEASIHANTSGVFKGFYKNKETGIGQFGGLNKDALFRIKGEIKLPFPIFSNFNCETIVYSGDSNKIIKDLPEVDIAYLDPPYNQHPYGSNYFMLNLILDYKYPESTSKISGIPGNWNRSDYNKSQKALQSLTELVEGIKAKYVLISFNSDGFITIEQMKKMLKRIGKFQVLETKYNTFRGSRNLNNREIHVKEYLYLLEK

SEQ ID NO: 93611 - protein, 341 aa, Unknown
  Obtained from environmental sample
  DOMAIN (11)...(338): Aminotransferase class-V
  misc_feature (1)..(341): Xaa is any amino acid
MIIKVFEEKRRYFDWAASAPDIALIPPEPGLYGNPSSLHSEGRAAKLALEDARQRCAAVLNVPASTIYFTSGGTESNSIALFSTLMRRGQGRIIVSAAEHSSVREAMVTLDKLGKPTGVIAVDSEGRVTSDTLTKALDKYKDVRFISVMAVNNETGSVTDIASLMDIIRRQTPPVHIHCDIVQAIGKVPLDISGWGIDSASISAHKIGGPRGIGLLYLRHSAGQGKTEVFYKGGGQENGIRGGTENIQGAVALASCIEKYATPQVLNENYENAKVRWNKLLTSLSAIERCTIIPLQRTEQCTHLSAQGDITGRFSPYILQVGFKGIPGEVMARALDDLGFA

SEQ ID NO: 93612 - protein, 171 aa, Unknown
  Obtained from environmental sample
  misc_feature (1)..(171): Xaa is any amino acid
MHDILVIGAGIAGLTVALKAAEDGKSVLLLTKGAKPDGSTNYAQGGIASVTTPEDSFQSHIADTLEAGDGLCKKKQVEILAKNAPKAIEQLLKWGVNFTASKDNARSFDLHLEGGHSFRRILHTADLTGKEIMRALLAELKQRSRGIDFIEHSTVLDLIMQKSHCVGAIVA

SEQ ID NO: 93613 - protein, 99 aa, Unknown
  Obtained from environmental sample
  misc_feature (1)..(99): Xaa is any amino acid
MYNMDKLFEAVEDRGHVCVGLDTAPEYVPEKERRSSPAETVLEYNKAIINATIDIAACYKLQIAYYEEMGLSGLDAYARTLKYLRERATLVIADIKRSD

SEQ ID NO: 93614 - protein, 384 aa, Unknown
  Obtained from environmental sample
  DOMAIN (20)...(338): Amidohydrolase family
  misc_feature (1)..(384): Xaa is any amino acid
SGSAMIIDGEKLSSSDKLPVLMPAFVDLHAHFRDPGPGVNSALPSEVIESACMAAAAGGFGTVVCMANTKPAIDTVEKAASLKKRSDVLGLIDLYPVMSLSKNMEGKELSEITAITKNGSSYIPPMLSEDGKDPDNDDLFLAAMKEAKRIGTPVSCHCDLGGDENNAVRRAIELGKKADCRIHIAHVSTENALQTIREAKLEFKAGSLALTCEAMPHHLCLTEEDANKLGAKTWGKVSPPLRHEDDRQALINALKDGTIDAIATDHAPHSTADKESGSPGFSGFETTIAALYTELVRSGLDIDLKRLSSLLSAGPARLLSFGNSRGRLLPGSVADFVILDIDAAWIAEPKKFFSRGKNSPFTGSKLYGKILMTLHRGRIVFLNS

SEQ ID NO: 93615 - protein, 814 aa, Unknown
  Obtained from environmental sample
  DOMAIN (254)...(419): Radical SAM superfamily
  misc_feature (1)..(814): Xaa is any amino acid
MSFHKTGYVDPVNDIGALLLGVDKPGRYCGGEHGRLAKKDALLQTLIAFPDLYELGMSNQALRIIYNGLNRISGISCDRAFAPALDFEQLLREKGLPLYGLDTGISLKRLDLLLFTLGYELGITGILTMLDVSGIPLRCDQRGEDDPLVIAGGPAVSNPLPYSAFIDAFWIGEAEAGFFDEVCVLMEIKRAGGSRSALLERIREYSHFWVRGKETASRAVDACFAIRGLWPANKDAHSVYPVPSMKTVQHHGLLEIMRGCPNGCRFCHAGYWYRPMRQKTPETIIREAEAFVALGGYREISLSSLSSGDYPGIGDLVDALNDQFSNRHVSFQMPSLKVSTFALSLLEKISQTRKSGLTFAVETPLDFWQLAINKQVTENYVVEILREAKRNGWRGAKFYFMIGLPVCSQAGIVDSEEIEIVNFVHLVAKKTAMHFNINVGIFVPKPHTPYQWARQLDSETAAKKLDFIRSKLKPHGHKVSVCDPFVSMLEGILSRGDERASGIVEQAFRLGTRLDPWQEFISKDAWQTALDNNPGLAGEFLAEKDPSTPLPWSVINAGVSAAYLRKELEKSSRGELTPPCKEDCAERCGVCNDKVQIAMNNAQCLQTTTLLPTPQGDAVAPLLPNKKPDPAIWRLLFEFSKEGSAVFHGHLSLIEIFSMALCRAGLDARYTQGFNPLAKLEIVSPLSVGISAGGEIAAVEFLYEIEPREFLEKMNATLPEGIKITRAECYCIPSGGKKHSLSSLLWGFGYAADGKTIAETIYVPAAAEKTHREKHLSSGGTLFSLRRSCVLSKNLTGGNQPWASYFDTYCHLYS

SEQ ID NO: 93616 - protein, 474 aa, Unknown
  Obtained from environmental sample
  misc_feature (1)..(474): Xaa is any amino acid
AATRVFEEIEQRQVDPGLLERVEGNNFRTRIYPIPADGIRTIAIGYEEELTLENESFQYKLPMAYQNPIEKFSVKATVWKSDTKPIVLDSIDKFIFDKADENYTASFTRENYTPNRALSFALPAPANTPRFITQSARGSHYFLASITPKIEPRQKQWNDDLAIIWDVSLSGSQRNLDREMELLDIIFADKKNANVHLYFLNNTLNKMVNKNTVNGEHKVRDGNWDGLRNVLKKAVFDGGTDFSKINLDAIIGKEILFFSDGISTLSDVDFIKNTPAKRPVHCLVSSSKADYSAMRLIAGKTKGKFININALSSAQLRNELLNETPLFLRAAYGKELREVYPSIAVPIHGNFSLSGIAEKDNAEVTLLFGFGNRVEKRIKIKLDAKKADKHGKAHKLWAQKKIAELDLNYDKNRDELTDIGQQFGIVTRNTSLIVLETIDDYIHYKITPPADLREEYLAEYMSEEKDLKRNRKMN

SEQ ID NO: 93617 - protein, 120 aa, Unknown
  Obtained from environmental sample
  DOMAIN (63)...(96): Tetratricopeptide repeat
  misc_feature (1)..(120): Xaa is any amino acid
KAYSEKGDYNKAIKDLSEAIQMNPDGAGLYNSRAWTYAHYMKRNYDRAIEDADRAIELAPNSGEYYDTRGWAYLGKGDYDSAERDFSKALQLNPNLKESKEGLEKVQEARAVKKPVKPRK

SEQ ID NO: 93618 - protein, 270 aa, Unknown
  Obtained from environmental sample
  misc_feature (1)..(270): Xaa is any amino acid
MAKINDHDRHLYDEKVSAYIAMTKTLLEIEKKLLVETKKDTPEAAIQKLTLADEMLNLTSNYIAVNGISQVVLKSKNEEVLNDARKSLYKAVIYLEEAVSNYIDVPFSDYEAKLTLLESFDENQRYFLIRKMGLAIDLLEYAYGDNSKWRWTFVEMEGRFATVSKNILDLRRVIEYSTFESPYYESTIYHLRLIKRLMAQSADRYREKYELSTGQIPDFKTGISYLGALRRLHILLADSEEAENVKKKMAIWKAKLEADHKSRKTPKKSM

SEQ ID NO: 93619 - protein, 113 aa, Unknown
  Obtained from environmental sample
  misc_feature (1)..(113): Xaa is any amino acid
VYHSNGVNGILEFAFSVEDKYKIGFSLWAIKDKNIENSILPEYLNSTDVSKKQLVKGFINGCFSNEKEAWINTYDFTTWKKTQICSLLLHIAYHEKIWNLAESLLGDSVNVFG

SEQ ID NO: 93620 - protein, 242 aa, Unknown
  Obtained from environmental sample
  DOMAIN (40)...(218): Metallo-beta-lactamase superfamily
  misc_feature (1)..(242): Xaa is any amino acid
MKTFLNMLKILVLGIQIIACSSGSYENPERLHIEMLDVGQGLSFLIRGRNCDFLYDTGTKNSGINTMLQNRGVKRLCSVVLSHWHDDHVGGIPALVKMAKNDEIQIKRVLFARDIPLENGSSGTARFRDSCLALLKQAGIETKVISRGDTIADFLPWTARILFPTEDSSLTENNASVVMRISDSQNAFLFMGDLEAKQEKSLLELEPLLTAFALQIGHHGSKTSSSWNFLAQIQPKMAFISA

SEQ ID NO: 93621 - protein, 190 aa, Unknown
  Obtained from environmental sample
  DOMAIN (1)...(171): Peptidase C26
  misc_feature (1)..(190): Xaa is any amino acid
MILLIDNYDSFSYNLYQCIGSIDPDIKVVRNDEITVDEIKKLSPSRIVISPGPGKPSDAGICIEVIRNLCSMSPIIGICLGHQAIFEAFGGTVSYASRLMHGKSSEVTVDTNNSLFKGLPQKIQAARYHSLAGIKSTLPDSLKITAWTQDDEIMAVCHKEYPVYGVQFHPESILTPNGKIIAENFLRVRN

SEQ ID NO: 93622 - protein, 491 aa, Unknown
  Obtained from environmental sample
  DOMAIN (23)...(172): Anthranilate synthase component I, N terminal region
  misc_feature (1)..(491): Xaa is any amino acid
MAKPSLEEAEQIAKTGAYNVLPISMEIFSDMVTPIDVLKKLMAVSKHCFILESAEDTKNWGRYTFLGYEPKIEITCLNGEMKITTSEDVKSFKTDNPDKHILEILDKHKGAKIEGLPPFTGGLVGYFAYDYAKYAEPSLKLDAPDKEFFQDVDLMLFDKVIAFDHYKQKIVLIVNINVENIKVEYKSGVEKLDDLKSMIKNGVPQQPEKAKVKSELKSLFTKNEYCEMVKKAKGHIKEGDIFQVVLSNRFEADFEGSLFDTYRVMRTINPSPYMFYFSGSDLEIAGASPETLVKLHDGKLFTYPLAGTRPRGKDDDEDSTLEKELLADEKELAEHNMLVDLGRNDLGKISKFGTVKVEKYMSILRFSHVMHIGSTVSGEIKEGKTGLDAINAILPAGTLSGAPKIRAMQIINELERNKRGIYGGAVGYLDFTGNMDTCIAIRIVYKKKGKVFIRCGAGIVADSNPESEYQECVNKSKAAQNALMQSSGGID

SEQ ID NO: 93623 - protein, 284 aa, Unknown
  Obtained from environmental sample
  misc_feature (1)..(284): Xaa is any amino acid
ASPSGGFNGVITGLSIGNGFISINETEYISVAVVPSENFYVLPESQVARLPKNSRANISSTQDLTEYCTEPTFRLAYRFNNKGEKKGASGNNGGIDILGRGDNYEWLWTTYEQGGWFYDLNGIKREMINGFQKDPNNGVELTVKPEFVYENGIPYLQLRNILYNPGNNTVIGQRFGASADVMIHENDYAPLLHKPYGAYMTDWETNPSLELMFVCEGGGGINPVDTLWLGRYGEGTHLNYIYTNNRSDALNLDSAIGFSYQNITLAPSQKKEFIVRFTLARTEK

SEQ ID NO: 93624 - protein, 160 aa, Unknown
  Obtained from environmental sample
  DOMAIN (1)...(87): SRP54-type protein, helical bundle domain
  misc_feature (1)..(160): Xaa is any amino acid
MFDKLTEKISDAFRFVAGKSTISEKNIDDAVEAIKMALLEADVNLRVVRRFVNSTIEEAKGEKVLRSVDPGQQFTKIVHDKLVSFLGETSKGPDGRSAQELKLKGPDTVSVVLMLGLQGSGKTTSSAKLALRLKKEGRKPLLAACDLIRPAAVEQLTLLA

SEQ ID NO: 93625 - protein, 287 aa, Unknown
  Obtained from environmental sample
  misc_feature (1)..(287): Xaa is any amino acid
EKLQKKLIEHKNLNDLETEFGNWFKAVRTDLELFREENIPLETQLNLEIQKYQKITGAMSVEYKGETKTMQQMVPYLQVPNREEREEAWRLLTKRRLQDAEALDAAFDKLFSLRIQIAKNSGYENYIDYIFKAKHRFDYTPEDCKNFHESIEKIILPLQREILQQRAKKMKLPKLRPWDLSCDPQGRAALKPFKTGTELVSKCGNLFSRLNPQWNEWYKILQKENLIDADSRLGKAPGGYQITFYDSNVPFIFMNAAGTNQDVYTLLHESGHAFHQFAMTKQELFAF

SEQ ID NO: 93626 - protein, 338 aa, Unknown
  Obtained from environmental sample
  misc_feature (1)..(338): Xaa is any amino acid
KDGKVQMQNLGMKLLDGSMNLTGEYNTQDIKVPSIDFGVNIKQFDVKSAISSFDILQKILPQPQNYDGKVSANLTLNSILDEHMSPVMNTVASKGQLQTHNIKIQNSELFATLANLLKNESWRTPTLNNINIKYEIKDGQVTIEPVHMNIAQTALELSGSQSLDMSLNYKVNATVPASAVGSGAADILSKIPGGVKINEFKLTGLIGGTAAKPVVTLSVADMASSVAGAVKDAVKEQVKEEVEKQINALMAEAEKQAQNIRNAAKQSADKIRQEANSAANKLESEAKNPLQKIAAQTAADALRKEGETNAVKVEQEAERQIKTIMDNANKKANDLRKG

SEQ ID NO: 93627 - protein, 418 aa, Unknown
  Obtained from environmental sample
  misc_feature (1)..(418): Xaa is any amino acid
MPSEKKRVGLVLASIHTGISLNVWNSFVRTAMSENISLFIFPGGRLDARQNFENLRNSVYSLVNDENLDGCISHSSTILYNQSKEEFEHFHKNFDPLPLVTLGFKLPGHSCVEFDAYNGMKALVNHCIRVHGARKIAFLHGPEFHQSAHARFEGYCDALIEGGLVSGLPGKKGVIQSPLVSGPFNWDAGAAAAAQLYKDRSLIPGRDFDTLVGSSDFMVLGAINYFAKHGYHVPGDYRAVGFNNSEESRITKSPLSTVKIPYTEMSAESFRILRKIMGKRKNPSDNDILLNSDLIIRESCGCSGIRILVSGVGGGGGIQCHSDYSSNAEESLVKITEKYLKTGAPDINTQARRLIHALFHEEQEHFFTMFEKNITQYFSSGREPENLLTLMDEAAGLELPGQIRNLLPSLYRSESEFM

SEQ ID NO: 93628 - protein, 287 aa, Unknown
  Obtained from environmental sample
  DOMAIN (1)...(287): FemAB family
  misc_feature (1)..(287): Xaa is any amino acid
MWGEFKSRFDSTAKAFLIDWQKNQITETLPLLALCRRFAFAFGLGFSFVYVPWGSLPDFFPAEDRAKALAELAVKLKPFLSKDTAFIRFEPPWHYKDGDEIFKNESVMLTSAGFKKAAATVQPPDTVIVNLNLSYEEILASMKPKWRYNVSLAEKKGVKVNVCGVRDIEVFYNLLKETATRDGIAVHGINYYRTLFEVCEKQSKINQFIRLYTAEHEGDFIAAIVVLFRGKDATYLYGASSNNKRNLMAPYALQWKAMRDAKEAGCINYDLFGIPPNEDANHPMAGL

SEQ ID NO: 93629 - protein, 187 aa, Unknown
  Obtained from environmental sample
  DOMAIN (4)...(157): Radical SAM superfamily
  misc_feature (1)..(187): Xaa is any amino acid
MATWMVTDRCNLQCAYCDPSIMKRANEAEVINRFEALDRIAVYKPRILNISGGEPALLKELPGLLSRAKAVWNPYIRVVHNGTGPQKLAEAFPCIDRLVISIDGPGEVNAATRGISGDAVLERIAALIDSPGLDTIPEITINTVVTEKNIDTLRSFAAQINSVSPRIGLALLPVMPVDGELSVRKTE

SEQ ID NO: 93630 - protein, 555 aa, Unknown
  Obtained from environmental sample
  DOMAIN (72)...(137): His Kinase A (phosphoacceptor) domain
  misc_feature (1)..(555): Xaa is any amino acid
MHLETIYYSFFNLICVLVLSLIVIALLIILFLRRANEKKKLEKMVQFQTKDLEKRLKEALSELESTKSESRSKSAFYINISNEIMTILNSIVGFLVTALDGNASQKTSDSLSNIRINTERLMQIVNDIMDISKIESGEMSLKKNPFDMHELFAGCRTLVMPRAVEKGLLLHFYAEPSVGKKPVGDIARLRQVFVNLLFNAVKYTNSGMVKLVSDILSIDDKSITIHFEVKDSGVGMSPEQIANVFKPFSLVEKTYKNGATGLSLPITKSIIEMMGGTLSVDSTPGIGSRFSFDLTFDTIDISMDEMLRERISYKDIDKPLFEGDVLICEDNFMKQEVIREHLTNVGLKTEVAENGLIGIEMVKNRINKGEKLYDLIFMDMHMPVMDGLEAAVEIVKMGIRIPIVALTANIMVDDLEMYKTHGIVDCVSKPFTSQELWRCLLNHMTPVNKSDSPHESETEIQESLEKYFVKTNINKYDEICKCMEEGDIKQAHRLVYTLKGNAGQVGKNRLQSAAAAVEHQLADGTNSVTPDQMAALKNELDSALAEFQSLIDETA

SEQ ID NO: 93631 - protein, 743 aa, Unknown
  Obtained from environmental sample
  DOMAIN (12)...(720): Polyphosphate kinase
  misc_feature (1)..(743): Xaa is any amino acid
MDKIEYNKLEFPYISRDLSWVDFNERVMNEGLRKETPLLERLRFLSIVSTNFDEFFMVRVAALKRLQKAEAGRAVDPSGLTPDQQLKAISQKVHDIMNRQYECLRNEIFPGLAKNGLSLLRPDSWTVPQLDFLNSFFLSHIYPVLTPLRLEDDKPMPFIESRLLNAVFLLEPENPNPPQGFEFETAAALKELKVIIPLPGVLDRLVWMPSFEAEHTNGEKEKFQLALLEDVIVTWGAYLFPGFKIKESMLFKINRDADFSVDEQRDEDFVSAMVEVLEGRGRSDCIRMVYSPGSVLLKEDLAKRFSLDNDFLYEVDGPINPVDFMELSGVASMEDLTEKPWKIHKPLVFNEDTLIWDQISQGDIMLHLPYQSFDPVVRFFQEAAVDPQVISIRTALYRTGGAIPGIGLNSGSSAFSPVVRALEQAALNGKHVTAVVELKARFDEERNISWANRLEKAGVIVVYGLSHLKIHSKISMVLRRENDRVKRYVHLSTGNYNDRTAKYYEDISLFTCREDIAYDAGLIFNMLTGYSIVQTMTKLTIAPTALKRRFLELIEREANRARQKYPAKIMAKMNSLTDVEIIKALYKASEAGVKISLCIRGICTLVPGIIGVSENIRVISVIDHYLEHSRIYYFSNGGADEIYCASADLMTRNLDHRVEILFPIQDEKLRAELYDMLNDYFRDNCQSSVLDSEGKWTLLSPPAEEKPFRVQKEMLFRAARDSENPGPVKLEYTVRRSPPADRS

SEQ ID NO: 93632 - protein, 408 aa, Unknown
  Obtained from environmental sample
  DOMAIN (277)...(373): Peptidase family M23
  misc_feature (1)..(408): Xaa is any amino acid
KNILFYKNNYQFEIKERTDEFAEELIAKPTGTNLEKKLDASKTLNTYHEVMINKEVLYIKGNDIKPEGIVEKNFHNWKEHFTVMEESGKEGSIKCDEKLILKVINKESLNFEQLLDIYVNYNYKEQRKKLRTIICQHHLEWNKDLYKGPFQKHLEAKLGKLDLWATPNGGKAEEKELPPKEQVWFAHPVYFINHLNEAKLLDRTFNPYYGENKKEALKGKRFNCFDNPGFAPIYHKREKSVDEDKDQTFKYEGKRYGVITGLFNQDYTDLYETHKYYPHEGVDFRGDIGREIKSFIHGKVIMVGVMGGFGTTIIVRPLYENGIIYLLGHLSESLVKEVDEFKPGETVAKVGKSGGTAHPHLHVSVVETSFIDKDDIVKKKEGVYKWDIIPEYRDPFNHHIKRHNPRPF

SEQ ID NO: 93633 - protein, 183 aa, Unknown
  Obtained from environmental sample
  misc_feature (1)..(183): Xaa is any amino acid
VRFLGEAQEIQSYFWRYVLIIGTAVFLVFGVMASQFESFVDPLIIFFSIPLLAIGVIWIYKIGGQAMSMFSIVGIVALVGVVVNNGIVLVDYTNTLRARGLKLREACLEAGRNRLRPIMMTSLTTILAMIPIAFFPGAGAQTIQPIGQTFVGGLSVSFFMTLFVTPVMYSLLNERHEKKAMSK

SEQ ID NO: 93634 - protein, 258 aa, Unknown
  Obtained from environmental sample
  DOMAIN (15)...(258): Putative transposase, YhgA-like
  misc_feature (1)..(258): Xaa is any amino acid
MTATDDETQPQDAGGQNQRHDESYKSMLSNAANFLHFLKKYIAAPWIADISVGDLEKVNKSFVTEDNTEIDSDLIYKMKIGGSDVYFYILVELQSQVDHTMPFRLLRYMVELLNDLFKNTKNNIRELKNFRLPAIVPIILYNGNDNWTAVRTFREYTENYEIFGDNIINFHYLLFDVKRTDEATILLTKKILDAVFLLDKRRLEKRVSEEEILEILKQFAPYMEVDDAVALLKWLKYFIYKGSISSENEESFKNILIG

SEQ ID NO: 93635 - protein, 600 aa, Unknown
  Obtained from environmental sample
  misc_feature (1)..(600): Xaa is any amino acid
YQPGQQIITIESAKTTEYFTLEVVDEEYARLKGDVIVSLKDGATVHRIKAWEILYNRTRNVMTATGNVEYTKEEGSNVETFSGESITVNLDNWSSIFMDGSSQKSTIGRSATFRFAGTVVSRNSEGATILTGAEISNPANEEAYWSLYASKLWLLPGNDWAILNAVLKVGNIPLLYLPFFFYPADEIVFHPVLGYRSREGTFLQTTTYILGRPKSSGSSENSITRIFGGDSDSEDKVREGVFLRTSKEKTADPSATQLSFLFDAYVNLGAYLGTEMTAPAKGLFGATKLSAGLGLTRDIYISGGNFTPFRDNSGESSWNSSRFFFMDVPLRYRFAYNTSFKVSNGSLSLDIPYYSDPYVNRDFMRRSEVLDWLAMLREGVTASDVISDASISSYEWKLNGSFNPPVAKFAPYVSSFSISNLNSTLVFSQRASGSYSGPSVPPNPGRAFFFPNRLTIFSISAAVAGTPLRTGNTPQSRTVSKTEPPPGDALLPDLPISPWGSTENETDDTYKKAVSGVYDFSPPALSQSFSLPATGGAQLAVDYTLTPATATELQFRTGKWSDSEDINWGEVSSILSSFRSDGSLGFNLGHTGGGAYSSSL

SEQ ID NO: 93636 - protein, 325 aa, Unknown
  Obtained from environmental sample
  misc_feature (1)..(325): Xaa is any amino acid
MHYKNFLTVTYAPAGYLNDNSIEQIKADIEKVSNYIKLDKIYLETYRSEILIEREKMEAVKALFTEKGYAVSGGITTTVKRTLMGSMCFTDPENRKRLGEIAAYTAGLFDEVILDDFYFTNCRCESCIKAKGDRDWATFRLALMNDISENVIIKNAKTANPKVNCIIKYPNWYDSFQANGYNLEDESKMFDMIYAGTETRDPHYTHQNLPRYLSFFLPRLFEHIKPGKNGGGWYDLFDCSLEDYVQQAYLTLFAKCREQMLFCFPLLANNPPYTAAVGAFYDDADLFIGRLGEPVGVACYKPYHSMERGFFHEFIECAAFPWIPI

SEQ ID NO: 93637 - protein, 149 aa, Unknown
  Obtained from environmental sample
  misc_feature (1)..(149): Xaa is any amino acid
GLGRGNRAFETYAKICPAYREDDSELRRLEPYVYAQMVAGKDAVNHGEAKNSWLTGTAAWTFVSISQYILGVRPVFDGLMIDPCIPSTMKDFTVTRHFRGADYHITVDNNAGAEKGIKSITVDGKPLNGVVLPVFGDNKVHKVVVTLGK

SEQ ID NO: 93638 - protein, 379 aa, Unknown
  Obtained from environmental sample
  misc_feature (1)..(379): Xaa is any amino acid
MLLRSIKAPLTAIQGIGQRIMKENAPKIARLGIRDVAGLLCHYPRDWEDRRFTVPIAEFQRAKVCTEVTVLAHDWIGFGHKRTPKVYVEDKSGRAVLVGFNRPWLAKQMEVGSCYRVWGSFEYKRGEIQSGNFEFEEASKAENFNTMLPVYSLCAGLRQAAVRRFTAKAIEQYASLLENELPEEIIARDKLLSKAAAIRAYHYPSSPEELELARKTLIYEELFYLEVLVGKRALGRKGNKTISNEQLAMSNEGQDNLPDKYTHSSFLIPHSSLVPPSPLQQRLIERLPFSLTPGQQKAIAEINADMGDYTHSDTHNDVYSNFSMARLLQGDVGSGKTLVSFLSALRAADNGGQTVLLAPTELLPASTRKTPPASWNPLA

SEQ ID NO: 93639 - protein, 50 aa, Unknown
  Obtained from environmental sample
  DOMAIN (2)...(38): Bacterial regulatory protein, Fis family
  misc_feature (1)..(50): Xaa is any amino acid
NGKEYLLQALSITRGNKKRAADLLNLKRTTLIEKLKRHEIQDDDSADNSD

SEQ ID NO: 93640 - protein, 69 aa, Unknown
  Obtained from environmental sample
  misc_feature (1)..(69): Xaa is any amino acid
MNQKFHDHLAKETSTLREQGLYKTERVITTPQRPRMTANGKNVVCLCANNYLGLANHPELIAAAKAAMT

SEQ ID NO: 93641 - protein, 248 aa, Unknown
  Obtained from environmental sample
  misc_feature (1)..(248): Xaa is any amino acid
MGAIYWQLNDCWPVCSWASVDYFGRWKALQYGAQRFYAPLRATLFNDETEAVPPGTIAAQLRRNVRVYVHNDTLKAVKGRIKLYLRDMNFNTLAEETINAELPPMAASEVFARDYGNLINTVELERSCFVTAELSIITDKENEVSKETVLFIPPKYFSFKKPEYSFDVVEKSDCFAITVKANTFCRFVRVKIPGEDIVFSDNYFDITGSEGKEIKAFKNELKNTYTAQALKALLENNAESSISVNESF

SEQ ID NO: 93642 - protein, 486 aa, Unknown
  Obtained from environmental sample
  DOMAIN (158)...(223): His Kinase A (phosphoacceptor) domain
  misc_feature (1)..(486): Xaa is any amino acid
MGNDRKKIIAVDDNVENLTAIKNTLKDIYDVYPSPSAAKMFGLLEHIQPDLILLDVEMPEMNGYEAIEKLKSMDKYRETPVIFLTSMSDAKSEMEGLQLGAVDYIRKPFVALLLLQRIKTHIAIMEQEREIKNLLELKTKEVSLREFAEQEAQNASRAKGEFLSHMSHEIRSPLNAVIGMINIATDENDIDSIKLYLGKADNAAKHVLGVINDILDMSKIEADKLDLSNGEFDFGKMMTNIIDVTGIRAREKNQQIVVNMNPNIPSFVISDELRLSQVITNLMTNAIKFTPENGKIQLNAKKLEEKEDEVTVRIEVIDSGIGISPEQQEKLFTAYNQADRTISKQFGGTGLGLAISKRIIELMHGKIWIESELGKGAKFIFTLKMKKGKPVAAAAATADATGAPAATVVPSVKASDLHLQGYTILAAEDMDFNREVLSKYLERTGVTIDYAENGKECVEKFKVNHEKYCMILMDINMPEMDGDEAT

SEQ ID NO: 93643 - protein, 64 aa, Unknown
  Obtained from environmental sample
  misc_feature (1)..(64): Xaa is any amino acid
KSIPIVAMTANVFREEIQKCLDSGMTDHIAKPIFPDDLYASLKKHLQPSLPASLGIGKSQGDAI

SEQ ID NO: 93644 - protein, 425 aa, Unknown
  Obtained from environmental sample
  DOMAIN (158)...(223): His Kinase A (phosphoacceptor) domain
  misc_feature (1)..(425): Xaa is any amino acid
MSNEREKIIAVDDNLENLTTLKNTLKDLYEVYPCPSAAKMFSLLERVRPDLILLDVEMPEMNGYDAARKLKSESQTGEIPIIFLTSMSDAQSEMEGLTIGAIDYIHKPFLAHLLLQRIKTHLSIAEQEREIKQLIELKTEEVKLREAAEQEAENASRAKGEFLSHMSHEIRSPLNAVIGMINIANEENDMDAIKLYLGKADNAAKHVLGVINDILDMTKIETDKLDLSNGEFDFGKMMSNIVDVTGIRAQEKHQQIAVNMNPNIPSFVISDELRLSQVITNLMTNAIKFTPENGKVALSAEKLEEKDGEITIKIEVADSGIGISPEQQQKLFQAYNQADSSISGKFGGTGLGLVITKRIIELMQGTIWIESELGKGAKFIFTIKVKQGTPASQAAGGTAPPGGSPASIKASDLHLQGYTILAAED

SEQ ID NO: 93645 - protein, 414 aa, Unknown
  Obtained from environmental sample
  DOMAIN (3)...(414): AcrB/AcrD/AcrF family
  misc_feature (1)..(414): Xaa is any amino acid
MSMVKTVVSRPTTFFIIFALLIGLGFFALVNLPIDLYPEISPPILVVYTSYTGAGPEEVERSISRPLEAVLTGVSALEKITSTSSKGASMVIMEFTYGTNMSDASNSIRDALERIRNYLPTGADTPMIFKFDPSMIPIMGLIVTSNRRTPEELRELAEDTIVPRIEQTPGVATASVNGGREKIIRVEIPQNRLEAYGLTISQIQQILAAQNMQTAAGTITERGLSYILTTMGEYTSLDQMRNTVISYKGGGVVNGQVEMPKQIYLRDLANVIDGYRDETSTVYVNGQAAVMLMVQKQSGKNSIQTAKDLRVRLKKIASELPPDIKINEMFNTTDIIEHSLNQVTSTAVSGAVLAIIILFIFLRSAKPTIIIGISIPISIIITMMLMYFAHLTLNLMTMAGLVLGIGMLGTTQSL

SEQ ID NO: 93646 - protein, 88 aa, Unknown
  Obtained from environmental sample
  DOMAIN (9)...(88): Chorismate mutase type II
  misc_feature (1)..(88): Xaa is any amino acid
MTPEIENLRQKIDSIEDSLISILNERAKYVLEIGKIKKAQGLPIADSKREEIILKRVAEKNPGPVSNEFMVDVFKKIIDESIKLESKS

SEQ ID NO: 93647 - protein, 267 aa, Unknown
  Obtained from environmental sample
  misc_feature (1)..(267): Xaa is any amino acid
LLYVFGVKDPLKVGMYEYKVLYAGGKSGFGKIDYFWQGKIAIEMKSRGEDMTEAYQQLSKYIANLPDEDKPDLWLVCDFENMRVRRRFAKRSVEIKTSGLYKHIKLFAEIAGYGDTERVVHQKDADVNAAEKMAVLHDALKNYGYGGHDLELYLVRLLFCLFADNTGIFPKGSFLQYIEESKPNGTDLSDRLAKLFEVLNMPEETRKARTLLSDDLKLFRYINGNLFKDPLSIAEFDAKMRQTLIDCAVFDWSNISPAIFGAMFQGV

SEQ ID NO: 93648 - protein, 418 aa, Unknown
  Obtained from environmental sample
  DOMAIN (1)...(418): Inner membrane protein CreD
  misc_feature (1)..(418): Xaa is any amino acid
MEAWGSQLLEAGPFIVIPGIRTDEVRTRTERDGEKIELIKRPFNLVVMPQKLNIKTDFKTTIRRRGIFSVPLFVTELTLSGTFDPAIASLSPNEEIFPAQAELVIALSSQKGIRKIDRAIWNGRELFFQPGNMGINIIRREGMGIIIARRDDSFWDKPAYTEAPVGSGIHALLPDFTQSNFDIAIAIQGGQLVRFLPVGQDTHVVVSADWASPSFQGSFLPATSNITDSGFDATWDISYLSRDIPLYWKAYDSDRERLDYSASFFGVNFFRAIDTYALNYRAVRYAIIFLVVPFLTLFLLEVFTKKRIHPVPYLLSGIANIIFYLLLLSLSEQMQFYQAYLIAAGAVIVVLTLYSRSLLFSWNKGWYMGLVGLLSYVLLYAVLNAESYALLIGSVGAFVVVALVMFLTRKLDWYGSDE

SEQ ID NO: 93649 - protein, 449 aa, Unknown
  Obtained from environmental sample
  DOMAIN (131)...(190): TGS domain
  misc_feature (1)..(449): Xaa is any amino acid
ELYDIFAIRIIVNQVTDCYTALGYVHNLWMPLYSRFKDYIAVPKPNLYQSLHTTVIGPEGKLVEVQIRTKDMNETAEHGMAAHWAYKFNLKHEELEKNMDWVGKITKMQNEIPNSTEFLGFLHESLLPEDSYAWTPQGKKITLPSGATILDFAFAVHTDLGLHCLGARAGGSVLGLDADIPIGETIQVLHSDSQEPQENWLSIAKTPKAQNSIRQWLRKTITTQSEFLGKKIWQRELQGLKISKENHPKESDICHAFKVQNISSFYESLGKSEIPLKNVFNFLKRYSDDSYAWQKLKMFNVFSSAEAPISIGYNERFLLNYASCCNPLPGDNVRGIMKSGKGIEIHKENCKILNKFPQGQQISLQWEHHNHAKPAFKCVFRVEAAGKMQMGDIFSAVSKHHALVKKTIFENKEGQLRGKIDLLAFNSAQVKNIEQSLKAIAGIQRIKLL

SEQ ID NO: 93650 - protein, 55 aa, Unknown
  Obtained from environmental sample
  misc_feature (1)..(55): Xaa is any amino acid
MVPSEVAQSLIDINPKLDRALIEKTVAFVMEAHEGQLRKSGEPYIKHPIEVAKIL

SEQ ID NO: 93651 - protein, 371 aa, Unknown
  Obtained from environmental sample
  DOMAIN (130)...(295): Integrase core domain
  misc_feature (1)..(371): Xaa is any amino acid
MTNYREILRLKQLGILKQDIAKSCGCSRNTVASVIKNAQEKGLGWETAAGLNNSELAGRLFPGNQKKPVYKIPDWEYIHREMAKSGVTLSLLWAEYCEQCRESGEIPYKTTQFYNYYSEYVQKTKATMHISHKPGEIMEVDWAGQTACIRNTDTGEPIKTYIFVAVLPYSGYTYVEAFLSQDQQSWIQAHVNAYGYFGGVTRILVPDNLKTGITKHTRHETVVNKAYQEMAEHYRTAVLPARVRSIVNNLRIPAFPSFSTIRFMIMMKLGFTIAVFADYFTVWTYRYYPPFHAAHQFAHQITPHYPVFFDNYTYYPILEYSYRMIYIYLILIEVSVPLPFLLCVPVCLPHATGRHIRHRHHRVKILLLRVY

SEQ ID NO: 93652 - protein, 1042 aa, Unknown
  Obtained from environmental sample
  DOMAIN (65)...(486): Alpha amylase, catalytic domain
  misc_feature (1)..(1042): Xaa is any amino acid
MARLLMSLDVINEEEKPIFLGPGPSEVLTFAGLDEYERFSPDQDWMPKTVLVAKSTLVWLFQLSQKYGKEITRLDQIPDEELDILARRGFTGLWLIGVWERSQASKTIKQWTGNPEAAASAYSLYDYDIAGELGGWGALINLRERCMKRGIRLGSDMVPNHTGIDSRWIVEHPGRFLQLPYPPFPTYNYNCGNLSGRDDITVQIEEHYFSRSDAAVVFKRIDNRTGNTRYIYHGNDGTSMPWNDTAQIDFLNPEAREAVIRTIIGVCQQFSIVRFDAAMTLAKRHIQRLWFPPPGSGGAIASRAEHSITTEEFNRRIPNEFWREVVDRCAAEAPNTLLLAEAFWMMEGYFVRTLGMHRVYNSAFMNMLKNEENAKYRATVKNTMEFDPEILKRFVNFMNNPDEETAVAQFGKGDKYFGICTLLVTMPGLPMFGHGQIEGFEEKYGMEYRRSYRDEIPDGYMVDRHEREIFPLMKRRSVFSGSANFRIYDLYCNGSVNENVFAYSNRAWINGREEKALIFYNNSYYETSGWIKVSDPAIPCEGGTRRDNLSEALAIHGESQYFTLLREQKSNLWFVRSSKSICENGFFVGLKGYETQVFLDVYEVEDDAKGRWARLNNDLNGSGVIDPFGAIKDIFLGELYYRFLEILKPEIIIDMNESLDKKDYADSFKESVETFINTAAHFIAGANGSYDEWTAKDKTGGKIKFTAVKTAAIEEEFKAFINRLKKLKDALSASAPKSASDKAKSPIFTRITECDSKGQLLYSTALSYGLLSLLRLIIGKEADGSHAASLAFDHWDLGRKMRDIYRRFGASDAQAWRITDIARAVLSRTGLNGSSIKAAPIRKEAVKFEAADFAALVIEENYRSEDFRRILGINIFNDVAWFNKEGFEDALFYSSVFFMVESDSIVKSPIDERIDRIAKVYEVLIKAEEKSEYRFDNLIDILTAKPSKAKKLAGVAGKAKVKTVVKKPAPKAKAKTAVKKTEPKAKPAAKKAAPKPKAKTAVKKVAPKAKAKTAVKKVVPKVKAKTVAKKAAPKAKAKTAVK

SEQ ID NO: 93653 - protein, 80 aa, Unknown
  Obtained from environmental sample
  misc_feature (1)..(80): Xaa is any amino acid
MFSIGNRRFVGSKQKLADWIIEAINTNCKGSSFFEVFAGTSVVSYMLAAQMKRLVINDTCKQIMLFMKHFMVRVEHHKKN

SEQ ID NO: 93654 - protein, 484 aa, Unknown
  Obtained from environmental sample
  misc_feature (1)..(484): Xaa is any amino acid
GNALEYVPEAIKTEAICLAALEIQRYGTVLKYIPDALKTEAMCLAAVQKYGYALEYVPEALKTEAICLAAGYEELQYWPEALKTEAVCLAAVEKNSKLLEFVPEALKTEAVCLAAGYKELQYWPEALKTEAPYLAAVQKDGSMLATVPEALKTEAFCLAAVQKNVRAFEYVPEALKTEAVCLAAVEKNGKLLEFVPEALRTEAICLAALQKDSSLLQYIPEALKTEAFCLTAVQKDSSLLQYVPEAFKTEVICLAAVQKDSSLLQYIPEALKTEAFYLAAVRKDGYSLKYIPEALKTEAICLAAVQKNGYLLKYVPEALKTEAICLSAVKQEGSALAYVPEALKTEALCLAAVQKNSSLLQYVPDTFKTEAFEAKMRSVISSGSGSSGYGIELIKWKFLSKEQKEWLEKIPYYYDSSKALEIPAELFTEEFCLAVVLKNSDGSVLQYIPDAKKTEAVCLAAVHERYKNALRYIPDALKTVGNLL

SEQ ID NO: 93655 - protein, 351 aa, Unknown
  Obtained from environmental sample
  misc_feature (1)..(351): Xaa is any amino acid
KTNNDLKGNGKLNTKNYQDYANYLKSFALNMYQNGAPIYAVSIQNEPNFESSYDGCFWSPVDMKNFFSQVGHFTDGVKGYGGGKEIPSVRTMNGESMNNPNINDAALGSPESRAAIDIIGRHTYGERLNRYARALDHPTDPKEVWMTEHLLNSEKIASGFPNDSTWNYMWKILNDIDLSIRINEESAFIWWAAKRFYSLMGDGQYNTKDGELLPRGYAMSHYAKFARDTYRVGITAKGKIRDGSNISTGNFNSHADSIDGTTARVTAFVSPDGNTISLVMFTPTYLNGTGGVDMGRIKIQLPADFIIGKASAMRTSENNYAKWEDVKIGEDKTSAIVSLPSGQILSVKFTK

SEQ ID NO: 93656 - protein, 148 aa, Unknown
  Obtained from environmental sample
  misc_feature (1)..(148): Xaa is any amino acid
MEMNNKKIIVKLPLILTAFIGLFMLACEKKLSGSIPANIDSYYVKGSRGDREQLRDLFLLLHDDNNNAESDFAVAREIANNFARNKEYSKLIHFLSERTINFPDDPYNSYYLLMIAYAYTQQDALPVAARYFDLIVKNYPDLIINGES

SEQ ID NO: 93657 - protein, 335 aa, Unknown
  Obtained from environmental sample
  DOMAIN (29)...(335): N-acylglucosamine 2-epimerase (GlcNAc 2-epimerase)
  misc_feature (1)..(335): Xaa is any amino acid
MLNKQEAARELKENILPFWRNMADEENGGFYGEADFYGKLNKTADKGCILNSRILWTFSAAYRIFGDSAYKTCAQNARDFLSKAFLDTTHGGLYWLADYTGKTLNTRKQFYNIAFGIYALCEHYLATGDQSSLESALALFDTTEQYGLDPSAGGYIEACNSEWRGIDDYRLSEKDLNCPKSMNTNLHVLEAYTNLVRACGDKRAHKALETLLHITLDKILNRDFHFELFFDMDWNSLTKNISYGHDIEGSWLLYEAALAIGDENLISKVKQTALAIAEVIYNTAIDRKNGGLISACDATGHNHNKKEWWPQAEAVVGFYNAYELSGEQKYLTPRI

SEQ ID NO: 93658 - protein, 338 aa, Unknown
  Obtained from environmental sample
  DOMAIN (1)...(333): Uncharacterized protein family UPF0027
  misc_feature (1)..(338): Xaa is any amino acid
MPDVHLGKSTVIGWTATYDSLIIPSYLGLDIGCGICACNLGKEKLAFDKLDKFIKKRVPSGQDVRDSLHEDLEEMNEFICSVNGNPAFSKTEDFKNEIEKLCEKQGKNPERIFASLGTFGGGNHFIEIDVDENHNRWLLIHSGSRIFGAHTAEYHEILALRETDEESKIKYLSGEYADGYLADLRVVQHYASVNRALMAQSIAKGFFDLDIREIEYRDCVHNYIDTACSIIRKGAISAKKDEPLIIPFSMAEGAVLGRGKGNDAWNNSAPHGAGRKKPRTDARALSLDEYRKEMRGVWSSVICKDTLEESPMAYKKARDVLDYIGETVEVEQRLNRCI

SEQ ID NO: 93659 - protein, 375 aa, Unknown
  Obtained from environmental sample
  DOMAIN (106)...(331): Glutamine amidotransferases class-II
  misc_feature (1)..(375): Xaa is any amino acid
MQEGQVRIPSGCAISGIINKSGKRIGGEAIIKSIAVMHDRSNGLGGGFAAYGIYPDYKNYYALHIFYESNAAKKECEEFLERHFDIINLSKIPTRKIKEITDEPLIWRYFVTPLPTKLASCQLDEREYTAKCVFRVNTRIDKAYVFSSGKNMGVFKAVGFPEDVGRFYKLEEYEGWCFTAHGRYPTNTPGWWGGAHPFALLDYSVVHNGEISSYDTNRRSIEMYGYKCSLQTDTEVITYIIDYLHRKHQLAFKEIASVIAAPFWSTIGCMKPDDLETHEYLRIMFSGQLITGPFSILVGFDGGMMALNDRLKLRSMVVGEKDELVYIASEEAAIRVIEPNLDTIWAPRGGQPVIVFMNGRVPDSGPAIYRGEEWH

SEQ ID NO: 93660 - protein, 67 aa, Unknown
  Obtained from environmental sample
  DOMAIN (1)...(65): Carbamoyl-phosphate synthase small chain, CPSase domain
  misc_feature (1)..(67): Xaa is any amino acid
MTAYLVLQNGAVMKGSSFGAQGEITGEVVFATGMTGYLETLTDPSYYGQIVLQTFPLMGITALFPLI

SEQ ID NO: 93661 - protein, 352 aa, Unknown
  Obtained from environmental sample
  DOMAIN (159)...(329): Peptidase C26
  misc_feature (1)..(352): Xaa is any amino acid
MTAYLVLQNGTVMKGSSFGSQGEITGEVVFATGMTGYLETLTDPSYYGQIVLQTFPLIGNYGVIPPDFESANVGARAYIVKHPCQNPSNFRSENNLDNFLKERGIIGLYGIDTRALTRIIRENGVMNGKIKMSPPTDADIAEAKTYSIVNAVAAVSSRSVVKILPDKSQVKKRVALMDYGAKRGIAKALAARGCEVWSFPHDANAQEILKMKPDGIMLTNGPGDPAEPANNGIIETLRDLQKSNVIVFGICLGHQLLALANGYTTKKLKFGHRGANQPVKDMSTGRVYITSQNHGYAVVTDNGSFVNVNDGTCEGMDYGNSFSVQFHPEACGGPLDMSFLFDRFMERMEKCR

SEQ ID NO: 93662 - protein, 96 aa, Unknown
  Obtained from environmental sample
  misc_feature (1)..(96): Xaa is any amino acid
MGDVGSLSLGGVIAVISLITKKEILLLVIGGVFVIEIVSVILQVASFKLRKKRIFKMAPLHHHYELLGWSENRTVIRFWILGGLCAIIALSTLKIQ

SEQ ID NO: 93663 - protein, 87 aa, Unknown
  Obtained from environmental sample
  DOMAIN (4)...(50): SpoVT / AbrB like domain
  misc_feature (1)..(87): Xaa is any amino acid
MNLAKVSTNGQVTVPVEIRRKLNLKEGDKILFFERSEGEIVINNASATAIINAQKAFEGVAREFGADSEEDVQRLVDEVRYSEKNSQ

SEQ ID NO: 93664 - protein, 746 aa, Unknown
  Obtained from environmental sample
  DOMAIN (292)...(472): Type III restriction enzyme, res subunit
  misc_feature (1)..(746): Xaa is any amino acid
MLLRSINAPLTSIHGINPKTIKENVPKFARLGIRNVAGLLCHYPRDWEDRRFTVPIAEFRRAKVCTDVTVLAHDWIWFGGKRTPKIFIEDESGRAVLVGYNRTWLAKQMEVGGRYRVWGSFEYKYGEIRSSNFEFEDASKAENFNTMMPVYPLCAGLRQAMLRRFTANAIEQYAAMLENELPGEIIDRDKLLSKSAAIKAYHFPSSPEERELAKKTLIYEELFYLEVMVGKRALERRGTGNRTISNEQLTMSNELQNNLTEKNAHSSLAPTPYSLLPTSYSPLQQRLIERLPFSLTKGQQQAIAEINADMGNCTHSVVYNGAYSNLSMARLLQGDVGSGKTLVSFMAALRAADNGGQTALLAPTELLARQHAENAARLLEPLGMRIAFLTGNIKAAGRKDLLKHLEAGEIDIAVGTHALFSKDVDYKNLQLVIIDEQHRFGVTQRALIMAKGLNGAATGGPHLLMMSATPIPRTLAMTVFGDMDVSVISDMPPGRKPVITHLAKESNEQKVYEFVRDKLKSGSQAYFVYPLIESDDEKETGLKDAVFLKDAVSMEERLATEVFPGFKVALIHSKLDEDEKRQTMECFRKGEIKVLVATSVVEVGVDVPNANCMVIEHAERFGLSALHQLRGRVGRGQDQAYCFLVYSDKYTDDGKARLNVMLESTDGFVIAEEDLKLRGPGQIAGTEQSGYLNLGIANPIRDIDALTKAREDAFSILENDPGLVLDGHRIIARVMEEAPPFGEVAL

SEQ ID NO: 93665 - protein, 1285 aa, Unknown
  Obtained from environmental sample
  DOMAIN (965)...(1043): OB-fold nucleic acid binding domain
  misc_feature (1)..(1285): Xaa is any amino acid
MFGAMDFIAACGHKKRKRPLKPIVGCEVYVSPASRHEKKGSENENKYYHLVLLAYNRTGYFNLVKLCSLAYTEGFYYRPRIDEEILSKYHEGLIALSACASGEIPRYIQAGKIDEAEKKAIYYRDLFGKDSEGNPNFYLEIQDHGIPSGVLRGSDLSQKDINKAVAGISKKTGIPLVATNDVHYLNKDDYISHDVLLCIGTGKVRTEEKRKKYYGDQFYFKTGDEMAALFAEYPQAIENTVKIAQRCNADVPKIETKELPQYLPEFKIPEGFSEPNEYLRHLTAEGLEKRYAKIKENDFKKWEDIKKRADYELDTIISMGYTGYFLIVADFINYAKEQNIPVGPGRGSGAGSIVAYSLRITDIDPLKYGLIFERFLNPERISMPDFDIDFANEGREEVINYVTNKYGKERVAQIITFGTLGAKAVIKDVARVLGISISESEMITKLISFNPEITLSKAKEEEPRLRDMESDPRFTELFAIAGKLEGLNRHSSIHAAGIVIGKKPLMELVPLYQEREEKGGNIATQYSMNFLEECGLVKMDFLGLRNLDIIKYAQELIRKRGNKYLNFNIEDIPEDDKKTFKMLGEGKSNAVFQFASDGMQDILRQTKPTSIEDLTALNAMYRPGPMQFIPRFVECKNGKAPISYPDPSLEGILKETYGVIVYQEQVMEVARIIAGYSMGKADLLRRAMGKKKKEIIDEEKTPFLDGAAKQGYSAQKAGEIYDMLVPFAGYGFNKSHAAAYSVLAYQTAYLKANFPAEYMAATLIVEIKSADRLLYTIVETRKMGISVDPPNINYSNKLFTVVDGRIVYGFLGIKGVGDAPADEIVRSRQNGRYKSFMDFLNRVDIKAVSKKVIELLIHTGAFDDFKVSRETLAGNMEKAIEYAQKMKEDKQLGQSSLFGDSNESGMPDFKFTEFPPVSRAERLNLEKKLIGFYFSGHPLDEYRQLWEKAVKADLANHETIQPGNYILIGIIKNIKTIISKSGKMAYATLEDYNGEIELTFFSRAWEACEDKIQDDKVAILKGKIEYHRNKDKYGFIADSLIDVREAQAAIEEEKAFQKKREKFRNVWLYMADLKSGGLAKAEKGSYTVIGQLTSLREAHDRNGDDMAFGTLQDFEGNIELVFWAKTWKESRELLNTGEFVALKGSLDPERDRNPQNPSLKVSKVDDLAALKRSASRKSEAGEQPKIPPLETQAVKSENSPDTAQPAPPLNEIHILLESGAADRDETIQPLRNYLNGNQGPCPVFIHIGDKIIKTNKGLSLEAEKEALGVLEGCIGVAQSWKEQCK

SEQ ID NO: 93666 - protein, 429 aa, Unknown
  Obtained from environmental sample
  misc_feature (1)..(429): Xaa is any amino acid
MPTFYELFKKIKSVRSLFLQLLFVALAFILMILSSSLYVGQMLRNQINRDALDMLTQTRLKIEAELSVNKNTLAVISETIREMIIRGYNEQVILNYMREIVNEIYQKNNKIIFNDFSGYFYVFKGKYLSAFGREIPDDYNPTEQQWYKTAVSAGNKIAIMPTYLNPQTKEQSIDYICRIFDEKGDPLAALRMNMPFDFNKIFATDRHVTKNDYWIFMDENVNVFYYPKPDIIGKNAKEIKGGFSLFADEVQKGTDIFEREAINYKDELMIFFTSRLENGWILCFSIPKTEYYSKLHLMILMLIILGTILAAVLIIILIRVDKTKNKLDDENRHKNTLLATIEAEREADKITQLMLDAMPLCCMLWDENCNLISCNKEAIRLFQLSSKQEFLDRFYELSPEYQPNGRISKELADEYIKKTFDIGHLRFEW

SEQ ID NO: 93667 - protein, 651 aa, Unknown
  Obtained from environmental sample
  misc_feature (1)..(651): Xaa is any amino acid
CYAVYMDTTNGMSSLTLGGNGPTVTGILRPTGVGVRVEAGFTPGTKKYMVRPPYVSIGMTIVSNGSSFPSNFTAIPPYGLRVSGSDLVLTRIYDISVSKEDGTALTGAHTFPAVNYGFQASTPNNNLKVTNTGSEPTGNMTVSLSGANAGLFRTSSSLSSIGPGSSSALTLYASLPANPKLDAGTYTATLTVSGENIESKSVTVSLTVNPVNVDTAHSSSNDIKAIKGLTVPASGATPVTTITETTQYRGAVSWSPALASGGTFAGGVSYTATVTLTPKQNYTMQGVPADYFTVAGASSATNAINSGVITVVFPETFTYGIGLGQTTYTFTSAIVGYGNQQASNELAVNILNTGNTYPGPLEMDPSPLVMQWSGPFVPRFDYGTLPEGVAWRFYFYPRAGLGAGTHTQTITVFAKADNENAAAITPVSFTLSFTVSAATVNLAAVPGVTAPQTGATAVTTVGTNSQYSGTVSWSPALSDGKFASGTAYTAYITLTETSNYSLTGVNANFFTVAGATSVTNAANSGTITAVFPATTAYGISLSKSGTFAFPGAVVNYSTPPSAETITVTNTGNTATGNLNITLSGTNASSFTLSKSTINSLTANGSADTFTVVPKTGLAAGTYTAIVTVSEGNNITANFTVSFTVGQASYGM

SEQ ID NO: 93668 - protein, 289 aa, Unknown
  Obtained from environmental sample
  misc_feature (1)..(289): Xaa is any amino acid
ASTGSVTFTGGTVSMNSQGAYSAVYNASTGKITVEGTASIETQDSRGSTIAIDNRDSGTLDIKGGRIHVYGSGYAVWNRSTGTVNISGGTVSVEGSGEAVRNSSTGTVNMSGGTILLYGSSRPSSGMVYNASTGTVNISGGTIDSGTAAAVGIGSTGKVIVSGTAHLTSRNTSDGNARAAIHLFNNGTDTDDRLVIEGGTVRNTGPAVWNASPGSVSISGGTVSGGGGTNNGTVRNDSTGAINISGGTIQGQTAVYNRSTGTVNISGGTVSGNYDDTRISIASAVYNYS

SEQ ID NO: 93669 - protein, 259 aa, Unknown
  Obtained from environmental sample
  DOMAIN (153)...(230): Domain of unknown function (DUF303)
  misc_feature (1)..(259): Xaa is any amino acid
MERLTVSPVFSDGMILQHGVSVPVSGESMPMVQIALSFAGKTYKARADESGKWSVLLDCHSPGGPFSMKIASETDTILIEDIYFGDVWLCSGQSNMELPMRRVKDNFPEEWNKPNQLIRQFSVPQEWEFSGPRQGLSGGCWKIASADTLEEFSAAAWFFAGQIFKTCDYPIGIILAAWGGTPIEAWMSAGALAGFPEKIALGRQFADTAFSDSLIREKQTHIETWNKELAAADAGLAHAWQKPETDISAWDEIQLPGGF

SEQ ID NO: 93670 - protein, 55 aa, Unknown
  Obtained from environmental sample
  misc_feature (1)..(55): Xaa is any amino acid
MKALYDIGFDGPVRPDHGRTVWNEVCIPGYGLYDRAMGLCYLSGLLEALKKGTRD

SEQ ID NO: 93671 - protein, 730 aa, Unknown
  Obtained from environmental sample
  DOMAIN (1)...(157): Alpha-2-macroglobulin family N-terminal region
  misc_feature (1)..(730): Xaa is any amino acid
MDRNSYEPGQQAKILLKSPYKKALALAITEMPNGELSYKWVNVDNGQGTFTFEIKQEMAPRVPVSFLLMRPRSAAPRRASDGLSVDAGKPETVGNTTWLTVNPVANMLDIKLSHTSMVTPGSTLELTINLRDIQGKARPGEVALWLVDEAVLSLRKEHSLDPLEAFLKEVETHVSIADSRNLALGDLLSLENPGGDGEEEDEDGLGKITPRKNFKVVPYWNPSIVVDKNGTAVVKIQMSDDLTNYAIRAMAVSGPDRFGTAKSRVSVRLPVTIQPALPRFVRLGDKLRAGGIARVVEGGGGAATFMISAKGLSVKSSADKQIQLDAVKPMQLFSELAVETPPFTRRGVLQWNTVSVKMAVKRNSDNAGDAFEVKIPVLLDRQFIEETQFSQIDKRGSFSWNALSAPARPNTMAASLFVSENQYLPKIIAAVSNLVRFPYGCSEQVVSQSYPSVVYRGMWEKYGVESPDTSVTEGVNRAMAFLKTTQHSDGLFGYWPGTTGYVYLTAYVVDFLTEVNTANKTLEKPFPFDQNMYRSAIEALKRSLRSDYSRFVGGYSAYERSCALMALARSGHTDIGYTRELAAAANELDVSGKANVFKVVSEKENVLGKQYAALEDQLWKSAIFLDRKGKEAFGGFQKVGVPVGARMHVSDVAALASFVSAMSSSPKTKSNPRTQLLAQELANMGTDDGWGSTYANSLSLLALRDFIDSKEQGAAENTFKLKQGDGDSKV

SEQ ID NO: 93672 - protein, 423 aa, Unknown
  Obtained from environmental sample
  DOMAIN (155)...(386): E1-E2 ATPase
  misc_feature (1)..(423): Xaa is any amino acid
LRLSEIKEAITKAGYQALEVSKDAVDEDKLRKEKEIKVLRIKFIIAASLGLPLLYIAMAPMIPWFTLPFPKSLNPMNFPLIYGLVQLMLTIPIVIAGYRFYTVGFKNIFLRSPNMDSLIAVGTTAAVVYSVYNLVRIIRGTFTAVESLYFETSGIIIALILLGKLLEAISKGRTNEAIKKLMGLAPKTAVIVENGEEKEIPIDEVIPGDIIIVKPGAKIPVDGIVTEGQSAVDEAMLTGESMPVDKKPGDHVYGATINANGVIRFKAEKVGGDTALAQIIKLVEDAQSSKAPIAKIADVVCGYFVPIVCVIALAAGIAWFAASSAGLTTPPAGKTTLEFALTIFISVLVIACPCALGLATPTAIMVGTGKGAENGILIKGGEALEITHKIQTIVFDKTGTITEGKPEVTDIVGSREWGVGSRE

SEQ ID NO: 93673 - protein, 314 aa, Unknown
  Obtained from environmental sample
  DOMAIN (177)...(314): AIR synthase related protein, C-terminal domain
  misc_feature (1)..(314): Xaa is any amino acid
MENSFSESYKNAGVDVTAGYRAVELMKKHVNRTKIPGVIEEIGGFGGLFALPKLDYKEPVLVSGTDGVGTKIKIAMLVDKHDTVGIDCVAMCVNDIICAGAKPLFFLDYIALGKNIPEKVERIVAGVAEGCVQALCALVGGETAEHPGLMKEDEYDIAGFSVGIAEKSKIPDINSVKQGDVIIGLASSGVHSNAFSLTRKVFGIDEDKSVLEKHFNELGCTLAETLLTPTKIYVKPVLELLEKTQVRSLCHITGGGFYENIPRAFGKNVGAVIKKNAVNIPPIFNIIAAQGKIPERDMFNTYNMGIGMCAVFPL

SEQ ID NO: 93674 - protein, 846 aa, Unknown
  Obtained from environmental sample
  DOMAIN (401)...(537): ATPase family associated with various cellular activities (AAA)
  misc_feature (1)..(846): Xaa is any amino acid
MSDQIVPIDQLLPNKLPLVALMGRPIFPGIFTPIMIGNPVDVKVIDDAVAGDAMIGLVMLQNETETPAIGDLYKVGTAAKIVKKINLPDGGVNIFISTLKRFKVKKTLHASNPIVAAVEYLNEEEDDTSEVKALTRALISEMKQISENNPLFSEEMRLNMINIDHPGKIADFIASILNIDKAEMQKILEILNVRKRMEQVLVFIKKEQELLRIQKKIQKEINEKIEKSQRDYFLKEELKAIKGELGMTTDAKSSDYQRFKDIIEGFKFEGEIKETVEQELEKFNLMEPNSAEFVVTRNYLDLIVSLPWNDPEPENFSMKNAEAILEADHYGLEDVKNRITEYLAVRKLRTYNAGNASVAVPAPAGEAPAPAPGTEPAAPAPPAADKNSRRVSVDSPAGSIICLVGPPGVGKTSVGRSIARALGKQFFRFSVGGMRDEAEIKGHRRTYIGAMPGKIIQGLKIVKTKAPVFMIDEIDKMGASYQGDPASALFEVLDPEQNVAFRDHYLDMPFDISHIFFIVTANTLDTIPPPLLDRMEIIQLPGYIDTEKLEIARRYLVPKSLEKNGLKKNQVKYTKDSLLHIANSYAREAGVRNFEKNLDKIHRKLAKQIVEEREKADGTGVPDGTGVSGEDAAVAKPVIFPIDKKLIEKHLGKPIFPEGDIKKADRPGMSVGLAWTSMGGDTLVIEATSVPGKEGLTLTGKMGDTMKESAAIAMTVARKLAVERYRVAQDWFDFNHIHLHIPEGATPKDGPSAGITMATALLSLMRDKVVTERLVMTGELSLTGQVLPIGGLKEKTVAARRNKARHIIIPRQNERDLDEIPDHVKKGISFHPVERFEEVLALALPE

SEQ ID NO: 93675 - protein, 391 aa, Unknown
  Obtained from environmental sample
  misc_feature (1)..(391): Xaa is any amino acid
MIQTDYINIVKKIAIENGKEIFLEPKKLKAFLSDHTKNEYKEENALLLSVLNTDCIKYIDKAENLAECKQFILKRLNNEYGLVSAKSSEMLDMLFLVLRGKTVQPLGESRKSIARFQTCISIGYYAESSHIVGLKADGKVVAVGSNDYGQCDTRQWRNIIAVSAGSRVTAGLKSDGSLVIAGGSVAGSAQSSSRDITSFSIGSSHIVVLRKGGFVNALGDNDFGQCDIQGWRDIAAVFAGQFHTVGLKWDGTVAAVGHNDYGQCETQEWRDIVDISAGFAHTVGIKADGTVITAGSKGMAQCATQHWQDIVAVSAGLAHTVGLKVDGTVIVAGSNDFGQCNVQGWRNYIAIRAGMSNTAGLKADGTVVVCGDNKFGQCNTQSWRNIGLMPE

SEQ ID NO: 93676 - protein, 97 aa, Unknown
  Obtained from environmental sample
  DOMAIN (13)...(48): Sel1 repeat
  misc_feature (1)..(97): Xaa is any amino acid
VELFRKAADQGNAFGEDSLASSYEHGVGVKEDFAKALEWRIKAAEHGNIEAQMRLGFLYEEGKQGAEKNLVKAAKWYRKAAEQGNSEAMKRVKRLES

SEQ ID NO: 93677 - protein, 83 aa, Unknown
  Obtained from environmental sample
  misc_feature (1)..(83): Xaa is any amino acid
VKSELEQIPGIGKNMAQHLINAGYTTIASLKGQNPEEVYFKDCKFQNIQVDRCALYQYRLAVAYANGTITDPEKLKWCNWKDK

SEQ ID NO: 93678 - protein, 242 aa, Unknown
  Obtained from environmental sample
  DOMAIN (144)...(201): Bacterial regulatory proteins, luxR family
  misc_feature (1)..(242): Xaa is any amino acid
MPGGTLLISRAVNWFPQFKERLEAFGFPDVHVTAVEKDGLNMLIDELNPDYVLIDSNFYDCGTPYMVGQMLGVFPKLNIAVINTGTFPDAIAAWFVFHGVKFYVKWLDGKEEFHHGLQCFLEGKRYIAPDLQNILDGMEWPVIPLKATKRQKEILLMLCCGWAIKRIEDRLHVGKSTVESQITELMKIFNSRGRAELIMTVNKLEIFTKDELSFYDDGDDYSGTLPEWAITQKQINKIAGNR

SEQ ID NO: 93679 - protein, 89 aa, Unknown
  Obtained from environmental sample
  misc_feature (1)..(89): Xaa is any amino acid
KRIFFGEIRSGEVANELLEAWNTGHPGNVTTIHADSAASTIPRIEGLLRQVIKGQLPDLAESINLIVHLKNKTVVEALTIREIREGKNM

SEQ ID NO: 93680 - protein, 299 aa, Unknown
  Obtained from environmental sample
  DOMAIN (5)...(276): Putative transposase, YhgA-like
  misc_feature (1)..(299): Xaa is any amino acid
MGANTKYKDSVFSLLFSDPDLLRELYCALEGVSLPADIPVTINTLRDALFMGMINDISFEIGGKLIILIEHQSTINPNMALRLLMYIARVYEKLIGDRNIYSSRLIHIPRPEFYVLYNGVTPYPDRETLKLSDMFEKAGAFGLPEKGSAALELEVNVININEGKNEVIAKKCKTLAGYSAFVAKVRAFEKEIGDKTEAMKQAVRYCRDHDILKEFLEQNGTEVMNMLINEWNIEDAKKVWYEDGLSQGLEKGLEKGREEGREEESFSIAQNLVKLGLPIETIISATQLDPDKVKALYQQ

SEQ ID NO: 93681 - protein, 56 aa, Unknown
  Obtained from environmental sample
  misc_feature (1)..(56): Xaa is any amino acid
LPEAIHLIQGTVVAYIKNLFDRNFLEYASYVIKDRAIPDLEDGLKPVQRRIMHTSL

SEQ ID NO: 93682 - protein, 209 aa, Unknown
  Obtained from environmental sample
  DOMAIN (12)...(203): DNA gyrase/topoisomerase IV, subunit A
  misc_feature (1)..(209): Xaa is any amino acid
LKTALSPYSGVSCTPLFEKDDGKFHKVANVVGECMKFHPHGEASIYPALVVLANKELFIERQGNFGNLYTGDEASAPRYIECRVTPLAKDVFYNPKLTQWAESYDGRNREPVLFPAKIPVVLIMGVEGIAVGMSTKILPHNAVEVLEAELPALPGKSLIFIPIFRQAAMLTFPNITAETAKFWCAQNWTLPIQSASLLRSFRSAQPPKA

SEQ ID NO: 93683 - protein, 393 aa, Unknown
  Obtained from environmental sample
  misc_feature (1)..(393): Xaa is any amino acid
RPGYKFEGWFNAASGGTKIESSTKVTNSANHTLYAHWTVINVTVAFNINGGKAPSPLNKIIAFDSTYGSLPTATRDGYKFDGWYTAASGGTKVESSTKVSNAGNHTLYAHWTAASGITVSFDAKGGTPSPASKAVTFGSNYSLPSVSRPGYKFDGWFTAASGGTKVEGSTKVSNTANHTLYARWTANSITVAFNANGGVAPSPANKAVTFDSTYGTLPNVTRAGYKFDGWYTAATGGTKVEGATKVSSTGNHTLYARWTGNTVTVTFHRNGATCDAIPQITATYNSKITLPAPPTRPEYTFEGWNTKADGSGTAFTAGTPVTADIGVYAKWKAVPKKIVAVTFNANGGSAPNPARKEVTAGSACGSLPAATTRAGYAFDGWNTKADGSGTAFN

SEQ ID NO: 93684 - protein, 237 aa, Unknown
  Obtained from environmental sample
  DOMAIN (166)...(232): Double-stranded RNA binding motif
  misc_feature (1)..(237): Xaa is any amino acid
LAAFLKAAGIRFKSLALLNLSFIHRSVSNETTSVPRVQHCAAGALNNERLEFLGDSILGAACATLLYEKYPGKNEGELAKIKSVVVCEDVLSVVARFLQIDTMLLLGKGEELTGGREKKAILADTLEALIGAIYLDSGYTTAFDFVSRYFIPEIDRITEKDYHRDYKSLVQEICQHNYGSYPQYRLIKRSGPDHERVYWIEVSVGGVVYGPGTGRNKKSAEQEAARMAYQAVAGTRG

SEQ ID NO: 93685 - protein, 78 aa, Unknown
  Obtained from environmental sample
  DOMAIN (6)...(73): Phosphopantetheine attachment site
  misc_feature (1)..(78): Xaa is any amino acid
MDELFEKMKKLIAEKLDVPEEKITLEASFRQDLGADSLDTYELVYAIEEEMGVSIPDEKANEFNTVKDAYDFIKEQQK

SEQ ID NO: 93686 - protein, 182 aa, Unknown
  Obtained from environmental sample
  DOMAIN (4)...(133): Cytidylyltransferase
  misc_feature (1)..(182): Xaa is any amino acid
MKAAFPGSFDPPTLGHLDIIQRAAGLFDELLVVVAVNKQKKYLFSAAERIEMIRQLTKDFGNVSVTSCDSLIVNFLRKQDIRLLIRGIRGMEDFSYEFELSMMNKAIDSSIETIFMTTDPEYLILRSSSIKELASFGGDVSGMVPPPVADALRKKLPEKDEPQPSPSTGVEPEVRGSPLDKK

SEQ ID NO: 93687 - protein, 376 aa, Unknown
  Obtained from environmental sample
  DOMAIN (122)...(187): His Kinase A (phosphoacceptor) domain
  misc_feature (1)..(376): Xaa is any amino acid
MDSNPAAAAAFPGFLFDAGQSTLKKFFNYLREQNAECIPEDLFIPLKTGNKEHSGDLILNGKNGKMITYMVTIKPIMIRKKPTSYIIIMSDVSVYHSMISEINEQNTRLAELRKEAEAASKAKSIFLANMSHEIRTPLNAVIGMALIARKNAENTKTLSAIQEIENASVHLLGLLNNVLDISKIESGKFELVNEAFSLKAAIDEVVKLISLRCAEKNIILDTNFENLDNYSVMGDKLRLNQILLNLLGNAVKFSAVNGVIVFYINVQEENKDTVKIQFKITDNGIGISEEQQGKLFQSFSQADSGIFKLYGGTGLGLSISRNLAEMMGGHITVKSRIGEGSTFEFTLSLSMAEKKKDSAAGEIMLDLRGKRILIVE

SEQ ID NO: 93688 - protein, 214 aa, Unknown
  Obtained from environmental sample
  DOMAIN (1)...(211): Peptidase family M48
  misc_feature (1)..(214): Xaa is any amino acid
MVEELARNAGVPKPKICAIPEAAPNAFATGRDPEHGVVAVTEGIMRLLSPEELRGVLAHEMGHIANRDILIQTVAGVMASAIVSIANMMQFMAFFGGNRNNEGGGSGNIAVALLTAILAPIAASLIQMAISRSREYLADDTGAALCGQPLALAGALAKLQNANQRVPMQTGSPATSSMFIVTPFSAKTVAGLFSTHPPIEERIARLQALARHER

SEQ ID NO: 93689 - protein, 362 aa, Unknown
  Obtained from environmental sample
  DOMAIN (10)...(353): Chorismate synthase
  misc_feature (1)..(362): Xaa is any amino acid
MSGNTFGELFRVTTFGESHGQVAGCVIDGCPAGLELSVNDIEKELARRRPGKPYGSRDENDTPEILSGVFEGKTLGSPIAIIVRNTNQNSRDYDELKDIYRPGHADFTWEAKYGLRDHRGGGRSSGRETLCRVAAGAAAKKFLALHGISVLAWSSSIAGINQPSPGEDGFDFEEIERNPFRVPSKQGAEKAAAKLEELRAEGESSGGVITCLATGIKPGLGEPVFDKLDARLAAAVISIGACKGVEFGAGFAAANMKGSENNDIPCHDGNGKFATNNCGGILGGISSGQDIFFKAAFKPTPSISKPQKVLDRDGGVKEIAIKGRHDVCIVPRAVVVVEAMTALVLADFLLLSRCAKISHKEH

SEQ ID NO: 93690 - protein, 1012 aa, Unknown
  Obtained from environmental sample
  DOMAIN (546)...(833): FAD dependent oxidoreductase
  misc_feature (1)..(1012): Xaa is any amino acid
MSEIMRPIPFPELIHWVKSEYNNHGSVFGIRKEKFFRSVNPNVIEMFGTKIRSPIGPAAGPNSQLAQNILAAFLAGARFMELKTVQTMDGEELRKCVARPCINAVDEGYNVEWSTELTVPEAREEYIKAWFLCHIFAKEFEIDDTANVIFNMSVGYSYEGIKSEKIDSYIEGMRNAKSTETWKRCYDYIAANINLFKRFTKTDLDAVSPVVSNSITLSTLHGCPKEEIEKIAAYLIVQKGLHTYIKCNPTLLGYETARSLLDEMGYGYISFDDHHFKNDLQFNDAVDMLKRLQAQANERKLGFGVKITNTFPVEIRRKELPGNEMYMSGRSLFPLSINVAKKLSQAFNGGLAISYSGGADCFNLKEILETGIRPVTVATTILKPGGYERLLQLAELAAETVSDISVAAPINVNALNALTESLPKKSRYRKEYRQIGLRKTESALPLFDCAKAPCMDGGCPIHQRIPEYLAAVAAGNYDEAFRIIAVDNTAVSITGTICDHQCQYRCTRQDYEDPLQVRKAKLIAADKAQAAFTSSLQSPKTKTDKSAAVIGAGPAGIAAAVFLRRNGVPVTVYEKRDKAFGIVRYVIPSFRIPEEAINRDFLTAEKLGVEFLFNQAEDYSITELQKKHNFVVIATGAWKTGSAVVKQGQEKIIDALRFLEDSKKTNCGLDLGKRVAVIGGGDVAMDCARAAKRNKGVESVTIVYRRTREFMPSQYEEQELAIADGVEIKELLAPEIWVNGILSCEVMRLGDYDSSGRRGIEGTGKKERLSFDTVIGAVGARVDTEAFTRNNIKLNAKGFPEVNSSRESSVPNVYIAGDCKQGAATVVRAIADAKAAAADILQKLKLEADFSVKPSCSVVDDISDLYYKKGVISELKQDNTDAYRCLSCNSLCEVCVDVCPNRANVMVELPPNNGLGIHQILHIDRMCNECGNCAIFCPHAGKPYKDKLTVFCREEDFTESENAGFLKTGADTFKIRLEDKSVLAYRRGENTIPKQWIALIDVVLSKYEYLLA

SEQ ID NO: 93691 - protein, 214 aa, Unknown
  Obtained from environmental sample
  DOMAIN (1)...(214): Fructose-bisphosphate aldolase class-II
  misc_feature (1)..(214): Xaa is any amino acid
NCPTMRCGFTRKVVDFAHSQKDYVTVEGELGELAGVEDDQASEHSHYTQPSEVIDFTEKTKVDSLAISIGTSHGRMKFKPEQCTRTADGVLIPPPLRFDILEEIEKKLPGFPIVLHGSSSVPIEYVKMIEKYGGKLADSVGIPEDQLRRAAKSAVCKINIDSDGRLAMTAIIRKILVEKPEEFDPRNILGPARDELKKLYMHKNQNVLGSAGQA

SEQ ID NO: 93692 - protein, 171 aa, Unknown
  Obtained from environmental sample
  misc_feature (1)..(171): Xaa is any amino acid
MAFLTVCLNPTLQKTLRFSSIYPGTVNRTGDYRLDASGKGINVTRVLTQLGKKALHLTQLGGVMSPLFLSLCEQDGLSVQWVESGSQIRFCYTLLSGEDGTLPGGSAVTELIEESEAVHAGTEERLLEKFDDVLARNTDLAWLVISGTKAAGFSDRGYSLHDAEGEREGAE

SEQ ID NO: 93693 - protein, 215 aa, Unknown
  Obtained from environmental sample
  DOMAIN (99)...(213): NUDIX domain
  misc_feature (1)..(215): Xaa is any amino acid
LYALFVSASERSTQRMSAAETKEKKSTARAAVPAVHSAGSLAVSTQHIFIYFIIAEIHCLWHNRITMFTFCPECASKNITFKNGNSFHCPDCGFVYYHNTAAATGCVIDADGRLLFLVRGKEPSPGKLDLPGGFVDPGEGALEGLYREIKEELGWSPPIPQGTPLARVFTFFASFHNRYPYKNIIYNTCDMYFYLSTPGLRESDLVLEKAEIAAV

SEQ ID NO: 93694 - protein, 212 aa, Unknown
  Obtained from environmental sample
  DOMAIN (67)...(135): Sigma-70 region 2
  misc_feature (1)..(212): Xaa is any amino acid
MGASELAVTWVMSVLMPMATSTGNSRTKLQFPQSNIRGGRRSVKGDETPEYLAGRASRGDEDSFAALCGVLKTKLFRTAKGVLGNETLALDAVSEAVFRAYKGIKRLREPKYAETWFIRIVLNVAKDIKRRQKHEIVMGTVPEGAHYDNYGDMEFFALIESLQKELREIVSLKYYSGYMLSEISAILNIPEGTVKSRLNRALNLLRLEVSNE

SEQ ID NO: 93695 - protein, 404 aa, Unknown
  Obtained from environmental sample
  DOMAIN (54)...(170): Vault protein inter-alpha-trypsin
  misc_feature (1)..(404): Xaa is any amino acid
MKSSKIPLIIIASLIALSCSPTKPKDAVPSVLSVTNSAANVAPLVLKVFGKKKSVVYLQSLDIQVEVTGNIASTRYTMVFKNRTDQILEGELTFPLPDGCTVTYYALDINGKMREAVPVEKEKATEVFEEIEHRQVDPGLLERVVGNNFRTRIYPIPAGGTRTISIGYEEELQLENNLLHYSLPMAYPDTLEKFAVKATVWKSSQKPLVPESEEELRFDMAGENYVASFARENYKPSRSLIFALPAPMDIPRVIMQHVQGNNYFFASVASKMETRKKQWGSNLAIIWDVSLSGSQRNLQREIEMLDIIFSEKKNAKIHLYFLNNTFKKIAKGNWSEMKSILEKAVYDGGTDFSKINLKEIEGDEILFFSDGISTLSDADFLKNDKAKYPVHCVVSSSKSDYGAM

SEQ ID NO: 93696 - protein, 144 aa, Unknown
  Obtained from environmental sample
  misc_feature (1)..(144): Xaa is any amino acid
MNKTAGRLFGITENIEKGVCFAAFALMAMLPFFDVILRPLNVIIPYSRLYLIRLFLVSGLFAAMLTTKAKDHISIAIINYAKSEKLKKILSCISGLLSAFIAANLFWDSISFLAYSFSGRSTGAIPDWLFALAMPIAYGVIAVR

SEQ ID NO: 93697 - protein, 207 aa, Unknown
  Obtained from environmental sample
  DOMAIN (3)...(104): Semialdehyde dehydrogenase, NAD binding domain
  misc_feature (1)..(207): Xaa is any amino acid
MKKVFVDGQEGTTGLQIREKLLTRKDIELLEIEPELRKDTKRRAEFLNAADIAFLCLPDDAAKESVALVQNPNTIVIDTSTAHRTNDAWAYGLPELSPSHEAAIQKSKRIANPGCHATGFLLAVYPLVAKGIIKTDENLSCYSVTGYSGGGKKMIAEYKENFDPSVKPYALGLSHKHLPEMQKIAGLKNPPLFNPILGPYYQGMAVT

SEQ ID NO: 93698 - protein, 64 aa, Unknown
  Obtained from environmental sample
  misc_feature (1)..(64): Xaa is any amino acid
MYNTAAILNEGMACLVEKLGVIETEIFIAHIIREPFDYTEWQRKHYENFSVAELNKQAVEYARE

SEQ ID NO: 93699 - protein, 225 aa, Unknown
  Obtained from environmental sample
  DOMAIN (86)...(221): GGDEF domain
  misc_feature (1)..(225): Xaa is any amino acid
MNLSYVLNTFTGPALIIAIIFAECMVKFSSNNKLRKAFCVILTAVFILLTADFAYLFNKNADNFTKYRIIWPIIAASLLFIYLFVILKENKTDYLTGLDNRYSFFEFVHKFTRNKNGKSLIIAMIDIFNFKSINEAYGNLEGDNALRNTAQIIKSCGRKSDFAARYGGDEFVLAVKTEIGIDDLLDKIIEELKNYNEKNGKPYDIKIIYGVDTYFSERHRRIDDF

SEQ ID NO: 93700 - protein, 126 aa, Unknown
  Obtained from environmental sample
  misc_feature (1)..(126): Xaa is any amino acid
MEIKRAIEFGDNIREKLGEIYVNAFYDEVLNYFSKDKAKLKKVFACGFLPEYFYVAIMDNEIVGMIACMGKDEFCIKLELKTIVKYLGIFRGLIINFWFKQFLKGFPKLDEKTALFECLAVDTKHL

SEQ ID NO: 93701 - protein, 202 aa, Unknown
  Obtained from environmental sample
  DOMAIN (1)...(200): NADH dehydrogenase
  misc_feature (1)..(202): Xaa is any amino acid
EGESELVAGFHTEFSGMRFAMFYMGEYAHIAINSALLATLFLGGYSIPFVSTDVLKAYGAQALAIVCGVFVFGILVFLSLMRRYAKWYEKSKASDRAVRLKEWALYKVLGWLSVPALLAIGVASIYFANIINAESLAAALIAAAIQILVLLLKMSFFCWLWIWFRWTLPRFRYDQVMHLGWIILLNVALANLVITAIVVKLI

SEQ ID NO: 93702 - protein, 202 aa, Unknown
  Obtained from environmental sample
  DOMAIN (23)...(174): Anthranilate synthase component I, N terminal region
  misc_feature (1)..(202): Xaa is any amino acid
MFKPSLEEAKRIALMGKYDIIPLSTEMYADMVTPVDVIKKLKNVSGHCFMLESAEDTKNWGRYTFLGFDPTMEITCLNGEMNISSSDSGETKSFKTDNPNKYIQEILDSHKSVKFEFLPPFTGGLVGYFAYDYAKYCEPSLKLDAVDEERFNDVDLMLFDKVIAFDNYRQKIILIANIKAANIESEYEKGKLQLESLKNLIK

SEQ ID NO: 93703 - protein, 318 aa, Unknown
  Obtained from environmental sample
  DOMAIN (62)...(313): DAHP synthetase I family
  misc_feature (1)..(318): Xaa is any amino acid
GWEQKGFSTIYSVGTEHTAVCLIGNTAQVDLDHVVNTSDIVDYGKRITEQYKAVNRNVHEDNTIVHVGGVSIGEGYFTVISGPCSVESKEQITEIAHSVKKSGSKILRGGAFKPRTSPYAFQGKQAEGLDLLRIAKQETGLPIVSEIMNQTQIDLFNDVDIMQIGARNMQNFDLLKEVGRLKKPVLLKRGLANTIEELLMSAEYIVSAGNTQVILCERGIRTFETMTRNTLDLSAVALLKQKSHLPVIVDPSHASGIRSLVPPLSKAAMAAGADGLMIEAHNDPAKALCDGAQSLDLEQFHSLMVELKRRSEIENKIF

SEQ ID NO: 93704 - protein, 605 aa, Unknown
  Obtained from environmental sample
  DOMAIN (3)...(605): AcrB/AcrD/AcrF family
  misc_feature (1)..(605): Xaa is any amino acid
MSMVKTVVSRPTTFLIIFALLIGLGFFAMVNLPIDLYPEINPPIMAVFTTYTGAGPEEVERSVTRPLEAVLSSASGLEKLTSISSKGSSIVILNFTYGTDMSDAANSIRDLLERIRNYMPTGAQTPMIFKFDPSMIPIMGLMVTSDKRTPEELREISEDTIVPRIEQTPGVATASVNGGREKIIRVEIPQSRLEAYGLTITQISQMLAVQNIQTAAGTITEGGLSYILTTMGEYRSLEEIRNTVISYKGGGYSGGQVEMPRQIYLRDLANVFEGYRDETSLVYVNGQSAVMLMVQKQSGKNSVQTAKDLRARLLTISKQLPPDIKITEVFNTTDMVQNSLNQVTSSAFSGALLAVLILFIFLRSIKPTLIIGISIPVSVIITMMIMYFFHLTLNLMTMAGLVLGIGMLVDNSIVILENIYHYREKGAKLKTAAVIGSSEMIVAITASTITTICVFAPLVMFQGLLEMAGELFAGLAFTVVISLGISLFTAVFLVPILASHYLPLVTRKQKPLTGMMAGIDAKFERFFKWLETKYRNAVRKVLKHKWIVIGFLFILFVISMALVPKIGWEFMPQQEEDNVNISATLPMGTPLAETEAVLKQLSYEK

SEQ ID NO: 93705 - protein, 1074 aa, Unknown
  Obtained from environmental sample
  DOMAIN (3)...(1037): AcrB/AcrD/AcrF family
  misc_feature (1)..(1074): Xaa is any amino acid
MGMVNTVVSRPTTFFIIFALLIGLGFFALVNLPIDLYPEISPPILVVYTSYTGAGPEEVERSVSRPLEAVLTGVSNLEKITSTSSKGASMVIMEFTYGTNMADASNSIRDALERIRNYMPTGADTPMIFKFDPAMIPIMGLTVTSNRRTPEELRELAEDTIVPRIEQTPGVATASVNGGREKIVRVEIPQNRLEAYGLTITQIQQVLAAQNMQTAAGTITEGGLSYILTTMGEYRSLDEIRNTVISYKGGGYSGGQVEMPKQIYLRDIANVFDGYKDETSLVYVNGRAAVMLSVQKQSGKNSVQTAKDLRARLARMVKELPPDIKITEIFNTTDMVQNSLNQVTSSAFSGAMLAVLILFIFLRSIKPTLIIGISIPVSVIITMMTMYFAGLTLNLMTMAGLVLGIGMLVDNSIVILENIYHYREKGAKLKTAAVIGSSEMIVAITASTITTICVFAPLVMFQGLLEMAGELFAGLAFTVVISLGISLFTAVFLVPILSSHYLPLVTRKQKPLTGRFAEIDAKFEKFFIWLENKYRNAVRKVLKHKFIVIGFLSLLLIVSIILIPIIGWEFMPQQEEDNVNISATLPMGTPLAETEAVLKQLELIVKKEVNSYERIVLSAGGGGMMGMGGNNSNTGSLRINLKKYSERTETANQIKENLRPYFNQFPGVIFSFGGGMRGGMMGGGNAVDIVLRTDNLAKGKVIGERISALLKERLSDYVTEPQVDLKDGLPQYEIILDREKMYALGLNTSTVGNEIKAAVDGIRATRYKSSGKDYDVILILTEADRNTLPSLDKIFINSQMSGRVPLSSFVHYEQGTGPLTINRENQSRVIHVTAGARPGVKTNLIQELVEDIIRSEIPIEDDLIIEYAGANADMIKLFGRFVLICVVAVFLVFGVMASLFESFKDPFIIVLTIPLSMIGIVAIYLITNTIFNVLTAVGLLVLLGVIVNNGIVLVDYTNLLRKRGYGLIDACIEAAGNRLRPILMTTLTTVLGLLPMAFFPGEGTELVAPIGKTVLGGLSFGTLMTLFLMPVIYAVMNKNSDRRAALAQERRDKIAAGERRAKTKISAHVDKEGL

SEQ ID NO: 93706 - protein, 90 aa, Unknown
  Obtained from environmental sample
  misc_feature (1)..(90): Xaa is any amino acid
MIRAEIIANRSVEENILEALAKEGVAKFYTKIPNVLGVGDCGPRMGDAVWPEENFALIVWCEKDEAEGIERAIKKVKEKFPGEGIKLFGV

SEQ ID NO: 93707 - protein, 609 aa, Unknown
  Obtained from environmental sample
  DOMAIN (2)...(198): Glutamine amidotransferases class-II
  misc_feature (1)..(609): Xaa is any amino acid
MCGIFGYVGDQDAVPIIVEGLKKLEYRGYDSAGIAVYGEHGLGVVKQKGRLAALEARLSEQPFAGPPLAGRIGIGHTRWATHGEPSDVNSHPHVGSKNKIAVVHNGIIENYKEIKERLKHRKIKFASQTDSEAIAQLAEHYYNGDLLDTVIHVSNALEGSYALGVLCADEPDILVAIKKDNPLIIGVSDHGHFIASDVPAVLKHTNKVYYLNDKEIAVIRSHSVQFFNFDKEPVEKRVETITWNIDSAEKGGYPHFMLKEIMEQPKILRDTINSTVKSGTYKNIFDNLDVTRFTKIVISACGSAYNAGVVARYVFEKLCRFPSIEVELASEFRYKDAVIGEKTLVILISQSGETADTIAAMREAKRKGAVTLSIVNVVGSTIAKESDFCMFTAAGPEIAVATTKAFSAQLVLLYILAIWFAAKSGKLSREAELELLAEIDALPEKTERLLKQIDAIQMYASTCIGYKSIFFIGRNIDYAIALEGSLKLKEISYIHSEAYAGGELKHGTISLVEQDTLVVAISNCAPLYGKIMSNAEQVISRGAKVLLIGNCPNAKPDDKLFHIALPESLDLFSPSLSVIVLQLFSYYVAANKGLDIDKPRNLAKSVTVE

SEQ ID NO: 93708 - protein, 128 aa, Unknown
  Obtained from environmental sample
  misc_feature (1)..(128): Xaa is any amino acid
GNEYSVKELKRKLTKLKKQSKSLKGVTFRGGDPFLQAVDFADLAQAVRKTGWDVVTYTGYTYEELISLVKDGDAGAEALLAATDILIDGKYVHAQYSADLQFRGSSNQRIIDVAKTREKGQVVLWRKR

SEQ ID NO: 93709 - protein, 367 aa, Unknown
  Obtained from environmental sample
  misc_feature (1)..(367): Xaa is any amino acid
LSELVDEEKIKALVYSLSKEETFQAMEGFIYNLNTMHSRAGAQVPFSSINLGTDTSDAGRMVTECFLLAYEKGLGRGESPLFPNVCFKLKEDVNFEEGDPNYDLFQLSMRVACKRLFPAYSFQDSSFNKPYRDEEVAYMGCRTRVMSNCNGAEVTNSRGNLSFTTINLPRLGIRAEKDLALFWKLLDEVIDLTVEQLITRYNVQKALKVRDFPFLMGQKLYLDSEELSANDTIEKAIRHGTLSIGFIGLAECLTALIGRHHGEGADAQALGIAIVSHMRRRCDEATKKHKLNFSLLATPAEQLSGKFTKLDVNQYGVIHRGDGQGMVHKFISCPCRVSNYRSGKNRERRRLSQILQNGAYFLRELPP

SEQ ID NO: 93710 - protein, 97 aa, Unknown
  Obtained from environmental sample
  misc_feature (1)..(97): Xaa is any amino acid
CSNLTSVTIGNSVTYISSEAFAGCTKLASITIPKSVTEIGSKAFGGCTSLTSVTFQGTIIADNLNSAFDGDLRNKYLAGGVGTYTRPNGTSNTWTKQ

SEQ ID NO: 93711 - protein, 340 aa, Unknown
  Obtained from environmental sample
  misc_feature (1)..(340): Xaa is any amino acid
MERGKLGTLVDCLSAAADKLPARPDYSASKYTNRDAVNSAFAAFFFQFPSLLRYMREMQEREKRDNVQSLFDVKGIPSDNQIRNIVDETAPEAISPVFNETLKTAGQSGVINEYRVLEGGVLLAIDGVWYFSSEKIHCPHCLTKKTEKKGEEQTEYYHAAVAGAVVKPGCHKVLPVAAEIIRNSEGEKKQDCELAAGKRWLEAHGAEYAWLKPTLLGDDLYSNRPFCEEIVQKGWSFIFTCKEESHKWLMETVTNSFLPEVKEEKWDPRKKKRVTYTWEYLNGVAIRYDERDPFMVNYFSMEIKAAGAKKASYFNSWITNKPITDKNVAYLAECGRTRGR

SEQ ID NO: 93712 - protein, 474 aa, Unknown
  Obtained from environmental sample
  DOMAIN (44)...(187): GAF domain
  misc_feature (1)..(474): Xaa is any amino acid
MNHNTETNNLNEAVGITKALEDSKKMLEMLNKAAITFVSQSEESFEKRIEGGVRAICDMAGLDRFCIFRNSSKPDCLHVSQIYRWDRETGGTIEIDPVLVDVTYAKFAPRWEAILASNEIVNGPIKAMPESAMLQSFGLVSALVVPLFIKNAFWGFALFEDRHNERYFDKEQVEIMCSAAFLCANVFIQRQTEIEIDRTSKKLESSKKMLEMLNKAAITFVSQSEGSFEKRIEEGVRSICDMAKLDRFSVFRNFNMPDGLHSSQIYRWDREAGGTTEIAQAVLKDVLYSKFAPKWEKILANNEVINGPSRLVPEPEVLKSFGVVSALIVPLFIKNTFWGIVLFEDRRNERYFDEEQVEMMRSAAFLCVNTLIQRQMELDVEESNELNNSMLDAVPAAIVVLDEDGNVLNCNESATKMFECTKQQFIENFFNFSPEYQPDGSKSKEKARELAKYIFSECTNLLFEWIHTSYLGKI

SEQ ID NO: 93713 - protein, 465 aa, Unknown
  Obtained from environmental sample
  DOMAIN (282)...(464): AMMECR1
  misc_feature (1)..(465): Xaa is any amino acid
MSVDEKIRKAAVAGRFYPASPKELRGDVEKYLSAAAPTAASTPTDVSIMIAPHAGYVFSAAVAASVYARASRAARTVILIGPSHHKRFNGVHVTDARYYETPLGKVEVNQEINAKLAKQPLCLRAPGAEDSEHCLEVQLPFLQVLLGDGKFTIVPLITGNVGAKAVAEMLLPFIDDTTMVVASSDLSHYQPQREARDIDDATISTVISGNADGFMEACGDTAIRVVMEIAAKRGLAAELIDARTSYETAPEYGDSHRVVGYAAIAFVKSGGADGGAENFSRQEKDYMLKLARETLTSAVRDGTQSPPPKPKPELRKLTQNYGCFVTLNSHGQLRGCIGNIEPIKPLYKGIADNAINAAFHDPRFPRVKAAELEDIKIEVSVLTRPAPLGAKSADEILKKLVPFEHGVILKMGSRQSTFLPQVWEQLPDKIGFLEHLSMKAGAGRDDWKRADVWVYRAVHFAEGGE

SEQ ID NO: 93714 - protein, 63 aa, Unknown
  Obtained from environmental sample
  misc_feature (1)..(63): Xaa is any amino acid
IKTEREFWIPKIERPIERDKEVSKYLRKEGWKVIRFWGKEITENTVKCADITEKIIIKRRYSK

SEQ ID NO: 93715 - protein, 216 aa, Unknown
  Obtained from environmental sample
  DOMAIN (22)...(211): Glucose inhibited division protein
  misc_feature (1)..(216): Xaa is any amino acid
MSEALLKEGLGKLGLQGSENRILPLLERYVEEIELFNPAYGLVKVKDREELIVKHILDSLAPLNVIRNFIQGRASFRVADVGSGAGLPGIPLAICIPNAAFTLVERMGRRAGFLRDAVAVLGLPNVTIEEAEMEKIAPAAEDLFDLIVFRAFRPLDSAILKGLFAILKPTGFLAAYKGRKQAIEEEMGGLNVSWEVVSLEVPFLAEERHLVLIKQL

SEQ ID NO: 93716 - protein, 306 aa, Unknown
  Obtained from environmental sample
  misc_feature (1)..(306): Xaa is any amino acid
LITAEYFYNKLTEKGVGFFSGVPDSLLKDFCAYITDHTDKQNHIIAVNEGAAVGLACGYHLATERIPLVYMQNSGIGNAINPLLSLADNEVYRIPLVLVIGWRGEPGVHDEPQHVKQGKVTCSLLESMGIPYAVLKKNEDDMNSQIEACFNTIAETNAPYALVICKDTFAPYSLQKKEEHDVIMTREEAIEEIAANRDGIIVSTTGMISRELYELRDKAGTGHARDFLTVGSMGHASSIALSIALQKQQLRVTCLDGDGAALMHMGSFAAIGTLKPRNLCHIVLNNGSHDSVGGQPTIAPFIDIPA

SEQ ID NO: 93717 - protein, 283 aa, Unknown
  Obtained from environmental sample
  misc_feature (1)..(283): Xaa is any amino acid
MNKKKILINGDFLCRRLTGIERYAYEITRRLDKLCKKNEIAIVIPSHAENIPAYKNLEIISLEKKGGFNIRWQMLTLQWFLLTHRKYIVLEFGNCCLPLAHGIVFLHDIYCEFFPEDFVSKRDKLIRLYSRIQYRFIAYLAKKIATVSEYSKKEISETFNINPSKIDVIYSSADHIRNIEPDFSIFEQFPMLKEKQFFFSLGSLSKRKNIKWIIEYAKKHPESTFAISGTSLSTVKVNELDDEIPNNIIMLGYLDDSEVKALMTRCQAFVLPSYYEGFGLTPL

SEQ ID NO: 93718 - protein, 438 aa, Unknown
  Obtained from environmental sample
  misc_feature (1)..(438): Xaa is any amino acid
MKMERAVYSELLAWKASKNRKPLILYGARQVGKTWLLREFGKNEYKTAIYINFDKDPDVQKYFTGNISPNYIIAGLEDYSRKKIVPEETLIIFDEIQENQRAKDCLKYFNEDAPQYHIAAAGSFLGIAGGKFPIGQVDEITIRPMSFYEFLQAKGDDILLNNIKSLDRSLFDLSSITAGPRLKEYMYVGGMPAVVKAFIESGNLHETRKEQEQILNNYKEDFSKHIKGTDMPKVRMIWDSIPLHLSKEKKKFMYKEIKTGARAAAYENALDWLINTGLVYKVNRTNEAKLPIAAYADRDAFKIYMLDTGLLSAASGLDITTFYNPDPLVFKEFKGAITEQFVLQELKTLGNIPISYWGRDEGKSEVDFVVQWRNEIVPIEVKSGIRKKTKSLDIYCGLYHPAHAVRTSLKGFGISDGLYSIPLYMIASFADMLADEKK

SEQ ID NO: 93719 - protein, 352 aa, Unknown
  Obtained from environmental sample
  misc_feature (1)..(352): Xaa is any amino acid
MVKNIQLTPVLCAATGAAAGFYLFGRLSFAPLFVIAFVLLAALCFFRVFVSVRNFPHAGFKLVPLYSAALAAGFMLGLCAASAGRNVVKFALPLEKITAVEGVLLEDPRIINGGRAMASLSLKKCAGNGKIRAGSIRASAKGTITVFFPQDNAIRITEFGRGAAVFTEGALRATDTGLLFSAESAHIVKPAPPVERMRTGIRLKLIEKFGGKAWGGLALALLLGIRDNLDTNLAVMYRDAGCSYILALSGMHLAVLAALIAFLLKKPLGFKGASLAGAVIICLYCFIVGPMPSLNRAAIMYLLGVVTLLGAFPKEPLSILALSFLLQIIISPSQGNSISFILSYSALAGILL

SEQ ID NO: 93720 - protein, 708 aa, Unknown
  Obtained from environmental sample
  DOMAIN (40)...(698): FHIPEP family
  misc_feature (1)..(708): Xaa is any amino acid
MMNTKGSSGPAGFLSGVFNSPVLQSIGKQSSLFVIIGVVCIVIVLVIPIPTFLMDILLAFNLCIALVILLVSMYNKEALDFSVFPSLLLTVTLFRLSLNVASTRLILTQADAGRVIEVFGSFVTSGNMVVGVIIFLILVLIQFIVITKGAGRIAEVAARFTLDAMPGKQMAIDADLNAGLINEEQARARRSKIQRESDFYGAMDGASKFVRGDAIVGIIITAINIIGGFIIGVAQMGMDWGTAISTYTQLTIGDGLVSQMPALMISVGSGMIASRAASEDNLGSEITGQLLSNHKVLWLAGSLMFFFAIIPGFPKVPFVMLGGVCFAAAYFRMQENKRAEAAAAQDDPAKQPGGKDAGKPEERIEDYLHVDPMELEIGYGLIPIVDVKQGGDLLDRITMIRKQLASELGIIIPPIRIRDNIQLTPNEYKIKIRTVVVGKGELLSGAYLAMDPGTAVRKIRGVPTVEPAFGLPAIWITESQKSDAEVAGYTVVELPAVIATHLTETIKKHAHEILTRQSAKSLIDNLKEQGGAVIDELIPSLMSVGDVHRVLQNLLRERISIRDLLLIIETLATVAPRSKNSDVQTEYVRTVLAPQICETYKNDEGAIPVITLDPNLEAKLEGSIQESEGIFRFSLSPADANRILEAVGVQIEAAKLAGEYPILICSPTVRPQLKRLTEANFPELVVLSYSEIVQGIEVRSLGMVTLDG

SEQ ID NO: 93721 - protein, 222 aa, Unknown
  Obtained from environmental sample
  misc_feature (1)..(222): Xaa is any amino acid
MLVANNNFFITDIFKEKEEYLNKQIITYLGNKRSLLPFIEIGINKVLAKLNKNKIKTFDVFSGSGIVARYLKSYSSKIIVNDLEKYSEIINYCYLTNFSEINMHKLLEYYNKLLFQLEEEKLKPGLITKLYAPRNKNVIRKRDRVFYTYRNACYIDTARKHIEKIPQEYKDYFLAPLLSEASIHSNTSGVFKGFYKDSNTGVGKFGGNNEDALSRILGNISI

SEQ ID NO: 93722 - protein, 83 aa, Unknown
  Obtained from environmental sample
  misc_feature (1)..(83): Xaa is any amino acid
METELTLKLDRAIINSAKKYAKNNNKDLSGLVEDFFKTLTDEHSSTEKYPPLIQQLSGIISETDLERVSREDEKVRYILRDGR

SEQ ID NO: 93723 - protein, 297 aa, Unknown
  Obtained from environmental sample
  DOMAIN (7)...(281): Aldo/keto reductase family
  misc_feature (1)..(297): Xaa is any amino acid
MLYRKFGNTGLDISVLGFGAMRLPATYSGGKTVYDYEESARMMARAYELGVNYFDTAPLYCDCESETIVGRALKPFRDKVYVSTKYAVSSAKGSDLRRGLEASLKMLDMSYIDFYHFWGITWETYETRITAKGGPLEEARRALEEGLIRHVSFSFHDDAANLPKIAESGNFETVLAQYNLLDRSNEAGIAKAHALGMGTVVMGPVGGGRLGAPSEKISSMIPGGARSNPELALRFVLTNPAVCCALSGMSSMRQVEENCATASVGKALSPVEMDSVAAAMRENKKMSDLYCTGCKYC

SEQ ID NO: 93724 - protein, 113 aa, Unknown
  Obtained from environmental sample
  misc_feature (1)..(113): Xaa is any amino acid
MINKKKCFVFLILFCLYHGLQASDQELLSKVDSLVSYFDTDFQAEYTIVQDKPGQARSITVAGVFRRDSKEQYVIVIMQPPISKGQGYLKEGKTLWFYDPESRRFNTTSSSER

SEQ ID NO: 93725 - protein, 390 aa, Unknown
  Obtained from environmental sample
  misc_feature (1)..(390): Xaa is any amino acid
MVFFLVLRNIAGNKKNCAIIALLIAVITFLFFIGNSVIGKSNIGLRQAFVQSLTGDVVLEAKADVTMNLFGANTPIINTFFTIPPLPAYDLVMEIVRAQEGIAGSTSQVSGKAYLDLLDVREPVLLCGVDADSYFPLFPGINIEEGRFLISGEYGAMITVERAKKIETKSGQYPQIGMPMLLTSGGAVGFKIREVPLIGIFSYANPGQFMNEIVIIDPQTVRVLNSIQVATAQDVELGEDALALLDVNTDDIFNDIFTIYDNEKSTEQFSAETLQAYLSENKLEDNVNLSGGDWNFIILKLKKIKNTRSIISSLNKKLEPYGVTAVDWRIAAGTSAILLLLIQSLFNIGVFLVCIAGVITVINIILIGVFRRTREIGTLRAIGAGDFYIA

SEQ ID NO: 93726 - protein, 342 aa, Unknown
  Obtained from environmental sample
  misc_feature (1)..(342): Xaa is any amino acid
MITCGACAFYLVLRNIAGNKKNCAIIALLIAVITFLFFIGNSVIGKSDLGLRQAFAQSLTGDVVLEAKADVTMNLFGANTPIIDTFFTIPPLPAYDAVMDIVRAQEGVAGLTSQVSGKAYLDLLDVREPVLLCGIDADSYFPLFPGINIEEGRFLVSGEYGAMITVERAKRLEAQSGQYPRIGVPLLFTSGGAVGFKIREVPLVGIYSYANPGQFMNEIVIIDPQTVRVLNSIQVASSQDIELGENALALLNADTDDIFSDIFTVNENDTTEEFSADILQTYLSQTKTEETINLSGGDWNFIILKLEKNKNARSFISSFNKKLGPYGVTAVDWRTAAGTSAI

SEQ ID NO: 93727 - protein, 96 aa, Unknown
  Obtained from environmental sample
  misc_feature (1)..(96): Xaa is any amino acid
MLMQKYNAKDLSNPEGDFVNIGSGKDLTIRELAEIIRDIVYKGISDRTCHIEWDTSKPNGTPQKLLDITRVTNLGFSPKIELTRGIEIAYKDYLLK

SEQ ID NO: 93728 - protein, 309 aa, Unknown
  Obtained from environmental sample
  DOMAIN (21)...(106): Cation transporter/ATPase, N-terminus
  misc_feature (1)..(309): Xaa is any amino acid
MKVGTNIGDALRTSAELARREEVRTRLAFAAGATEEELRGRLDAPRGGLTEDQVEESRDRYGNNRVTHGKKVPLSRRVASAFINPFTVILLLLAAVSATMDIVLAPPGEANPIGVIIIATMVLISGVLRFVQETRSGHAAENLLKMIKTTTNVQRYGEDRQEIPLDEVVVGDTVHLAAGDMIPADMRILNAKDLFVNQSALTGESMALEKTPAAFPVAPAALAEAPCLAFMGSNVVSGSAVGVVVATGNDTTFGEMAKHVSNKPVQTSFEKGVNSVSWLLIRFMLVMVPVVLFINGFTKGTWMEAVLFA

SEQ ID NO: 93729 - protein, 193 aa, Unknown
  Obtained from environmental sample
  DOMAIN (1)...(78): Glycosyltransferase sugar-binding region containing DXD motif
  misc_feature (1)..(193): Xaa is any amino acid
MPEYAFVLWDMNKFDINSHVFVKEACQAKKWAFASDYIRLYALYTEGGVYFDTDVYVKKSFNDFLGNGFFTGIEYHEGFAKNGAHLLNDDGTLKNENNGEIFTHGIQMQAAILGGVKGHPFLRDCLDWYNGKHFILGDGAHYDKLISPYIYAHVATRYGFRYKNELQKLKNNMTVYPTSVFAGSLSQSGENTY

SEQ ID NO: 93730 - protein, 272 aa, Unknown
  Obtained from environmental sample
  misc_feature (1)..(272): Xaa is any amino acid
MKDNSAKQSEYEEKTKSYSSSVEQLLKDTQDVEAALKKGEIPEPEFMKIKLSITMLTLVSNYLAMNQISQSVFGKINENLLNEARKSIHRCLAYLEEVVTNIVDAPFSDYADGLAKIEAVSPAQRHSLVEKIGQQMNNLKESFGKDSKWKWIFVELEGRYATVAKNLIDLRDYFVNSDFESPHYESTVRHVRKVRELLEQSADGYRKKYELSTKSIDDFQKGINFLSALKRLDIFTRDHDSAVTTKKKIETWTAKMTADAAAQKKEQADARR

SEQ ID NO: 93731 - protein, 302 aa, Unknown
  Obtained from environmental sample
  DOMAIN (231)...(302): Sporulation related domain
  misc_feature (1)..(302): Xaa is any amino acid
MTMKNRILILLLTGLCAAAFAQNKNDFEFNPDDGAITGYLGSGSEVIIPDRINGVPVTYIDNSVFRDKNLTSVSIPDNIKNIGPNAFTGNKLEKVVIGNEVDMMTSAFPPDFINKYLDEPRRAGGTYSFNDDNWDYNPAGIRYLTPENVVADTSQQAQNVSPINIVIHNYVGKQPEQFMDGTMPQADYYAPSSTPSSSTPSSSSSPSAAQQPSRQSVGNATVMPGLPDPNSNKRYRLQVGAFNSQNAAAHTFRSLQDAGFNPVYEHSQNFYRVIIADVPAASVAGTVQRLGAIGITQVWVRE

SEQ ID NO: 93732 - protein, 70 aa, Unknown
  Obtained from environmental sample
  misc_feature (1)..(70): Xaa is any amino acid
LYIGEDLDVLMEICDRLMVIHHGKIMGVVDPQDTTKERIGLMMLGEKPAGGVTGAGAAAPEAAAASEAAK

SEQ ID NO: 93733 - protein, 84 aa, Unknown
  Obtained from environmental sample
  misc_feature (1)..(84): Xaa is any amino acid
VHAPAGSIVMYATSAGSVADDGTGNNGLFTGQLFNNLKTPGLSVRDIFDKTGEDVLRVSNGKAAAVVYRGSGTNRNKRGNSARI

SEQ ID NO: 93734 - protein, 439 aa, Unknown
  Obtained from environmental sample
  DOMAIN (178)...(439): Protein of unknown function (DUF342)
  misc_feature (1)..(439): Xaa is any amino acid
MVDFVTLKKIMADRLETDRAVQSVEAVGPTLDSAVADAAALLDIPSRRLEYEIIEKGNAGFWGMGKKDWRIRAYEKVSSVRKKRQQALIDEEVSANIVVIEDKNGEAFVHFKSGGDVMLKVTPASGQGKSASELYAMHFLQDRKAERIDTALVRKTINEAAGVYVKVAEFDHKSYNDSVVYVEISEDEMSALVKTTAPGEGGCDVSYEVYIATLKQNRIVHGIKEDFLRHFVDQPVYNENVVIAEGTASEDGKDAYIQYNFETDERKVRLREGSDGKIDFKELNIIQNVVENQPVAIKKPPTKGTPGWTVTGKMLDAKDGREISLPVGTNVHVSEDGATILATINGQVVMSNGLINVEPVYTVDNGVNLKSGNIDFRGTVMVNGDVEDGFFIKADGNIEVNGSVGKADLDAQGDIIIHQGINGKGEGRIHAGKSLWARF

SEQ ID NO: 93735 - protein, 233 aa, Unknown
  Obtained from environmental sample
  DOMAIN (119)...(146): NHL repeat
  misc_feature (1)..(233): Xaa is any amino acid
VRKLFLFFILFSLFPIPYSPLPTPHSLLFASPTNYTYNYDFWEEQVSSPDAYYVSSYILGTALGLNNFNDPQGLFIRDNRIYVCDSGNNRIVLLEYEDGEHRLVSVKNSVTINGRMSRFNYPMDIFESRDGFLYIADTNNHRILKLDRDWNYVSSILKPDDESIDEFAEFLPLKLVVDFANRLFVQARNVNKGLMEFDSRGEFAGYMGANKVKVNIVDYIWKVLATKAQKERM

SEQ ID NO: 93736 - protein, 509 aa, Unknown
  Obtained from environmental sample
  DOMAIN (234)...(342): Miro-like protein
  misc_feature (1)..(509): Xaa is any amino acid
SLPQRPAAAAGRVGGKLVGGKAPPHHGRQGQPRGNKPEGGAPGGRGGFGPRQGGTGQQRSGGFQPRQGAGGNKQFGGGGGGFRGGQGGNRGGFGGGAAPAGPLPEGKGPAKRKFIAKKPSYNRKEKELEMEEKLLQTKKKITHIANPVPKSIDIMEVISVSELARKMNLKASDLITKLMSMGQMVTINQQIDADTATILAAEFGADVKIVSLYDETVIETTSDDDAALLPRPPVVTVMGHVDHGKTKLLDAISKSDVVSGEFGGITQHIGAYMVETPHGSLTFLDTPGHEAFTRMRARGAQITDIVVLVVAADDGVMPQTIEAINHAKDAKVPIIVAVNKIDKPEANPDKVKSQLSDLGLMPESWGGQTMFVELSALQKTGIDKLIEAILLEAELLDLRANFKCNAEGKILESKVDHGRGIVATVMIERGTLAIGDAYVAGIWPGKVRAIFNDKGEKINKATPSMPVEVLGFEGIPNAGDPLQVVADEKVAREFSSKRQELRRLKTPKY

SEQ ID NO: 93737 - protein, 96 aa, Unknown
  Obtained from environmental sample
  misc_feature (1)..(96): Xaa is any amino acid
VWVRKDNVEEYKKKNTINFTDSRNGQKYRAVKIGGKTWMAENLNYQTGNSWCYDNNNSNCEKYGRLYDWNTAKTACPISSVLNKDSLGLFERVVWY

SEQ ID NO: 93738 - protein, 198 aa, Unknown
  Obtained from environmental sample
  misc_feature (1)..(198): Xaa is any amino acid
MISQQFRIHRLQVFNWGTFSDLHEVPIAERGFLFVGGSGTGKTTLLDAFSALLIPPRWVDFNAAARETDRSGRDRSLVSYIRGAWAEQEESGVIATRYLRPGTTWSALALSYRNGTGQDVVLVQVFWLRGSANGSADVKRHYFIFEREFDLREFKDFGQSNLDIRKLKQSFPEIFSRDEFRSYCDHFCHLLGIENEMA

SEQ ID NO: 93739 - protein, 251 aa, Unknown
  Obtained from environmental sample
  misc_feature (1)..(251): Xaa is any amino acid
VTPASDAELGRKLAEARMRLLRLQPFFGLLLLHMRYGLDDDCETAGTNGTHVLFNPAFLSRLTPLETDCVLLHAISHVVLGHCFRNEDRDSDLFGRACDLVVNSLLLTDLAVFRSCVTVDGGRIRHLTPGGEEAGLYSAEEVYEMLLGRRGCEQSGVPAEDGGGKRGADEKFPDDHGLWREGASREHKRLREEWGQRVLQAAVTVEMQHDAIHCGRLPLLAERLLGVLRRPQTDWRTLLRNFLQQEVHDYG

SEQ ID NO: 93740 - protein, 323 aa, Unknown
  Obtained from environmental sample
  misc_feature (1)..(323): Xaa is any amino acid
RLRETAVNILPKQRYGVMTTESIVAFLGSQERAQKECKEASCLAELGRKVNADYVAQARIGRFDNNLSIVVELYRSKSGVMVGSFTGNSKSISGLLTFIDEKAPILFKELLSAFSSSSTASPAVVLTPTPVPIPASTQPVAIEYGQQLTDSRDGKKYRTVIIGKQTWMAENLNHDANGSKCYNNEPENCQKYGRLYNWDMAMKVCPKGWHLPSDKDWNVLMKFVNPNCSDNSDCAGAGTKLKAASGWKDNGNGTDEFGFAALPGGYGNSGGLFSTVGNVGFWWSASETDAGSAYSRYTSYGSEYARWYGSSKSYLHSVRCLQD

SEQ ID NO: 93741 - protein, 585 aa, Unknown
  Obtained from environmental sample
  DOMAIN (149)...(230): PEP-utilising enzyme, mobile domain
  misc_feature (1)..(585): Xaa is any amino acid
MRTFTGLPVSTGVAYAKAFVYSADETLEIPHHGVSEADVHAELKRLKNAISEAVKEAQSLLDRAGREMSREQADIFQAQLLMMEDADFHEQMNNRLKESLCNAEWVVWEVSHELSQKLLQSPDAVLRERSVDIDDVSRRIISCLLSDAKGRSPLADLTEEVILVSQYLMPSDMVNLSKDCVKGIVMDEGSSTCHTAILARAFNIPAVMGISGFSRIANDGEPLVMNGLSGLVVTNPDKQTLARFRTDEKQQRRQTDRLSGLRELPAETTDGCMVAIKANISLPEEAETLKHYGAEGIGLYRSEFLYITPGKAPDEETQYRAYSHVLKTMGDLPVTIRTMDMGGDKIVPELHAVAQIDSEKNPLLGWRAIRLSLANPEMFKVQLRAILRASVHGNARIMFPMISGIEELEQAHAMLDEARAECKKMRQSFSRDIETGAMIEIPSAAMTADILAEKADFFSIGTNDLVQYSLAVDRGNEKVSYLGEAFHPAILRFLKKIIDAAHERGIIAAMCGELAGNPEATCLLLGLGLDEFSMAASSIPRIKEIIRSCSLKACKSLATDALRARSIEEVRTLLNEWKADNARKH

SEQ ID NO: 93742 - protein, 59 aa, Unknown
  Obtained from environmental sample
  misc_feature (1)..(59): Xaa is any amino acid
AVLHSGCWELTHDNQDREINGLLEAMDFFNLKIGTIITFDTEDIIQTAGKKIKVIPAWK

SEQ ID NO: 93743 - protein, 352 aa, Unknown
  Obtained from environmental sample
  DOMAIN (269)...(345): Surface presentation of antigens (SPOA) protein
  misc_feature (1)..(352): Xaa is any amino acid
VSDYLSQDEIDSLLNGLGDGAEGGASDERYKAIAPIFELFCKQASSVLGTAAARTVDVVSESCAKADLNAAKGKLPGNLLSLTLSLVSGLEGDMYLIIDKKVVGILTDLMMMGDGSAPYSEDSKDAASELFNQVMGAFSTALGGELGESVSAGNVSVSEFNFATPPFDAASADMGLAKFSVAGLVNSYIAVLIPNAFGDNIVATKVSKSSPAMADLNVGISQSEMDALTNMSMSSINDVGGGGGSFGMQQFAPPPPPPRKGTYDGPKENIDLLLDVELDINIELGQSELSIKRILELAPGSIVELDKMAGEPVDLIVNNKVVAKGEVVVVDENFGIRIVSLVSAEDRVKSLK

SEQ ID NO: 93744 - protein, 221 aa, Unknown
  Obtained from environmental sample
  misc_feature (1)..(221): Xaa is any amino acid
MAKLTFKLTRDTLFKILFVKHEDLLKDLVSQILCIDIGTITDFKIDNPNIEPEALGQKFCRLDIKMKVNGQVVNLEVQVKDEDDYPERSLYHWARCYSSALSAGKDYIDLPRTIAINIVDFELFEDTKDFHSEFRALEVTRHTELTDKMSMHYFELKKLPEVAESDAENKLKLWLSFFNAETDEELSKIEKIGGKTMVQAIQAYKSVVVSDELKRQKSNAK

SEQ ID NO: 93745 - protein, 216 aa, Unknown
  Obtained from environmental sample
  DOMAIN (2)...(179): Transketolase, pyridine binding domain
  misc_feature (1)..(216): Xaa is any amino acid
MKTMLYRDAIAEAQAEEMRRDKRVIVFGEDVAKIGGLLKCTAGLYKEFGPERVRDTPISESAIAGLATGAAMAGARPVAEIMYIDFMGCCMDQVANQMAKMCYKSGGQHSVPLVLRTQCGRSHSSSMTQSQCLESWVTHIPGLKVVMPCTPRDAQGLLKTSIRDNNPVIFIEHKGLYQTKGEVPEEEYLIPLGKADVKREGKDITLISWSKSVMTC

SEQ ID NO: 93746 - protein, 242 aa, Unknown
  Obtained from environmental sample
  DOMAIN (119)...(155): e3 binding domain
  misc_feature (1)..(242): Xaa is any amino acid
VAEIVQMPKRGIQMTSGTIGKWLVKEGESVKKGAPLAEIETDKVTAEIESPAEGVLLKILVAEGVSADVGAPIAVIGKAGESYDLASVKSPAATVSVSVAAPVTQKTTQVASGGRPHRISPRAKKLAASKGFDYANFVGSGPGGRIMEKDIVKALQNVQPGSSAGKAAQGVAVQGDTVLPLKGMRKIIAERMKASLDTMAPANHRMDVDMSEIIALRKKLNALYESASIKISIIDLLVKITA

SEQ ID NO: 93747 - protein, 270 aa, Unknown
  Obtained from environmental sample
  misc_feature (1)..(270): Xaa is any amino acid
SREQRAESREQRAESKDYCPNDKDVYKIDFNTPKNIAHCSLLIAHSPVPGTHSPLPTPYSPLPTPLVLLPVFPGTNCEWDMERAFREAGARTRIVIFRNRNKEDITESKQELARAIAECQILALSGGFSAGDEPDGSGKFIANVLRAPIIADAVNNLLENRDGLILGICNGFQALIKLGLVPYGAYRRAEESMPTLTFNRVGRHVSRMVNTLVMPNCSPWLALDKPGAVHALPVSHGEGRLVISEAEGETLFKNGQIPFCYADENGHPTM

SEQ ID NO: 93748 - protein, 276 aa, Unknown
  Obtained from environmental sample
  DOMAIN (60)...(209): Radical SAM superfamily
  misc_feature (1)..(276): Xaa is any amino acid
MKLNQELRKGNINNFLRVISNFIVNFIPISSWFYRKMALLGLKLTTKKRLSKRKQFRFDIPITDHCNLNCKHCWTFSPVAEKTFLDVQTISSDLHKLSEIANGEVSDILLAGGEPLLHPKLINIMDATRKYFPNVEIALITNGTLLNKQSDEFWNACRRNRIKVIITRYPIKLDFESLKNKAENEAVSLEYFGGESEPIKSMWKLRYDLNGTQDLEHSWKYCHSANYCMRVANGKIYPCGQIYSVRHFNKYFNTNMVVSEDDVLELDSIRNLDEIL

SEQ ID NO: 93749 - protein, 381 aa, Unknown
  Obtained from environmental sample
  DOMAIN (175)...(337): MatE
  misc_feature (1)..(381): Xaa is any amino acid
GAVVVSQYIGRQDFKESSIASKQLVYVVALISLIMTIISVSFRRPIVSLIYGKIEDDVMKAASIYFLITAISYPFLAVNNANAALFRAIGNSKVPMLIALLVNIMNIAGNAFLIYGLKIGVAGAAISTLVCRITASTITTTMLYRNKNIPISLSGLSKVRFIKSMIQNILNVGIPSGIESSMFQIGRLLTQRIFPVFGTSAMAGNAVTGVINSFSFMPGTAYGIALLTIVGQCVGAGDYTEAKKQVKRIMKLAYITLFTMSTLIFIFVEPLVSMFSLSAEAHNLAKTFMSIHCISMALGWPISFAMPNALRAAGDARFVMVASTISMWVVRVCAAYLFTFTLGIGPLGVWLAMGADFFVRGGAFTLRWRSGKWQEKRVIRD

SEQ ID NO: 93750 - protein, 288 aa, Unknown
  Obtained from environmental sample
  DOMAIN (2)...(283): Glycosyl hydrolase family 26
  misc_feature (1)..(288): Xaa is any amino acid
LGQHTQTRAQEELEYIREVTGKEPALCGFELLAYSPNINYKESGAECITEVEENKNTLENAFDWADKKGLITFTWHWFSPLYGADKAFYQKNTTFDARLALKENTPERAAFLSDMDAMAELLKPFCQKHIPILWRPFHEANGEWFWWGSRGPETARKLWLDMYERYTCYHKLDNLIWVWNSPLKEGYVGDNYCDVISRDMYLPEHTHSDYRDAYEELLQLTSADKITALGETGSIPGLAALSETKIPWAWFMTWSKKVCREAYTSREELKAAYNSAYGVTLEKLPALY

SEQ ID NO: 93751 - protein, 81 aa, Unknown
  Obtained from environmental sample
  DOMAIN (4)...(80): ACT domain
  misc_feature (1)..(81): Xaa is any amino acid
MDRFTIELIVSNHYGVLNRITGLYAKRGYNIDSLYVNETQNPEKSRMLITSKGDKYIQTQMVRQLKKLYDVDNVVLMAQVG

SEQ ID NO: 93752 - protein, 280 aa, Unknown
  Obtained from environmental sample
  DOMAIN (1)...(277): Protein of unknown function (DUF1703)
  misc_feature (1)..(280): Xaa is any amino acid
MATTKRILPVGIQDFADIRTRGFVYVDKTARVYDLITGSGKAFFLSRPRRFGKSLLCSTLGAIFEGRRELFGEIAGRPALAINGLDWEWKKHPVIRLDLSAGNYSNGVETLSSVLCAEMRREAGKYDVTLDCKDQLASQFKYLIEKAHEKTGEKVVVIIDEYDSPLTGTLLEPTVHVQLRNELRAFYSVLKSCDAHLRFIFLTGISKFSQVSIFSALNQLSDLTLDPRYADICGLTQEELEENFEPEIDGVLESTGSSREEYMDNMRRFYNGYRFSKNPL

SEQ ID NO: 93753 - protein, 206 aa, Unknown
  Obtained from environmental sample
  misc_feature (1)..(206): Xaa is any amino acid
MVTIDEYKCPNCAGAVKFDSSVQKMKCPYCDAEFETSVIAEYQKNATAEAQAADSFKWTDDAVTAWKEDELDGLSTGSCPSCGAELVGDQNTVAMVCPCCGNAQIVSKRLVGMMKPNYVIPFKLDKKAAVAALKDFCKDKRLLPDFFVEHNHINRIQGLYVPFWLFDAKAGGNIRFKATKVKYWMDSSYNYIKTRLLLCNKGRRSR

SEQ ID NO: 93754 - protein, 465 aa, Unknown
  Obtained from environmental sample
  misc_feature (1)..(465): Xaa is any amino acid
MVDIKGYNCPNCNGIILFDISTQTAKCQSCGATFGRAALASYQWGNEDIFDCAGGGEDLFDCAAAAGGEDTFDCAAAAGETNVGALGDEDTFDCAAAAAEQPQETVWETKWDGEVWEDPESDDLTTGACPSCGAELYGCKTTIAMVCPCCGNAQIVAKRLQGILKPDSIIPFKYDKNAAVEALEKFCAKRKRLLPARFLKENRLDAVQGVYAPFWLFDLDVEGYVEYEATRRVKRGKHYVTIHYCVEREGCVLFKKIPVDGSQKMDDEYMDAIEPFDYYQLTDFHPSYLAGYTAEKYDVDALKSRGRALYRMETTVEKMFRKTVHGYNTVTVVESDINVTKGSMSYALLPVWTVNTKYDGDDYLFMMNGQTGKMVGRLPVDNGKAWMYRGIFTGGFWALLTPILYYLNMTGILGFVTVFILAAGLAALGIKWPGDLSLDVPFPVITMLSIVFSALGAFWIVRKWI

SEQ ID NO: 93755 - protein, 312 aa, Unknown
  Obtained from environmental sample
  misc_feature (1)..(312): Xaa is any amino acid
EKLIRSIGVEREEAKGALYKAVCNDNVLEMSNFSDNSVDLIHTSIPFSNHYEYTPSYNDFGHNEDNTRFFEQMDYLTPELLRVLKPGRVAAIHVKDRILFGNATGTGMPTVDPFSDMTTAHFMKHGFQYMGRIVVLTDVVRENNQTYRLGWTEQCKDGTKMGVGCPEYVLLFRKLPSDTTKAYADEPVAKNKDDYTRARWQIDAHSFWRSSGDRFALIEELRETPVSDLQAKYREYSRNNIYDYSEHIALADDLEDENKLPSSFMVIAPGSHSEWIWDDVNRMRTLNGEQARKELQMHICPLQFDIVERIIR

SEQ ID NO: 93756 - protein, 324 aa, Unknown
  Obtained from environmental sample
  DOMAIN (11)...(321): Domain of unknown function (DUF377)
  misc_feature (1)..(324): Xaa is any amino acid
MSCAIVNGVSLPNIPWEDRPSSSNPKKELMWRYSKNPIIPRDLTLTSNSIFNSAVVPFKGEYAGVFRCDDTARHMDIHAGRSNDGVNWKIEDNPIQFIKTDSELPDSEYKYDPRVIFIEDRYYIIWCNGYHGASLGMGYTYDFEKFYQMESPMMVYNRNGALFPRKIGNNYAMYSRPSDSGHTPFGDIVYSESPDLVYWGKHRHVMSPSDGWQSTKVGAGPCPIETSEGWLVFYHGVLTSCNGFVYSFSAALMDLEKPWKVIARPRPYIINPREIYELAGDVPNVTFPVAALVDKDTGRVAIYYGCADTVTGLSLARSTKLLIG

SEQ ID NO: 93757 - protein, 309 aa, Unknown
  Obtained from environmental sample
  DOMAIN (1)...(274): Amidohydrolase family
  misc_feature (1)..(309): Xaa is any amino acid
ASLTRISNWFSENDLRLRVNLQCTIENDVVFNEFIRRGWITGSSMGHPYLTMGASKLFADGSLGSRTAYLRKPYLDAPSTRGFQIHSQEEMDALVLKNHKNGFQVIVHAIGDAAIEETLNAFEKAVGGQTNELRHGLVHCQITDLPLLRRMANNGTLAFMQPIFLTHDLYMLESRVGKELASTSYAHATMNKLGINAAYGTDSPVESMSPLECIDCAVNRRDVTNGYPKEGFYPGECVDVYTAADAYTIGSAYAEFTEACKGRIKPGYLADMTLLDRDIFIIPRKEIRKAQVLWTMVGGVMAYKKAILP

SEQ ID NO: 93758 - protein, 144 aa, Unknown
  Obtained from environmental sample
  misc_feature (1)..(144): Xaa is any amino acid
MSVMVILIDTNIILDYLIARQPFMDNADKVLRLCLEQKCGGYIAAHSITNIFYILRRQFSVSERKKMLIELCEFIEVAGIQKKQVIDALVNEDFNDLEDRMQVECARLVNADYIITRNITDFSSSPIPAILPEDLLHKRRKEFR

SEQ ID NO: 93759 - protein, 375 aa, Unknown
  Obtained from environmental sample
  DOMAIN (282)...(353): Bacterial flagellin C-terminus
  misc_feature (1)..(375): Xaa is any amino acid
VALGGSAIEGDEKKLKAGTIVAEGSYKITGTLANNVTYSGANENTVLQEDKVTLIADGSILTKNTALGFEVGGTISIEVSGKAIDISRDGTNIIVNGELVAATKTVTLEDGTILRNDSGIVNVVEGRIKTVGDINKTGSDVTAWSIAKDSTLTANSVLNEAVFGVGTVISDKNTIVAGAITLAYNDTVGNNSYIQFGANHSSKATTDPEYANEAAKLQAKLHDAAVGDSITFIFSEYVAASSQLNDSVMAQIGANSGQTAFVSMGDMRAKALGVAGVDVSTKWGAATAIETVNNALQKVSHQRSSLGAIQNRLEHTIKNLDTAAENLQAAESRIRDVDMAKEIMEFTKNNILQQASQAMLAQANSQPQSVLALLR

SEQ ID NO: 93760 - protein, 242 aa, Unknown
  Obtained from environmental sample
  DOMAIN (27)...(167): Bacterial flagellin N-terminus
  misc_feature (1)..(242): Xaa is any amino acid
MRISHNIAALNTHRQMGISELDGSKSMEKLSSGYRINRAGDDAAGLAISEKMRAQVRGLNMASKNSSDTISMIQTAEGALGETHSILQRMRELAVQSANDTNTDSDRTELQNEVRLLIAEVDRIGNTTEFNTKKLLEGSAKGVADEIIGTSRINNNSSLALDPGKIAKLSDNVAADKSWAFDGAFMLVRTGKTKDNADGTAVYNASDFRLVGPNGNEYSFVSLGAASIDVDDATMLKAGTIV

SEQ ID NO: 93761 - protein, 179 aa, Unknown
  Obtained from environmental sample
  DOMAIN (86)...(157): Bacterial flagellin C-terminus
  misc_feature (1)..(179): Xaa is any amino acid
TTTGATTPSSVQFGANTGAKLEAKLHDAAVGDSITFIFSEYTAASSQLNDSVMAQIGANSGQTAFVSMGDMRAKALGIADITVGTKWGAATAIETVNNALQKVSHQRSSLGAIQNRLEHTIKNLDTAAENLQAAESRIRDVDMAREIMEFTKNTILQQASQAMLAQANQQPQSVLALLR

SEQ ID NO: 93762 - protein, 481 aa, Unknown
  Obtained from environmental sample
  misc_feature (1)..(481): Xaa is any amino acid
MKRKLFIFSALFVFASFSAFAQSASAQFKPFTSFRVIQTDHFDIIFPKESEETARTLASYADRVYDQISSLLGIDVRGRIPVTITPHTDLFNGYYSLFFNHIMLFDTPMDVEWTNFYNNLQKLFLHELTHAVSFNTRSPSNDSWYRVFGSLYTPALGNAPLFMVEGVTVSFESLDGGGRANDPRTKQYLRQAIHENKFLTPFQASGVYDKQIRPNAYYYEYGGLFSAWLQKNYGMEKYSQLWKEMGDDGNFSFFVYRSDFYDIFKKVYGVDFLDEWKKFGDSFALDGLETNEYELSSKKYSYFSEREYFVRGLTARKNNLYFIETSEAKIGIYNTATGKTKTFNADSGIYDIDVSADGKKMLLSGYRYIEDRAIAFVSEYKTKNGWKTGGTINGIGKARYFRDGVIGIRSVLHNNRIVFEKFDGKSETLFTGNETLMFSGPQALDDERIVFIAMKEGKRELWLFNYVTKELFKIENTQDDN

SEQ ID NO: 93763 - protein, 348 aa, Unknown
  Obtained from environmental sample
  DOMAIN (81)...(270): Adenylate and Guanylate cyclase catalytic domain
  misc_feature (1)..(348): Xaa is any amino acid
VPLFIIALTAAGSSLRDLLVLSNGIEPLFWMAPYSFILMVILIYAMLITEENFIQGAFSRYLAPEVISEIVKDPDKLNLGGEKREMTAIFTDIQGFSAISEQLDPVHIVQLLNKYLTTMSDIIMEHLGTVDKYWGDAIIAFFGAPLFNADHSALACRSALAIKAAERELNKTLVSEGLSPVPIFTRIGINTGEMVVGNMGAEKKMDYTVMGNAVNLASRIEGVNKQYCTGGILISEYTKSRIGDEFLLRRIDRVRVVGINTPLRLYELLSANNEQTATDNERRAVEIWEKAIDLYEQSKFKEALALFTSLIENHPNDNVAKFYALRCEVFMKTPPPQDWDAVKNMTEK

SEQ ID NO: 93764 - protein, 268 aa, Unknown
  Obtained from environmental sample
  misc_feature (1)..(268): Xaa is any amino acid
MSTGAVSGHGFKLAMDALCEKYKSDAALAADPISIPLTYTSAVDIETTSWVAAHLAYGRVSPMLNAIRRLLVPLGSRPAQWLRERSEAEIRRELEQSQPGWVWRFHTLPDMAAWLIAWKRLDKSTGHSGVGPLLIPDGRDSADARLSALVNDLRKELPESHGLRFNLPDPLKGAACKRWRMFLRWMARKGWPDFGAWENYPASCLVVPLDTHVHRISMQIGLCQRRGADAKAAHEITAALRELDPEDPLKYDFALAHLGILGDCTGKK

SEQ ID NO: 93765 - protein, 476 aa, Unknown
  Obtained from environmental sample
  DOMAIN (11)...(172): DHH family
  misc_feature (1)..(476): Xaa is any amino acid
MEDAVERILAAKEEGEKILISGDRDVDGITSTALLAGFLSSLGMDVSCRLPTGDEPYGLSLKAVEDFAAAFGTLIITVDCGISNFEEVKKAEELGVNVIITDHHNPQENLPPALAIVNPKLSTKLFRDLTGCAVAYKLVSALRFALKSELYGQSVCLLNTRPVNDCWVIEIAKLRNLALIDSLTETVVPDTVKISETRLPAFLEGQQIFAWDAAFQKRTLAQIFGNGVEIYMQDIAGEIGKEIPQAAGKTLLRIKELSRVAKYRDSETSEIDVFVSLFSSFVWQREKLFGADDRMDLQLACLGTLADIMPLKNENRIIVKQGLQSLMEKPRPGLSDLLFKLDMSGRRIGTNDISWILSPTINAAGRMGNPQKALDLLLEKDSHQRDRLASDLISMNEERKKIGEEIWTIVEPAAAENLQAYQNKLAFAYGPDIPRGVTGIMANRLLNRFKVPALVVSFGKDVYTASLRSTSRVQPS

SEQ ID NO: 93766 - protein, 380 aa, Unknown
  Obtained from environmental sample
  DOMAIN (39)...(75): Sigma-70 factor, region 1.2
  misc_feature (1)..(380): Xaa is any amino acid
VQLIEEDNSSEEDESDDGKKQQNSKNRAAANDKETSLVDDPIRLYLREIGKEHLLTAEQEIELSKKMEEGENIIKSVIKRSGMIIPEFFQIAQKAFAKKDMKELNFSKKEITEYMTECRRLNQFYKDTLRTIHGDLRNYIDLKNHLISKDMDYLEDKDCSTIRKRIMRALKNIHIHPDEILAFSEKFLQASKKIKKYVKEQERLQKHLKVVSLKELRTLGRYLTIKDERERVEAELGLPSDEIKEKIKLVQVTQKKLRTLEAEFEETTDNINEMAGEIQRGRVMMKNAKDRLIKANLRLVVSIAKKYTNRGLHFFDLVQEGNIGLIKAVEKFEYQKGFKFSTYATWWIRQAITRSISDQARTIRVPVHMIEQINKVLRES

SEQ ID NO: 93767 - protein, 332 aa, Unknown
  Obtained from environmental sample
  DOMAIN (234)...(310): RNA polymerase Rpb2, domain 7
  misc_feature (1)..(332): Xaa is any amino acid
MLEAVPYRRFRQISVAAGKERLEAQVLDIMDKTDSQLHVLSDVLAERVERLLKGDELLPGVLKNVKVYVAVKRKLQVGDKMAGRHGNKGVVSRILPIEDMPYLPDGTPVDIVLNPLGVPSRMNIGQILETHLGWAGRVMGVHFTTPVFDGARESEIKEWLEKAYEKNGRSGPDASGKTKLYDGMTGEAFEQPVVVGCSYMMKLHHLVDNKIHARSIGPYSLITQQPLGGKAQFGGQRLGEMEVWALEAYGAANTLQELLTIKSDDMTGRSKIYEAIVKGEPSTTAGIPESFNVLVQELRGLGLDLTIYDAKNKQIPLTERDDELINKSGSNF

SEQ ID NO: 93768 - protein, 307 aa, Unknown
  Obtained from environmental sample
  DOMAIN (4)...(307): RNA polymerase Rpb1, domain 1
  misc_feature (1)..(307): Xaa is any amino acid
MRDIQDFDSIMIRLASPEMIRDWSYGEVKKPETINYRTLRPEKDGLFCERIFGTTKEWECYCGKFKSIRYRGVICDRCGVEVTHFRVRRERMGHIELAAPVSHIWYYRSVPSRMGLLLDIPMTALRSVLYYEKYIVIEPGETDLRRMQLLTEEEYYEAQERHSGGFTAGMGAEAIRTLLENTDLDELAAELRAKMIEKGPKSDKRLLKRIDIVENFRNSKNKPQWMILDVIPVIPPELRPMVQLDGGRFATSDLNDLYRRVINRNNRLKRLQVLNAPDIIIRNEQRMLQEAVDALFDNSKKKRVVKG

SEQ ID NO: 93769 - protein, 334 aa, Unknown
  Obtained from environmental sample
  DOMAIN (1)...(26): Bacterial regulatory proteins, lacI family
  misc_feature (1)..(334): Xaa is any amino acid
MTVHEIAALAGVSIGTVDRVIHKRNRVSPATRAKVEAIIEKYQFTPNPIASGLKRSRPYRFCALLPKRDQDAGYWGQIIAGIERAAGEIKPLGAETEIIEYDRYDPKAFEKTSAAVYDKKPEGLLFAPIMQKRTRPFVEKISAEKIPFIFVDSDMPETEPLCVICQDSFNGGYLAGRLFHLFAGTVTMPAAILDAHGDDYNITRRREGFLSYAEKNDIPVIVQEYSDYGGGDISTEKIAQFLKEHDNLSGLFITNCMAHRAAEAVKQRRKKESFLLVGYDLIPSNRQFLLEGHINAIISQRPEEQGREALLTLFRSVALGQKVEKRVEIPLDVY

SEQ ID NO: 93770 - protein, 282 aa, Unknown
  Obtained from environmental sample
  misc_feature (1)..(282): Xaa is any amino acid
MTEEVLLPYQKAWIEDEAKVKVWEKSRRIGASYVEALASVLEAAKSKEAGGQSSYYLSYSKEMTQQFARDCAFWAKHINAAAKELEEIVLKDEDKDITVYRIRFASGYEIWCLPSVARSLRSKQGRVIVDEAAFVEDLEALLKAAMALLMWGGCVRILSTHNGDDSPFNELIKEIKEGKKDYSLHRTTFDEALAQGLYKRICLVQKKEWSPEAQEAWRKEIIDSYGDGADEELFCIPVRAGTRYFPSALLEAVSDSSAKVLRKSCDDAFTFETKEKRVKELQ

SEQ ID NO: 93771 - protein, 337 aa, Unknown
  Obtained from environmental sample
  misc_feature (1)..(337): Xaa is any amino acid
MSGMYPNEQILEVFGEQVKWPGLGPDGKFTNGSFTDPLVKPSFIPAETLNLLLDNIQRVIAGAGLNPNNIEADQLVRAVKALNKKTATFVVGSSAAGHTLADCDYLCDGVDDQVEINAAIQALRPLGGGKVVLLGALYNITASIVIDIDNVTIEGMGASTMLIIMYNATGGMIRVDANNCTVASLAIDGNKASFPGGNSIVIAGNYNKVIGNTCNNNGEQGIYLINRSNYNKVIGNTCNGNIRGIYLFNNCDSNLISANIYIDNDYGIIIHNGSSRNVIDGNIAMRGTGQAGDYTSAQHTIYGGTNTQKNLFTNNLILGKNYVDEAGASNTFANNKY

SEQ ID NO: 93772 - protein, 235 aa, Unknown
  Obtained from environmental sample
  DOMAIN (45)...(126): OB-fold nucleic acid binding domain
  misc_feature (1)..(235): Xaa is any amino acid
DRQDVDTAIKEAEEFDKKSEVHRNTWLYMADLKSSSIKNVKKGSYTIIGFLKSLREHTDSKGNIMAFGTLQDFEGDIDLIFFSKAYSECKTLLNLDEIIAFRGNIDPENERDPQKITFKVSSIADFAQLTRIAARKTAAGEKPPAANMEEQKPSVKPADEIHIKLTEGAADNEENLIPLRDYLAENSGSGLVFLHIPLTGKEKIIRTFSGLEISGGNSVIEDISKFKCVSHVWRK

SEQ ID NO: 93773 - protein, 658 aa, Unknown
  Obtained from environmental sample
  DOMAIN (232)...(394): Type III restriction enzyme, res subunit
  misc_feature (1)..(658): Xaa is any amino acid
VSDLLLHYPRDWEDRTKTVPISGFNRGKICTVVTVAARDWIGFGRMRTLKAYVQDETGTAALLCFNRPWLDKHLVTGAKLRLWGRFYYKYGEIQSGAFEIEPFEENNNESGCILPVYPLTSGLTQKHLRRFISRLLEQYAAKIENELPAEIIERDNLLNKSDALKAVHFPNSREELEKAKKTLVYEELFYLEVMVGKRVIERKVKKNNSALQGSGEEEPFTKLQRRLIERLPFSLTEGQSGAVKEINSDMASNVPMARLLQGDVGSGKTLVSFLAALKAVEEKGQAAIMAPTELLALQHAENAGRLLEPIGCRIAFLTGNIKAAGRKELLKNLQAGEIDIVVGTHALFSKDVTYKNLKLVVIDEQHRFGVTQRSLIMSKGDNPGLLMMSATPIPRTLAFTVFGDMDVSVIKDMPPGRKPIKTHLAKESNEKKVYDYVSKELKQGRQAYFVYPLIEGGDEIKDAVSMAERLAKRVFPKYKTALIHSKLPEDEKRQTMDDFRKGKIKILAATSVVEVGVDVPNATCMVIEHAERFGLSALHQLRGRVGRGQEQSYCFLVYSDEYTEEGKTRLLVMMENSDGFVIAQEDLKLRGPGLITGTEQSGYMFFGIADPVRDIEQLERAREDAFSILESDPSFVLENHQIIARVLEEAPPFGEVVL

SEQ ID NO: 93774 - protein, 82 aa, Unknown
  Obtained from environmental sample
  DOMAIN (2)...(82): Protein of unknown function (DUF419)
  misc_feature (1)..(82): Xaa is any amino acid
ICVKYNGHIFAEVYPKDSDYKITLRCKPEIGQMYRKKYSEIILPGYHVPLKQRKYKNTIKLDNNIIGKIIYKLIDQSYETLL

SEQ ID NO: 93775 - protein, 322 aa, Unknown
  Obtained from environmental sample
  DOMAIN (92)...(297): Flagellar assembly protein FliH
  misc_feature (1)..(322): Xaa is any amino acid
MAKAVFRPGELVLIDERVIISAPTDFGAAQNEPVSHEEEVEPAQPVEVYTGPTAEDLRHEAEAFRIEWDIERQAMIESAQAEANEIVQKADMAASRQKQEKIEEADAILAKAKEEAEKLVSEAKLLAEKLETDTRGTLDDEKTAAFNQAREEGRNEGYAEGKAEVDRLIERTHVVLERAQDKRGDILIQTEEEIIRLVLLLVRKIVKVISENQREVVISNVIEALKKVKDRGNIIIRVNTADLKLTTEHTKEFIKDLEGVKSIQVAEDSSVDSGGCVIETDFGEIDARIASQLGELESKILQASPIKSKPKSLTARSLKAEI

SEQ ID NO: 93776 - protein, 91 aa, Unknown
  Obtained from environmental sample
  DOMAIN (12)...(66): Helix-turn-helix
  misc_feature (1)..(91): Xaa is any amino acid
MTNLRHVLALNMKKKRSTLGLSQAKLAEKINTAPTYIAMIELEKKFPSVEMLERIASALLMDTIELFFCKTSSGKLAQKITQVRYYWILKR

SEQ ID NO: 93777 - protein, 325 aa, Unknown
  Obtained from environmental sample
  DOMAIN (173)...(256): Transposase IS116/IS110/IS902 family
  misc_feature (1)..(325): Xaa is any amino acid
KETYVLVEATINTFAFISLFRDLVKEVIVANTYQLKSVGLPGKKTDKLDAFKLAEKLKAQVISGVQQIVPVSVPSKEIRDLRALFATYQVIRKEIGRTKNRIHSLLKENLYPFTKEYIFGKKTRAYIRSISKDYLLSFQINMLMDTLERMEEQFDALVDEIKKAGSPFMRHIDILTSMSGISVITALAIIADIIDVSRFKNSKHFTSYLRSAPRVESSNEKTVIKSTTKAGRKLSITLLSQSLNHFRDENEKLNRWYNHIISYKKKGIIRMALCRKVFTEIFQMLKKEEYHYFRNPVLHGKKMAEYIKFLEKEHCVFPQEFILAA

SEQ ID NO: 93778 - protein, 193 aa, Unknown
  Obtained from environmental sample
  DOMAIN (1)...(185): Flavodoxin-like fold
  misc_feature (1)..(193): Xaa is any amino acid
MKFLIITGNPKQDGLCHTVTEEARKGAETGGAIVDILNVTKIERCHVCGNGWGTCREKHVCAFGNDGFNEAQAKAYEADMLCFITPVYWGEAEESLKCFFDRIRRCEFDMPWGGPRDKKPAFSGKQVLLIASPGGSGNGMLSCLEQMDRFCRHTGAVIFDYIGINRWNNDYKKQAVFEAAKAMASGRKNGDSI

SEQ ID NO: 93779 - protein, 176 aa, Unknown
  Obtained from environmental sample
  DOMAIN (72)...(93): MORN repeat
  misc_feature (1)..(176): Xaa is any amino acid
VYEGETLNGVPHGKGKKTFTNGGVYEGDFVNGDLHGRGKIIHPNGNMYEGEFKYGHFNGKGKFTYATGGIDEGDYADGKLHGKGKQTFPDGGTYEGDLVDGKLHGRGKRKYSNGDVYEGNFTGGNPHGKGKFTWGDDGSVYEGDFFNNEFHGKGKMTYPDGRVVEGNWKDGEFLGK

SEQ ID NO: 93780 - protein, 498 aa, Unknown
  Obtained from environmental sample
  misc_feature (1)..(498): Xaa is any amino acid
DLGPLEDETTEPIAPETGADTVAEADSTDNADMGLPDFPDFETGENMELYGEDTPDSHEKAETDSANFDLGDIPDFGDIESQEQPAESEGEAVSEEAGDTGSSDLPEFDLVDIPDFEDTGSPVSSSDVESSSFDYTGTESDEDSFDFGSEPPDSGTEATLEDISEDGFDSFSPDSGSLGDGFDDIGSLDDFGNLDDLGIPSLDTGFGAKTMGKGKTPVKKGKTSKGGADDVEEISLTMEELEQFQETLSSYPLNLRIACEELIAEKAVVPEQMSRLISLLIEGAPAAETAALAGKLLDKPIPIPKGYEKRTGEDLEAEQSSFAYIFVHNFLPVLRLFMAIALVVLSAGYLFYRYIYMPIKAEGIYKLGIERIDAGEYSRANERFLEAYKIHPKKPWFYTYARAFRDARQYTLAEEKYRELLNFTASKNKRGIPEKSAVLEYADLETNYIGDYQTADSIIRRNILDYFPMDKDALLALGDNSLIWGEYDKERLKTPAKH

SEQ ID NO: 93781 - protein, 425 aa, Unknown
  Obtained from environmental sample
  DOMAIN (124)...(425): Penicillin binding protein transpeptidase domain
  misc_feature (1)..(425): Xaa is any amino acid
VLSEQADSLPGVFWESKPLRNYPDSGSLAHIIGYVGSITRDELTVLYNQGYQQGDIIGKSGIEKQYDELLRGKEGRETRTVDVRGRNVAGDNTRVNPEAGKNLVLTIDRKIQTLAEKALGRRMGAVVVLRPTNGEILAMVSYPWFDPNIFNQTDLETEYLALLDDPNKPFINRAIQSSYPPASTFKVIMTTGILAENAFPTEQLVECRGEIDYGDRQWHCHIRRGHGRLNLQRAMAQSCDIYYWTVGRDYLGIENIINYARDYGYGEITGIDLPGEVSGFLPTPQWKERRLHERWQGGDTMNTSIGQGYTLVTPLQMANMAAMAVNDGVIYKPHVLKEVRDPKTGAVETSVVPKIIHKSEVDPGVFALVRRDMRGVISEGTAQYPLNIRTVQIAGKTGTAEVGLPDNWHSWFTSFAPYETDRPEE

SEQ ID NO: 93782 - protein, 210 aa, Unknown
  Obtained from environmental sample
  DOMAIN (8)...(30): MORN repeat
  misc_feature (1)..(210): Xaa is any amino acid
VKDSSSVFEGDFVNGKLHGKGKSSYSSGRNQRVYEGDWDNGIKQGKGKLTYTISDEYNKTIGFVYEGDFVNDKYHGKGRMTYYDGTYDEGNWKEGYFIHGKWKFKDGSLYEGDIVDDIPHGKGKRTWRKTFSAAALAVYEGDFSAGKQHGKGKMTYYDGTFEEGNWKDGEFKGKGPFGLFGRASEKAAAELEREIARQKALNTLRIDIKN

SEQ ID NO: 93783 - protein, 215 aa, Unknown
  Obtained from environmental sample
  misc_feature (1)..(215): Xaa is any amino acid
MPEIAFQYQVPKKMIGTFVVDCFMVERYKFSNSVTDIPVEEGSNISDNIVEDPDVIHVEAFIGNTEFEVIVNDGNSVSNLQAPDRMARVMQAYQALKRMVKQRKTVDVVLGLETFTGMAITKFDIDRDAETGANLPFTMEFKKLKIVHSEATTINASTAKAGPAGDQTASTANYGTAGTEQPQNNIAKEEWRFAVRMGSASKEDYQREFGVPYPQ

SEQ ID NO: 93784 - protein, 408 aa, Unknown
  Obtained from environmental sample
  misc_feature (1)..(408): Xaa is any amino acid
MKNRQIFPVVILFFLVSLRLFGFDFSDLILSNDDRLLFKATFENQQTLFVSRLTDLNMQQLTAYPEKLALVNNGRSLLVQNRFGVSRIPVTGGIPSPLAGFPSFASGNVPLKGRAHEYAVSSDGKWLLYIEPVSPAFGNLYIVEVESGARLLVSEKIELPNTGFPACWNPDSRLFVYAKGGKLFYFPMLADLTVIADERFRYIGSGEINSVTWGQQGDFYYFTGNTLYRVLSPELFTRTIYGDFLSIGTVIAVLPFDFEPGFDKYWLAPNSGSVLINKKGKSLFLFLLGENQYNNSALPHIMLPQGEGTLNVLWPSSGPLTIVSSLKKEITVWRFEITGKTVRTLTPSSVPLSSNGALSPDGTKAVFWGDKGLELWDYSSWRLVQKISENKTLSCVWLNNREFITGNS

SEQ ID NO: 93785 - protein, 305 aa, Unknown
  Obtained from environmental sample
  DOMAIN (94)...(222): Polysaccharide deacetylase
  misc_feature (1)..(305): Xaa is any amino acid
CLSGADEFGFEENGRNQRIFARTGSEWFANTGRGAWTPAAEPVMRNVSLSSDRFRIFLEPQAAGPFTNIPMIRNTLSVGTTSLVSGYSANGAYKQGRNIRVALCFDLYDDETGLSQVLNSLRCFNIKATFFLNGDFIRRCPNAAAAIIAAGHETASLFYAPIDLSDARYNITPQFIAQGLARNEDEFFRATGKELSLLWHPPFFRTSDMINSAAAVVGYSTAVRDIDPGDWLSKEEALRLGIRQLSASQLIEQITEKRKNGSVIPIRLGSNPGGRDDYLFQKIDVLLDALIRSGCDIVPVSAIIR

SEQ ID NO: 93786 - protein, 258 aa, Unknown
  Obtained from environmental sample
  DOMAIN (165)...(236): Bacterial flagellin C-terminus
  misc_feature (1)..(258): Xaa is any amino acid
SALSASRQLGITSSNLDKTIRRLTTGKRINMASDDAAGLAISNRLGADIRVSTQARRNAQDGLAYMQVADGALEEVTALLTRAAELAQQAQTGTISSTNRKALDLEFQVISSAINNVAENAVFNSVSVFRTNAIYVAVASFEKIDFTIGTMEGNVKLSSLSITDDTAALAAQKKLDDLIQNVSMQRATIGSRMQYMNTISNTLGIQVENFTAAKSQIEDANIADEVISLTKFQILGQSGTSALAQSNQAAQLMLGLLR

SEQ ID NO: 93787 - protein, 290 aa, Unknown
  Obtained from environmental sample
  DOMAIN (4)...(60): Flagellin hook IN motif
  misc_feature (1)..(290): Xaa is any amino acid
AGDTYTIVNKDGVEKNITLQTGKTSLADLADAINASDSGVTASVVQKTPGKYHLVLSSADTGEGASFTVDGVERTDGSAVGIFASRTDNALGLANNKDNAFDTQYVKVTATAQNAKFTLNGTEMERRSNTIDDAVDGVSFTLNKAEAGKTVNLKVDTDVDSIAKAFQDVVNKYNTAYNAYKTATGKGGILSGDLSLQTIFSQLRSSITGSVEGATWNSEGGSSTGTVSMALLGMSTGRDGTLTLDSGKLLEALRQNPDMVGKVFDKASADTKGLIDKLTTAGGGTLTTII

SEQ ID NO: 93788 - protein, 166 aa, Unknown
  Obtained from environmental sample
  DOMAIN (1)...(153): Sigma-54, DNA binding domain
  misc_feature (1)..(166): Xaa is any amino acid
MSGGEAFIHQLNRRNKTLIRVAAAILQFQHSFFIKGPKYLAPLTLGDIAKELKVHETTVSRTANGKYMQTEWGIFEIRYFFTNSISGTGSNRSKFSKKSVKEIIREIIEAENRLLSDQDISALLKQKGIELARRTVAKYRKELDMGSSYTRKIQEKKQEGQNEHGN

SEQ ID NO: 93789 - protein, 68 aa, Unknown
  Obtained from environmental sample
  misc_feature (1)..(68): Xaa is any amino acid
MDGMEATKELRSIGYNSPIIALTANAVVGQQDIFIASGFDGYISKPIDIRQLNDVLNKFIRNKKKAWQ

SEQ ID NO: 93790 - protein, 93 aa, Unknown
  Obtained from environmental sample
  misc_feature (1)..(93): Xaa is any amino acid
MKLPLSHGSITVQVANAQAAAPAPTFIGQATLLNNQNMNVSEPTTETRVMPAVNNAGQLAQALNSLGVAPRDIISIFQAIKKAGALHAELVIM

SEQ ID NO: 93791 - protein, 249 aa, Unknown
  Obtained from environmental sample
  misc_feature (1)..(249): Xaa is any amino acid
MIVQYHKFALTAVFGLALAFTFSCTSVDDGDDGGSSNNSSGGASGPCPNAVTSDGFVSCGGQTYRTVQIGDQVWMAENLNYNVSGSKCYGEGGQVYDKESRTLITLSTAEIQANCDKYGRLYNWATAKTVCPSGWHLPSDVDWNTLIKFVNPSCNNNPDCDYTGAKLKATSGWKGNGNGTDDAYEFAALPGGEGNSAEQVFEQGGDIGYWWSASEYDSFNAKLMTIERVVSSYDYRDKTKLFSVRCVKD

SEQ ID NO: 93792 - protein, 243 aa, Unknown
  Obtained from environmental sample
  DOMAIN (14)...(242): MBOAT family
  misc_feature (1)..(243): Xaa is any amino acid
LYLNILGFIVENINIVFGKLFLPNPNISLPIGISFFTFQAMSYVIDVYRKETPVNRSVLDVALYISFFPQLIAGPIVRYHDINEQIKNRTHTTAKFASGVSRFVIGLSKKVLIANVMARLCDTVYGLPHESLTTVLAWFGALAYMLQIYFDFSGYSDMAIGLARLFGFELLENFNYPYISRSIREFWKRWHISLSTWFRDYLYIPLGGNRKGLVHTYINPIVVMLLCGLWHRANWTFIVLGYV

SEQ ID NO: 93793 - protein, 345 aa, Unknown
  Obtained from environmental sample
  misc_feature (1)..(345): Xaa is any amino acid
MYGGFAGLETSLSQRDVANNPTILDGQQTHCPVVQLNKLCVLDGFTVQNGKCTGQAQNGGGIWAGDSVVVENCKILNNSAYNGGGVFGKGRVRIINCVVYDNKAKGYGADMYGHCLSLAAEPFATPVPPAPPVPPGAILPAVSVATCNDTSSISGTVTYGDESNTDINTSTTTVGSQTWSAPVFVSGCNKTTFVGGSYLSPQNSDCRKSTDGSGRSYTGYGDLFSWCAVVRYASSLCPSPWRVPTNADFCTLDKALGGPSTCPSAGTGHYTSDVAAKYISVWGGSYGGRCYPDDGTLGNQGSNGYYWASVQYDANIGYLLNFNSSYVYPQYYLTKFNGFALRCVR

SEQ ID NO: 93794 - protein, 348 aa, Unknown
  Obtained from environmental sample
  misc_feature (1)..(348): Xaa is any amino acid
DRDFFASLGVKFECINDKPGQIAHRIVPEGESLIPCCKLLEDTHARDSSFVLGYVPDCDGDRGNLVIWDNTLGKARALEAQEVFALACVAEFSQLVWTQEFIPGKAVKAAVAINDPTSMRVDRIAEAFGISVFRAEVGEANVVTLARKLREEGYIVRILGEGSAGGNITHPSAVRDPVNTILAVAKMLSVSSMHERKGLFEIWCNYSNQAEKYREDFTLADIIASLPPFVTTPAYSKDAVMQIKTHDHAELKDKYQKVFLREWEERKEQLKKRFGICGWDAIAYNGTAERRGLTRFGEAGKGGLKVLFFDGEGTETAYIWMRGSHTEPVFRIMADASGTDAGVERFLL

SEQ ID NO: 93795 - protein, 94 aa, Unknown
  Obtained from environmental sample
  misc_feature (1)..(94): Xaa is any amino acid
LGLCLKKSVLNGNAVRNNQDVGSNKACANIAVANSAVCSTRSARLAEGRIRGGCAIGLKADGTVVVVGENENGQCNTGSWRDIVAIAAGGSNTV

SEQ ID NO: 93796 - protein, 285 aa, Unknown
  Obtained from environmental sample
  DOMAIN (6)...(94): Uncharacterized BCR, YitT family COG1284
  misc_feature (1)..(285): Xaa is any amino acid
LSTVWRLFLVTLAGVLMSLNIKTFVHAGELIPGGFTGLSLLLQKICLKFGNFNLPFSVPYYIFNSVPAIICFIFIGKKFTLYSLVTIFVTGLLADSMPTMFIDLIKVHDTLLSAVFGGALNGLSIAICLYAGATSGGSDFIAIYISERYRKDAWHYIFIGNCVILSVAGFLFGLDKALYSIIFQFTTTVALEALYRNYQQRTLLIITNKPDVIFSVINEKTHHGATCFEGFGSYEKKSRTMLYSVVTASQVKALIPAIRQIDEEAFINVLKTDQLNGRFYQKPYD

SEQ ID NO: 93797 - protein, 71 aa, Unknown
  Obtained from environmental sample
  misc_feature (1)..(71): Xaa is any amino acid
RAAALDDKIDAEHKALTEEVLAFIKEQPQMVKASVRLLRLSGYMERLGDHITNLCEGIIYMIEGSHEELND

SEQ ID NO: 93798 - protein, 525 aa, Unknown
  Obtained from environmental sample
  DOMAIN (149)...(511): Alpha amylase, catalytic domain
  misc_feature (1)..(525): Xaa is any amino acid
MAIIEHSASLPWCYYDKYSKRILIRISTSIDVNKVNIIYGDPFDFYKKGNEEYSWRSNEAAMDIKYISENAFLWQIELMPLKWKRMMYVFKIEIKEQNEMNLYYFSENGPVLFSEKEIIEPYAHFFLPFIHEIDSPCVPEWAANTIWYQIFPERFLSGDDSISPHGCCNWENGRPEYGNFFGGDLIGIRKKLEYLKNLGITGIYLTPVFTSPSNHKYNTSDYLNVDPHFGGKTALKELVKEAHNSGIRIMLDVVLNHVSSKHHFWQDVLTNQENSPYKDFFHIHSFPVGEWYSDYKAMNFDSFSFQADMPKWNTENKAVRDYLIGAACYWIKECDIDAWRLDVADEVTFDFWRDFSSAVRQIKDDFFILAEIWHDATPWINSNCFDSVMNYPLSFTIKDFFLKENISVSEFNRRLFIIISRYGKMHTEGAFNFLDSHDTPRILTTANGNRQAVRNALTMLFLLPGSPCIYYGTEIGMEGGQDPDCRRPMIWNEERQDKDLYKFIQYLTDFRKKNIDLYTNAAWLV

SEQ ID NO: 93799 - protein, 91 aa, Unknown
  Obtained from environmental sample
  misc_feature (1)..(91): Xaa is any amino acid
LWKGKLNSAEIQIAQITDFTAPFNRADNLRYEIFIDKKLTAPLPAGAIAGYYVIYDDYGEVNRVPLITQRSYEKGNIFKRFWHSIMLLFVK

SEQ ID NO: 93800 - protein, 355 aa, Unknown
  Obtained from environmental sample
  misc_feature (1)..(355): Xaa is any amino acid
MAGVTREVVLPLLKKLELLLCDFTEREAETPQVGRTHGQHAVPITLGFAIAEYVSRLGKSILEIEQRSKELKGKLAGAVGAYNATSMIVQNPEELERLYLAELGLEPSEHSTQLVEPEYLLRLLLEFNTAFGIIANLADDLRNLQRSEIGEVREGFAADQVGSSTMPQKRNPWNSEHVKSLWKAFMPRVNTFFMDQISEHQRDLSNSASQRFIADYIAGFCLAISRMMGVIEGLGADRERLLSNLRGGGVLAGGSSGGVLAEPAYILLAESGVSDAHEVIRKITLNAEKSNISFAHALVQEPDVLQRVGGKMVELGLVSSPEEALSFFNKPERYCGLAAHKAKSLARKYKTLMGG

SEQ ID NO: 93801 - protein, 90 aa, Unknown
  Obtained from environmental sample
  DOMAIN (2)...(89): Chaperonin 10 Kd subunit
  misc_feature (1)..(90): Xaa is any amino acid
MKVIPLGDRVMVKLEKNEAKTAGGIIIPDTAQEKTQQGTVTAVGPGTEKEKITVKNGDKVMYDKYAGTQVKIDGEEHLILRMNDIIAIVE

SEQ ID NO: 93802 - protein, 172 aa, Unknown
  Obtained from environmental sample
  misc_feature (1)..(172): Xaa is any amino acid
LNKLNRLLFLFSLFFIAALSSCSKLGYGVLLWSIDEPPVDSGTVLPVYIKSNIEKIWVVGIPNLAKSHKDYKKEIPLTQLEFLGSKRKAQKWAETFGPYAMLYAENLQDGLPIRDNTDNNAKRVYRLRLGEIVKVLGTAKGVPPISTTGDPLPGEWYRVLTNERRYRLLFFF

SEQ ID NO: 93803 - protein, 206 aa, Unknown
  Obtained from environmental sample
  misc_feature (1)..(206): Xaa is any amino acid
MPQDIQAILDQARREDTAGNHPAALIKYRLFLKHEAGDAQAWADYAGCLLAAGRYEDSVRACDTALGISPGLEPALINRAAALVGLGRFEEAKWIYGGLLASCPDRTEFIVGMQKCLYRMGDIASMEPILMKILDSNPKHEEALSLLTAVYTVKGETGKLLEWSWKFLELKFEGEELLWEKSALLLKMGDFKEGFRLFENRPSKKK

SEQ ID NO: 93804 - protein, 196 aa, Unknown
  Obtained from environmental sample
  misc_feature (1)..(196): Xaa is any amino acid
MTSGIHSILDQARKEDGEGNTSSALMKYRLFLKYEASDPQAWADYAGCLLVAGRHEDCRNACVTALELSPDLEPALVNMAAALVGLGRLCEAKDIYANLSSSRPDRTDFALELQKCMYTMGDVAAMEHGLLKILDSEPNNEEALGLLAAVYAARKDWGKFKACSMEYLEAKFKGEGLLCEKGKLLIRLGHFGEGLR

SEQ ID NO: 93805 - protein, 459 aa, Unknown
  Obtained from environmental sample
  misc_feature (1)..(459): Xaa is any amino acid
VIQISSPTQGPGSPQETGYRQESNAVENLSGDSPIWKGAQKKNKLGVFAKLLQGLSVKLTKGGAVSNSDSSELSEIEEPNPKGNGKTTKKLASLAINDKKPPFGMEILNGEGLEEGFFNALMGEINLEPVESKAEDPLFSDWLPEIKQKNDLLNSNLNPNLNLNPSQLIAAESEKTDSVPDFPGSKALANEQALSGGKAKGGRNSGFLNVSFREAEAEFLRNQPLAEKAGSGLVSQAAGRENAPPSETRGRKSKERLNIEVRDLRTGEGQREALAQAENTVSLREAIEANLRPLSKMETEIPVELDLNKGSVDGKADGSSLSRSFEDALAAQLRGNLSTDIVRDAAVIVRNGGEGTIRLSLRPASLGDVKIRLELTENKISGHIMLKVMRPFALLNGSFLFWKRLSRIRASARPVLKCSLHRKIPQAEGLLAVVKKGRKWILWFRRWPRPATRPNPNRA

SEQ ID NO: 93806 - protein, 162 aa, Unknown
  Obtained from environmental sample
  misc_feature (1)..(162): Xaa is any amino acid
MPDRYENPLCKRYASAEMQRLFSDDTKFSTWRRLWIALAESQRELGLDISAGQIDEMKAHINGINYEAAAKFEVETRHDVMAHIRAYGEQCPMAKPIIHLGATSCYVTDNTDIILQHSALLLIKKLLINTLAKLYDFADKYKTLPCLAFTHFQSAQPTTVGN

SEQ ID NO: 93807 - protein, 531 aa, Unknown
  Obtained from environmental sample
  DOMAIN (16)...(81): His Kinase A (phosphoacceptor) domain
  misc_feature (1)..(531): Xaa is any amino acid
AGQERQKEEAEAANRAKSTFLATMSHEIRTPMNAIIGMTTIGKSALNIERKDYCFMKIEDASNHLLGVINDILDMSKIEANKFELAPVEFELEKMLRRIVNVINFRIDEKHQELSVHIDRSIPHVLIGDDQRIAQVITNLLGNAVKFTPEKGSITLTVRLAGKVNDLCTVEFSVSDSGIGITPEQQKKIFNSFEQAESSTTRKYGGTGLGLAISKRIVEMMGGSIWIESEPEKGSVFFFTIKVWCGTEEKYVSLSPEINFSNVRILAVDDEADVLAYFKEITQDLGIMCDTAMSGEKALELISKNNGYNIYFIDWKMPIMDCIWLAREIRLRRYDNSIITMISAAEWGDVAEEAKTAGIDKFLSKPLFPSAIAEIINECYGVNKRHIEKAPSEEIEGVFEGRRILLVEDMEINREIVRALLEPTKLKIDCAENGAEAVLMFEKFPTQYDVIFMDVQMPEMDGYDATRRIRAIEAGLNKNNPDRRLKRIPIVAMTANVFHEDIKKCLDAGMDSHVGKPLDFEEVIKKLHDYW

SEQ ID NO: 93808 - protein, 488 aa, Unknown
  Obtained from environmental sample
  DOMAIN (24)...(466): Amidase
  misc_feature (1)..(488): Xaa is any amino acid
MLLFESSALELSALIKAKKLTVFELTSAYIDLIKKNDSRYNAFLTLAKEKALTRAKEIQSQLDKGEALSPLAGVPIAVKDNISTEGIETTCASKMLKGYTPVFNATVIEKLEKAGMVVIGKTNMDEYAMGGSSETGASGPVHNPWDTARVAGGSSGGSVAAVAAGEIPIALGSDTGGSIRQPCAFCGATGIKPTYGSVSRYGLVAYASSLDQIGPVGQNIDDCAALLSIISGPDTRDSTCVIEKPFEFGEAPSGLQGVKIGLPRNYFSGGIDDEIKSAVLAAAKEFQASGAIIEEFEMPLMDYMIPAYYIIACAEASSNLSRYDGLKYGYRSAKAQSLSEVYRLSRNEGFGLEVKRRIMLGSFVLSSGYYDAYYKKALQVRALIKDAYTRLFTKYDMILSPVAPTTAYKIGDNIGDPMKMYMGDIYTVSINLAGLPSAALPCGFDTAGLPIGFQLIGDAFSESKLIGAARVYQARTNYHMKRPEGAKT

SEQ ID NO: 93809 - protein, 364 aa, Unknown
  Obtained from environmental sample
  DOMAIN (256)...(324): PET112 family, C terminal region
  misc_feature (1)..(364): Xaa is any amino acid
MKWETVIGLEVHAELSTKSKIFCGCTTAYGGEPNTHVCPVCAGMPGVLPKLNRSVVEYALRLGIALDFNITKHCKFDRKNYFYPDLPKAYQISQLYAPICRDGHLDIEVDGKKKTINIREIHMEEDAGKLIHDAKGAGTFMDFNRCGVPLLEIVSQPDFRSAAEVIAYLEKLRETLLYLEVCDCKMQEGSIRADINLSVRREGDELGVRTETKNMNSFKAIARAIEYERTRQIEILEDGGQVVQETRRWDDEKLESYSMRSKENAQDYRYFPEPDLLPIDIDDAWLASIRKDLPELAYQKRERYCHDFGIPESEAAVLTVHKNICDLFETIAQKSGQPVEAAHLLTGEIMRLMNNANVCRKIWL

SEQ ID NO: 93810 - protein, 55 aa, Unknown
  Obtained from environmental sample
  misc_feature (1)..(55): Xaa is any amino acid
MNQYRTHTCGELREKHTRQTVTLSGWVDTIRDHGGVTFLDLRDQYGVTQIVLHDD

SEQ ID NO: 93811 - protein, 416 aa, Unknown
  Obtained from environmental sample
  DOMAIN (167)...(416): Glutamine synthetase, catalytic domain
  misc_feature (1)..(416): Xaa is any amino acid
MKDIPSLFGSMVFNETVMRERLPKDVYKALKKTMSKGTHLELDIANVVANAMKNWAVENGATHFTHWFQPMTGTTAEKHDSFISPIGDGKIIMEFSGKELVRGEPDASSFPSGGIRATFEARGYTVWDVTSFAFIKDGTLCIPTAFCSYSGEALDKKTPLLRSMEAISKQAIRVLRLFGDTTAQRVLTTVGPEQEYFLIDKEMYLKRPDIIYTGRTLFGARPPKGQELEDHYFGTIKPRVSAFMKELDEELWKLGVNAKTKHNEVAPAQHELAPIFSTTNIATDHNQLTMELMKSIANKHGLACLLHEKPFAGVNGSGKHNNWSISTDTGINLLEPGDTPNDNAQFLLFLVAVIKAIDEYQDLLRVSVASAGNDHRLGANEAPPAIVSMFLGEELTEIIEAIESGQGYKNKEKLDM

SEQ ID NO: 93812 - protein, 502 aa, Unknown
  Obtained from environmental sample
  DOMAIN (1)...(225): E1-E2 ATPase
  misc_feature (1)..(502): Xaa is any amino acid
SGNAAKRLSEMVETTACAARKYKDKESGETFSQKKEIPMDEIVVGDVVYLAAGDMVPADVRILQAKDLFISQSALTGESEPVEKFAETAAKIGNNPLEMNNLAFMGTNVISGSATALVITVGDDTVLGTIAQQLQTKKVPTSFEKGVNSVSWVLIRFMLVMVPVVLLINGFTKGSWFDAFLFALSVAVGLTPEMLPMIVSANLAKGAVSMSKKRVIVKSLNSIQNFGAMDVLCTDKTGTITQDKVILEYHLDIHGEESVDVLRQAFLNSYYQTGLKNLMDLSIIEYARKAELTNLWEDYKKVDEIPFDFNRRRMSVAVEGSSGRVELITKGAVEEMLSISDQAGYQGTAEPMSGELREKILSTCRKLNEQGMRVLGLAQKTVTLPATLSAADESSMTFIGCLAFLDPPKESAGMAIKALGEYGVKVKVLTGDNDSVTRTVCNSVGLDAGHILLGSELETMNDEALKKAVDEVDIFAKLSPSQKARIVTALRDDGHTVGFMGD

SEQ ID NO: 93813 - protein, 164 aa, Unknown
  Obtained from environmental sample
  misc_feature (1)..(164): Xaa is any amino acid
MPAKKYIVTLTEDEKKTLKVIINKGKYSAEKRKRAQALLLADENYTDEMIADKAGMSRRGLEQLRQRFVEDGFEVTLEGKPRGHKPKALGAKDEARLIALACSPKPDGRTRWSLRLLQQTWKTLAYTDTKTVSYQTIRRTLKKTKLNLGAARNGASRRRGSLSL

SEQ ID NO: 93814 - protein, 151 aa, Unknown
  Obtained from environmental sample
  misc_feature (1)..(151): Xaa is any amino acid
MQEEARNSLLKLLEEPPARLTVVLTAPRPLSLIPTILSRLRPYAFNSRDAEAEQEVIRRVFKAEGYKGGIGFYLDSFLPVTQDALEALAAFFAASVAYRAALLSKRRNRPLSGEVVLLGKSSAPKAEAAGFGRPKEDTAAVINLIIEKAAK

SEQ ID NO: 93815 - protein, 441 aa, Unknown
  Obtained from environmental sample
  DOMAIN (69)...(390): Aminotransferase class-III
  misc_feature (1)..(441): Xaa is any amino acid
MMKKKAKPAKKSAAKKSSSVKKSSAVKKSSAKKSKSASVKKVKKAAPKIMLDVSPEEIFVPTYKRGGAPIVSGKGMYVYDSDGKGYLDFGAGIAVNALGHAHPALLKELNAQGGRIIHTSNLYYNEPQIELAARLVKHSFATKVFLCNSGTEANEGAIKFARKRGTKVSDQKFHVLSFSDGFHGRTYGALSATAQPKFHVGVGPLPDGFHYTPYNDIQCAKATLDKYDFAAIIVEPLQGEGGVNPADVEFLRFLREYATEHSISLIFDEIQCGMGRTGTLWCHEQAGVTPDIMTLAKPLGGGLPLGAVLCIDEVAACISPGDHGTTFGGNPVACALGAKLIDIVSDKKFLEKVKATGDYLKEKLSALAGKFPSIDHIRGTGLIIGVRMKDDPLKLVDECRNRGLLVIKAGMNTIRFMPPLIAGRKDVDRAVKIFESALSAG

SEQ ID NO: 93816 - protein, 263 aa, Unknown
  Obtained from environmental sample
  DOMAIN (6)...(240): Amino acid kinase family
  misc_feature (1)..(263): Xaa is any amino acid
MADSVGMAVIKIGGSTVDTPGLLEEFARSVENFQHNHLPIIVHGGGKDIARQLDKLNKESVFVEGMRVTDAESMRVVQMVLSGDVNKRIVHELVKRNVPALGLSGVDGGLLIATKMLVNGQDIGFVGEIGVVRDEIIRALFSVGYIAVISPVSHGLHGDIYNVNADSAAGDIARAMKVGDLIFISDVPGVKIGGAVRGVIRVSEIEGLIEAGDVTGGMIPKLRSAAAAVEAGVGRVHICGWHGATTLMDEMDEKTALGTTIQK

SEQ ID NO: 93817 - protein, 266 aa, Unknown
  Obtained from environmental sample
  DOMAIN (86)...(242): Semialdehyde dehydrogenase, dimerisation domain
  misc_feature (1)..(266): Xaa is any amino acid
HAASAELLLPVIDRGIKVVDLSADFRLRDANVYKEWYCDEKHPEHVAPHLLERAVFGLCEHYRDKIAGASIIANPGCYVTSVLLPLLPLYKGGVPIDWVIADSKSGVSGAGRGLKQSTHFPEANENFSAYSIGHKHRHTPEIEQELSVAAGRPVTITFSPHLLPVNRGILSTIYIKTESGAAECGDIVKKFYAGSDFVRIREASDLPQISSVVHTNYCDIAFTGGGGGQPVIAVSALDNLVKGASGQALQNMNIMFGLKESAGLLR

SEQ ID NO: 93818 - protein, 121 aa, Unknown
  Obtained from environmental sample
  DOMAIN (50)...(120): Prokaryotic dksA/traR C4-type zinc finger
  misc_feature (1)..(121): Xaa is any amino acid
IPPIDQEFLDKMEAALLVLKSEIVNKLIASNEDFKEIMEGEEPKDLADIASDDMDRKMIEAIGTQELKQLKLIESAITRIKQGKYGHCIKCGKRIPQDRLIAIPYALMCIECKSEEERRNR

SEQ ID NO: 93819 - protein, 695 aa, Unknown
  Obtained from environmental sample
  DOMAIN (577)...(693): DEAD/DEAH box helicase
  misc_feature (1)..(695): Xaa is any amino acid
MLLAKIYSARPGRYFTIIPQEIDAAEFAADLDSLSGVPCLQFPGWGIAPYRELAPHSAVFGERIRALSELVTGKPGIVVIPQRAFLSPLPPPDYIKSLLVSIKPGAKIDTAGLSRKLVSYGYIRVPRVQVRGEFALRGEILDIFMGGDESGAEDEVEAFRVLFDFDKVESVKRFNPSTQGGGLGKEKLAELLIRPMRELVWTDDRIETLSANLAACKEFSDGGKAIIEELITHRNFAGEEMFYPLAGTGDWGLGTGKNSILEYLGSEGTLVLVDRERLDNAQESISREYHGLYMRSRRDGESREFPLPERLLLNFKELIERHGEVKGRKIISFLSIKNEARPGCCRVSIPCEPSRSFFGNINYMKDEFAALHASGWHIAVAAESPVQAERIESMLVPHKSLSIIASPLSSGFSLPEIKLMVIQENEIFGRRKRPPRSLKTVRSSPIDTFVELNPGDYVVHVNHGIGLFKGIERINTLGFERDYIQLEYAGDETVFVPVEQLNLVQRYIGNEGNAPRLDTIGSKSWENRKGRVKKSVEDIAQRLLELYSKRKQSTGYAYPKDTEWQTMFEAAFPFEETEDQLRCVEEIKRDMESSSPMDRLVCGDVGYGKTEVAVRACFKAVMGGKQAAFLAPTTILAEQHYENFKERFSIFPVRIAMLSRFVDHKNTRTILGQLKNGEIHLLIGTHRIIPRDVAF

SEQ ID NO: 93820 - protein, 195 aa, Unknown
  Obtained from environmental sample
  misc_feature (1)..(195): Xaa is any amino acid
MKAVILAAGRGSRLKRHTDERPKALVELAGRPILAWILESLAWAGASPLAVVGGYRHELIEAFAVQSQFPFRTLVNSLWSETNMLASLSCAAEWVAGQESLISYADIVYPVQHVRAIMADNRPITLTYDLEWEKLWRLRSNGDPLADAESFRAEGGLLKEIGAKPENPAQVQGQYMGLLKLTPAGWAIWLNQVSA

SEQ ID NO: 93821 - protein, 231 aa, Unknown
  Obtained from environmental sample
  misc_feature (1)..(231): Xaa is any amino acid
LAVNREQGTGNREQIIESGTQATSVSQAAACTENTGKKPDPVIWRLLFGFSKEGSAVFHGHLSLIEIFSMALCRAGLDVQYTQGFNPLAKLEIVSPLSVGISAGGEIAAVEFLHAIQPREFLEKMNATLPEGLKITKAECYCIPSGSKKHSLSSLLWGFGYAGIDGETVYIPAACEKAHREKHLSSGQTLFSLRRSCVLARNLIDDSQTSSQPWAAYFDVYGRLYQITGNR

SEQ ID NO: 93822 - protein, 269 aa, Unknown
  Obtained from environmental sample
  misc_feature (1)..(269): Xaa is any amino acid
FIAADIAGVYLQPEGPSWPNHGSSLGNGRPIDEYLMTETQRMAKWYGNYASFCMLACGNEPAGRWVPWVSRFVDYWKATDQRRVYTGASVGGSWAWQPKNQYHVKAGARGLAWNARPESVSDFTSKIDTVRQPFVSHETGQWCVFPSFDEIKKYTGVNKAKNFELFREDLADNDMASLAHNFMMASGKLQALAYKHEIEKTLRTPDYAGFQLLCLNDYSGQGTALVGVLDVFWDEKGYINASQFRRFCCETVPLMRTAKFTYHNNESLN

SEQ ID NO: 93823 - protein, 321 aa, Unknown
  Obtained from environmental sample
  DOMAIN (248)...(292): RNA-metabolising metallo-beta-lactamase
  misc_feature (1)..(321): Xaa is any amino acid
MFMGENVSFEFYDAGHILGSAIAEIKIKKGGEELNILATGDLGRKGKPIIRNPEVPKSAPDYIILESTYGDRRHDSTDDALKKLAEIAKRTVQNKGKILIPSFAIERTQELVYYFHILVDEGIIPEVPIYVDSPMATNATTIFQVHPECYGEEIKQAFIKHHKNPFGFNSLHFTTSVDESKALNEQKGPLIIISADGMCEAGRIQHHLIHSIQDPNTTILLVGYMAENTLGRRIRNREGEVKIHGMWLKLKARVEEINAFSAHADYVETVEWLNELDKSRLKGIFMVHGEKKAQAALKKYLAEQGYANTEIVKYGKTYEMD

SEQ ID NO: 93824 - protein, 291 aa, Unknown
  Obtained from environmental sample
  DOMAIN (32)...(287): Bacterial extracellular solute-binding protein, family 7
  misc_feature (1)..(291): Xaa is any amino acid
LPVRFYIFLSALTRVFAQRGGRSQGEAIEVRLASPLPRNSDWGRALDRLAAEWARVTNNEVRLRVIHDGLEGGESKMLSSLSADNIQAGLFLSSGISEICPAVMTLSIPFFIKNETELDLVLSDVLPVLDAQMSKTNFVTIAWAKGGWINIFSKDSVIVPDDLRRQKLATNPELKDMNLVFKTMGYNMVEMDFIDLGPKLANNVVTAVYLTPAAVAPLGLHKNLKNMLDIPIAPFVGGIVVNRVTWNKIGPDRQKELVRVTKVMAAEFDASMPKTISNAVLMMGRDGLKVN

SEQ ID NO: 93825 - protein, 283 aa, Unknown
  Obtained from environmental sample
  misc_feature (1)..(283): Xaa is any amino acid
GRALAFAAIALGTIAALPAIAKFIWAFEPPQPFFSWVDTLYNIAWFIRVPAILLLIAAALTGMPIFAAIGGIALIMLQAAGLEPEAAPIQIFSALTDTDIIAIPLFTLTGFFLSESKAGERLVRTFRYFFSWLPGGMIIATVIICAFFTSFTGASGVTILALGGILFTILTENKYTERFSIGLLTSTGGIGLMFPPSLPIILVASTSNTILHFMNIPSHYSIIHFFVGALIPGIILVLAMMAAGIFASMKIKIPVETFDTKQAFRSLRESLYEILLPIILVLG

SEQ ID NO: 93826 - protein, 431 aa, Unknown
  Obtained from environmental sample
  DOMAIN (164)...(324): Radical SAM superfamily
  misc_feature (1)..(431): Xaa is any amino acid
MPEKFILGLGIPFPGCLAGALVCAESAKVFFGEKVVTVAGGGYVNTELRYLEDERVFDYFDYLSFDRGYGSLNAIVERETADVKISDDTALYKTMYRNRKGSIIKDNGITKNDIKNNVGISIDDDSAVTVFPDYSGVDFSRYIHPADDENSMHRLWSDGRWLKAYLAHGCYWHNCAFCDTSLDYIRCYQPVDVDALFHHLLAQAEATGIRGVHLVDEACPPASLLRLALLNREAGLPLVFWGNIRFEKAFTPDVAAILAAGGLMGVSAGIEVATEKGLQRIGKGVDVQGIVDVCAAFKEAKILVHAYCIYGYWDQDEQEIADSAEVLRQFFAEGLLDSAFWHQFTLTKHSRVYAEKQKGLHPLLKPNGDPLCGKMAKSKGKIFALNDLSFAGEEKFDRYAEPLHRLLGEWMRGDTSWPNNNDLLKPKIAPH

SEQ ID NO: 93827 - protein, 113 aa, Unknown
  Obtained from environmental sample
  misc_feature (1)..(113): Xaa is any amino acid
MYETVIFNRLGKDEIGKIVDIQLAQLCSRLTERKVELKLTKAAKELLAERGYDPLFGARPLKRAIQADLENPLAKAIIAGKIKEGDTVTADKNSEKGSEALSFKKSASSKGNT

SEQ ID NO: 93828 - protein, 156 aa, Unknown
  Obtained from environmental sample
  DOMAIN (3)...(117): GTPase of unknown function
  misc_feature (1)..(156): Xaa is any amino acid
MSIKIALAGNPNSGKTTLFNALTGSNQFVGNWPGVTVEKKEGKLKGCKDVTVTDLPGIYSLSPYTLEEVVARNYLIDECPDVILNIIDATNLERNLFLTTQLTELGIPVVMALNMMDVVRKSGDKIDTSRLAKELGCEVVEISALKGDGIAEASSA

SEQ ID NO: 93829 - protein, 76 aa, Unknown
  Obtained from environmental sample
  DOMAIN (2)...(74): FeoA domain
  misc_feature (1)..(76): Xaa is any amino acid
MQTLKEIKPGETVRVVKIGGEGPVKRRIMEMGITKGVEIHVRKVAPLGDPVEVSVRGYELSLRKADAESIEVDSGN

SEQ ID NO: 93830 - protein, 214 aa, Unknown
  Obtained from environmental sample
  misc_feature (1)..(214): Xaa is any amino acid
MEAVQTQPTYPRGLDFEQVWAALMEDRENLRETDRMMKENAEQHEREMKELREIQKETALQMKESKAEFNERLGNYINLFGDFTEYIMAPKLREKFMEFGLVFPRTNRNVSVKDENNNTLLETDVMLENGDKAMMVEIKTELTVERINKHIERLEKMRKHSDLHGDKRTFLGAVAGVVVADDVREYALNQGLFLIEPAGEELNITPPNGKPKEW

SEQ ID NO: 93831 - protein, 410 aa, Unknown
  Obtained from environmental sample
  DOMAIN (64)...(179): PAS fold
  misc_feature (1)..(410): Xaa is any amino acid
MSDNTKQHPDIAALQKENKTLARKLKETEYLVSSYEQYAIFQKSIYESIKKQKSEQDTYLRLIFGNTPDVILVLDANLMYVLGTKNSMRVLGINTDALTGQDVSAVFLQIMPMDWVSALTNDLRSVLSSGIGKRFGRFVTTAHGSEYYFETSVIPIKDDNTGAVTGVILTMHDETTLHEAVLSAERSNRAKTNFLAKISHEIRTPMNAIAGMAELILREHISGLVREHALSIRQASGNLMAIINDILDFSKIESGKLEIVETEYQFASLINDVISIIRMRVIDKQIFFTTNIDCDIPGRLIGDEIRMRQILLNLLSNAFKYCDRGFISIHVSSEKASDGAVTMVFDISDSGIGIKPEDHARLFTDFVQLDKVAHKEVEGTGLGLVITKSLCEAMGGSIDVYSVYGEGSTF

SEQ ID NO: 93832 - protein, 220 aa, Unknown
  Obtained from environmental sample
  DOMAIN (51)...(160): NlpC/P60 family
  misc_feature (1)..(220): Xaa is any amino acid
LQAIFAGQLAAAPLDSGFALAPKASASQAEKDAAYQEARSRLIIAAGKYERTPYRYGGRDRKGLDCSGLVFISFLDALGISVPRSAESLYSWVEKVPIDNAQPGDLVFFRTTKTNKISHVGILAGDGRFIHSASEGPATGVMYSRLDEKYWSRTYAGAGRAFPAAGAYDSADRENALTRSQKESGKEKSTAGKQKDSGLLIGFAAAPTWNFANGNVLGGA

SEQ ID NO: 93833 - protein, 235 aa, Unknown
  Obtained from environmental sample
  DOMAIN (29)...(214): Peptidase family M48
  misc_feature (1)..(235): Xaa is any amino acid
LGRAVAANILAIYKPYTANPALTSYVNLICQSIVINSPNPEIFNGYHTLILDSPEYNAFSSPGGHIFITKGLVELTVNEDMLAAVIAHELAHIMLKHSINIINTMKFNDDMSAIGDRASAFAGGSSAAAQRLLVFRDSVGAMMDTLIKNGYSQEQELEADQEAIILLAASGYNPMAIMDVLKVLQSKENSQRSGFNTTHPSTSERIANVGIWIGNRQTRDNSSLRADRFRKIMEK

SEQ ID NO: 93834 - protein, 128 aa, Unknown
  Obtained from environmental sample
  DOMAIN (5)...(110): Ribosome-binding factor A
  misc_feature (1)..(128): Xaa is any amino acid
MQNNRTERLGILIQELISALILEGRIKDPRISQFVSITRVNVTRDLSYADVYVSNIRETANLERNAQGLQSAAGFIQAQLGAALKIRKIPHLRFHADTSIREGFDMVQKIEQLTKEDGVRSSDTVEVK

SEQ ID NO: 93835 - protein, 875 aa, Unknown
  Obtained from environmental sample
  DOMAIN (366)...(474): Miro-like protein
  misc_feature (1)..(875): Xaa is any amino acid
MAEEIENIQKPKAELIKHTQADHSSAKSPAAQEGGLPESQERRKSKVIVVKRKPAASTGGTDQGSQPTVSLGARKKLVVASHPKDEAQESAEKTATPSETQSQADGTPVKQYDASATGSKVSPGAASTPFPFTQRPAVAVGRVGGKQVGRKIHDDNRSGGSAGGGNAVRSSASKGAGQQRHPSPVPRQNQGFRQNFGAQQHNTPRPGSQGRTGFTPRPGGQGRGGPAGSSPPSILPEGKSGAKRSFKAKRPTYNRKEKELEMEEKLRQTRKKITYVANPVPKSIEIMENISVSELAKKMNLKASDLIQKLMKLGMMVTINQQIDADTATILAAEFGADVKIISLYDETIIDTGTDEGADMLPRPPVVTVMGHVDHGKTKLLDAIRKADVVSGEFGGITQHIGAYMVETPHGRITFLDTPGHEAFTRMRARGAQVTDIVVLVVAADDGVMPQTIEAINHAKEAGVPIIVAVNKIDKPEANPDRVKSQLSELGLMPEEWGGQTMFVELSALQKIGIDKLIDTILLEAELLDLKANFHRSAEGKILESRIDHGRGIVATVIVERGTISVGNSFVAGIWPGKVRAIFNDRGDKLKHASPSMPVEILGFEGIPNAGDPLQVVDDEKIAREFSSKRQELKRFEDAKNFKQVTAETLRDRISDGTIQELKVIIKADVQGSAEALKSSLEKLSTKEIRLHVIQALPGPINEGDVDLAIASKAIIIGFNVRPLPKAKILAEQEKVDIRKYNIIYKAVEEIHQAMEGMLKPDTREEVIASVEVRNTFKVPKVGTIAGCFVQSGVVKRSASVNVIRAEIVIHSGKIASLRRFKDDAREVAAGYECGIGLEGFDDIQVGDQFEVIEIVEVARKLSPNREQPPAASQG

SEQ ID NO: 93836 - protein, 207 aa, Unknown
  Obtained from environmental sample
  DOMAIN (151)...(206): PASTA domain
  misc_feature (1)..(207): Xaa is any amino acid
EFRSSESGAAQKIFQQETVRQVIKPETAKTLTEILEKVVSEGGAAKAKVSGYHFAGKTGTAEKIKKSGYGYEAGRYIASFAGFGPVENPQFAAVIVLDEPDGQYYGGQIAAPVFSEIMSQIMIYSNVQRKEKTAAESNGQRPLLPPQNGKTQVPNLYGESIKSVRETLKKQDLKFIPQGDGIAVMQSVTPYEEVDVQTEVIVYFEQR

SEQ ID NO: 93837 - protein, 194 aa, Unknown
  Obtained from environmental sample
  DOMAIN (10)...(109): Flagellar hook-associated protein 2 C-terminus
  misc_feature (1)..(194): Xaa is any amino acid
MSDVYIPGVKSRFNTDQVIDGLMKLEKIPRDRVQSNMDTLRVQKGYWQEVGRRINTLRDSARGLYSFQNPFNERIGQSADDSVITAIAGRDVPEQSFTFTVKQTAQADRFLSQPLDEKTKIEAGTYSFSVGKDEISINYRGGTLKNFVETINNRGRNKISASLMTVKSGTISLLIESKLTGSRNRLAFSQDASA

SEQ ID NO: 93838 - protein, 569 aa, Unknown
  Obtained from environmental sample
  misc_feature (1)..(569): Xaa is any amino acid
MGPGSTFETSAESWVLFALSGVIMLVITRSATILLSKAREHQTSFNNLLATMENYVAMVDENNKIVYASKTLSQLGNIEDPANVQGWPLIDLFPGKRLKVFAGQMLKNKDNYAEDWEFSLNGQKRYFKASSHALPGTTGNSLINLYDMTYLAERDEIAAMKDSMKIGLFYMDQNCVIQDHYSRYLEELLSEENLFGKLFTDVIANSVTPKELVSIKDYFGMVLENTYDQEMLDDINPLNELHYINVRTGDRKVFQCAFTTVERGHGELFLLVTVYDITARVELQQKLAEEEAKRQEEMQAVFELIQIEPAVFSDFMEDMEFEFGTIDKILKNDELSAHDALVKVYQSVHAIKSNAVILGLNVFGNKVHNLESKIKKLREQEGEVPFVEMLNLTVDIEKISNEREGFKEILDKLQSYAGGGGGLPGVGGTGGARQNVKVLVESLTKTTTRVAQDMGKQIKFAAAEVDPEALDNSPRRVIKDILMQLIRNSAVHGIETPDERKKKGKNETGVVKLSIKMTEDQKHVLVKLSDDGNGLDYKKIAVKAIQKKMLKKEEAVKKDLLLKVIFMPG

SEQ ID NO: 93839 - protein, 269 aa, Unknown
  Obtained from environmental sample
  DOMAIN (1)...(269): Fumble
  misc_feature (1)..(269): Xaa is any amino acid
MILGIDIGTTTTKAVTIEDGKLTRMVKTKAVDAVTAATGAFGKIVLENGIDIHLIEKIKITGAGAAKIKNDIFGIPTERVNEIDAIGIGGMYLSGEKNIIITNIGTGTVIIEAGDKGISHFGGSGVGGGTILGLAKKLLPTAEFSDIMELAKTGNISQVDLLLGDITDTGISFLSKESTAANFGKMLDTAGPSDIALAIINMVYQVIGVLSVFAAKARTTDRVIVTGNGSANPIGQKIFSGITGMYGIKFIYPEHAEYTTAVGAGIFKT

SEQ ID NO: 93840 - protein, 81 aa, Unknown
  Obtained from environmental sample
  misc_feature (1)..(81): Xaa is any amino acid
MDTITVCMGSSCFGKGNSANAEFVTRFIEEHNLQDSVEVSGCLCSNACARGPNIRINDKLISGISEQTLADIIVKELGLQL

SEQ ID NO: 93841 - protein, 81 aa, Unknown
  Obtained from environmental sample
  misc_feature (1)..(81): Xaa is any amino acid
MDTITVCMGSSCFGKGNSSNADFITRFIEEHNLQNSVEVSGCLCSNACARGPNIRINDRLISGISEQTLADIIVKELGLQL

SEQ ID NO: 93842 - protein, 600 aa, Unknown
  Obtained from environmental sample
  DOMAIN (396)...(430): Putative Fe-S cluster
  misc_feature (1)..(600): Xaa is any amino acid
MSAALGSAKAPVYTELAECHDCYKCIRKCPVKSIKVAKGQASILFDRCIYCGRCVMNCPAHAKHYRNDIDKVKLLLANGQKVAVSAAPSFVSEFTEWKPQELIAALKKLGFAIVSETALGADFLAARSARDLMSGNTPCASPGKQPLMISSACPVIVDYIKLYNPHLAPYISSHASPLLTHARFIRSRYGAETAVVFIGPCFAKKHEADIYNEEIDAAITFAELREWLHKERITPKTISLSPSALADYAFEPRRSAKGAFFPVEGGEITAFSAYIAEAAAEEGKRIQTLSASGFHAVGDLLKGFDPATLEAPLFLELLACPGGCLNGPGMSGMSPGVSRHTRLLDYVCSADNTLDGEALSLTPQIEAGYPLAPLPDAVHTEQEITEALMLVGKHSLADRLNCSSCGYDTCRDFAIALLDGRAEKSMCASHMRELANKTANGLIKAIPSGVVIVDRDMKIIDCNEQFARLMGNEAEELFVMMPGLEGADLKKISPFPQYFQTIIDPSGPEFTQTDVRDGSRIFHLTVFAVEKGVAAAGVVEDITAPRVQIETTVERARELIKKNVSTVQQIAFLLGENAAESEAILNSIIESYTVEEEKDA

SEQ ID NO: 93843 - protein, 77 aa, Unknown
  Obtained from environmental sample
  DOMAIN (7)...(64): Protein of unknown function (DUF433)
  misc_feature (1)..(77): Xaa is any amino acid
MEQFNRITHNPTVMGGKACIRGMRVTVGNILGQLSTGRSIENILVDFPYLEKEDVLEAIRYAAWRMQEKEVPFSIAI

SEQ ID NO: 93844 - protein, 363 aa, Unknown
  Obtained from environmental sample
  DOMAIN (262)...(357): Peptidase family M23
  misc_feature (1)..(363): Xaa is any amino acid
LSKTQSVLDSIKTELERGRRRFRELQHEEGNYLSRLEQIEKNIYSSGKYADLVQRQIDTTEITLLSLGDSLTKAEADLYRARQIMKKRLRNAYMTGDMNRLQLLLTAGSPSEFVRRIRYFQDLNRYDRHLAESIRESIVSVSEKRSAQGENRDKLVKLLSDKRKEQQALVAEEAQRRTVLSDIRTKKSAHEAMVAELEEAQNELDAMMKTLEGRRKRAKEEEEERRAAVSFENSRGKLPWPLRGEVVRKFGNVVHPVYKTITPNNGIDIAAKKGDAVRSVASGDIALVKWMRGYGRCVFIDHNGGYYTLYAHLDEVSVTENARVTSGTEIGKAGETGTTGGPKLHFEIKLRAESLNPEEWLER

SEQ ID NO: 93845 - protein, 52 aa, Unknown
  Obtained from environmental sample
  misc_feature (1)..(52): Xaa is any amino acid
NNGSRDKADNKYLECGITAGVDYIISGDIHLLELKEYNKIKIITAKEYLEIV

SEQ ID NO: 93846 - protein, 397 aa, Unknown
  Obtained from environmental sample
  misc_feature (1)..(397): Xaa is any amino acid
MTTDKIVFDNPAAQWEEALPLGNGRLGAMIFGSPDRERIQLNEDSIWSGPYRDRNNPSSLAALSSVRRLLDEGRIPEAEELCLESFSGIPQTQQVYQTAGELRIDFCPEGIFGHRSSGTRGGPLLHDIRNYRRELDIERAVHTISFEYNSIVFTRECFISAPAGLLLLRFSAARGDGGAVSGKISFRADLDRGVFYDRKGNIEDGAFIRRDGDIPFCAVIKVIQRGGTLRSRGGFVTVEQADEALLLADIRTGFRETDCAAACVMALQTVASTGSATEATGRERSLRPLRPLRPLSLSKGSKGSKGTPDTTIAPIWDNLLAEHTAEYRSWYKRQDLQIDGSENVMRYFNFCRYLLISCSRPGTLPANLQGLWNPHLDPPWGSDYTVNINTQMNYWPA

SEQ ID NO: 93847 - protein, 87 aa, Unknown
  Obtained from environmental sample
  misc_feature (1)..(87): Xaa is any amino acid
MNAQITTARLSPDTRNKLLVLSRIKGKTKSDIIKESLEMYYEHEETEIDSFTLGEPRFGKYGSGESDRAVTYKERIKKKLADRMSGC

SEQ ID NO: 93848 - protein, 180 aa, Unknown
  Obtained from environmental sample
  misc_feature (1)..(180): Xaa is any amino acid
MEREHEARAIEVCEGIRKKRSEDLEIEFLFGYKAALTDRIHEIPGCANISLSETGIGSAIFARKPGDGSTREQAVSCQRVLGASANFALQYATKRYRSNLINWGILPFIITDETALSLNKWIFIPNIQKQVKEKAQMIKAYVLGKKPSEITVTLGELTDSERQILLDGCLINHYQITNNK

SEQ ID NO: 93849 - protein, 657 aa, Unknown
  Obtained from environmental sample
  DOMAIN (1)...(395): Aconitase family (aconitate hydratase)
  misc_feature (1)..(657): Xaa is any amino acid
MEKFPVPLVMTNCHNSLCAVGGTINQDDHVFALSAAKKYGGIYVPPHLAVIHTYNREMMAGCGKMILGSDSHTRYGALGTLAVGEGGGELAKQLVGRTYDIARPQVVAVYLTGEPAAGVGPHDVALEIIAAVFKNGYVKNKVMEFVGDGIAKLPVDFRNGIDVMTTETTCWSSIWKTDTSVRDYLEIRGRAGDYRELRPADIAYYDGLIYVDLSKIEPCIALPFHPSNVYTIRELNENAKDILAKIEEDGLKTLGIQGRPTGLGLMAKARDGGVWAQQAEIVGCSGGIFDNIMAAADIIKGGSIGNGNFTMSVYPESQPVYLELVRNGAAETFIRAGVLMREAFCGPCFGAGDTPANNELSIRHATRNFPNREGSKPGEGQTASVALMDARSIAATALNGGRITAATELQVPFGKYKFFFDKGVYDKRVYNGTSKPLPQTDLVLGPNIRDWPAMPALAENLLVKIACFITDPVTTTDELIPSGETSSYRSNPLRLAEFTLSRKDPAYVQRAKDIHALEEARQSNKQDPEPAALLKKLRTIQGCANIGLSETIIGSGIFARKPGDGSAREQAASCQRVLGGSANFALEYATKRYRSNLINWGILPFIITDETALSLDSWVFFPNIQKQVREKARMIKAYVLGDKPVEIAVTLGELTDT

SEQ ID NO: 93850 - protein, 240 aa, Unknown
  Obtained from environmental sample
  misc_feature (1)..(240): Xaa is any amino acid
MINRAVERYPDLAGMIQIVGPQLASGFSDFTIPFPDTSTLNYFQTGLRYTTTIGPADIGGQYYYGNLFNPAAAFTVSGIDAFLDDVMSNVSSGGGFTGDPGLLNPIKYNRYHQIGLDYAQVVFGFNLRAEFAVHLTEDLSGDDGSVRNPFIGWSLGFDRELPLGIYANIQCNETIRLLDDKLGSNPVMDSEAGTDITSTRITAQLSKKYMRDNLESKATVIWDIENSSCYVIPAIVWTMG

SEQ ID NO: 93851 - protein, 377 aa, Unknown
  Obtained from environmental sample
  DOMAIN (154)...(352): DNA methylase
  misc_feature (1)..(377): Xaa is any amino acid
MPKKTPAIDTSKLNQIDAYTYPEHDRANIPPIGMAQYDTVASPEVKYEYDPHIAPSLQWAGKKEGTTFEVPTSSIHIHESIKPHKIIRSVQTIGDDYADEQGWLFESDAERAKRRNDSIEFYQHKNKWTNRLIAGDSLVIMNSMLEKEGMAGQVQMVYIDPPYGIKYGSNFQPFVNKRDVKDKKDEDLTTEPEMIKAFRDTWELGIHSYLTYLRDRLLLAKELLSDTGSVFVQIGDENVHHVREICDEVFINENFVTLITVRKTGGFSSSKLDSVCDYIIWYAKDISKLKYHDLFLNKTDKDRPSIYNALQFSDDTIRRMTREEFENNSIISNDAKIVAFDNLSSMGKANIEQPFDFNGKIYFPSTNTHWKCKYPEG

SEQ ID NO: 93852 - protein, 495 aa, Unknown
  Obtained from environmental sample
  misc_feature (1)..(495): Xaa is any amino acid
GYAESFHFPVNFKDKTYYPAQTRHWSTTETGMKNLVIANRILATENKLRYKRKLGDFAVTPIGNIWTDLMGASNLIYVVQTNERIIQRCLLMTTDPGDLVLDITCGSGTTAYVAEQWGRRWVTCDTSRIAITLAKKRLMTATFDYYKLAHPEQGVSSGFVYKTVPHITLKSIANNEPPEQETLYDQPEIEKRKVRISGPFTVEALPAPVVKPLDDDTHPAPFFHENAAKKQSDWMQELKASGILGRQGEKIQFSRVEPLEGTKFLHAEAETKETDRKKAVICFAGETRPLDIRMVTQALNEAETIRPKPVYIVFAAFQFDPTAAKHIDDTKWPGVTLLKVQMNPDLMTADLKKKVSSSQSFWLVGQPDVELIHIEKGADKGKYKIKVKGFDYYDIKQGIVNSGGTDKIAMWMLDTDYDGMSIEPKQVFFPMEGKNEGWDKLAKTLKAEINPVLIEKYRGTEFLPFTIKDNTQIAVKIVDDRGIESLKVISVGANG

SEQ ID NO: 93853 - protein, 238 aa, Unknown
  Obtained from environmental sample
  DOMAIN (9)...(236): FlhB HrpN YscU SpaS Family
  misc_feature (1)..(238): Xaa is any amino acid
LQWFSDEAEAEGRTEQPTEHKLRRLREEGQVPKSQELVGAVTLFLPALMLLFMAPSMLRTCVEMLRFFFSRATELDPTKDAIIVGVFFSYLVRLVLPILIVAVFAALFSNIVQVGFLFTTKPITPDFTKVLPRFGQFFKRIFSIDGLFNFGKSIIKMLIIGGVAFLLIKMDINKLANLQKDGSLAGAGDGGFACHTHTAYLRGFAADTVYSRPYVPALALPGTEQNVPAGNERRNENV

SEQ ID NO: 93854 - protein, 87 aa, Unknown
  Obtained from environmental sample
  misc_feature (1)..(87): Xaa is any amino acid
MADAARVGGEGALSKSPLGNTKDLFIAIGVIIVVVMIIIPLPIVLLDTLMAINVIFSLLVLLIVLYAQKPTEFSLFPTVLLVATVFS

SEQ ID NO: 93855 - protein, 339 aa, Unknown
  Obtained from environmental sample
  misc_feature (1)..(339): Xaa is any amino acid
MALSKEQEEWLKKIPGYYFSDKSKVKKIPSELLTEEFCIAAVHQTTWLMEFLPDEAKTEAVCLAAVRRYGSALQHIPDAKKTKAVCLAAVQQDGSALKFVPEALMTEALCLAAVQRYGHALKYVPDSRKTQVLCLAAVQEDWNALKFVPEALKTEAICLAAVQKDNSLLKYVPDALKTEAVCLAVVQQNPQALGDIPKKLRTEAVCLAAVQEGGYGNALKYVPEVQKTEALCLAAVRQNGRTLEYVPEAQKTEALCLAAVQQDGSALEYVPDAKKTEAFYLAAVKQNGSALKFVPDAMNPEPFEAMIGSVISSGSGGSEYGIELIKKWKLSKEQKEWLK

SEQ ID NO: 93856 - protein, 57 aa, Unknown
  Obtained from environmental sample
  misc_feature (1)..(57): Xaa is any amino acid
FAAAGEPFDPMIHEALMKAPNAQIPADCVAEVFEHGYRLNDKVIKHARVVVSSGNGG

SEQ ID NO: 93857 - protein, 273 aa, Unknown
  Obtained from environmental sample
  misc_feature (1)..(273): Xaa is any amino acid
MDNAKQAEYTEKTVSLNSSVEQLLKDAQDVEAALKEGTIPEPEFMKIKLSITMLTIVANYLVKNKIYTSIFGKLNENLLNEARKAMHRCLVYLEEVVTNIVDAPFSDYAEGLSKIAAVSPLQRFSLVEKIGQQLNNLKEAYGKNSKWTNAILEFEGRYAVVAKNLINLRDYFVNSDFESPHYEPTVRHIKRVRELLEQAADGYRKKYELSSKAIDDFQKAINYLSALKRLDIFTGDQESAVTTKKKIETWTAKMTADAEKQKKEQSSVKRQPA

SEQ ID NO: 93858 - protein, 388 aa, Unknown
  Obtained from environmental sample
  misc_feature (1)..(388): Xaa is any amino acid
MGLEGAPGLKKEHYAVFDTAAPSGKKGKRSISWTAHIGMMAAVQPFISGAISKTINMPNSANYDDVKGAYMLSWKNALKAVALYRDGSKLSQPLNTFAPGTDPLADTIIKVEKGLELPSAPDRKKAASLRGLRKSLPNRRMGYTQKAKIGGHSIFIRTGEYEDGSLGEIFLDMHKEGAAFRSLLNSFAITVSLGLQYGVPLEEYVDAFTFSRFEPNGMVQGHDYVKMATSVIDYVFRDLAISYLKRSDLGQVKPEDLVATATKNEIDVPEGKQRAEKQEKQAAGFRPNATVVASPAPAPQAGRQIKGGNQGSVTKAAVFSSPAYAEQPQTQTAVLEESYPEESEVIKIVQARIKGYEGDPCSSCGSFTLVRNGTCMKCDTCGGTTGCS

SEQ ID NO: 93859 - protein, 57 aa, Unknown
  Obtained from environmental sample
  misc_feature (1)..(57): Xaa is any amino acid
MKRVSSDMPVTDMDFYLRGREENLSDIQNQIGSQTRLNQLRNDPIAASHAVRYESFI

SEQ ID NO: 93860 - protein, 395 aa, Unknown
  Obtained from environmental sample
  DOMAIN (142)...(192): Flagellin hook IN motif
  misc_feature (1)..(395): Xaa is any amino acid
MVHTSGHILVQGQIGRQFDLRKDIDTEGFAHIYWNDTRNEMVFTKGKLGALMEMRDVTLEFEIQNLDNMTMNFVDLVNEIHRAAYGANGKTGNNFFSEYPFVTNVNGNYDRAGNGVFDSSYIYRINGQNTLEPQAQPGFEGVITLSASDRQVQVPYYSTDTVTDIVSRINNSGAEVVARINREGKLSLKGTPADLVDGQRVNPDFVIRHIEDSGHFLVGYAGLLLEAGPEGAFTWDRADAVTSLRGGAENYSVAPIAHPSGWVEVNPALLKDPTSVAAGFGFNGREANPGNGDAAAAIASIRNTPVMVGRLATFDDYFADAVGRIGLLGEQAQTAHATQNALMKDLLERRQSVSGVNMDEELSNMIRYQHGYNAAARFITTVNSMLDTLINRMGV

SEQ ID NO: 93861 - protein, 340 aa, Unknown
  Obtained from environmental sample
  DOMAIN (151)...(319): Cell division protein FtsA
  misc_feature (1)..(340): Xaa is any amino acid
MFGQSTAIGIDLGTCNTLIYITGKGILINEPSVVAVEKGTNKVMAVGADAKRMLFKTPGSIHAIRPMRGGVIADLESTEKMIRYFIGKALPRYRVFKPRMVIGIPSSITEVERRAVEECAYKAGAREVVIIPESLAAAIGAEIPIHEPAGHMIIDIGGGTSEISVISLGDMVVTNAIRTAGDDFDEAIIKYVRSELNLIIGGGGAERLKIEIGNAFPDKEIEKMEIKGTDAGTGLPRRLEIDSEQIREALKVPVNIILDEIKSILGKTPPELAADIVERGIVMTGGGSLLKGLPKLISKETGVSVILAQSPLDCVALGAGKYFEKTRGYEIRNMYDSLNK

SEQ ID NO: 93862 - protein, 287 aa, Unknown
  Obtained from environmental sample
  DOMAIN (124)...(283): rod shape-determining protein MreC
  misc_feature (1)..(287): Xaa is any amino acid
MKTGREKQQNRLGSDFYVFVILILVSFSAIFFSSRNVLGNVKNLGLSLFSGLRGSIHEASSLVSRTVLSIRELATLRREYTELTERIARYEQLERSSAEIRQENNRLREQLGFSQDLRYQHIPAVLIGRDPNNLFSAFVINKGFHAGVSTNMPVIAYHNGTQGLVGKVVNAGAFESLVMPLYDERCFVSSRLSESRYEGIVEGRGIPEAPLLMRYIRKRARDEISIGDMVVSSGIGGVYPSGINIGRVNRVIFEEDDLSMEVELEPSIDFSRLEYVFVIKQLEETNG

SEQ ID NO: 93863 - protein, 236 aa, Unknown
  Obtained from environmental sample
  misc_feature (1)..(236): Xaa is any amino acid
MKARIILHGEFSIGEIDKRLYGSFIEHLGRAVYTGIYEPGHPEADSFGFRNDVAQLVKELDVPVIRYPGGNFVSGYNWEDGVGPAESRPVRLDLAWNTKETNRFGTNEFAEWVKKVNSEIMMAINLGTRGAQDARNFVEYCNFPGGTYWSDLRKSHGVNEPHKINLWCLGNEMDGPWQICHRTAEEYGRAALEAAKVMKWTDPSIELVACGSSFSGMPTFGSWENTVLDHLYDHVD

SEQ ID NO: 93864 - protein, 456 aa, Unknown
  Obtained from environmental sample
  misc_feature (1)..(456): Xaa is any amino acid
MKDYPTAINSPIVDKSDRLTALDSLAAESPKGLFRDFQQSTAEINNHIHTIYSFSPYSPSMAALLAKKAGLGAAGSVDHDSIAAAEEMLAACAILGIGGCAGFEVRVSFKTGADGKTSPFASRKINNPDSAGYAYMTVQGIPRQAIKKAAEFLAPIRVKRLERTKAMANSANSLLLESGLSNIDFEADVLAQSKYDEGGEITERHLLKAVADKIILKFGKGPELCEGVKSKMGITIPPRQIAMFADANNPHYIYDLLGILKTEFLPQIFIQPDEEECIPATQVTAFAQSIAAIPAYAYLGDVGESPTGDKKAEKFEDDYIEELFAEISRHGFKAITYMPPRNTQDQLRNLRRLSAEWGFMEISGVDINSSRQSFNCPEVLKNEFRHLLDTTWALIAHERLASVDTCYGLFSDKNPIASMNLAERLGVYADIGKKLDLHHPDESAIMLSNEIDKGNT

SEQ ID NO: 93865 - protein, 287 aa, Unknown
  Obtained from environmental sample
  misc_feature (1)..(287): Xaa is any amino acid
RDAVDLGYLLHKNPSRPQTAEFNFGKAHIFYPEVSANRCTAALLLDMDPLDLARGKQGSTGSGLFDYVNDRPYVSSSFMSTAISRVYGTAMSGRCEKNQSLADSALELSATLVMLPCRGDTAMLEKVFTPLGYKVKWENGLLDERFPEWGDCCYVNLTISGKIRLQDLLRHIYVLIPVFDYRKHYWINDKEIDKLLAHGSGWLENHPEKNFITRRYFTKLGHFTRQALERLNRLDNGEGGAQSPVTESESETESAISVKIPRLNDQRLSAVLNELKNSGAKSVLDMG

SEQ ID NO: 93866 - protein, 356 aa, Unknown
  Obtained from environmental sample
  DOMAIN (162)...(248): Methyltransferase domain
  misc_feature (1)..(356): Xaa is any amino acid
MLEKVFAPLGYKVEWESGLLDDSFPEWGDSCYVNLTVSGKVRLQDLLRHIYVLIPVFDYRKHYWINDKEVDKLLSHGSGWLENHPEKNFITRRYFARLGHFTRQALKRLNRIDNGEGGAESPVTEGEPEAEPSAAIRTPRLNDQRMLAVLGELKACGARSVIDMGCGEGNFLRLLIKEKDIAAIAGTDVSAAVLNRAAERLGIERLGEKQKNRIALFQSSLFCRDKRFRNYDAAAIVEVIEHLDENRLSSFASVVFGDTAFSIVIITTPNVDYNENYTWLKAGSFRHGDHRFEWNRDQFRVWADSVAARYGYTVRYEDIGEQDEEHRTPSQMAVFKKNAAQETTLPEPNAVTGVAP

SEQ ID NO: 93867 - protein, 308 aa, Unknown
  Obtained from environmental sample
  DOMAIN (57)...(307): Domain of unknown function (DUF323)
  misc_feature (1)..(308): Xaa is any amino acid
MGIGVVVRNPIVKETRNAYEQKTYSPFPTPHSLSSCFFLFSLFFFLLFGVYAQQDAIPDGFVRIQGGTFTMGSPPNEPERRNNEIQHQVTVGSFYMGKYEVTQKEYQEIMGTNPSNFRGDENLPVENVSWYDAIEYCNKRSQEEGLTPAYTINKNHRDPNNRSGRDSVEWIVTWDKNADGYRLPTEAEWEYACRAGTTGAYNTGANISDNTGWYSANSRGKTHPVGQKSANAWGLYDMHGNVWEWCWDWKGVSTSGDRTDPVGAVSGASRVMRGGGWYYPALFARSAYRGDGNPSDRSRSSGFRLVRQ

SEQ ID NO: 93868 - protein, 608 aa, Unknown
  Obtained from environmental sample
  DOMAIN (316)...(408): Helicase associated domain (HA2)
  misc_feature (1)..(608): Xaa is any amino acid
GSLNIDFTLGLLKRVLESRRDFKVIISSATINAQVFCEYFGGCPVVKIDAQRFPVTLIYDAPNQDPPPAAGQDEYSPRSFTEFHGGKGDSHARKHQKHEHKGMNRPERPANGKSSNTAADALLEKIEKIVTRFISEKREGDILVFLSGEKAIKDCMNRLALCKAGGKLHLVPLYGRLGKEEQERVFDPAPKGKTKVVLSTNIAETSVTIEGITAVIDSGLSKLNWYNPNSYTSSLVEAPISKASANQRKGRAGRTREGSCYRLYTRDDFEERPQFTTEEIFRTDLSEVILRMSDLGITDFEGFDFISTPGYEGLEAGIETLNLLHALESDRTLSNIGKMMTEFPLAPRQSRIIVEAILRYPNVLRETLVAAAFLSTQSPYLLPPGEETEARKAHGRFRDDNGDFVSYLKIFKAYCDSPHKTRFCEKNYLDEKAMAEIVNVVAQLEEIIANLKIPVLAGGNANDYLCCIATGMIQFVCVREGAAKGGGGARGGGGKHGASKKNVTYRSLTADRITIHPGSVMFRTDPIYIVAGEIVRTSRMYAMSVSPLSKEIMEKLGLGTRDWGLGTGEERKEKKSHAEAHRTSGTRHKGRKGEKRKKSKKRDRGDEQ

SEQ ID NO: 93869 - protein, 405 aa, Unknown
  Obtained from environmental sample
  misc_feature (1)..(405): Xaa is any amino acid
VLLTLRDTLPPDTEVNLRIMAGARSEANWLGTKGDQFYNFHTLRPFRLNDVSARSAANPRTEEGDTIPISLYFSHVVDPDSSPSLFSVQGMPALNKDNIHFYGNTVVINRLPLEYEKNYQVNVSANLKDVYGRSLGQNQTVLAEVGQANSYVYHMNYGPRMLEAGFPPLVVWETVNPVSMRSRIAAASGPYERLPLSSLTLMAQDVSKYTKNKKNFIFEDLAPFLGPGGKGSATMIWEYETRSQWNNRIYKGDNWLSVQVTDIGITMRYAYNKVLVWATKLSTGEPVANARAELLEGNTVVRQGTTNAQGLAVFEFRDGEFASRFTDLEPYYGVSDWSKGFRVRVVQEGGAMAGGDQAEFVPNNSHNIWRFPVEAATSPFEVEKERALVFMFTDRGLYRPGETVT

SEQ ID NO: 93870 - protein, 1576 aa, Unknown
  Obtained from environmental sample
  DOMAIN (1113)...(1199): Alpha-2-macroglobulin family
  misc_feature (1)..(1576): Xaa is any amino acid
MPQQEYRITVSDKIKSLGGKSLEGERSFSFETERLSVLEWRLGAEDDWVSSWDADPLEAKYMNIIFSYPVNLGEIAKWMEVKTASGQSYAFTLSRLPKINENYYYRAEQYKAEQGVLLTLRDTLPPDTEVNLYIRAGARSEAAWLGTKEDQIFNFHTLRPFMLNDISARSAVNPRTEEGDTIPISIYFSHVVDPDSSPSLFSVQGMPALSKENVHFYGTTVVINRLPLQYETNYQVNVSANLTDVYGRSLGQNQTILAKVGQANSYVYHMNSGSRMLEAGFPPLVVWETVNPLSVFSRIAAASGPYEHLPLKNLPERDISNLQKNKKNFIPEDLSSFLGPGGKGTATMAWEYETRSQWNNRIIQDSRWLTVQVTDIGITTRYAYNKVLVWATKLSTGEPVANARAELLEGNTVVRQGMTDAQGLAVFEFRDGEFVSRFTNLEPHYGVEDWSKGFRVRVVDGGGAMAGGDQAEFIPNNSHNIWRFPVEVAVSPFNAEKDRALVFIFTDRGLYRPGETVTFRGIDRNLVRGKFFPYEGNYSIEVSTGGRNAPLIALLRGKTTGSGGSHGSFAIPPNLAPGRYVMRYKRFEGDGQDYAITFLVANFERLRVEASLKIPDLTYYQGEKISGRLSASYLSGGGLSGAPYTYYWSREPTGFNPGGNWQYWRFGPETYDGRYFAASGDGTLGPDGSADIAHNVGVDGVEGITYRYRLEASVQDAARQEISVRNAAIVHPASFYIASRLDTGTLKAVDSASTKPSAFFLSSGSPATVSWALLTPEGTPFEQASDSRDAPEITFKLIRHEWKQSRQAGIGGRINLYWEMVEETVMERSIRPGRREYSGVIPFTPSTSGEYEVRLSSKDSLGRSAQTRYRFYVTGAGWALWGRGDSDSITLRPDKGSYAPGETAKLLVQSPLPKGKYLLTLEREGILEEKIIELDGSALTIDVPIKESYIPIVYAAIASYTVRSGPPTHTYYEPDLDKPKGLFGLTSLFVDNENRHYTIEIEASKSVYRPAEQAEVTLKVSQNGKPAAGVELTFMAVDRGVVDLIDYHVPDPLAFFYSPWNFPLGVRGADSRSLLIDPVTYSLSDLQGGDEEDNSKMEERKDFRPTAVFEPYLVTGADGTVKVNFNLPDSLTTYRCTAVASGTSDFGIAEKDLRVSAPLTAVAALPRKLRWRDTGTVSLILTNLENTVVEAKVSAATETIDSGVWDTVLEIDGVKEKTVKINPGATVEVSFRAAALGAGESRIIFTLQSPLVNERIIKTLTVDRPVLYETVTSIGSLASDNPFIEEGVILPSLVPEGTGSLSVSLSSSRLALLKEAVRYLLDYPYGCLEQKTAQLLPLVAFADRLETFELDSPVTNPRKVIEDELALLAKSQLPDGSFPYWPGGQYGDQYVTLRVAHIAALAKQKGYEFPAAMNTQTLTKYITENDFSSTVFKEDPFLKGYSLWVRAMYGARIGTEISAFLRRGDELGISGWGFAGLAAMELGLRDLAVSTRDRVRRFIRPGTRTLDLSDTYERVGNFWGYDSDRYAIALMLYYALSPADDMTTRLVNSLIERQRRGIWNNTSSSFWAVLAFSKIA

SEQ ID NO: 93871 - protein, 271 aa, Unknown
  Obtained from environmental sample
  misc_feature (1)..(271): Xaa is any amino acid
LTAVAALPRKLRWRDTGTVSLILTNLETTAVEAKVSAATEAIDGGIWDTVLEIDGIREKTVKINPGSTAEVSFKAAALGAGESRIIFTLMSPSVNERIIKTLRVDRPVLYETVTTIGSLASDNPFIEEGVIIPSLVPEGTGSLSVSLSSSRLALLKEAVGYLLDYPYGCLEQKTARLLPLVAFADRLETFELDSPVKNPKKVIEDELALLAKSQLSDGSFPYWPGGTFGNRYVTLRVAHIVHLARQKGYAVPDAFNTQTLTKYMSENDFSS

SEQ ID NO: 93872 - protein, 92 aa, Unknown
  Obtained from environmental sample
  DOMAIN (36)...(89): BFD-like [2Fe-2S] binding domain
  misc_feature (1)..(92): Xaa is any amino acid
REKMHCSVMGQEALHAAIEYYKNGGKTPETKVKEGNIVCVCFNVTDAEIERAVKENGLKTLADVTNFTKAGGACGKCHEKIEIMLKSINKTT

SEQ ID NO: 93873 - protein, 152 aa, Unknown
  Obtained from environmental sample
  DOMAIN (19)...(144): Transketolase, C-terminal domain
  misc_feature (1)..(152): Xaa is any amino acid
ALCPQETEAFSQPLERGRGAWVSKSGSNQVCLAFTGSLYTEAVEAANILKAQGITADLYNLRFLKPVDENYLADLMNTYKLVMFLEEGMREGGFGEYAAALARRRGCTAKTEIIAVESVLFEEDRALGEREELLAENGLDGKSIAKNVLGRL

SEQ ID NO: 93874 - protein, 66 aa, Unknown
  Obtained from environmental sample
  misc_feature (1)..(66): Xaa is any amino acid
MQQTIFGKTNLSVGRTGFGCIPIQRISYDESTALLQYAYDNGVTLYDTANGYTTSEERIGIALHHV

SEQ ID NO: 93875 - protein, 97 aa, Unknown
  Obtained from environmental sample
  misc_feature (1)..(97): Xaa is any amino acid
MKIEKKTFGVLSNGKKIKLWTLSAGDLKLSLTNFGATWTSLIVPSRSGVKEDVLLGYSGLDGYLNNEPFIGVTVGRFANRIANAAFSLTEKIHSFGK

SEQ ID NO: 93876 - protein, 403 aa, Unknown
  Obtained from environmental sample
  DOMAIN (1)...(232): EAL domain
  misc_feature (1)..(403): Xaa is any amino acid
MHNIPSERITAYFQPILSADTKEIYAYEVLGRYISDNGTVQSLGDFFTNPDTSHEEALSIDRIVRKNAFKKYVEEKRNEYLFVNIRLAWLLPYAENPEEMITLQLVKEFGIAPEKLVIEITEEEFNASEEYLRAIVHYKKIGCRIALDDYGKSASNIDRLAKLQPDIIKINIDYIHRSERSYHYREYLRSLAAFADSVGIEVLYEGVETHRQLDICISSKGRFYQGFLIADPQPSMSNTVINSFVFSALIETTYKAIKNKAIKAESVRKSLDVQVERFLFENPFDYEKINYDAYLIKLFGELPEVKRIYLCSQQGVQLSDNIERNSEDIVCRDYKNKNWAWRGYFHESLTAFTMGRKSCVSNIYRDFTTKEQMFTYYYAVSDDVFLFVDITEDMERIEAYAAG

SEQ ID NO: 93877 - protein, 501 aa, Unknown
  Obtained from environmental sample
  DOMAIN (195)...(354): Protein of unknown function DUF115
  misc_feature (1)..(501): Xaa is any amino acid
CFRLSAAQTAMGRYTFIESRTHRVVPAIVDSGGGTHALHSTVDPEREAQRLAATLNEGWVEPGFTVFLGLGAAYAAAAALSSGNASHILVIEFDINGIAELLSALIYDVLGDPRFTLLVDPDSNLIQKTILDLYNPCLCGGIRALPLRGRVEQDKEKFAMAGEAVQRAIEKVSADYSVQAHFGMRWFSNIIRNIGIARSLNPGAPHINTAAISDVAICAAGPSLNAQIPLLRTRRRTGLFIIAADTSLPALLAGGVKPDAVVSIDCQHISYYHFIGTRCADIPLFLDIASPPLLSGFSHSPFFFAGGHPLAAYLCQKWMPLPYLDTSGGNVTYACLSLAEQLRARRITVYGADFSYPLGSAYARGTYFYPLFERKQNRLSPLEACLSSFLYRSPFLPPENEGSRSVVSPCYETTSLRFYRKSFEEKASSMEAEVIAESGLGIPLEIRKKTNKSFSDRKVINFTPGKALTNANEFLEQYKKDIKALPVFGRNMNLNTNETQV

SEQ ID NO: 93878 - protein, 58 aa, Unknown
  Obtained from environmental sample
  misc_feature (1)..(58): Xaa is any amino acid
MSEMIGLNALKLALQELFASDEKIIAIGEDIGAHGGAWMYFQGLYAKYGRDRVIQMPI

SEQ ID NO: 93879 - protein, 284 aa, Unknown
  Obtained from environmental sample
  misc_feature (1)..(284): Xaa is any amino acid
MPVKRKYKDSVFTSLFKDKKRLLELYNAIDGTSYKDPNLITINTLDGVLFPNKQNDISFTIDGKLVVLIEHQSSINENMPLRFLIYISKVYEKIIDPKSIYKHYLMKIPRPEFIVLYNGTDKYPKEKTLKLSDAFEELGIKKAPELELSVRVLNINKGHNPKLERRSKNLAGYSFFVAKVREFQSIGNPLKQAIEKAVRHCIDKGILRDYLRKNSSEVVNMFSVEFNLKDAIAVAREEGEERGIEKGEARGEKKGIKKLLALLEKGIPLAEAKRRLGVNRKFAT

SEQ ID NO: 93880 - protein, 148 aa, Unknown
  Obtained from environmental sample
  misc_feature (1)..(148): Xaa is any amino acid
SKCYDNKPANCQKYGRLYNRDVAKTVCPKGWHLPSEKEWHTLYSFVGVVINHESQFEIRSLRAKNGWAVDEDVLDGTDNYGFSALPGGFHDADRGDFESVGDAGYWWVSYDDGFTIIDIDITNKRNSALPRDRNCCGNFWISVRCLKD

SEQ ID NO: 93881 - protein, 344 aa, Unknown
  Obtained from environmental sample
  DOMAIN (184)...(305): Nucleoside diphosphate kinase
  misc_feature (1)..(344): Xaa is any amino acid
MSKGLSYVFVTPYTVAKSRTGGVLSRLLTRTDLDLVGAQIFAPDQDFADKYSQFLKERAPQNQLVLLADYVKQYFGPSGGRPHRTLFLLFEGENPCEKLLNVCGHLYTQHVEVYALAGETIRDTYSDLIFNNGDPNDVRYFEPAVLTPRKQEEANRDLRLIADFLEGKENIVQNVIHPDPSKIERTLVIIKPDNWTHNSSRPGAIIDMFSRTGLRIIGVKIHHFSLSEALDFYGPVENELKEKLADTFGTRAKELLEKEFAFKLDQKMINILNTDFGFQCAKNQFHNIIEFMSGKRPGTYSDEEIKKHGQVKCMILVYEGENAIQKIRDVLGSTDPTKATNGTV

SEQ ID NO: 93882 - protein, 145 aa, Unknown
  Obtained from environmental sample
  DOMAIN (5)...(143): Aspartate/ornithine carbamoyltransferase, carbamoyl-P binding domain
  misc_feature (1)..(145): Xaa is any amino acid
MLKGRSLVEPEDFSLTEMDGLFTLAEKIEKDEKYMRDSCRGKLLATLFFEPSTRTRLSFEAAMLRLGGSCLGFADPGSSSAAKGESLADTIRMASSYADTIVMRNPKEGSALLATKYSSVPIINAGDGGHHHPTQTLTDLLTSSG

SEQ ID NO: 93883 - protein, 332 aa, Unknown
  Obtained from environmental sample
  DOMAIN (237)...(301): DHHA1 domain
  misc_feature (1)..(332): Xaa is any amino acid
MDIAFGHSNMDFDCFGSLILIKRLFPVYRLVRSSRIHPAAQVMYDFYEDYFNFLSLKDISGEKIDNIIIVDTCTTGRVSEYFSNISNSSPSIRVFDHHMEECDIAGAKIEGGRFGANTSMLGKMAIERGITLESEEATIALTAIYADTGRFIYESVTRDDYEVSAWLLDMGASLSLVKSFLETVREDKQIAVLNRLRPETYSIQGNVILLSYLELEENVSGLAAVVEKIMDVQNPDAYFAIFFIPRDKTILLIARSQKKAIDLHALLSVYGGGGHQLAASAKITGRDGQEFFSEFCNFLNYNMEPAADVMDIMTKNVFTIHETTSLRKLQCF

SEQ ID NO: 93884 - protein, 521 aa, Unknown
  Obtained from environmental sample
  misc_feature (1)..(521): Xaa is any amino acid
MKIAFNFRVAGFLFTAVLFLAAAFTAFALPETPEFGADTIQDLFSPDLAGQGSFVTSRGSAPFSAINPAQAGQTDRLILNAGALGVTNLNIASELGGIFNIGLLYPTKSVSFSGNLRYYYFDQFKTDYPLRNELGGNFAIAKEFFPQFSLGAGINFGVGSDHWTLSADLGLLQNLGDIGFIKNFTWALVLRNMGVSWAPTWFTPWLGFTFDFVRIEGKNGKPSPLVMNFAADAGVPSVIFPEDLNLIVKGGITVTFLDTLTLSVLWPGAAGYNMNESKKENDSLFQRFPSLGIGVNFLIPSGGKRQPGERRSSDGDITFDAAFKPLYYDVYATGAGVTWYAGYRDDLPPNIIINYPEIQYISPNYDGKQDNLLFPVRIVDDHYVTSWIMTIKDSNGNVVRTYQNKDRRFEMMDVRDIYGRYYFEKKGVDVPPEMRWDGVFNTGETGPDGKYYFSISASDENGNTGYSPSYEVVIKNTAPQVTIDNINLNDRIFDPSVGNRRAINIVPRGTVEDKWESGIYD

SEQ ID NO: 93885 - protein, 163 aa, Unknown
  Obtained from environmental sample
  DOMAIN (1)...(136): RecF/RecN/SMC N terminal domain
  misc_feature (1)..(163): Xaa is any amino acid
MITKWGVKNFKSIREADLELAPLTVFTGVNSSGKSSFLQSIIMLSQSARSDDRDGYITLQGDLLNLGSFEQIYHKNLNEINRSQREEIGINCTIPVNENEDVHFELGLEEGFSEYNKSSKLKSEQGLLEYRKKEESKDFSIKWARPENLPANASEKYYKIFRI

SEQ ID NO: 93886 - protein, 331 aa, Unknown
  Obtained from environmental sample
  DOMAIN (230)...(321): Elongation factor G C-terminus
  misc_feature (1)..(331): Xaa is any amino acid
GSPGEIVALGRMDSIKTGNGLSLANAVVELPFPESPQPVMPFSLKAAKSGEEVKLSAALGKLLEEDLSYRMEQNLETQERVLWGMGEIHLKNAVSRLKSKYNVEVSSEKPLVPYRETIKKNCEQQGKHKRQSGGHGQYGDVHFRIKPLPRGSGIEFIDSIVGGVVPRNYIPAVEEGMRDYCKQGPLGFPVVDISVELYFGSYHDVDSSDMAFKTAASIGMQDGLQKCSPVLLEPILKVQISVPNEHTSKAQRLVTGHRAGQILGFDAKPEWPNWDVVDAYLPQSEMNDLIIEIRSQTMGVGFFTWVFDHLQELEGREAEKIVETRKKALEG

SEQ ID NO: 93887 - protein, 116 aa, Unknown
  Obtained from environmental sample
  misc_feature (1)..(116): Xaa is any amino acid
AGSPSHAQYAAERDGILNELRQRAIILAEALNKIPGVECNGVAGAMYAFPKITLPHGRTDEEYCMALLDEEGVCVVPGAGFGQIPGTAHFRTTILPETEKIQLVAEKLNKFHLGFK

SEQ ID NO: 93888 - protein, 287 aa, Unknown
  Obtained from environmental sample
  misc_feature (1)..(287): Xaa is any amino acid
VRDKHYDPTLGGLDWQAVHDKYLPRIKKAASEEEGRGAMNEMLGLLGQSHIQVIPALAYGDMEGGPRGDHTPGLEVRALGGRALVTRVEARSPAAAAGVRPGWEILKVGGKPVRPVIERVEKTYSASTTKGLRGATVVNGSVAGPAGEAVEIEFNDGAAVRTLKLDRREPRGTTVAFGNMPSARFWVETEALPDGIRLIRFNIWLSPVEVADAFSKAMEDAGKAKGFIIDLRGNPGGIGFMAMGAAGWFTPQKDLKLGAMTMRGATLNFVVSPRPNATDAPLVILVD

SEQ ID NO: 93889 - protein, 47 aa, Unknown
  Obtained from environmental sample
  misc_feature (1)..(47): Xaa is any amino acid
MQDLGRARIFSTRTAGAALPAAFTRLPNGDGFQYIMANYISEGGKPL

SEQ ID NO: 93890 - protein, 113 aa, Unknown
  Obtained from environmental sample
  misc_feature (1)..(113): Xaa is any amino acid
MKYSNPANLAVVACPGGEIFADEVIAHLKKLYRHHSERLAADLAKRYGLTVEKAVEQINFINEIVSPGSHIHSIHSVKNPYHVPRFKIPVKFTCFPNGEVKAEIMESIRGQDV

SEQ ID NO: 93891 - protein, 443 aa, Unknown
  Obtained from environmental sample
  misc_feature (1)..(443): Xaa is any amino acid
VIKNKLRDWIKIASEKGFWANNAVQITQAWIRDGLRERAITRDLKWGIPVPKPGYENKVFYVWFDAPIGYISISGCLGKDLAEGFHDFAHAAHKTKFPSWQKFVDYWWKSPDDVELFQFIGKDNIPFHTVIFPSSLLGSGDNWTMLHHISSTEYLNYESGKFSKSRGIGVFGTDAMETGIPADVWRFYIFYHRPETSDAVFTWKDFQEKVNGELIGNLGNFVNRTLSFITRYYNGKMPSGNPDPALWETVQKFENTIAEKLERADLRDAFHAIFELSSYANKYFQDAEPWRLRNEDPAKAEAVIRDLAYIARDMAVLIEPYMPQSAAKLASFFGLALGPSFTWKDIGRAEGIAPGSEIKSEVLFAKLEDELVAGLRERYSGSQKDRQTEAAAEVKTAPAFEQTLDLRVAKIEKIERHPKADKLYVISLEVREGISGSREERTI

SEQ ID NO: 93892 - protein, 201 aa, Unknown
  Obtained from environmental sample
  DOMAIN (161)...(197): Tetratricopeptide repeat
  misc_feature (1)..(201): Xaa is any amino acid
MRKNLIKSLFFGIPALTAFIAFARLMQVDSAKVQALFERGIAYADKGDYDKAIEDFNSALKIKPDDYKVLLNRGFMYRLKRNYDQAIEDFSAIIKIKPDEYYPLYVRGRVYSAKGDYDKAIEDLEAALKIDPNNANAKQLLEEVQSNKAIDDLSATLKIKPDDIVTLILRGIAYHEKGNYDKAIEDYNAALKIKPNDQDAL

SEQ ID NO: 93893 - protein, 576 aa, Unknown
  Obtained from environmental sample
  DOMAIN (241)...(394): Protein of unknown function DUF115
  misc_feature (1)..(576): Xaa is any amino acid
VSFWEMNSKVLIDHYPGLLEDITGKEEKGIEDTTLTPEDIQINPASSGDPTLCVKGINIHSGRDPVREGIRLAQSAAGDGPVVILGFGLGYAATAAAEMSASAAQAIEKGRPIIIVEKHRKLLIKALETRDLSDFLSNNRIIFVVGGTGEGITNALSIADGFISAGERTEPAVIRNRALIDLDKEWYGVVEEKLRTWSMRDDVNSATLKRFGKRWVRNLSRNISAIRDYAGISRLAGLAADIAAGFAADVTESVPVFLAAAGPSLDKARPFLREIHKRCVTVAVDTSFRFFTDNGIQPDFVLVVDPQFWNSRHLDRCPCGITALIAESAVYPPVLRLPFKNIFLCGSLFPLGSFVEKRVDPKGALGAGGSVSTTAWDFARALGSKEIWIAGLDLAFPGLKTHFRGAVFETRSNTASNRFNPAETWVVRALRDGYPFKAPCASGGQVLTDRRLSLYAAWFENRFRQYPEAKNYAVFQDGLAIAGIQAAATETLLSLPERRAEIDKKLQSAFSQIDNDFNNPEEKQKRAARYAKAVSALIGGLEEVKNAAQKGAGIAQQALKSKLDSGKQNKILKELD

SEQ ID NO: 93894 - protein, 623 aa, Unknown
  Obtained from environmental sample
  DOMAIN (569)...(623): PASTA domain
  misc_feature (1)..(623): Xaa is any amino acid
MNLKKRYIFIFSCLAVFAVYLLAYYGNLMLKGKVPNLRQTAAIAERGSIMDRNGHFLALQIRFADVAVWRPSITDITFLSDELAPLLEMPSAEISRKINSSESNFLYIKRQIDDAAARRLVSLLDEKKIMGVMIQPVLGRLYPEKNLASQIIGFVGDRNQGLEGIEYAFNGTLAGSEDFAKGDVKANVKNNTDVKGSHVMLTIDTNVQHILEKIASKTLNETRAEAVMLLAMDPRSGDIIGSASLPNFDLNNIRASDETSRMNRPVIWAYEPGSVFKIFTMAALMDSGAITNKSVFTCNGYYVTGSGSHINCLGAHGNVTAREIIIHSCNAGAAYASDQITGGGFYKLLTDFGFGSRTGAGSPGETSGYLLGSEQWSDRSKPTIAMGQEIAVSAYQMLQAASAIANDGVLISPRIVSNIISPDGRVTEWKPIERRRILKAETAKDIRSYMVDTASGIGTGWRAAVEDLSLAVKTGTAQIIDPVTRRYSDTDFIASCIALLPAESPSLILYLAIIKPRGEILGGRIAAPAIREAAESLIDYIGIPRGRNPQVSHPSSVDIPAGRLPVIGSHLPDFTGISKRVLLPLLLRDDVDVEIRGEGWVRRQDPPAGTPVTDGMKIILELE

SEQ ID NO: 93895 - protein, 205 aa, Unknown
  Obtained from environmental sample
  DOMAIN (1)...(173): NAD dependent epimerase/dehydratase family
  misc_feature (1)..(205): Xaa is any amino acid
AYDLLAENERIPAATFDAAIWAHREKRLKKINVMSSSMVYESTNVYPSPEGEHLKCPPPLSTYGFQKLACEYFAKGGWEQYKLPYTIIRPFNCVGTGEQRAKNEKEIMSGNVKLAMSHVVPDLVQKVAKGQNPLHILGSGYQVRHYTYGGDLAKGIRLCIESDKAVNEDFNLSTPVSTTVKELAELIWKKINGDKPLSFVSDKAF

SEQ ID NO: 93896 - protein, 172 aa, Unknown
  Obtained from environmental sample
  misc_feature (1)..(172): Xaa is any amino acid
MGVVSKGIGAAFGFIRDSVIGTTAETERYRVALGTMLGDQEKANKIIRDLDYGEGMFEGVRLSDFYGTASAIGGLQNMVTFGMKAEEAGDVLARLGDIAQGDSEAFNSMANAMGQVFATGKADSVKLKQFAKQGFDVVGEIAKQTGKSREEIQKSGVTYEQTAAALRALTDE

SEQ ID NO: 93897 - protein, 149 aa, Unknown
  Obtained from environmental sample
  misc_feature (1)..(149): Xaa is any amino acid
MEARQFESLLEKISAFSGDAVIDLSLWGEVSLHPEKMALIEMVLRRPELALVIETSGIGWKNSELEQCAQLAQTAASVKRNNNLPPLSWIVSLDTTDPAWYKEIRGAGFAEANDCAKTLLSLFPRDAYVQAVRTAGAENDIERFYRSWK

SEQ ID NO: 93898 - protein, 296 aa, Unknown
  Obtained from environmental sample
  misc_feature (1)..(296): Xaa is any amino acid
LVLFAGNLSGEAAEPLIDGKNSLILALQRAQSFPGVGKTALLTGPEGDFSSVPAGIYIEKRDSWTVKALLEAIAAHSEGFDLTYFAWADCPFPDPELARKLAERHIRYAAEYSYADGWPYGLAPELLSPGTAAILAKILGDSDGGPVGRDALFSVIQKDINAFDIETEISPVDLRCHRLNLCADSRRNLLLLRRLPNARREKYRIPPLLSALSPKSRKSSEPCPLFIRCRFTAAAPKAVHGVPGRRLPAALLRNGGTIWKRGNLNPCWKKSARFPATRLLIFPCGGRFPFILKKWR

SEQ ID NO: 93899 - protein, 231 aa, Unknown
  Obtained from environmental sample
  misc_feature (1)..(231): Xaa is any amino acid
MKQVKNLFGVAIALAIVVSMAALLAGCSNPTDDTTTGATTTKGNITYGISLSSTAHVFTAAELGYTAQPPLTVTVTNTGNQATGDLTVVLSGDNAASFTVSKTSISSIAVGGTDSFTAAPVADLAIGSYAAVVTVSGGNGITAGFNVSFTVENNPYIITGSGDAFTATRKTVTVGTADQPIQDVINAVRSDAAGAPITIQFGDGTGVLDIGTANITFNTTGGIWGAVTLSG

SEQ ID NO: 93900 - protein, 213 aa, Unknown
  Obtained from environmental sample
  DOMAIN (1)...(210): Nucleotidyl transferase
  misc_feature (1)..(213): Xaa is any amino acid
MAGGKGTRVSSIANDIPKPMIPICGKPILEHQIECLKRNGLTEIILVIGHLGEHIKYFFRDGKRFGCNISYYNETEPLGTAGALYKLKHLSDDFILLNGDVIFDIDFSRMINFHREKKAHVTLAVHPNSHPFDSAIIFSNSDNQVTRWLNKEDERIYYKNQVNAGIHILSTEFLKSCPQSKEKVDLDRDMLKPSISGGKILNLSKARRTRSKK

SEQ ID NO: 93901 - protein, 143 aa, Unknown
  Obtained from environmental sample
  misc_feature (1)..(143): Xaa is any amino acid
MRGKLLLLCVLLLVVENLFANDIYTTIEINGVIINGGLIYAAVYSNEHDYKNETAFARFILQSDNTALTYSLDLPEGEYVVSVYQDKNGDEKLNSGLFGMPSEPVGKTNYNLRGAPGNFNKLKVPVNNSSTRLIVNMRKVRLL

SEQ ID NO: 93902 - protein, 288 aa, Unknown
  Obtained from environmental sample
  DOMAIN (140)...(281): SpoU rRNA Methylase family
  misc_feature (1)..(288): Xaa is any amino acid
KFSFGGNRLCAFTKAVEPEPSKPSIIQNAFTPSELVFYADVSKLLAEDALFPDNAKKVFEEASSTFVAASAFAAGSAFAAGSAFAAGCTFAAQESTIKIRRALNSVKHLLLAAIGRDQSDWDFSANDGRLDAAERQVFSGMRVYMEDIRSPFNVGAMFRTAEIFGVEKIFLSQFCADPRHRRAERTAMGCIDIVPWERRDFFADEENPAPPFPVFALETGGIAIDKFPFPRGGLLIAGSEELGVSPRALAAADASLGRVSIPVYGAKASLNVSVAFGIALQAWTKVFR

SEQ ID NO: 93903 - protein, 328 aa, Unknown
  Obtained from environmental sample
  misc_feature (1)..(328): Xaa is any amino acid
MKIKGYSTKEITEIIGCSRITVYLLWRKWKKAKGKKEKGNVIAVKKTGRKTGFGRTLTEKQENLIIRTIVKKYPDQLKLNYALWTREGIQQLIQKIFGITMPIRTVGEYLKRWNFTPQKPKKYAYERDEEKVKEWIEKEYPRIKKRAKRQKAEIYWGDETGITTTDVRGRGYAPEGKTPVVQQRGKKESMSMISAITNQGKIYWKLFDESINSEKFLEFVKRLILNKKRKIFLIVDNAKPHHSLILKDWLEKNKKKIELYYLPSYSPDLNPDEHVNADIKHGIGSRAPKSSKENMIIAAEEHMQLLKQTPERIIKYFKDPTISYAAYV

SEQ ID NO: 93904 - protein, 150 aa, Unknown
  Obtained from environmental sample
  misc_feature (1)..(150): Xaa is any amino acid
MAYQFMKANQERYTIKEMAMLFGVSRSAYYRWARNGASQRRKADDTELVRLILEIVARHHRRYGSPRVRRELRYIYGKRVSLKKVARIMREKGLNTLKSRKFIPTTDSNHTLTVFENILSREFYAESGGLKWVSDITYLRTINGWIYLTI

SEQ ID NO: 93905 - protein, 113 aa, Unknown
  Obtained from environmental sample
  DOMAIN (1)...(107): GGDEF domain
  misc_feature (1)..(113): Xaa is any amino acid
DKCLKAVAQTLSQCITRADDFIARYGGQEFIVVLPNTNEYGARLIAEKLLDNIRDLKLPHEQSDVANYVTISIGGTTGKVKHTHNAGDFIKKADELMYKSKQEGRNRFSFGRL

SEQ ID NO: 93906 - protein, 82 aa, Unknown
  Obtained from environmental sample
  DOMAIN (6)...(49): SpoVT / AbrB like domain
  misc_feature (1)..(82): Xaa is any amino acid
MLASVVRIGNSRGIRLPKRIFQELKIKDEVELTINKDSLIIKSVKKRPRPGWNEAFAKKLDDKIEKLLLPENIDDENFEWVW

SEQ ID NO: 93907 - protein, 156 aa, Unknown
  Obtained from environmental sample
  misc_feature (1)..(156): Xaa is any amino acid
MKKKTVLALLMATMLTGGVFAQINMSAGAGGSFSMHMTDYSRSDFDAPKPIVGGGFNAFFDATYAMVKVGMFIGGNSREIDWETGNKVTMKMTYNYLSLGLLGKYPIDLGGFTLFPMLGFEYNMLLGGKMEAGGAAETLERSPDYDMFILQLGVGD

SEQ ID NO: 93908 - protein, 179 aa, Unknown
  Obtained from environmental sample
  misc_feature (1)..(179): Xaa is any amino acid
MDNRLLAAQVLICGIDGRGSLPPHMKLLLTESPPGGVMLFKYNLDTDNDSIRSLVSQTVSLVTDEAGIAPFIAVDHEGGTVNRFLPGTVDLPAANSYWELSLSHGKNTALEKVESDSYIAGRTLHSLGINLNLAPVAEYLTSDNRHFLEKRSYGTDPFFTADAAGAFVRGMEHAGVLCV

SEQ ID NO: 93909 - protein, 490 aa, Unknown
  Obtained from environmental sample
  DOMAIN (439)...(486): His Kinase A (phosphoacceptor) domain
  misc_feature (1)..(490): Xaa is any amino acid
VAIAFAWMVIASYWFVSDIERRHLQSDVKNAILNTEASIIADLKEPETILAGFAETIRGMIVRGDSAERVREYIHYMNKYMRDNEKDRLLGTMGFYGFFDVYGEVYFTEGADWIPPEGYELQDRQWYIAAVEANGDIGITEPYINIRVGEIPVITFARRIFDEDGKALGIICLDIKLDRVSQHAVDTQFAEKGYGFLLSKNMDLIAHPEPSMIGVAFRDVKSHISSYADELVRKGYVDEVITTDYRNIECIVFLERLKNGWYMGVVTPRDKYYQTTRNMATFLTVLGVVLATALIAVLLVLFRQMNIENKKFQYMAHWYNSILNAIPLPISVTDADTNWTFINTAVERQKGIKIKDAIGRPCSIWGSEICNTEDCGIICARRGLSQTYFSQGDSSYQVDVAIIKDVNENIMGYIEVVQDITNLKQITKKQADAEAANTAKSAFLAKVSHEIRTPMNAILGITEILLQDETLSHYMQEALSRIYNSGYLLL

SEQ ID NO: 93910 - protein, 766 aa, Unknown
  Obtained from environmental sample
  DOMAIN (4)...(761): Inorganic H+ pyrophosphatase
  misc_feature (1)..(766): Xaa is any amino acid
MLSLSQIWFVVPASAIIALICALVFYKNLMKKPEGNQTMKDIAQYVREGAMAYLKRQYKTVSLVFVVLFFILVVLAALGIQNPFVPVAFLTGGFFSGLCGFLGMKTATNASSRTANGATHSLNSALKIAFRGGAVMGLVVVGFGLLDISIWFLLLNYVFDNHVFGFGIGFTEAQKMVEITAVMITFGMGASVQALFARVGGGIYTKAADVGADLVGKVEAGIPEDDPRNPATIADNVGDNVGDVAGMGADLYESYCGSILATAALGAVLPQVGIAAILAPMFVAALGILFSLIGIMLVRTKEDAGSKNLLRSLLVGTLGSSILILVAVAAMAGCGLISWGIFGSVASGLVVGVIIGQFTEYYTSDIYKPTQSIANQAKLGHATTIIEGISVGMKSTGFPVVCIAVGILLAFGFAGGFGNLSLGLYGVSFAAVGMLSTLGITLATDAFGPIADNAGGNAEMSGLSPEVRKRTDELDMLGNTTAATGKGFAIGSAALTAIALLAAYIEEVKLWLGKIAASSNGTFKAGSVVFASSEENLANYPFTSDLAVRIIDNGNRAINSDGTLMGLVAHSANISDFLVAYNLTLMNPTLLCGLFIGAMMAFLFCSMSIQAVGRAAGAMVEEVRRQFREIKGIMDGTGKPDYARCVAISTAGAQREMILPSLMAVIIPILVGLILGVPGVFGLLAGSLATGFSLATMLNNSGGAWDNAKKFIEKGNHGGKGSDTHKSAVTGDTVGDPFKDTAGPSLNILMKLMTMVSVVFSGLIVK

SEQ ID NO: 93911 - protein, 326 aa, Unknown
  Obtained from environmental sample
  DOMAIN (79)...(213): Fic protein family
  misc_feature (1)..(326): Xaa is any amino acid
MGFSQKTEAMLNTLTLDVLKSSEIEGENLNYEQVRSSIARRLGIDVANSVKSSRAIDGVVEMMLDATQNFKQALTEKRLFDWHRVLFASEYFPSISVGKYRTEEMQIVSGRMEHLNVHYEAPEPERLSEEMAQFLKWLNDENEPNHVLKSAIAHFWFVTIHPFDDGNGRIARAISDMMLARSDNSSQRYYSMSAQILKARKKYYDVLQKTSYGNGDITDWLLWFLETLKKSLLESEKIIDSVLFKANFWDKHKDTPLNSRQRLMLNKLMDGFTGRLKSSKWAKIAKCSQDTALRDIKDLLEKGILRQDPHGGRSTGYELYILPYNI

SEQ ID NO: 93912 - protein, 72 aa, Unknown
  Obtained from environmental sample
  misc_feature (1)..(72): Xaa is any amino acid
MPLIIRDVQLDDTQALLDIYAPYVQTTWVTFESKVPAFAEFRGRIEQYRFTLGFPYKVAEIDGDIAGYAYAH

SEQ ID NO: 93913 - protein, 1348 aa, Unknown
  Obtained from environmental sample
  misc_feature (1)..(1348): Xaa is any amino acid
TPPQIKLNMPLVDGINWDNLPVTDGIGFLDDLKRNDPLFIGFDLMGLATDSYGIEKGYPKIMMWPAPDQDFSIQLDAEGQPMPGDERYGTWRSLIVPNDIDGLTATKFSWPFVNLIADASAPGGYRPPVINVNDPSLSEPSDSLIPGRYRLKLVVKDLFGNENYYPNRTDTTRGPNNPSPKFIEVTYKASDVPLIQYTKYPQYYNAVKDLEVYFTVSSQNEPTFLAATIVNTNDAEREVQLGGPYTPERLSSNGDVYFFKLTVPASDAKSWPAKKDVFPATGIVFVKIQASAGDKTGPSTYQNFIFDDKPPKVVIDRPVNLTNKASAGILPLEGGDYEIWYPDPARTKWITGSITVAGAVDDNLTLIKDVFFHIGKLGDDDPSSDRESIYNTESNWINTNLQNKDKYSDSAISWSGSLYSWSCSFKAFDNEYKTTAEGMARTQKHTELYGFTSNDYSETEGEGRKRFYLPFYVKVVDSAGNYKIVHYKLCVDPLLDEPTVTITQPEVKKDINTGLSVTPIVGGTVRVAGFAEDNYWMHTVLVRVKKAEAYPAGTTTDNGYYIPKTSPATSPFYKSSPGSGFPKPMKADGHTPDTDGWFKAEIIGDSNNVNWYANINQNLELDPTGSTVDVTVEVVAIDCSQEDTTHTKFNIIGPVETLPLKFSKDVPMITNVKIKKAGVDDRDYKEGIRASDAFSFSFDVEAVNNINTLTARVNGAATPITLINFTSNQSAAGWSITELTPSSAGRNKRNVTVTIDSTADIITSLSIPGFNYGKTGNITLEISAIDATENRLSTTNTFGIGIDNFYPTAVINTMNLAADNPSSAKYYFAEGVAQDYPVTGSNLVQGLDKVLIYFERANITYDNNNNRKVTGNDTFVRPNGTDASIADDFVTYPKVIYYEGPASSGITSPNRTNHIRFPKINSGSPSKSPCAMVIDTAENGSTIDADGDGTYGEIWNGQSSAFKEFGARVAFTSTSTPSITSSWEDGPYIVHYMVLDQAGNATHYQNDIYLENKKPRITKINFGTDIDGNGFVSNNANLQEYLYSSDEVLSPPSNSSVYGIKTLNNPYFRIRGNRFAVKFSVEKGNGNKGATVTYVTQGANISAASMERGRIYTIVNSGSGWSYTDFTKYGAPNNIEGTTFVATGPAASSSPPAGTPPGTPGTVTPYTSRPDGTHRFPLTMAASDTDGTITITNFNNIPDSQKDANGDILSNRHNERFFILKVFDTTVSDSSPDGWDQLADAVLVRLDIDNQDGKAPSIEVLPLGYEYNVDPSALPPLNNPANYAAKKWKPLIGQDYNNYEKNVAMTKVNGKAVKAGYVQYSYGVYPEIDPDGTADISGRVKFLGKAED

SEQ ID NO: 93914 - protein, 304 aa, Unknown
  Obtained from environmental sample
  misc_feature (1)..(304): Xaa is any amino acid
MDEASLLALQNEIFELEQKLADKKHRLEEARTSLEKQTANAVTIQKPLSGDSFQASLIEVNNHSPPEIKIAMFRSLFRGREDVYAKRFESKKSGKSGYQPACRNEWVRGICEKPRTNCGSCTQRSFEPVTDDVVRNHLSGSIVMGIYPLLLNETCHFLAIDFDKETWREDVRAFMDTCRLEDIPASLERSRSGNGAHIWIFFDKPVSAAKARKLGSFLMTRTLDRRPEIGLDSFDRFFPNQDTMPKGGFGNLIALPLQKNARDKNHSLFLDGDMTPYIDQWAFLASIKRLDMNNSSYTYLWYGM

SEQ ID NO: 93915 - protein, 97 aa, Unknown
  Obtained from environmental sample
  misc_feature (1)..(97): Xaa is any amino acid
MVWDVDRTEEYDAWFLEQGEDGQASIRMNVELLTKYGPNLPRPYVDTLKGSRLKNLKELRTQTTAHVFRVAFLFDEERKAVLLIGGDKKDKNGFIEI

SEQ ID NO: 93916 - protein, 574 aa, Unknown
  Obtained from environmental sample
  misc_feature (1)..(574): Xaa is any amino acid
MGNRERSAIFCQSLRDFPCPVTLGKNAPSFGLHRFKQGLRFIPPDDEGFTLRGDKQWLVYKGRRRSHRFTILGDTAFEYDCILKKEPERNVISLLMEGAKSFDFFRQPDFVEEPFLKGSYAVYKKDTLVGEGTGKLCHIHRPEVIDARGRRCWGELSVVGNELRITIPEKWLAEAKYPVVVDPTIGTTTVGSQDTFRQNGINIILYMGGEIPVNRFLVPQSFDGLCIASMYVNGNGHLPTGGHPVLYSDNGDKPQTKKSINEYTADFTFTRNNPSPGWRQSTFYTSEVIQSGLYIWFGVFAYAYWEPRYDYGGKCYHDGYSFSLTSAPNTYPLYNVNIYNDYLLSMYFTCTAAAQNFVRTLTQGVSLPDNRIVTGNYKRITEQTVKADATPTKQLTIFKGIQDTLNSFDLAKKILSLFIRIQDTSSSLSLTNKMFSGFRKIQDTADGFDLTSKMLTVFASIKDTVNNFDLSKISFLHFRQVRETIKTSDTLSHLRDLIRGLVDIAGTESEAKKAWFHFRTINETAMAISSISRGLFLFVRIVSGIFIRDGLLGRFLKSKAELSLKSCVTRGNYS

SEQ ID NO: 93917 - protein, 455 aa, Unknown
  Obtained from environmental sample
  misc_feature (1)..(455): Xaa is any amino acid
ERSLQSDNTTYLFAGTVISRDEEDVTILNQATISSANNPESLWSLSASRVWLLPGSDFAIFNAVLKVGEMPVMYIPFFHYPADEVIFHPVIGSRTREGSFIQTTTYLLGRPKASSSSQSSLTKILGNSSDMEKKREGMFLRSTGKKVTDPDKTSLKMMLDYYVNLGTYIGMDLSLPAYKIFSATNLSMGVGLTRTLVPQDGSYTPFFPDYNGETDWNHSNLLSKDVPFRYRFTSGNTISGKYGSFSWSLPYYSDPFVDSDFLKRSEDMDWINMIQQGAASMEAQDSSENQISQEPWQFSGQITPKFPNMAPYINSISIGSISTTIAFRTVDTRSKYTSNDIKYYSPSSWFFAPDTATLYQVSASISGAPLSLGEKASRSAANAVEIEDPLKGIGIPRSPFESKANEEAAKKDTSDKLVPPALNQRFDLPRWGSTRFSIDYRISPQSTSTLRFDSR

SEQ ID NO: 93918 - protein, 328 aa, Unknown
  Obtained from environmental sample
  misc_feature (1)..(328): Xaa is any amino acid
MRNEKCVIKVITLKEYVTKVFNINLNIEALSPRRLIQFAETEAVTEDIFKEYLTVSLLEDENILSRVCEETVDIGDSLKSASLEDLNALWDVLSKNILGNYIPSMKHKIFFEEYQSSLKTAVSSGSPAEMLENLINHYSAFGSGKNAKYTAFKWQNVMTGIGQPDDISLDRLFCLDSQKEILTENTSLFLRGLPANNALLYGTSGSGKSAMVKALLNKYYNQGLRLVEIPKEKLEELPQLVDCIKNKRLKYIVFMDDLSFETDDIGYKKLKVILDGRIERQPQNILFYATSNRFHIINETWKDREGDEVHFRDTMSEKLSLSERLEFA

SEQ ID NO: 93919 - protein, 199 aa, Unknown
  Obtained from environmental sample
  misc_feature (1)..(199): Xaa is any amino acid
MLYYFYVGCYTSNPKDKGIHLLVIDTDSGILRLEDSFYGGENPSFLLRLGNFLYAANETWRAGMVSALSVGDQNALTFLNSREATGAGTCHVAVMNNYLYAANYESGSIFGVEILPDGSLGGVVAEIQHEGSGPNPDRQKGPHAHSVNHVPGANLLIAADLGADRLFCYNQRKDGSLVPDSISPVVSAPAGGGPRHIAI

SEQ ID NO: 93920 - protein, 304 aa, Unknown
  Obtained from environmental sample
  DOMAIN (9)...(299): Predicted permease
  misc_feature (1)..(304): Xaa is any amino acid
MIPEMIKREAIYLWYYFSILLGQIGPYWILGMALGSVISVFGKERIHRLFDSLQDKHLGVFGLIPASLIGIASPLCMYGTIPIAASFSQKGMRDDWLAAFMMSSILLNPQLLFYSAALGSAALIIRFASCFFCGIASGLLLHIFYRDKNFFNFKGFGETESRDTDSNLALRLLKNLWRNFKTTGPAFLIGLCLAAMFQRYIPEDTVAALFGKNRGFGLLMAASVGVPLYVCGGGTIPLLQVWLLNGMTMGAASAFMITGQAMKITNLGAVKIILGLKHFLLYIIFVILFALLGGFMVDYIFRIG

SEQ ID NO: 93921 - protein, 519 aa, Unknown
  Obtained from environmental sample
  DOMAIN (5)...(377): Glucose inhibited division protein A
  misc_feature (1)..(519): Xaa is any amino acid
MCGGNMGAHVLLITFDMEKIAQMSCNPAIGGVAKGQIVREIDALGGQTAIITDRTSIQFRMLNLSKGPAMWSPRSQCDRMKFSAEWRRTLEITPRLDIWQDGVASIIVEDGAACGVTTRLGVNFRAKAVILANGTFLNGLIHVGRTKIEGGRVAEAASKGLTEQLRNLGFETGRMKTGTPPRIDGTSIDFAKLQRQDGDDNVRRFSFLPDVETRQLQRPCYIAYTNTSVHRTLERGFADSPMYNGTIQSIGPRYCPSIEDKIVTFASKDAHHLFLEPEGTDTEEYYVNGFSSSLPWNIQWEALRHVEGLENVRLFRPGYAIEYDFFPPVQLFHTLETKLVQNLYFAGQINGTTGYEEAAAQGLMAGINAVLKQREEAQFVLKRNEAYIGVLIDDLVTKGVDEPYRMFTSRAEYRIILRQDDADARLTPLAHKLGLASEYRLNLLNTKIKEQDKLKDFINNYNVTPASINGFLEHCGTTPLKHTIKLIELVMRPQISLNTLILEIPDLMKLSQSIPDRKD

SEQ ID NO: 93922 - protein, 236 aa, Unknown
  Obtained from environmental sample
  DOMAIN (3)...(236): SAICAR synthetase
  misc_feature (1)..(236): Xaa is any amino acid
MKKLEQIYEGKAKKVFKTDNPELLIVDYKDDATAFNGEKKGTIAGKGVINNRVTNHLMKLLESKGIPTHFVEEISERETVVKKVQIVMLEVIVRNIAAGSLSKRLGLAEGTKMASTVLEYCYKDDALGDPMVNDYHIAALNLATKAELEKISDYSFKINKILSEYLKDLGIELIDFKLEFGRTSDGTIVLADEISPDTCRFWDSKTHEKLDKDRFRRDLGGVEDAYKEILKRLLGE

SEQ ID NO: 93923 - protein, 333 aa, Unknown
  Obtained from environmental sample
  DOMAIN (177)...(333): AIR synthase related protein, C-terminal domain
  misc_feature (1)..(333): Xaa is any amino acid
MENSFSESYKNAGVDVTAGYRAVELMKKHVQRTRIPGVIEEIGGFGGLFALPKIDYKEPVLVSGTDGVGTKIKIAMLADKHDTVGIDCVAMCVNDIICAGAKPLFFLDYIALGKNIPEKVEQIVAGVAEGCVQAECALVGGETAEHPGIMAENEYDIAGFSVGIVEKSKILDINSVKPGDVIIGLESSGVHSNAFSLTRKVFGIEDNKSILEKRFNELGCTLAETLLTPTKIYVKPVLALLEKIKVRSLCHITGGGFYENIPRAFGKNVGAVIRKSALNIQPIFNLIASQGKIPERDMFNTYNMGIGMCAFVQAQDADETLSILKSSGESALV

SEQ ID NO: 93924 - protein, 325 aa, Unknown
  Obtained from environmental sample
  misc_feature (1)..(325): Xaa is any amino acid
VKLPSIFRFRNLCIAFGAAFIVVVLCAVLAIYALPTVLKPYLEEKIGAATGSEVHIGLIKIYPFKLAITLQDFSAKNKAAKLTWDSLYIDAQLLSIPTRSVRLDELRIHGLHSQLILQNESKELSAIAQFATDAFLKRMNVPLYIERFIIQNGSFEALDKRGEKEKRFGIAPISFSLEKFSTKYSAESGNNYNLQFTSLTGGFFRWNGNLQWDPFLSQGELEIRDLDIIQLRDFYQELLPFNLQSGKLDLRTNYRIVEEPEIGFVLENAKLSLNRPSLTVDSSQFDMRAASVHTDSLQISTLNRTLFAGNVIIDSANVRFAFDSL

SEQ ID NO: 93925 - protein, 211 aa, Unknown
  Obtained from environmental sample
  DOMAIN (1)...(207): Radical SAM N-terminal
  misc_feature (1)..(211): Xaa is any amino acid
MDSMIAHYTAARRKRSDDAYSPTGKSGLRPDRATLVYVEGIRRTYKDVPVIIGGIEASLRRFAHYDYWSDTVRHSILLDSKADILVFGMGEKPLLNIARRLANGETIGSISDERGTCVRVHGRAAIEQWKDVCFLPKYEAVKEKDTASLRAYAEHFMVQKQNADPLSAKPLAEENDGDRWVIQNPPALPLSQRNWMTYTNFPLREKPTQCM

SEQ ID NO: 93926 - protein, 962 aa, Unknown
  Obtained from environmental sample
  DOMAIN (1)...(172): BadF/BadG/BcrA/BcrD ATPase family
  misc_feature (1)..(962): Xaa is any amino acid
AHATAAAYFDKDVDTIFEIGGQDAKYTYLTGGVPSDYAMNEACSAGTGSFLEESARESLNVKTEEIGERALLGKQPPNFTDQCSAFISSDIKTAGQEGIGKDDILAGLVYSVCLNYLNRVKGSRQVGRKIFMQGGVCYNKAVPVAMASLMKHEIVVPPEPGLMGAFGVAMETANRMDIGLSAVSKFDLDELSNREATRESSFVCAGGKEKCDRKCEISRIRVNDKLYPFGGVCNKYYNLRLHKEVDVEDLDLVAVRNKLLFEQFGVMEGLAHKGHAKTADGHGAHPKSVGIMRTFLTHALYPLYSNFFREMGFRVVLADAIDPEGIARIEAAFCLPAELTHGSFLNLLKKKPDYIFLPHVSQIPVKNPSTHSKTCVFVQGEAYYLKTTFRHEIEEARTAILSPVLSFERDYDRARARHELINMAVSAMHISQKTAEAAFHRAVERQHAFDNELQTYGRRALEYLEANPDTFGLVIFGRPYNSFAADANMGIPHKAASRGYIVIPFDMLPAGDYMADSKMYWGMGQKIMKAAQFVKKRDNLFGVFITNFSCGPDSFILSYFRNLMKSKPSLTLELDQHTADAGIDTRIEAAVDIMQSYRRISKSLPPEETSFIPAVVPDNEMRVRAADGTFYNLRDPKVELMLPSMGRYGTEALAAIFRSLGVNAHALPVADKEVLSIGKKNSTCKECVPYIVTTGSFLQYVWEKKKDPDKITLFFMATSDGPCRLGQYCRAIAQNIENLKIPNTAVLTLTDENGYGGMGAASLLKGWQSIIVSDVFSDIRSMLAVAAKDKEQALATLEECWGEFIRFFEGRVGGGVMKTIDRVVKRLSKIPLKMKPEDVPIVSVIGEIFVRRDEFCRKNITDYLESHGFAAKVAPISEFLCYSNYVLNSNPPDIEQTLKERIRVRLTSKLQDWWENRIKAAMAKCGLYKFELVEVEKTLAASRHLIDERLRGEAGADGRPCS

SEQ ID NO: 93927 - protein, 76 aa, Unknown
  Obtained from environmental sample
  misc_feature (1)..(76): Xaa is any amino acid
MNRKLFVILIVAVIAIFGLGSCLTNRKTGDIHNSKNSLDWAGTYKGTIPAADGPGINVSMKLNKNNSYELTYEYID

SEQ ID NO: 93928 - protein, 355 aa, Unknown
  Obtained from environmental sample
  DOMAIN (1)...(69): S-adenosylmethionine synthetase, N-terminal domain
  misc_feature (1)..(355): Xaa is any amino acid
KDDPHSRVACETSASTSLVLVGGEITTTTFIDFQEIVRNVVKEIGYTKPEYGLDCNSMAVMDMIHNQSPDISQGVSGTGLDIYHGQQGAGDQGMMFGYACNETEELMPLPITLAHKLLLHATKLRKEKTIKWLRPDSKSQVTVEYEGYKPIRIDAVVIAHQHDPDVSYKDIESGIIEGIVKPILEPTGLLDKNTKYYINPTGRFVVGGPFGDTGLTGRKIIVDTYGGMGRHGGGAFSGKDPSKVDRSAAYAARYVAKNVVAAKLADRCEVQLAYAIGVPFPVSIMVDTFGTAKADEKHIASAVEKVFDLSPAGIIKTFDLRRPIYQKTASYGHFGRAEFPWEKTDKTEALKKAIK

SEQ ID NO: 93929 - protein, 118 aa, Unknown
  Obtained from environmental sample
  misc_feature (1)..(118): Xaa is any amino acid
VKLRERGVKLAIATSLFPELCGPVLRNNGIDDFFQVICNTNETEHGKSHPDVFLLTAKKLGVKPGGCLVFEDILVAVKSAKGAGMDVCAVYDRKSENDWEEIKEAADYAINDFRDAPL

SEQ ID NO: 93930 - protein, 570 aa, Unknown
  Obtained from environmental sample
  DOMAIN (379)...(570): Glycosyl hydrolase family 3 C terminal domain
  misc_feature (1)..(570): Xaa is any amino acid
VREYLRGKNVQKPVEWNTLEELLSQMTLAEKVGQMTQAERGNLEKGDIKKYGIGSVLSGGGSTPWENTPQGWVKMINGFVEESLKTRLGIPVVYGIDAVHGHNNAQGATILPHNIALGAIAAGNQQRGAQAAYTAGKITAQEMIAAGVRWTFAPVLGVAQDVRWGRTYESFSENESIVTIMGAGFIKGLQENGAAACMKHYLGEGQTIDGRNQGNAVLDRAGIEKILPPYRAAINAGAMSLMPSFSSVNGIKMHQNKELLTDLLKEEMGYKGFVVSDWSAVKQLTGGSYRMQIANAVNAGVDMCMAADGRNNWIDFINHLTKLVEDGIVPMSRIDDAVVRILRFKQSLKLFETPMITRAGEIGTDENRAAARELVSDSLVLLRNEKNTLKKLSESKRILVTGQAANNIGMQCGGWTITWQGSHGAITKGTTILEGIKEATKDKASITYAEDGNAAGSFDAVIAVIGENPYAETEGDRSGNISIRDRDMETLRKSYGYHCPVIVIMLSGRPMNIGDEYKKWDAFIAAWLPGTEGNGIADVLFGNKSFAGRTPYTWRKTLNGEVIYPLGFGL

SEQ ID NO: 93931 - protein, 199 aa, Unknown
  Obtained from environmental sample
  DOMAIN (1)...(198): Histidinol dehydrogenase
  misc_feature (1)..(199): Xaa is any amino acid
MCWLSLTDKDGGIEKAADLVAADMLGQAEHDPDARARALVPNRELAEKILTAIERRIKSLPTEKTARASLDAGGFIIVYETQEEAIRIANTIAPEHLELQTANAESWIPQLKNYGSLFIGSLCAEVLGDYSAGINHTLPTSTSARFTGGLSVRHFLKTVTTLRCAQSEGFEKARNAAEILARAEGLEGHAQSAAAREQK

SEQ ID NO: 93932 - protein, 361 aa, Unknown
  Obtained from environmental sample
  DOMAIN (24)...(356): Aminotransferase class I and II
  misc_feature (1)..(361): Xaa is any amino acid
MSEFWNSRIKRLSPYVPGEQPKDRKLIKLNTNENPYPPSPKVIEAIKNAAGERLRLYPDPECAIFREAAAARYGVKPQEVFAGNGSDEILAFAFGAFFESGEKAAQILFPDITYSFYPVYANLWEIPYRTIALAQDFSININDYQVPSGGVIFPNPNAPTAVALALDDILSLAEYLEKQGKVLIVDEAYIAFSGSSDAQSAVRSINSHPNLLTVHTLSKSASLAGLRFGFAIGNEKLIEGLCRIRDSFNSYTIDLLALSGAAAAVSDKLYYDEINRRVIATRERTAEVLRGLGFTVLPSSANFLFVKPPNKSGAEFFAALRNRGILVRHFNKNRIADFLRISIGTDADMDKVLEACREILG

SEQ ID NO: 93933 - protein, 82 aa, Unknown
  Obtained from environmental sample
  DOMAIN (3)...(81): Phosphoribosyl-ATP pyrophosphohydrolase
  misc_feature (1)..(82): Xaa is any amino acid
IFAEIIRERFRNPAPGSYTATLDDALVREKVMEEAQELCEAKTHEEIIWEAADLLYFSTVLMTRAGVTIQEILDELDRRHKK

SEQ ID NO: 93934 - protein, 133 aa, Unknown
  Obtained from environmental sample
  misc_feature (1)..(133): Xaa is any amino acid
MTTDSNAKKRYRPRFIDKTYRPDAKVGRFLSVLILFGVSYGLYRGIQDNYLAEIIHVTPFERGIIEFFREMPGLLLILILALMYRFADSKVFKIGVAIMAGGSVGLLLSSTTPFFMTKVFVVISMVLFSTGEH

SEQ ID NO: 93935 - protein, 224 aa, Unknown
  Obtained from environmental sample
  DOMAIN (12)...(223): haloacid dehalogenase-like hydrolase
  misc_feature (1)..(224): Xaa is any amino acid
MRKFDPKKIKALAIDLDGTILLPNTMLGGRTQACIRKLISNGMEIIIATGRAIEASERFRIPMGAEGPMVYFNGAEVVDMPSGRILYTNLIGKDVVDFGTDIARSLGIHFQVYLPAGISPETGKRDIRQKWEALLTEKDGPDVQMYKKHTGIEPIIKDLKSVAAMPDLEGCIKGMFIADPSIHDEIRKRIYDRFGSRINVMRSFPTFLEVINNGVSKGEGLRIA

SEQ ID NO: 93936 - protein, 332 aa, Unknown
  Obtained from environmental sample
  misc_feature (1)..(332): Xaa is any amino acid
MLYITSGKTDIIRVGLNPYRGFTGWDAKTVNVYADWRFNGTSELSITGKYKIGEFLDIPPTIDEIPVTSIGNDAFNNKQIYYIFISDNITTIGNNAFMYNKLTGITIPESVTVIGNTAFAYNSIVYIAFSESENVTSNVTYIGDNAFYHNQLRSVIIPEKITFIGNGTFAYNWLTSVIIPENVTAIGIGAFAYNQLTDITIPGNVITIGNIAFAYNQLTNITISEGVKYIGENAFSYNQLSEVTIPNTVTNIGNSAFANNILNEITIPDDVMSIGANTFFNNQLINVTIPEKVTFIGNSAFEDNKLSEIKIPDKVKSIGVHAFFRNQITSIT

SEQ ID NO: 93937 - protein, 350 aa, Unknown
  Obtained from environmental sample
  misc_feature (1)..(350): Xaa is any amino acid
MALVSTKGYFRLDVVKDNAPKTLIAWTEISDFDGINFTMNIITCGACLIFLVNGKWLAEVADSTVDYGKLGFVLASYESAEESNEYVCKAMLDYLSVDTRIKSIDECYKKWTDDSNINAEWRLRLAETYAVMDEPAKALDQINRAWKRRDEVIRTVSNTSEVRTKRELLFAARMSFRIREYKTAEEFINMILDQWPDSAEGKLACTEKIKILYELNKFAELKEFIVKNQVNINKDIDYYTLFAKCLWELKDYADSAEAWDKAFEMNAENGIYAANAANAHEMAGNNKKALSRYVSAGKIFLNQDNMPELSAIIKKLSILGTGDWEARALAGKWAFSIEDYDRSVKEFEVS

SEQ ID NO: 93938 - protein, 293 aa, Unknown
  Obtained from environmental sample
  misc_feature (1)..(293): Xaa is any amino acid
MQELKDEIGRYIKEEMDYEGEIAGNIKTAIKVRLDNLCVGAKGYMFNTCEYLDMTELLETNAVFELEGLADDSDKAFCVGLMVIFINECRQIAKEIQGNRKTGLSHLLVIEEAHRLLKNVDTERPGENIGNPKGKAVEHFTNMIAEMRSYGQGVIVAEQIPSKLAPDVIKNSSNKIIQRIVSADDQQIIANTIGISAGDSIQLGTLETGYALCHKEGMALPVFVRINYVVDNFVSDELLYYGDIDTRINKINFNMAGEILNNEETTKTVVLTLLNTILSENADYAVNAAETAV

SEQ ID NO: 93939 - protein, 505 aa, Unknown
  Obtained from environmental sample
  DOMAIN (197)...(503): CO dehydrogenase/acetyl-CoA synthase delta subunit
  misc_feature (1)..(505): Xaa is any amino acid
ASRKFLYAEGGYARIVWMTKELKDLLHNDLLRRFDEQKLPGFIDQIADETVAVTAEDVRKFMEKVKHPALKMEDMTHFAQSEQAGEADAKTDAVKKDAPSGESTSAKTEEAGSIPANMDLAAITEKIKADVTKEIITGIIDILSERFLGKAPSAASSEVKTESANVIKTPRISASERISTIKSFALPADSASCSIYSVKLGNLKSEGGTRGRTYTIGGADCMPFHFWEGKMPNKPLVAMEVFDSVSEKYPDILRKAYGDVLSNPVQMAKLCVEKYGAELISVNLDGTHPERENRSGKQSVELVKSILEAVEVPLIITGTSHHEKNNEVMKAIAQSCEGENLLFNWVEQDNYRTIAGAAMAYGHTLVAQAPIDVNISKQLNILLTNMGMAPEKIIIDPMTSTVGYGIEYTYSVMERIRLTGLGGDNMLLSPMIVSVGMECAKVKEFKAPQSSFPDWGDLAKRTAYWEIATATTLLYAGADILILYTPEAVTTIKKTINSLMDGEGK

SEQ ID NO: 93940 - protein, 108 aa, Unknown
  Obtained from environmental sample
  misc_feature (1)..(108): Xaa is any amino acid
MNKRKIAKKSRVSKPSKISKVKKAAKASNVKKVTKVAKAKKVSKAPKVKAVAKTANVKTPSKAPKVAEPLNAAERTSLKSEIKAICDIMRRFNCAGAMQYVPEMTWLL

SEQ ID NO: 93941 - protein, 286 aa, Unknown
  Obtained from environmental sample
  misc_feature (1)..(286): Xaa is any amino acid
MEIVQGFPVLTGLQLSSAPTAFMGKLYLCDEDGKVYSVDATGKQGVWETSFTSALRSPPSFLLLSDKKRNSIYSAVYPKSFFGEIWLLDGEGRTLPNWPAPISIESDDDDEEDEGSSSSSGGGIGFGSPLLFAYKNNIYVAFINQSGQISVYDEEAVLVPPFPIALDGVFYLQPVFDGEFMWLVSANGMFFRVSLEGEVLCQDIPGFSVKEEGYITFFDSDGDKIPEIYITGEGNALYAYTRYFRSLGGFPLPAWGRPLFVPAQGGKKAEIFGMGMDKRLYRWQFK

SEQ ID NO: 93942 - protein, 374 aa, Unknown
  Obtained from environmental sample
  misc_feature (1)..(374): Xaa is any amino acid
MKKFQTVIIFVIAAFFSACTTVKDLSINIQGNKTEKNLIAIEEVIVPLEAVGANEARNKTKEITSARELLVQMEKEGSADADYSSRLIAWSGRLAILEGKYSEATRLYRQSVSVSPGNIPAVVLSVRLEGDPVKKLEIIEKELVLLNQKSLGIGELNIEKGHALTELKRFPEAVGAFDTAFSSGINKVYKDSYGQERDRAWELRNATGVNAGSLSLLGRESITWNDCIALAKNETQLFRFITGGRNITDAELFIRLVERAFIPYTQDITVTQWPSAKPKPDEAVTRAGAAFFIWHLYAEARGDRGMLTRYSARYATGTKPRTPIPDTPALSPFFDSILGCVETELLSLPDGRNFRPTQFIKGAELLAILKKIDN

SEQ ID NO: 93943 - protein, 161 aa, Unknown
  Obtained from environmental sample
  DOMAIN (3)...(161): Glutamine amidotransferase class-I
  misc_feature (1)..(161): Xaa is any amino acid
MILLIDNYDSFSYNLYQFIGAIDQNIKVVRNDEVSPEEIKKLAPKRIFISPGPGKPSEAGICIDVIKKLHTDIPILGICLGHQAIFEAFGGTVSYASKLMHGKSSQVSVDNGNPLFKGLPPTIQAARYHSLAGVKSTLPGDLRIIAQTADGDVMAVCHNKY

SEQ ID NO: 93944 - protein, 96 aa, Unknown
  Obtained from environmental sample
  misc_feature (1)..(96): Xaa is any amino acid
MPFTEQDRLNQEKKVAELAAELDRLNAQFEAQLKAAGLTEADLAKIDLDNPPPELKAALAEAGRKAEREGRERAAQARPAASSAPKAGVRGGSIRA

SEQ ID NO: 93945 - protein, 79 aa, Unknown
  Obtained from environmental sample
  misc_feature (1)..(79): Xaa is any amino acid
MTDHNVQTAWDLEPEKIKAIMTAVLEGARPADAAGVSQKQLEALYALGHSLYMAGSYHDAVTIFQGLCLYDYGDCRFWT

SEQ ID NO: 93946 - protein, 283 aa, Unknown
  Obtained from environmental sample
  DOMAIN (191)...(276): FR47-like protein
  misc_feature (1)..(283): Xaa is any amino acid
MNEPLFWRWKKMNKSHIAGVEELLRANERWCMNACSRFIKGGSPVWILGQGDPLALVIHARQTLLPVLCDQEKVPQPRFLRGFFGGKVSLHSLQGRKDDALVMEKALEEMGLYAVEKKDYDIMCLDHALLSCHSTAPVNLVIRKPAPQDMDELATLHAGYEQEEVLPAASEFRPAASRLNIERIFAEEQMLVAELEGRLVGKINTNAISFTRCQIGGVYVHPDYRGLGIAGRMTFEFAESLRSQGRGVSLFVQKTNIAARRVYQRVGFEIQGDYRIDYFSNNN

SEQ ID NO: 93947 - protein, 553 aa, Unknown
  Obtained from environmental sample
  DOMAIN (95)...(326): Glycosyl hydrolase family 3 N terminal domain
  misc_feature (1)..(553): Xaa is any amino acid
MRIFPVLLIFLASSIFSLSFFDDRPPEELAVALERAMSDDEALAQVFMLGWVGAEPSPLIMDWIHDRNIGGVKIFGWNTGDTVRLARTVGVLQEASLKGKFNIPLLVATDQEGGWIRHVKGNTSITPGNMAIGASGYPRDAYLAGYYIGKELALLGINMNFAPTVDLFTNRDSWLISTRAFGSDPVKVGIFGAAYMRGQQAVGIIPTAKHFPGHGDTHLDSHGVLPRINVTFETLWERELVPYRMLVKEGIPAVMSGHLAFPRIEASGVPASLSSWFLKDVLRGKIGYRGLVITDDLMMNGATLWAGSVSRAAKQALLAGNDIILLSKTPDLFDPVWNLLSSSMKDDNEFRLCVRDAARRILETKLRYLRDSQAVPFVPDIKKVENGLPDPQGSAFFVDLAARSVTIVKPSKEAAFGAREKQGIFPLKPEDAGKVLLTGQYLDFFKVGRAAFPGAISYWYSEDFNIDSLLTYARAADTVIFCLSDTEGLRILKRLEALKKRIVVLSVLNPVYLENIPWIDGAVAVYSDSFESLAAGFSAIIGRIPAEGRLPYE

SEQ ID NO: 93948 - protein, 360 aa, Unknown
  Obtained from environmental sample
  DOMAIN (36)...(360): Methylmalonyl-CoA mutase
  misc_feature (1)..(360): Xaa is any amino acid
MIPNFSAIELQLASSASGAARADWEKRAGDISGLTWMTNEQIPVKPMYSAEDNANAEHLSYVAGIPPFLRGPYASMYVIRPWTVRQYAGFSTAEESNAFYRRNLAAGQKGLSVAFDLATHRGYDSDHERVVGDVGKAGVAIDSIADMEILFSQIPLDKMSVSMTMNGAVLPVMAFYIVSGLEQGAKLEQLSGTIQNDILKEFMVRNTYIYPPKPSMKIIADIIAYTAGNMPKFNSISISGYHMQEAGATADLEMAYTLADGVEYVRAGIKAGLKVDEFAPRLSFFWGEGMNHFMEVAKLRAGRLLWAKLLKSFDCKDPKSMALRTHSQTSGWSLAEQDPFNNVIRTCVEAMAAALGHTQS

SEQ ID NO: 93949 - protein, 486 aa, Unknown
  Obtained from environmental sample
  DOMAIN (357)...(485): RNA polymerase Rpb1, domain 5
  misc_feature (1)..(486): Xaa is any amino acid
VQTVKSAKKFVEKERPEVWDILEEVIKDHPVLLNRAPTLHRLGIQAFFPVLVEGKAIRLHPLVCSAFNADFDGDQMAVHVPLSVESQLECRILMLSANNLLSPASGHPVMTPTQDIVLGIYYLTKMSPDRLGQGRAFSDTDEVLHAVAAKQVDIHAKIRVRHNGKLIETTPGRVIFNTVVPKDIEFVNELLNKKRVQQLVERVYNAAGTKTTCKFLDDIKALGYEYATRAGITFGANDLVIPDEKKEIIDRSQEEVTRIRKQYDRGIITEGERYNKLIDLWTHTTSQIADKMHERLAGDKNGFNPVYIMMDSQARGSKDQIKQLAGMRGLMQKPQKKITGAVGEIIENPIISNFKDGLTVLEYFISTHGARKGLADTALKTADAGYLTRRLVDVVQDVVVYEEDCGTPMGIYIEALKEGDEVMEPLSARLLGRVTQENVYHPVTDELICPVNTLIDVGLAAKIEEAGIESVFIRSVFTCESDFGVV

SEQ ID NO: 93950 - protein, 392 aa, Unknown
  Obtained from environmental sample
  DOMAIN (1)...(160): Transglycosylase
  misc_feature (1)..(392): Xaa is any amino acid
LRVFPSADGVKREWLPVNEIPATVLRIFVRAEDARFYLHPGIDPIAVIASALRNLRAGRVISGASTITMQLARLLKPRDHGFKGKILEAIDALRLEARLSKKQILELWINGIPFGSNIEGLSAISRARFGRTVRGLDDARAVLLAVIPRRPGLYDPARSPDEKAAINAALALARRCRLNMDEAALKEAAADADPGRLADEKTPFYAPHFTDRITADGRQPVRTTLDLNLQLYAEKRLASELAMLENNRVGNGAVLAVDNSSGEVLVYIGSASWFDDARNGKIDGVRVKNQPGSCLKPFLYALALEKGFTPNDILPDIPTVFGSNEAYSPGNFNRRFNGPVRLRIALASSLNIPAVYMLERLAVRNFEDWLGRLGFDSIAASAGSYGLGLALG

SEQ ID NO: 93951 - protein, 413 aa, Unknown
  Obtained from environmental sample
  misc_feature (1)..(413): Xaa is any amino acid
MSELGTQNAAQSENSLPPEALTLLKNVREMLNEEKWTRAALSNYSTGQFKEFDSLLKEARDLRVVDEMKKDCDEHLAHSKNSIIALYLSGMIALSRQIIDDAAMINLVTIFADNHKWAIVKYLCERILDHGESKYALRSLIDCCKNENNEEALYGIWERLVKVDYEEAELAKSLAEHYEKMGNDEAAVDYYKKALHRFINKSLFANVKEIWEKLLVFCPDDIDFFFHVQKKVAKTISEERAIDLLKLVYASCKDRDIDTAIAILKIVLQYDEKDYPARKEIVECYKKKFAGHSHLDDYIRISNLSQSYRNVHEAITDFEKHIAFDKGNYVFHRTWGVGKIAGIEGDDIKINFSKKANHTMSLKMAVSALQILSKDHIWVIRATWSREKLQEKVKADIHWTLKTIIKVPGIPAT

SEQ ID NO: 93952 - protein, 472 aa, Unknown
  Obtained from environmental sample
  misc_feature (1)..(472): Xaa is any amino acid
YCPAWGYTGLFNAQPSIRGGFPGDMNASLDGYYVMNPYHWGGGFSIFDPRMVQSAQLSHGVFSTRYGHTISGLLDITSKTPSPVDTEFELAASSSAVNFNLSFPLAGKGGILVMGRVTYYDPAVWLMQALSIPLYDMGLYTQEQVDILNAVRVAPYIRSATITGNYRFTDNLDLHATGFWGMDGVGFTYAYETQEDKGLSSSSRTALDWTNYQGFVTAALNWNPRNDMLVKFTIGTGYEDAVVDADSGNSVRKKTFSKDFYEKYSTPELEQFLDRGPSPYDTQEFMKQSELMFNVQARTDYDWELGKGFLVAAGAQEMFTMYSMDGSQQGFYERRFNSLKQEDQDRIKSPLGPLWDQLPDQFKNDLRIAYPSPSFSINAENFLFTTSGYSLVEYAAPDKKFNAELGLRVDHYYLLGDGFSYVTKPALNPRLNLDFNILNNLWIIGSLDISAGTGLFSTMDNTVFMAEKRYDI

SEQ ID NO: 93953 - protein, 284 aa, Unknown
  Obtained from environmental sample
  DOMAIN (5)...(279): Acyl transferase domain
  misc_feature (1)..(284): Xaa is any amino acid
MSKTILLFPGQGAQYVGMGKVLSETFEPAKQLLKKADEVLGFELSKIMQEGPEDTLKSTDNTQPALYVCSCMAMELLKSKNLSFDYVAGHSLGEYSAIYAAGGFSFEDGLRLVRVRGELMAKAGELKPGAMSAVLGLSEADLNAVLGEAQSAGVVVAANFNSPGQIVISGSKEGVAKAGEIASAKGAKKVVPLPVSGAFHSPLMEYALPKLKEAIEKTAFSDLKVPVIANVTSEPVSKGTELKELLAKQLLSPVRWQQGMEKAISLGVQRGIEVGSGKVLMGLM

SEQ ID NO: 93954 - protein, 173 aa, Unknown
  Obtained from environmental sample
  misc_feature (1)..(173): Xaa is any amino acid
MIRSIFFSAALLLLVSTQNLFAAGAFTPEQYKKALWMVTRFYGAQRSGLGPNWLLMDHTYKTSFVKDAADGHNLEGGWFDCGDHVLFGQTFFYSAYVLAKAYEAFPKGFHDLYNGKDYSDYAESNDWSINGGKPNRVPDLLEELKYATDWIIKATPNGTTFYYEKGTWRLRPQ

SEQ ID NO: 93955 - protein, 188 aa, Unknown
  Obtained from environmental sample
  DOMAIN (61)...(185): NUDIX domain
  misc_feature (1)..(188): Xaa is any amino acid
DRREYSGRPGPVGRILRSYHIGQWRKDSLFCGSCGNANKDADSGIVARQCSACGRLEFPRIAPAVITIITNDNNEAVLAHNKNFSGGFYSLIAGFNEAGESLEETVAREIKEEINIVVKDIRYILSQPWPFPGSLMLGFSASYDGGEIKPDGIEIDDARWFSREALPNLPGSASVSRFLIDLWIIGKL

SEQ ID NO: 93956 - protein, 410 aa, Unknown
  Obtained from environmental sample
  DOMAIN (2)...(348): Serine hydroxymethyltransferase
  misc_feature (1)..(410): Xaa is any amino acid
NVDAIESLAAEEARKLFGAEYANVQPHCGADANLLAYWAILSVRVENPALEKWGETNLYKLTDAQWKELKSSLGNQRFLGLDYYSGGHLTHGYRNNISSRMFDVYGYSVSQETGVLDYDQIEKQALEVRPLILLAGYSAYPRKINFKRMREIADKAGSVFMVDMAHFAGLVAGKVFTGEYDPVPWAHVVTTTTHKTLRGPRAGLVLSTNEFAEALDKGCPLTMGGPLPHVIAAKAITFREASAPEFRSYAGRIVENCQALAASCMKNGLTVLTGGTDNHLLLINVHEDGLTGRQAESALHECNITLNRNSLPFDPNGPWYTAGLRVGTAAVTTLGMGTAEMEEIGSIIALVLKGTSQAPGEKNPAVKSKAKYLIEPAVKAEALDRVKKVLDRFPVYPELDLPLLKEAFVN

SEQ ID NO: 93957 - protein, 336 aa, Unknown
  Obtained from environmental sample
  DOMAIN (146)...(336): RmuC family
  misc_feature (1)..(336): Xaa is any amino acid
MTVLPLTLVMIILAAIAAQAIAFFIVLALRRDPEKQENVLQKFTDYENRLDKNENAVREEIGKNREDMIRAARDSRDELTKVFFDFSAMLDGKLRAVQEMVNNSARVNREELAASLKTFGEQFAASVKSFNDLQKEKFSELIANNSMRLDKMQETVDEKLHKTLETRLGESFKLVSERLEMVQKGLGEMQGLANGVGDLKKVLTNVKSRGVLGEYQLGGILEQILSPGQYAQNVKTKAGSGDNVEFAVKIPGKEDPSKTIWLPIDAKFPTEDYEKLNAAYESGNVDEIEHYKKELEKRIKQFAKDIKTKYVDPPNTTDFAIMFLPFEGLYAEVLRI

SEQ ID NO: 93958 - protein, 251 aa, Unknown
  Obtained from environmental sample
  DOMAIN (4)...(95): ParB-like nuclease domain
  misc_feature (1)..(251): Xaa is any amino acid
ENVKFFPIEDIKIDPEIAGIFKVSDKVLKQIQEQIEQFGYNEEEPVVVWKGKNILLDGRTRYTAAKNANLKKIPTFEKEFENREAAILYTIERQVIRRNLTGAEILTAVQTIKNGRKENDGLGRKADILAEKLGISPATVYQALAITKKGTPEELKAVKKGEKSIKKAYTEIKERQKPEKEFPVNDAQSLPGNVAFLKSAVILLVENGSDNLSAAELLINHFLKKNEKSGFYKLLPENIAKQLPLLPLLNR

SEQ ID NO: 93959 - protein, 67 aa, Unknown
  Obtained from environmental sample
  misc_feature (1)..(67): Xaa is any amino acid
MTAVHSLSHSALCTDFYSLTMAQGYWKQNLSRRAIFEMFFRWQPFGGGYAIFAGLGTLLDSLVSLSF

SEQ ID NO: 93960 - protein, 531 aa, Unknown
  Obtained from environmental sample
  DOMAIN (299)...(529): MutS domain V
  misc_feature (1)..(531): Xaa is any amino acid
MIDKLTLAEKTQILLEYPKILENAAGFAVSEEAAIIIKNSKPFYDTCKAAEIKEIVSAVYALIKSRNDEPRSWLPSIGFLLPKTETPGAVLALDEALAIGLFIERAAELTNWIIKDRGGEEQETNGRQKLLAMLNEEALPNLSAAAAEIFKVIDREGGMRDLPALRAIRKRIGSLEKELKTAVLRYTAQDEYKRMLQSPLPSQRDGRTVLAVKANYRGRISGIVHEVSSSGQTVFIEPLDVVEKNNDILMEKRNLDAEAQKILRELTEKINAHAENLKTLHTTIIELECLRSRAKYSLATKGHFAKDAKGGHEALILKKARHPLLKKAVPINIEMKNTTRTLIITGPNTGGKTVALKTLGLLAMMNQSALALPLDEGSVLPMFDGIYADIGDEQSIDQSLSTFSAHITKISAITAFATENSLVLLDELGSGTDPEEGGAIAMAVLDYLIEKNSRMIVTTHHGILKNYGYTRQSVENASVEFDAQTLSPTYKIINGLPGESRAIDIAASNGLDGAIVNSARKYIDEKKSDVS

SEQ ID NO: 93961 - protein, 514 aa, Unknown
  Obtained from environmental sample
  misc_feature (1)..(514): Xaa is any amino acid
AYIGVASGTPVTTGTKASDSWTGDSRDKTNATLLWTADSKASTVRVPGAITIKAGNNGLGIKSIGQIKVASDQTFPGEIPDNYELSVQVYIGTGNGPNARAIWMPVETGNKQKELNLGQAFVEAGSDGAIAIEGGKRTLIKVDHSVVLVRHASTGIKGAGGVYVDGGYIEVLATEANNTGTALTGVELRISGGWGETVTDRSEIHSKGIAVLDTRKDSVVQITGTVHLSGTLSSNTTVGSSVLGDTAYVTMGTEGDTRNTKSRNLWQMSTVSGVTKDLFEQGRALVIPANVTVSVADNGSRLETAKSDTIRVSGRVTTVGKQAGAKFVNNGKIIVENGGNILYNKADAESFKNNSEEAVIVLKTGSKLDDSLLVHDTGTFSARKYTFLKMARLLSGATADTIKGVVSSRGPGKVIVPPVYATLYGNQSLFVDEDDLDESGKSYWSATSARMDTVYTEKYVKYPLDKRYKPYMDLGEGGTAVGDFTLSGQGTVKLPEEGVRLLTEAGTFNRLATM

SEQ ID NO: 93962 - protein, 459 aa, Unknown
  Obtained from environmental sample
  misc_feature (1)..(459): Xaa is any amino acid
MRNIEIKGARVHNLKNIDVVIPRNSLTVITGLSGSGKSSLAFDTLYSESQRRYVESLSSYARQFLGLMEKPDVDRIDGLSPAISIEQKTSGHNPRSTVGTITEIHDYMRLLFARVGTPTCHKCGRVIARQSVQEITDRILSLDTGAKFQILAPVVNNRKGAYKELLAKLQKSGYVRVRIDKTIHNIDDDIRIDQNKKHNIEVVVDRLVNSPTVVSRLTESIETALSVSAEGTVIVDVAGKEELLFSERLACPVCGISSEEPSPAMFSFNNPLGACEECHGLGFLMEVDPDLVAPDQTKTLLDGAIIPWNGAYIDGGWNNHMLHAVCKRYKIPMDKPYKSLSQKHKDILLYGSDGEKVEVQFEGKDGRSHARFNRTFEGVAPNLLRRYRDTGSEDIRRWIEGFMTQRACPACKGTRYKKQPLAVLIDEKNIAEVSALSIESALKFFKGYSPKGNAKEISK

SEQ ID NO: 93963 - protein, 364 aa, Unknown
  Obtained from environmental sample
  DOMAIN (2)...(121): Oxidoreductase family, NAD-binding Rossmann fold
  misc_feature (1)..(364): Xaa is any amino acid
MLRIGVAGIGKISGVYLDNLTRMFGRRVKLTALCDVIFERAEKAAVDYHVKAYRTLDEMLGADVDIVLNLSQPKYHFDIALASIKAGKHIYNEKPLCTKREEADILLKVAAEKNVRVGCAPDTFLGAGIQTCCKLIEDGRIGNPVAATAFMMNHGPEHWHPSPEFFYKQGGGPMFDVGPYYLTALVNLLGPIARVSGSAKISCPTRTITSEPLNSAIINVEVPTHVAGVLEFAGGTIGTIITSFDVYSHTLPYIEIYGTEGTLRVPDPNTFGGPVYLKRFHEEEWTQIPLINTYTEDCRGLGVTEMVEAIEADRPHHASAELAYHVLDIMYGIHEAAETGRYYNSFTFPSGYERHPSRPPAAWT

SEQ ID NO: 93964 - protein, 122 aa, Unknown
  Obtained from environmental sample
  misc_feature (1)..(122): Xaa is any amino acid
VFHNIHGASNIAQAGGLAALDDEGIKEIRALTDFYLGNAKLIRDALKSRGIESVGGDNSPYIWAYFPGRDSWEVFSQILEKCQVVTTPGAGFGPAGNGYIRFSAFGHRADVEEACKRLISKE

SEQ ID NO: 93965 - protein, 310 aa, Unknown
  Obtained from environmental sample
  DOMAIN (78)...(309): Putative esterase
  misc_feature (1)..(310): Xaa is any amino acid
MKKINFPIICRILAALAVVMYMCLFTACKKEGNNHEGGNDNMLSMLDKIFKIFDTFKDENYSPPSGFDTKTSGASYGTITEETYYSKTTGANRKCYVYTPPGYDSNLTYPVLYLLHGIGGTHTEWLGGNPNEILSNLINSGGAKPMIVVMPNVRAMNPDNVPSDVFGMANVNAFHNFINDLKNELMPFINNNYPVSDERNKCAIAGLSMGGMESLNIGISLPETFGYVGAFSAAPSLPFSAEQMKLPDEYKDNTYILICCGLEDGLLSFSQDYNEHFADNGVQTTFYTIHGGHDFGVWKNGLYNFAKRIF

SEQ ID NO: 93966 - protein, 1081 aa, Unknown
  Obtained from environmental sample
  DOMAIN (834)...(983): Thiamine pyrophosphate enzyme, C-terminal TPP binding domain
  misc_feature (1)..(1081): Xaa is any amino acid
IAGELTPTVFHIAARALAASSLNIFGDHQDVMACRQTGWAMLSSNSVQEVIDLAVIAHSSTLRARVPFLHFFDGFRTSHELQKVDEVSFDVMRQMIDDDLVVAHRKWGLTPEKPQIRGTAQNPDTYFQGREGVSPYYLKVPGIVQEEMDKYAKLTGRAYQIYEYFGAKDAEKVVVIMGSGADTCHEIVEYLNGKGEKVGVLKVRLFRPFDVEHFVKALPASVKAIAVLDRTKDPGAIGEPLYEDVYAAIAIARTNGKFSADPIILGGRYGLGSKEFSPAMAKAVFDNLSGKKIHNFVVGINDDVSKNSLDYDENFVIKEEGMSEAMFYGIGSDGTVGANKNSIKIIGDAKPELSAQAYFSYDSKKSGGFTISHLRFGKKEIRRPYLITKADFLACHKFSYIETLDMLTNIKDGGTFLLNSPFSPEEVWKEIPVEVQKQIINKKLKFYVIDAAHIARETGMGNRINTVMQAAYFKISGVLHEDEAVKLMKEHIQHSYGKKGADVVEKNYKTVDASLSAVHEIKYPASADGKLHMKQPFATAKDPWIKEVLGAVSVQQGDKLPVSKIPDDGTFPTATTQFEKRAVAERVPSWNPAVCIQCGLCSVVCSHGCIRMKNLTNAEASAAPAGFKTAEIKPKPVDGKKTTLAISAEDCMECGVCINQCPMSKDSSKPTALSWKSYADDPAYHEEQAKAWYYFLSLPEVPAAELNLGTQKGLAYKRPLFEFSGACGGCGETPYVKLVTQLFGDRMVMANATGCSSIYGGNLPTTPYCQRADGRGPVWANSLFEDAAEFGMGMRLTSDKLALHAHEIAEKAKSEGIAVAIIDKILANDQKDDDAIEAQRKSVDELKAALKNDSKPTAKLLLSLADFFIKRSVWILGGDGWGYDIGFGGLDHVIASNRNVNLLCMDTEVYSNTGGQMSKATPVGAIARFAAAGKEITKKDLGAIAMSYGYVYVARVSMGGNTAQAIKAFREAESYDGPSLIIAYSHCINHGIDMSHGMDQQKAAVTSGIWPLYRYDPRLKAEGKNPFQLDSKDPTTSLEDFMYKEVRFKSLKAADPARADALLAKAKAHTERVLKEYKYLA

SEQ ID NO: 93967 - protein, 230 aa, Unknown
  Obtained from environmental sample
  misc_feature (1)..(230): Xaa is any amino acid
MAEDLVGKVINFFSGDSNENLSDKEIVLKQRVRQLGENKYSKFFKAKTEECDPSLAQFFHSLYKLILPIRIFMKDMTKTARLRQIVLESYMDQSIIDLVKKLNPAVIEQRSKNTPPEDLTVQISKDIEELSSKFDSDRIGGVNRVYNLIMTIFQLANFDYPALLRKFDPNFTEGPFATAPKFSPTKVGLMVKEISDFLAVSQVITPENDWRSVLKLLRLCAGDEMIPDPQ

SEQ ID NO: 93968 - protein, 372 aa, Unknown
  Obtained from environmental sample
  DOMAIN (25)...(212): Glycosyl transferase family 2
  misc_feature (1)..(372): Xaa is any amino acid
MFGFFLEWLRDRKACKTDRQDPKVSLIVPIHNEGRRMEALLESLLEQDYWQDDSHPCHPRGDLVEIIFVDDRSDDESPAMLAKFAKDATERGMKNCKIITLRDNPGPNYKQYALSAGIAQARGDYFLFTDGDCEVPPGWVRAMARRMCDKTAGAVIGPVFKKKQGRGFLPLYQCFDHAVRYNYLAGSTGLGAAGGGFGNNLIVSRAALDAVGGYDAVPPSPTEDAALISLIRSQGKFRVRAAALPDAAVATEAEKTWRGFSNQTLRWNNGGVFSPEPVTRFNYNFLMLIIAAGTLAAPFLPFFPRLWPLPLAVLAGMAINTATSFVFFRRQLPQGGPLNLGYALALFFMPVYLTLMTVMGYCGVKAAWRERQ

SEQ ID NO: 93969 - protein, 398 aa, Unknown
  Obtained from environmental sample
  DOMAIN (164)...(395): Caspase domain
  misc_feature (1)..(398): Xaa is any amino acid
GIDAYRSIFYNPDVVQARLQGKPDPASKAKVTIQQADNFTPPTVTIQSPANFSTTNTATTNLSVAITSQSQPIQNIKIIVNGTLIGRNDLSTVKGTGLQPQKASLSVTGNQKTVNFTLPVNLDPGRNIIEVVAFNGYSESPRLPVEITWNAPAGQRPALPNLWILAVGVNNYQDSKINNLNYCVADAKGVIDSLKAQEGRRYAKVNSLLIADGEATAPTAANIRKNLSFLDQAGERDVVMLFLAGHGVSDNAGKFFFLPTDTRLSGNTVAEDSVITGSDIIKVLDRAGNLLVFIDACQSGGVDNDRLVRSLMETNAFVFTSSRGNELSQERQEFGHGVFTYSVMQGLKGATPAVAQGSVTVMSLSGFVMRDVPRITNGAQNPKAYSLGFYDFPVAVIK

SEQ ID NO: 93970 - protein, 90 aa, Unknown
  Obtained from environmental sample
  misc_feature (1)..(90): Xaa is any amino acid
GTWREFMETKEDIIAHLTVALEENDIDFLLSVLNALARSKGMAQIAAELGVSREGLYKSLSPGSNPAFGTVVKTLDNLGFKLNIELKHAS

SEQ ID NO: 93971 - protein, 107 aa, Unknown
  Obtained from environmental sample
  misc_feature (1)..(107): Xaa is any amino acid
MSEKTNIKQLNEEQKKAAFCEENAVVAAGAGSGKTMVLAHRFAWLLTEKGYKVDEILTLTFTKKAAAQMFKRIYSLLSQIAQEESGIPAQRAQKALDDFIHASSCRS

SEQ ID NO: 93972 - protein, 616 aa, Unknown
  Obtained from environmental sample
  misc_feature (1)..(616): Xaa is any amino acid
VQWARQASQFAPWLTGVLPQLGVWFNKVTGLTTDSVLEERAENAASKMEGDDKDLFVLVRRYAHFLNEHSLFEPAWETPPFNDEGKEVFIFFPESLSDYGEYSELLADSRHVKTISATNTDELKSDTFFYTNSRSEIKEAALYIRALNENHGVNWDSIAVCIPNSENYEPYVLREFTNRNIPFVKRSSKLLCDYPAGGFFRSIFECVSQDFSFSALVSLIMNKALPWKNALPIEKLVQFGIDNNCLYSWVEEIDGEEKYINVWEDAFNNPIHYFDRDVRDFFIDLKKRLNTFRRCESFNELRRQYFIFREHFFDMDICGEESDLILSRCISELMELVEIEKSFPDVKAPDPFLFFTEYLDEVPYLPQQKLTGVAILPYKTAAAAHFDCHIILGAGQESLSVVYSRLAFLPKKKREELGIPDEDASLEFINMHKYNSEKISAFFCSEQTFSGFAIPHSRINAPSEPKTCYSADAAFDGKFAQDPFNIEAYFYSSLSNKEKSQKLHDNQINGFANWKNRRAAKSASSGKWTVSEEIKNSIKKAFAKSGKYSVSATSLQKYYQCSFKWLFGNVFGIENTQIETTLMAENISGLVYHAVLNNFFTELKNDAPLLAPVQTD

SEQ ID NO: 93973 - protein, 148 aa, Unknown
  Obtained from environmental sample
  DOMAIN (4)...(115): Response regulator receiver domain
  misc_feature (1)..(148): Xaa is any amino acid
MDKKRVLIFEDSETFANLLLEFLNTEGYETQRAKNGLEGIKLVYSFLPDLIITDVEMPLFKGFESARFLKSRPSTRNIPVIMFTNPGETRDKFWGEQAGADFYIEKKPEIFDELSGQIQQLSGKSHQIDYEWIKKEGEKINDNSLVEM

SEQ ID NO: 93974 - protein, 442 aa, Unknown
  Obtained from environmental sample
  DOMAIN (304)...(417): Transketolase, C-terminal domain
  misc_feature (1)..(442): Xaa is any amino acid
MGKGIKDAQNNAFESKVSTHGQPIDAAGASTAQTIQSLGGDPQNPFVVWPEVKEFFEHRLAELQKEADSWQQRFETWKGTYPNLAADLENWQKNRAPVLDLSVVPQKQGVATRVNSGAILAWLADNQKNMICSSADLSNSDNTQAFLDKTGIFKPDDFSGAFLQAGVAELTMGSVACGIVLHGEFTAACATFFVFSDYMKPILRLASLMALPVKFLFTHDSFRVGEDGPTHEPVEQEAQIRLLENMNLPNGKPSMLVLRPADANETTLAWEMAMANGDSPTALILSRQTMPPLENPHSKASASGYIVQNAENPNLTFAANGSDVYLCCQAAELLRKEGITVRVVSIMSPKLFLDLPQKEREALIPRWGAAYAVSSGLPSVFAPVVGPLGYSWGLSEFGKSAPFAVLEKEFGYTPQAIATKAKAYLEEYKEMRKELKARNLMC

SEQ ID NO: 93975 - protein, 370 aa, Unknown
  Obtained from environmental sample
  DOMAIN (145)...(352): RimK-like ATP-grasp domain
  misc_feature (1)..(370): Xaa is any amino acid
MNKLRIGILFGGKSAEHEVSLQSAKNIFDAIDREKYEPVLIGIDKSGRWLLNDESSFLIHANDPKRIRLNLSSDAVALAPQSKGVISNLSALKNNGADNGPNNSSIDVIFPVLHGPFGEDGTVQGLLKLADIPFVGSGVLASAVGMDKDVMKRLLRDAGIPIGKFRVLCADDDVPSCEEVSSELGTPLFVKPANMGSSVGVSKVKKQSQYFPALRDAFEYDTKAVIEEFIPGRELECSVLGGSEIMASIPGEVKSRHEFYSYNAKYLDRKGAELIIPAKVSVETIQRVQELAITVFKTLCCEGLARVDFFLKKDGNVIVNEINTMPGFTKISMYPKLWEASGISYTQLIDKLISFALERFEKEKQLKTSL

SEQ ID NO: 93976 - protein, 53 aa, Unknown
  Obtained from environmental sample
  DOMAIN (8)...(41): Tetratricopeptide repeat
  misc_feature (1)..(53): Xaa is any amino acid
VRLEPNVALWWYRLGLAREAAGDFLQAVTAFERALRINPDYQEAENGLARTRR

SEQ ID NO: 93977 - protein, 508 aa, Unknown
  Obtained from environmental sample
  DOMAIN (131)...(489): Flagellar hook-associated protein 2 C-terminus
  misc_feature (1)..(508): Xaa is any amino acid
AGWVTFDLFNPDKSSKQIKDVLSEINTKLASVGANFSASLNSSGEIVIIGDLENDQNFTSKKDPNSADDTLLAPDRAKPENQKTFLEQVKIQIGSFKSNGAGGEEIDVLKKDMGTLANRNIFKEENVITEAQNAFYSIDGMSVSSQSNDDDKTVAGTIFSLKKVTAPDQVVKLTLEPDMSALADKISEFVEEFNELLKFIDENAKAEVVEQTDSSGKKVSNRVVGAFTGDAAISSLRENLRSMFSGVINELTNSVNNGYSTVYSSASRVGIVASREGYYEVDKEKLTKALNSDFEGVRKLFTSGGFSDTPGFGIGRFTKDSEVGVYSYDSEKMDWYLNGRKDSITDKWYSASSGDWSFDSVTGKWSLKKGTGTLIDAVKGTWAGNNIFTTSKGLSIEVPSNSTGEPQVTFLRGIAGQISNFMEKAKTGYEDHKGEWVDGYLKQSKDKYQTRIDDIQKRVDILQLRVDNFENRLIKQFAALEKSMSNLQAQSANMLSALGSLNNSNSKK

SEQ ID NO: 93978 - protein, 319 aa, Unknown
  Obtained from environmental sample
  misc_feature (1)..(319): Xaa is any amino acid
MDTFQQEYEKILSEIPASHVWQTLCELKNNLGDRPLVLYGAGRMGGQILEICNECGLPVTCICDSAKTGTYAETNGLRIISPDTLKLDYPRAKVLICSFAYNDEIYQSLRQNGFLPEQIVGCPAKHLYFETPQTFGQYLDGYRWAYDFFEDDISRQTILDRVRLYILNAPMHTNTSFTMYYEDDFISLSDNEVYVDGGAYNGNTVEWFLGKMRDAEKPYSRAYAFEPSPALYAQAVQLLSNRQNIEIVQKGLWSAEKELILFGNNTGGASFVIGSGSGQSIPTTSLDIFFQGKPDSELPTFIKMDIEGAEKEALLGASG

SEQ ID NO: 93979 - protein, 294 aa, Unknown
  Obtained from environmental sample
  misc_feature (1)..(294): Xaa is any amino acid
VEMRYEDENIWLTQKMLATLYDVDIRTINYHIKKIFNDSELQEDQVIRKFRITADDGKTYDAGHYGLQMIIAVGFKVNSERAVQFRKWVNKIAKDYTIKGWAMDKERLINGGSVLTTEYFEQLLDQIREIRASERRFYQKITDIYATALDYDRDSKTTRDFFATVQNKLHWAIHGHTAAEVIVERANANKPFMGLTSWANFLDGPLAKVRFTSAPGHPLSLAGRGIMLVCSNFRQSLLRSAAAYNSVDLQNLPVLQVARYIAIFGVAACPSSFSSLAPIILARRNVISSWCRWQ

SEQ ID NO: 93980 - protein, 165 aa, Unknown
  Obtained from environmental sample
  misc_feature (1)..(165): Xaa is any amino acid
MGLGAEEELKEIERLDTEYRAEILNSSFAASFGRLMQRPLQPILDPDGTRQDAWKDGVALTAGFVAKEIVVSTIAVMYKIPDSDLKAGGGSLKEALRRDSGMTGLTAVSFLVFALLYTPCLAAVSMIHKETGSLLWSLFTVLYGFCLAWGMSWLVIEIGQMAASW

SEQ ID NO: 93981 - protein, 952 aa, Unknown
  Obtained from environmental sample
  DOMAIN (233)...(438): DEAD/H associated
  misc_feature (1)..(952): Xaa is any amino acid
VLLATALKGAVEDRDIEEIRPIENPLDILAQMILALCIEKKRNIDELYSLLKGFYIFRNLNYEAYVRTARMLAGLSTNGEGKTRLRDVKPRIWLDNIAGEIGALDGSLLLLYSSGGVIANRGLYSLRLADGTKIGELDEEFVWERRLGDRFHFGGRGWRITAIEAESVQAVPLETSSDFMPFWKADTVFRSPRLTERVLAILDGYNGDSSNVPPEALAAFLDSQRNAQHGIPLSGSNRITIEIIDSPENRGDLYAVVMHSFRGGAINYPLVLALVQELEETLKLRVESFSNDDSLLLLIPRLGIEGNVKQIENIFRNAVTELNKSGGGGLCRGERLFRNRLEASGIFGASFREAAERSLLLPKAGFGKRTPLWITRQRSRRLFDAVRGEEGFPVTAEAWRSCLVDLFDMEGFRELLGSINDNSVALSFFYSSLPSPFSRDMVRQETNTLIYEYDERKDIQGSGATLSDKVIQEALGDASLRPVIKHELAHSFSARLRREEPLWAPDDQLSLYEWVKERIAIPLDEWETLCASLPEKLKQELSQLNSNDRLVMVKRNDAAFPSMVHREWEESWRRDPLPLLGPWLRYEGPIPLLRIAGVFGISLAEAEDAVNALAEVEEVVCDVRLAEDTSPLICDSRNFEMLLRLSRRKQRPEIIERPAALLVPFIALRQGLTMSNGGTALSVATIKKLNACCAPIKLWETEFFTARCDHYSPEIINSEINEGRLVWYGAGKEKIGLCRPDDLELVNVNTVHKSGQNIHSEAEAGEFRFSLEALAQLINNGFFDRPRDFWEIKDAINANAQQSVNSKNCAEALWQTVWQGRLSSDSFEPLRRGIQFGFAIKNTETVELPPKSNSGSPRMPHIPRSLRDRWRDGAPVSGRWFSIVLDENTAQDQWWDEPLNEEGRNRDRVRLLLARWGILCRPLMEKISKGSSASSEPSPFTWSGLLPTMRRM

SEQ ID NO: 93982 - protein, 504 aa, Unknown
  Obtained from environmental sample
  DOMAIN (20)...(213): Type III restriction enzyme, res subunit
  misc_feature (1)..(504): Xaa is any amino acid
IIILPESFHPVIRSWFTETYGKPTAVQAQAWPLIENGAHVLALAPTGSGKTLTAFLSAISRFCRNGTMYPEGTQYPANKLTVLYVSPLKALNEDIRRNLLKPLEAIRSRFEQAGLQFPDIKVETRSGDTPQSQRRRFYLATPSILALTPESLAILLLNPKGRQALSNVKYLILDEIHAVLGNKRGAFLSCQIDRLSLIAGEFQRISLSATIRAPEIAAAFVAGIDQNGQGRKINIVAPAAEKKIELTLSFDDRENNINQIDTYGRRYTSLINYILNRISGRSTILVFTESRRRAERLCYFINQEAGTTLAFTHHGSLSKELRQSVERRLAEGSLPCVVATASLELGIDIGSVDEVVLAGSPGSVSQALQRIGRSGHGVGMVSRGFLFPFHGLDLLLATALKGAVEDRDIEEIRPIENPLDILAQMILALCIEKNRNIDELYSLLKRFYIFRNLNREAYLRTVRMLAGLSSNGNGKIRLRDIKPRIWLDNISSEIGALDGSLLLL

SEQ ID NO: 93983 - protein, 489 aa, Unknown
  Obtained from environmental sample
  DOMAIN (9)...(182): NAD binding domain of 6-phosphogluconate dehydrogenase
  misc_feature (1)..(489): Xaa is any amino acid
MAVENTSAAADIGLIGLAVMGENLALNMESKGFSVAVYNRTTSKVDDFVQGRGAGRKITGCHSMEEMAASLRAPRKAFIMVKAGQAVDDAIEQLLGVLEEGDIIIDGGNSNYQDTIRRTAYVESKGLLYIGAGVSGGEEGALKGPSIMPGGSPAAWNLVKPIFQAISAKAETGEPCCDWVGENGAGHFIKMVHNGIEYGDMQLICETYDIMKNVLGLSCAEMGDVFDEWNKGSLGSYLIEITRDILRYKDADGQPLVEKILDTAGQKGTGKWTGIAALDLGVPLTLIGEAVFGRCLSAAKAERVQAAQIFSGPKAAPSADKAGFIKDLEKALYAAKVVSYAQGYLLMREAAQEYKWNLNYGGIALMWRGGCIIRSVFLGKIKEAFDKKPDLENLLLDPFFTGIIEDAQASWRRVVSAAVQNGIAVPALSSALAYFDGYRSERLPANLLQAQRDYFGAHTYERIDQPRGKFFHTNWTGHGGTTSASTYTV

SEQ ID NO: 93984 - protein, 158 aa, Unknown
  Obtained from environmental sample
  misc_feature (1)..(158): Xaa is any amino acid
MLALFAGLTHQMAAQEGVELQSLQVNTQLVHAQKASPKQSTKSLLLPFFDDFSSLRSPYPNDTLWQDKQVFINANFPIFPPTVGVATFDALNANGRLYEHATSSPFSADTLTSQPIRMDSIFPAGAEPQQLTETSNIYLSFYYQPGGGLGNSRGRAPA

SEQ ID NO: 93985 - protein, 359 aa, Unknown
  Obtained from environmental sample
  misc_feature (1)..(359): Xaa is any amino acid
MRHFLFEDKDYEYRPTFRRRKEKKDSVVEFARLLRAFGGRRSYRASVIRTPKRQDLRQKCIAKMQYSGSIEAHRVQLEKYLTREGTDRDGNAAELFGTDLEEYKKHMVGRNFRIFLSPESPNVDNKELAEQFVKRLEKMTGYRLYWQGACHYNTAHPHAHLLINGVDQQGREVNIPSDIVKVFMREAARDICTSQVGPRTQRDLDRDKEQELSAHRFTRLDNYIQEIGGGPGGLRVSTEEPFKDKERVLARLETLRKLNLCTYENNGYTLKNNWQEDLKANSRYNVFLKAREELRYSDQPAMKIYTGEQGIVTGKVTKIYRTDGDASDNHVVVLEALDGKAYFIPLLKGRSFTTKAVKA

SEQ ID NO: 93986 - protein, 291 aa, Unknown
  Obtained from environmental sample
  DOMAIN (1)...(289): C-5 cytosine-specific DNA methylase
  misc_feature (1)..(291): Xaa is any amino acid
LSISGNRAGLDGEKSGLFLQAIRVIKEMRSATNGTYPTTIIWENVPGAFSSNKRKDFQKVLQEIAAIAEPGISIPRPSAKSGWLAAGGIVGDRWSLAWRCLAAQYFGVPQRRKRIYLVANFGNQCAGEILFKPESLSGNNKKGKEKEDSFTGNVKESPKQYTVDIGYSSNAIQMNPQSSVTLRANGGGCGAKTGLYCLPVNQCNVPFVCNGFGDYKQGNIGKTLLSRDDITSGDLIVSGYSVRKLTPLECERLQGYPDNWTKYGHDGKNISDNQRYKAIGNSVAIPCGSSY

SEQ ID NO: 93987 - protein, 611 aa, Unknown
  Obtained from environmental sample
  DOMAIN (307)...(526): Bacterial extracellular solute-binding proteins, family 3
  misc_feature (1)..(611): Xaa is any amino acid
VIHPNRVFQKKYLSLAVTLLLCLLSVCQKSVVQKPDEMPSFTSYHDIPGVTEDEIRAVEALKEQTDFFIYGTIESTETFIREDGEIRGYSALFCEWLSQLFGIPFKPAMYEWGDLLTGINSNKIDFTGELTPTEDRRKTYFMTDAIVERTVKTFRLADSMPITEIIRSRPLRCYFLKGTTTINDVTSRLNGKYKTFTVNNYKAAYQALRNGEADAFFEENTSEAAFDIFDDIIAEDFFPVIYSPVSLTTRNPGLQPVISIVQKALHNHSLDYLARLYRQGENEHRRHKLYMRLSEEEKAYIRNHPVISFAAEYDNYPISFYNKYEKRWQGIAHNILKELEALTDLTFKITNDKNTEWSDLILSLENGETSMISELLYSEDREGLFLWPQSVIMTDNYTLISKSNYPDISINDILRVNVGLINNTAYASLFQSWFPDHENTTLYKNTNAAFKALERDEVDMVMANVSQLLMLSNYYERTGYKANFVFNYNSKSTFGFNLNEPILCSIVDKALRLIDNRGISGQWMRKTYDYRVKLARSQRTWLTSVAALFFCILVLLSFLIYKNRRLGKWLEKLIQKRTNELVIQSATLSAAFDATPDLIFCRDINSNFTRC

SEQ ID NO: 93988 - protein, 258 aa, Unknown
  Obtained from environmental sample
  DOMAIN (40)...(118): Bacterial Ig-like domain (group 2)
  misc_feature (1)..(258): Xaa is any amino acid
MKKSNLWTGILAITLVFTMAITACGGGDDGGGKTGGGTVAVTGVTLNKTYLTLDVGGSEKLIATVAPDNATNKAVTWSSRSPTVVSVSADGTVTAVSGGITIITVSAVDGGFSATCSVDVTVPSPTTATYTAAPNNATATTAITLTFSAAVTGLTANDITVTDGTGSATKGTLTGSGTNWSLGITVTATGNVTVSIAKSGIESGSKTVAVAKPAPVWTAVTNSTFTNTDTIYAIAYGGAAGQEKFVAGGSSGKIATST

SEQ ID NO: 93989 - protein, 351 aa, Unknown
  Obtained from environmental sample
  DOMAIN (10)...(231): Polysaccharide biosynthesis protein
  misc_feature (1)..(351): Xaa is any amino acid
VLDFYKGKKVFLTGHTGFKGTWLCRILLQAGADVTGYAFDPPTQPSLFVQTDTEKDIHSISGDVRDRDALVKAVKKAEPDLVFHLAAQPIVRLSYREPAVTYETNVMGTVNILEAVRLTPSIKSFVNVTTDKVYENKEWHWGYRENENLCGFDPYSNSKSCSELVTYSYRSSFFSDESAPAISTARSGNVIGGGDYAEDRIIPDCIRAVTEKKEIIVRNPHSIRPYQHVLECLCGYLVLAEKQYGDKTFQGAYNFGPDDGSCVTTGDLASIFCAAWGNDAAWRVQGDGGPHEANFLKLDCSKSKTVLGWKPCWDIQTAVGKTVEFAKAQSDNERLACIEKQIREYFKDHHV

SEQ ID NO: 93990 - protein, 316 aa, Unknown
  Obtained from environmental sample
  misc_feature (1)..(316): Xaa is any amino acid
DTFDNWYSNSGLTTVYNFSTPVTVDITLYAKWNIVSPTTYTVTFESNSGSSVPSQTVNSGGSATRPTNPTRSGYTFDNWYSNSGLTTVYNFSTAVNSDIILYAKWNQIASAATVNTAAIQGITAPVTGGAPVITITENTQYSGTISWSPAVTGGTARTVKIDMYDSAGDGWDGGGALRINVNGTNVANSVKVQSGSTNTYTFTVAADDAVQVYWVAGTYQEENSFVMYYSDTPPSPAFTTSNQGPTSWSGSNALVYRVRNTMDSISGGTLLGSFTNASFAAATQYTATITLTAKSGYTLQGVSSNFFTVSGATTVS

SEQ ID NO: 93991 - protein, 462 aa, Unknown
  Obtained from environmental sample
  DOMAIN (138)...(446): Penicillin binding protein transpeptidase domain
  misc_feature (1)..(462): Xaa is any amino acid
TVNAVNRVNKNKDNRTNSVNIANNVNINNTGKTDKKKTTVDTNTNIVNTVNSKDNKKPIPDNKITFVDLRQLVKEYKIGVNASRQQIAVPAVENSKGFFGWGKSKESDVDTLSVALSIDTTLQKYAASMFRQYRPRYAAAAAIDPTTGRVLALASFADGGDAETDGKELYLRSCFPAASVFKTIVAAAAVERGGMHGKTVLEHFGRNHTLYTTQLKKDLKVSRDITLEDAYAYSVNPVFARIALFNINKDIVTEYGRRFGFNESVPFEYDVDVSEMFAPDTGFSVAEFASGFNRKTTITPLFGALLAGAVCESGVIFEPTVVDTVRSLRGDSCLYVRRAKVWRRAVKEPTAAELRWLMTKVTHYGTARNTFRQLRDSPRYNTFEFGGKTGSVNQVGLGRVDWFVGFARNPNNKNQRIAVGVVTTHGEYWTVHSSYVAAELIKKYISNVTAATSSRATSQPAG

SEQ ID NO: 93992 - protein, 286 aa, Unknown
  Obtained from environmental sample
  DOMAIN (71)...(264): Metallo-beta-lactamase superfamily
  misc_feature (1)..(286): Xaa is any amino acid
MKKTAFLALIFYAIAANGYAGDSDGIYTLKVGQYEVYILVESERDGNTGILVGADEAVIKRYIPAEGFKHTANAVLIKAPKQNILIDTGTGAGGIIVEKIKKLGVQPENVDAVLLTHLHGDHFGSLQKDGAAVFSKAKVYLSAKELEYFTKSNVNQGAVAALKPYGTKVTTFEPGELGKKLKEILPGISPIAAYGHTPGHIVYLIENKKEKLLIIGDLLHIALVQFPVPEISATYDMDQKAAATVRRQILDYAAKNKIPVAGMHIVYPGTGSVSAEDSGFKFTPGQ

SEQ ID NO: 93993 - protein, 656 aa, Unknown
  Obtained from environmental sample
  DOMAIN (467)...(656): Methyl-accepting chemotaxis protein (MCP) signaling domain
  misc_feature (1)..(656): Xaa is any amino acid
MKIKFKLSILIIAIVVVIVTGVAVLLLRQASSIALDLSKQKTMYLARQNAQYWDGRMSGYIDVLQTLSNIMNFYENLPAEERRQTYEDTMMSVFEDMPDFIRMFTVWRPDAIDGMDEKNIDRIGSTTTGQFAYALARDTGEIKPLTAVVVDEVMAHITGPNAKVVQMSDPSPFKNMGKDTFAVRIVVPILNKRLNETVGAIGCQLDISMIQPRIEQTIEDFDEVTSMVIYSDNGFVLGNYLPEFIGKQIDTETQYGPYLNDVEDVIKNAQEWEGTAYDPELKTNMVMAVANVPIGVSPTTWSVMVGSTEAYIMKDVNAMRNFIIILASIALAAAVALIYLALNSTTKPIVKLADTLKDISEGEGDLTRTIAVNSKDEIGELALYFNKTLDKIKNMIIHIKDEANGLSDIGNDLAGNMTETAAAINQITANIQSIKGRIINQSASVTETNATMEQVVTTINKLNGQVEDQSSNISKASSAIEQMVANVGSVTQTLIKNADNVNSLKEASEVGREGLEEVAKDIKEIALESEGLMKINSVMKNIASQTNLLSMNAAIEAAHAGEAGKGFAVVADEIRKLAEDSSAQSQTIGSVLKKIKEAIDKITESTTNVLNKFEAIDSNVNTVAEQEGNIRNAMEEQGEGSKQILDGVSNVNEITN

SEQ ID NO: 93994 - protein, 465 aa, Unknown
  Obtained from environmental sample
  DOMAIN (249)...(455): Mechanosensitive ion channel
  misc_feature (1)..(465): Xaa is any amino acid
MKKIFFVICLLFSFSFCFAQETPTVQVVPDTQKSPEIQETLAETEIKSDIVTEKEHIAKEKVTELDSVTSVTPLLPVAKRIKEERPFLYRLGIALAIVVGQALLLWIIWFFFKRLNTKIVTTGREKIKPFYINKFRVLSEKHVINLIEVVLKLVKYVVTAIQLFLTIPIIFSLFTATKDIASLLFGYILNPIKRIAIGMIEYIPNLFTIIIIITITRYVLKALKYFAAQITKGKLQLPGFYADWASPTLRILQVLLWAFTVAIIYPYLPGSDSRAFQGVSVFVGIIFSIGSTSAIGNLVAGLVITYMRPFKIGDRVQIKDITGFVVEKNLMVVRLKTHKNEYVTFPNVMILGSNIINYNTSSDEDEEGLILYSEITYGYATPWQTIHDILVNAALATEYILKKPKPFVLQTQLDDFYAHYQINCYTKDVSKVPLIYSLLFENIQSGFTEAGLDMTTAHFRIITKT

SEQ ID NO: 93995 - protein, 317 aa, Unknown
  Obtained from environmental sample
  DOMAIN (51)...(265): Methyl-accepting chemotaxis protein (MCP) signaling domain
  misc_feature (1)..(317): Xaa is any amino acid
MHNTSAAVEQITSTLDSMKDLMVKQEYGAEEAGKAVSVIKENIDSLKTMIEQQTDSVNMSSSAIEEMTANIHSVNQTLIENSKNVSILSEASENGKTGLQTVAQEIQEIAHDSEGLLEINSVMENIASQTNLLSMNAAIEAAHAGEAGRGFAVVAEEIRKLAESSGDQSKTTTTMLKKIKTSIDNITKSSEEVLSRFGAIDSGVKTVSEHEQNIRNAMEEQETGGKQILESISRLREITSSVKKGSDNMEESGETLVRETDEFIKTSKETVDGMNEILKGINQINISIGQVNDMSMENNRNFESLKTETGKFIVDER

SEQ ID NO: 93996 - protein, 470 aa, Unknown
  Obtained from environmental sample
  DOMAIN (167)...(248): Cache domain
  misc_feature (1)..(470): Xaa is any amino acid
MKIGLKLTVLMTVLGVFTVASISITLLLRSRTSITRLSEQYAVSMANDSAADITNFIQSYTYRAETASHVMGQYKYIDPANRRALFNVVLEGLALSNPGITGVWCVWEPDVLEGGDRQYIGTKGTDSNGRFAPYYYWDEGKVKLDVLDDYDEDDYYLLARNSGKPAVLNPFEYNVGGKNVLMTTIAIPIRADGKVLGVIGFDLPLNEIQDISQTQKPFPDAVTAVFSNNGTVTAHFDPSRIGKDLRETEADMTGKYINDFVNAIKTGKFFTFSNYIAALKTDLKIFLIPITIGSTKTSWSYAVGIMRNTIMAPVYQMLTIAIAVSVAVLGLLVLASMFLSRSISKPILKVAVTLKDISEGEGDLTKRIAVKSDDEIGDLGRCYNLTMEKIRNLVGTIKYKINGLNHTSFELSANMGKTSTAVQQISSHLDNMKNLMVKQENGATEAGRAVGDIKVNIDSLNRMIEEQTDS

SEQ ID NO: 93997 - protein, 855 aa, Unknown
  Obtained from environmental sample
  DOMAIN (466)...(680): Methyl-accepting chemotaxis protein (MCP) signaling domain
  misc_feature (1)..(855): Xaa is any amino acid
MKIRIKLSLMVIAIVSVVAGGIAIILLLQASDISLKSNLRGLNYMAMEQAEYWKGREDAYIRALSTLANVMDDYDLIPANQRRDRYDDMLHSVLRSEPNLITIYTIWKPNALDGMDSSFIGRIGSSPTGQYAVTYRRENGVITIGTSSDIEQSMAYISGPNARKDRVDDPQPFTINGKTSQNLRMGVPIFNPRTDEVVGIVVCLLNLDVIQEIVMNTIKTYEEIALMVMYSNNGTIIAHFIPDRIGKNLKEVDLEYGDKQQEAYQAILDGKPYNLRFYDPNMKDHCNFIMQPFTIGNSGVSWTILVGVMDSYALKEVRAITKFTILLTLIAIAASAAIIYFVLGGITNPIVKVADTLKIVAEGDLTHSVNVNTKDEIGDLARDFNFSTDKIRELVGTIKYKINGLNHTSFELSINMGKTSNAVEQITLSLDNMKNLMVKQESGAEEAGRAVGVIKENIGSLKKIIEEQTESVNMSSSAIEEMTANIHSVTQTLIENSKNVAVLTEASENGKTGLQTVAQEILEIAHDSEGLLQINSLMNNIASQTNLLSMNAAIEAAHAGEAGKGFAVVADEIRKLAETSGKQSKTTATMLKKIKASIDNITKSSTDVQARFGAIDSSVKTVSEHEQNIRNAMEEQEIGGRQILESIGRLRDITYSVKKGSDDMEGSGGTLVKETDEFIKISKETVDGMNEIMTGINQINVSINHVNEMSIENNNNFESVKQETQKFNVTSGNEKKKILMVDDDEIHLEMVGSVLQNDYDIVSSKSGKEALGLFYQGLVPQLILLDLIMPDMDGWNTYTRIKAISNLHDIPIAFFTVSDDPKDMEHAHEIGAVDYIKKPYDKDDLLNRIGKILKK

SEQ ID NO: 93998 - protein, 236 aa, Unknown
  Obtained from environmental sample
  DOMAIN (1)...(233): Beta-galactosidase
  misc_feature (1)..(236): Xaa is any amino acid
GECHCPLCQENFRSYLKKRFGSLDALNEAWWNSFWSHTYTDWSQVESPGPLGDVNVHGLNLEWRRFCTEQIVDFYLNETVPLKKITPNVPCTTNLMTGVSGVDNFRLARALDVDSWDSYPQWTGTEKDIETGVLFSFYHDINRSAKGKPFMLMESAPSATNWRPVAKLHRPGVHMLQAMQAVAHGADTVQYFQFRKSRGSSEKLHGAVVDHEGSENTRVFTMWRKSANALRVCGAL

SEQ ID NO: 93999 - protein, 585 aa, Unknown
  Obtained from environmental sample
  DOMAIN (393)...(585): Glycosyl hydrolase family 3 C terminal domain
  misc_feature (1)..(585): Xaa is any amino acid
MKKNFCLLIAFCLLLFSQCSSKASAKSAKWKTSEELLSLMTLEEKVGQMTQAERGDVHMGDITKYALGSILSGGGSVPMTNTPEGWISMINGFTRESLKTRLKIPVLYGLDAVHGHSNAMNATILPHNVGLGAIAVGDLDKGAKAAYTAGRITAQEMRATGARWTFAPVLGVAEDARWGRTYESFSENVNIVTVMGANVIKGLQDNGAAACMKHFLGEGQTIEGRNQGNALLDRVGIERILPPYRAAIEAGAISLMPSFSSVNGVKMHESKSLLTDLLKNEMGFKGFVISDWAAITQLSGGNYKAQIANAINAGIDMVMATNGRNSWINFIKHLMELAEEGTVPMARIDDAVLRILRFKQRIGLFDAPLTKEASAIGTDANRTAARDLVAQSLVLLQNRNNVIAQLPLYKRILVAGQGANDIGMQCGGWTITWQGDHGHITNGTTILEGIQNAAKDKASITYAEDGKTDGAFEAVIAIIGEDPYAETDGDRTQINIRQRDMDMLREVYGYNCPVIVIMLSGRPMTIGDENKKWDAFIAAWLPGSEGDGIADVLFGDKDFTGRTPYTWRKTVNGEVLFPFGSGLTK

SEQ ID NO: 94000 - protein, 166 aa, Unknown
  Obtained from environmental sample
  DOMAIN (2)...(149): Mechanosensitive ion channel
  misc_feature (1)..(166): Xaa is any amino acid
MRSFKIGDRIKVGDVYGDVVEKTLFVIRVQTIKKEVITVPNSSILSANVTNYSTAAGDGGQGVVIAVEFSVCYDVSWERAHPLLIEAALSAEHILSEPPPFVFTKELSDFAVVYSLRAYTRRPDLYAVICSNINRNVLDVFRREGIEMIVPQYRSVRNGEKLVRPE

SEQ ID NO: 94001 - protein, 684 aa, Unknown
  Obtained from environmental sample
  DOMAIN (245)...(416): Radical SAM superfamily
  misc_feature (1)..(684): Xaa is any amino acid
MRDRFIDTAGELGAKLLTVDKPARYTGGEYGIKSKKEASLRTLIAFPDLYEIGMGNQALKIIYNRMNGIQGVFCDRAFAPAPDFEKLLREMNIPLYGLDTGIALYSLDLLMFTVGYELGLGGLLLMLDTSFIPLRCEERTEDHPVVLAGGPAVSNTAAFSPFVDAFWIGEAEAGFFELASELAKMKESGKGRGELLEKISAHPNIYVKGKKKTLRAIDSDFCNDDEAAAVFPVPSMKIIQHHGSVEIMRGCPNGCRFCHAGYWYRPMRQKSPALIAAQVLEMVTKGGWHEISLSSLSSGDYNGIDCLVENLNDKFRNMHVSFQLPSLKVSSFSLALLEKISVTRKSGLTFAVETPQDASHNAWQMAVNKEVTLDSVSAILNEAKKRGWKTAKFYFMIGLPLPASEKSEEEEIVNFIACVGRRTRMHFNINVGLFIPKPHTPYQWSPQLDAASAIKKMDYIRNSLKPMGHKVSVSDTLISQIEGILSRGDERAGLLFEQAYLGGSRLDAWNEYINRDKWLSIFEENKELIDSFLSFLDGKNELPWQGIDSCVSGEYIRNEKEKSDNVQITPSCKQKCSLCGVCGKEIKMTENQVVVTKNAPSSANLHDTIDNNNDCTYRNDETIDTYDVNPQDAKINKNKADPDIYRLLFSFSKSGSAVFHGHLSLIEIFSMAFTRAGIPVMTQR

SEQ ID NO: 94002 - protein, 65 aa, Unknown
  Obtained from environmental sample
  misc_feature (1)..(65): Xaa is any amino acid
MSLDRRVSTGMPGLDQAIDMLRLGDNVVWQVNNIEEYLHVVRPYIKQAKKDGRRLVYFRFGIMSL

SEQ ID NO: 94003 - protein, 402 aa, Unknown
  Obtained from environmental sample
  DOMAIN (1)...(231): EAL domain
  misc_feature (1)..(402): Xaa is any amino acid
MNFTQDNVVAYFQPILSAETTDVYAYEVLGRYLDDDGNAQSLGPFFTNPDTSHEEALRVDRIVRRYAMRKYAEEKRNEYLFINIRLAWLLPFIQNPKEMVTLQLANEFGIPPEKLVIEITEEDFNSNEEYLRAIVHYKRAGCRIALDDYGKEASNIDRLAKLQPDIIKINIDYIHNSENSYHYREFLRAMAVFADNVGIEVLHEGVETERQLDICISSKGRFYQGFLLAMPQPSMTNPAINTFVFSTLIALAYNAIQTNVSNMETLKNSLDVQVEHFLEENPFDNEKINDDKYLAKIFLKLSEVIRVYVCNRTGTQLSNNIEKKDGEIVYRDFKNKNWAWRGFFHETIKAFIRGRRSCLSNPYRDFTTKDKICTYCYAITDNIFLFADMIKEPDKGLVYAAG

SEQ ID NO: 94004 - protein, 323 aa, Unknown
  Obtained from environmental sample
  DOMAIN (33)...(310): Glycosyl hydrolases family 18
  misc_feature (1)..(323): Xaa is any amino acid
AVEPVAAEEEEAEEEIIVDLPQPGSNLPVSVFQEIWAYVVADREAAFRPSLPLSDIGYCGAEISSYGTLIDVPKRSKLRFFSGRVHLVVMCGGRALSHFVLKPGSDERRKLIADLLAAAKDFDGLQIDFEDVGQRDAEPYFTFLKELRAGLGNKMFTVAHRARTRKIADDVYDYEKVLPYVDRILVMAYDEHWSGSAAGSIASLAWCKRVADYSLKVIGKEKLIMGLPFYGRGWAKPSHSQAYLYTSVERVMKENNIKNIRRENGIPAFDYDATVSVKVYYEDEYSLSARMEMYRNMGVTAIGFWRLGQETPAVWPLLKLGEK

SEQ ID NO: 94005 - protein, 62 aa, Unknown
  Obtained from environmental sample
  misc_feature (1)..(62): Xaa is any amino acid
LAAVETGGEVRSEKGKVRSEKGKVRSEKGKVRSEKGKVRSEKGKVRSEKGKVRSEKGKVKSR

SEQ ID NO: 94006 - protein, 278 aa, Unknown
  Obtained from environmental sample
  misc_feature (1)..(278): Xaa is any amino acid
KFIYKTGGTGFIDFSGINKFENITLEKVGNGIRFVDTSVTITGDFVLSNNETITLATDSILKEGKSSIEAGSISLNNIFAENNESLSLTTTSKDINLNGTIGISNAYIGGITVVCADKVSFSGNIYAGNIDVTSTGEIIIDADIFTTDAQTYTGELALGGMGNRILTGTTVTLGLIEGNGKSLTITGNSVINWGSGIDNFSVSGNFNLAGGSLSAATVDVTGTSTIAADVTTSGTQTYTGQVELKSDVILEGTTVTLGVVTGNENSLTINGNSVLAGG

SEQ ID NO: 94007 - protein, 270 aa, Unknown
  Obtained from environmental sample
  DOMAIN (210)...(243): Tetratricopeptide repeat
  misc_feature (1)..(270): Xaa is any amino acid
TLMNPSATAEYKMLGDLYVQQRKPAEAVKAYKKFLEKGSDNAAARLVGEEAFKAKNWAEAVKYLIMVKGEEKNPAFLEMIGKAAFENKDNSRAVDTYKTLSNMNPQNAEYVKMLYDLASRMGAREDAVNHLRKFVSIKPQDAEMQKTLGDLLYERKDKPGALAAYKAALAVDPRAKGFHKRYVELMDASGTPQDKITAMEGAIAAGEADAPMLIKLGNIYREQKQPAKAVPLFEKAVKENRSDVQLLVALAQSQEAAGMINEAITTYEQY

SEQ ID NO: 94008 - protein, 170 aa, Unknown
  Obtained from environmental sample
  misc_feature (1)..(170): Xaa is any amino acid
MPFISLASEPKLIDSGWYKKAFDIAGFNGFEQFIIAFGIVLIIFYFFRAVYSTLLTYSINRFSFDIYKYLSKGVLKVILSISYKLFVQKNSAEQIRTITEEANEVGKIVLNLMKLLSELFPVLFIYIVIVIINWKMTLVITFVLSLIVFFLLSFITKKNKKLGVKRLNWK

SEQ ID NO: 94009 - protein, 259 aa, Unknown
  Obtained from environmental sample
  DOMAIN (1)...(158): Stage II sporulation protein E (SpoIIE)
  misc_feature (1)..(259): Xaa is any amino acid
TPEGWIIEVYEELQRVFVAFDGSMLISAAIGLIDEETGAMYYLNAEHPWTVCYRNGTASFTENELTMRKIGTTETENHAVIRTLQLETKDVLFFGSDGRDDIMMGTDEATGQRIINEDETRFLHCVEEAGGDLKKLVESVEQGGELTDDFTIIRIEWKKPPLAPPPDFEAVRSSANKAIVDKDLPRAVQLLRKAMYLYPDIKIIEQLVACHRERKEMPEIIQVYQYGLKMMPLHEGLLHSMVNESRRMVREILDGSKGK

SEQ ID NO: 94010 - protein, 172 aa, Unknown
  Obtained from environmental sample
  DOMAIN (1)...(166): DinB family
  misc_feature (1)..(172): Xaa is any amino acid
MQKDIFVLFAKYNKVVNQKMNEVIKNLSKEEWEKNLGGFFSSVRGLCSHLYICDFNWLKRFSHLKEFDVFKEALFAREPYSFKEVLFADMAEYLTNRPLLDERIIAFINEVNDKDLDSLLKYSDSSGNLYEKNFGGLIMHSFNHDTHHRGMISLCLEMLGRENDFASFNAVL

SEQ ID NO: 94011 - protein, 522 aa, Unknown
  Obtained from environmental sample
  DOMAIN (430)...(519): Penicillin-Binding Protein C-terminus Family
  misc_feature (1)..(522): Xaa is any amino acid
VKEAALPDSGQDDPRAPFYAPHFTERLARMEPITQSNANARSNVRSTIDLALQLFAEEELALEISLLSEKRVSNGAILAIENETGAVRVYVGSGSWFNEEASGKIDGVRFRAQPGSCLKPFLYAMALDTGFSPADILPDLPTVFGSREAYVPSNFNNRFNGPVRLRIALASSLNIPAVYILERLGVRTFEEYLVSLGFDSILETIGTHGTGLALGNAEVSLEEMVKAFSVFPRMGTPAQLRWMEDGKPGEPAPPCMSPYAAWMIADILSDRSSRFVGFGPAPSLATPFESMFKTGTANQFQHIWALGATKRFTVGVWMGNFSGETIIGSTGSSIPARIAAKLLGVLEESAGQEKAQRSTSKVTENLAGPVPQGTTEVQICALSGMAAGPYCTGLTREFIRNEKIPAVCNWHTQAGLFYPSEYRSWLSERFRSGGVRQEGAGRIRTPVTGAVFYLDPSLPAEAQAIRVETTGFSESALLFVDGELSGSLNHAGVYALPLSRGRHSVTVADNEGSAAEVEFEVR

SEQ ID NO: 94012 - protein, 108 aa, Unknown
  Obtained from environmental sample
  misc_feature (1)..(108): Xaa is any amino acid
MNIGDYSVKRPVTIVILYALALGIAVTLVLNLAVDLYPSTVRPVLSIFTRFPGSGPADVEKNVTERLERALSTSVGLVNMTSNSQFETSNINLEFAYGTDMDKAANNA

SEQ ID NO: 94013 - protein, 378 aa, Unknown
  Obtained from environmental sample
  misc_feature (1)..(378): Xaa is any amino acid
GGGQGSAQGAGSQTQGSGSRQGGAQGAGNGQAGGGQARQSAGEQGGDRQSGTGERQVRTGEGQGGQARQGAGEQSGSGQGRQGAGEQSGSGQGRQGAEQSGSGQGRQGAARNATVVQVFTVELGTIENSVVINGDVLARNQVAIYPTVGGKLVESRIGIGDRVGIGNVVAMVDPSRPGEVYSLSPVVSTISGTVLQAPYSIGDTVSAQSSLFVVGDLSVLRVETFVPERFVSSIRPGLGAMVNLEALPGETFPAEIDEVNPVLDPASRTLRIKLRFVGRNDRGAADPRIKAGMFATISLVTRTRSNVPIIPRTSVINTYGSWIAFVIDENNIAHRRMLELGLENERFFEVISGISLGEQVVTAGQNFLTDGDPVRIVE

SEQ ID NO: 94014 - protein, 755 aa, Unknown
  Obtained from environmental sample
  DOMAIN (74)...(313): Peptidase family U32
  misc_feature (1)..(755): Xaa is any amino acid
MPVELLAPAGSPEALDAAIGEGADAVYLGLKNFNARMRSANFTYPRFEAALRSLRRMGKKTYVTVNTVFEQREADRMYQLLKYLSSLGPDALIVQDFGVLAMVNSEFPKLKVHASTQMNIASSKGANALSRHGVSRVVLARELCLEELKSIRADTNVEMEVFAHGALCVSASGLCLFSSYLGGKSANRGMCTQACRRLYNHGDEKGAVPRNGAVLENGYYFSPADLQLLEQLPDLAAIGINALKIEGRMKSADYVGTVTSAYRLVLDAIAEGGGGSINGGENIARSIARGQEILRGDFARSKTKFYFFSTEDNKIDWLNPAQDGGTGIALGVIRNVRGKNEDRQGLVVSDNSPATVKLSAGDSIRLHRSDDSDRVSHKLTYAEVQTGATAGAYRLSIPDGFGVGDRVYLIQNKAMSKRYRPVIKGVSSAGKHGPAFEKAPIPKIPELHKNKPAKTGGQGGQNLPEGIYVAVSHINDLYIVQSARPAKVMLNLSRKNAAYILADDKAPLPFRPCDTILVLNPYFPQAAAEQMADDIIRLVGLGYKQFVINNLGHLSLFRDFRQGLQLIAGPWLYMFNTWALSFIASLGVDGLVSPLENNRQNLERTLGFEKLKHLREFVFVPVFAWPPLFRIRADLGKVYGFKSFQDSRDELFSLCSDREETLVIPERPFSITDKIPFLKEAGFRRFIIDLSGPILKKKAYKDLMHSAESGVPLPDISRFNWKDGFFQEGVQGSGARVQGLGTQLPEPRTPNPVPR

SEQ ID NO: 94015 - protein, 137 aa, Unknown
  Obtained from environmental sample
  DOMAIN (10)...(132): Acyltransferase
  misc_feature (1)..(137): Xaa is any amino acid
MQHSTSYKHRWRMYGVKRAITVSNHTTFLDPVKIGWLVIPRLLFHTMLEATVEFPLLGTFTRLLGGVPIPRGRHGFQKILESCQKVFKYRRYMHFYPEGECFLYNQRIREFQSGAFRIAAELDIPVIPLVTVFTNGL

SEQ ID NO: 94016 - protein, 233 aa, Unknown
  Obtained from environmental sample
  DOMAIN (5)...(35): Flagella basal body rod protein
  misc_feature (1)..(233): Xaa is any amino acid
MMRSLFSGVSGLQNHQTRMDVVGNNIANINTTGFKRNRVNFQDILYQQLQGAARPTEDLGGVNPKEVGLGMSVSSIDTIHIQGMLQATNVPTDLAINGNGFFILDDAGKQLFTRAGGFNVDMDGVLVNPANGMKVQGWMAQEVNGSTVLDVSRPVGQIVIPVGGKDPAKATTMVNFACNLDKRIPELPENPTGDQILKSTWNTTIDIFDSFGDKHVLQVSFTRVPGTTNSGTP

SEQ ID NO: 94017 - protein, 292 aa, Unknown
  Obtained from environmental sample
  misc_feature (1)..(292): Xaa is any amino acid
DILAGLLRKTGVETAIDGGIQAAPLADFDGEPGADLEALTDDDAMEVKSRLLGKNAQDDGKTGKLAAKTDKDSEENEISAIDLSVELLLNPYVDQPVQNREGAALEDFSHEEGGNFLVGLEQAEAARLADANAVQTPNEAFAESSEEVAILAEALKKSTQEKNSDKEAQNSDAIEALLAEKQRGEGLAALQKNGGEREGRGRLEEARAKEKRREKFSVDVRDFRTGNESQGSQKSAVTRVNASAENRLRGEGATREITLELRLPDQHQNPAPAEARWEVKASSAFETFLRGN

SEQ ID NO: 94018 - protein, 343 aa, Unknown
  Obtained from environmental sample
  DOMAIN (18)...(339): Aldose 1-epimerase
  misc_feature (1)..(343): Xaa is any amino acid
MKIDKKTFGVLSNGKKVKLWTLNAGDLTLSLTNYGAAWTSLIVPSRNGNFDDVLLGYSGLEGYLTNQPYIGVTVGRFANRIKDAAFTLDGNKYTLTANDGKNNLHSGPRGFDRLLWKAEAYEESDGVFVRFEIESPDGDCGFPGKLNAVVVYGLTKSNEIIADYHAKVDKPCPVNLTNHAYFNLTGEGKGNILSHEVLLYSSSYVEIDKYAIPTGKLIDVKGTPFDFTQRKHIGTDLGKLTGYDHCFTVDGEAGKLRPCAEVIEQDSGRIMKVFTTQPGVQFYTGNYLNNIAGKQGSVYVKHSGFCLETQHFPDTPNQSGFPPCIADPENDYNEKAVFAFNLV

SEQ ID NO: 94019 - protein, 487 aa, Unknown
  Obtained from environmental sample
  DOMAIN (1)...(453): tRNA synthetases class I (I, L, M and V)
  misc_feature (1)..(487): Xaa is any amino acid
MGFDAFGLPAENYALKTGTHPADTTAKNVNSFRTQIKKLGFSYDWDREVDTSAEDYYRWTQWIFLKLFDKGLAYEAESPINWCPSCKTGLANEEVKDGLCERCGAKVTRKRIRQWILKITAYAERLLADLDGLDWPEPVKLMQRNWIGRSEGANVIFKIDGHKYELEIYTTRPDTLFGATYMVLSPEHPLVEKITAPEQKQAVTSYIEAAARKSDLERTDLAKEKTGVFCGAYAINPVNDQKIPIWIADYVLISYGTGAIMAVPAHDERDWEFAKTFKLPIVQVVAEEQPHSPLPTPHSLCTKEEPSECTTADGYSVNSGSYDGLPTEETKKRITQWLEDNKLGKNMVNFKLRDWVFSRQRYWGEPIPVVHCESCGIVPLSEKDLPLKLPDVQSYAPTGTGESPLAAITEWVNTVCPKCGKPAKRETNTMPQWAGSCWYYLRYLDPHNDREFASKDKMEYWAPVDLYVGGVEHAVLHLLYARFWHKV

SEQ ID NO: 94020 - protein, 445 aa, Unknown
  Obtained from environmental sample
  DOMAIN (165)...(230): His Kinase A (phosphoacceptor) domain
  misc_feature (1)..(445): Xaa is any amino acid
MSDNPKRIIVVDDNAEILTAIKNALKASYDVYPTKAVSNMFELMKRFQPDLILLDVDMPDINGYEAAKMLKGSHNFRDIPLIFLTSMNDAASEMEGLNLGAIDYIHKPFVAPLLSRRIKTYLSVMEQQKVILERNKEIEELLELKTKEINMREAAELEARNASRAKSEFLSHMSHEIRSPLNAVLGMISMAAETDDIQTIKDYLKKAYNAGRHVLGLINDILDMSKIEANKLELAYGEFYFRKMLEGIVNEASVHAGEKYQDIAVNVNENVPPVITGDELRLSQIITNLITNAIKFTPDKGRIEVNAKKLDERDGEITLQIEVADNGIGISPEQQKKLFTSYNQADNSIAQKYGGTGLGLAISKRIIELMRGEIWIESELHKGSKFIFTIKAGKGTDKASEESSLQTRSGESGFDFSKYTILVSEDDEINREIMAALLEKTGYFL

SEQ ID NO: 94021 - protein, 291 aa, Unknown
  Obtained from environmental sample
  misc_feature (1)..(291): Xaa is any amino acid
ARVILKTGDTLVGISNKKIRSATLQGSGSNLLNVSVVNGQVQLVPVDDGEAGPLSLRFDVEDGPSFTSNQFRISAISSGPTVTIQNFNNYSWVRNSVNVSFNLASRGRVTNVEYSLDMGDTWQRALSASDISGLRAPVNTNISRTFDLTGAPDGSINILIKASGDTDFNITDFTVLKDTTAPSAQTIVPISEAKVNGTIRMAFAVQEMGVIQSVTYRRNASSAPREVFNDNQWTGDYSPRFFEILMDSLIMPLDNSMRFTFTDKAGNSSEISAWQFVIDQPMDIPIVQVIL

SEQ ID NO: 94022 - protein, 226 aa, Unknown
  Obtained from environmental sample
  DOMAIN (1)...(205): D-alanyl-D-alanine carboxypeptidase
  misc_feature (1)..(226): Xaa is any amino acid
MHLIMKEIEEGRASYDEIIPITAESWAQNQPYRSSLMFLEPGQTVTIREILLGLAVVSGNDAAVAMALRLAPTMNQFADMMTGEARRMGLQVTRFVESSGISEDNMTTAAEFASFCRQYLMTHPKSLAEFHSVPSLAYPMADNVQERKRSNPRTIVQENRITLIKAFPGVDGFKTGFINESGYNIALTAQRNNTRFILVLLGAPNSRDGAVIRDKDGINLLSWAFD

SEQ ID NO: 94023 - protein, 246 aa, Unknown
  Obtained from environmental sample
  DOMAIN (1)...(201): D-alanyl-D-alanine carboxypeptidase
  misc_feature (1)..(246): Xaa is any amino acid
MKEIEEGRASYDEIIPVTAESWALNQPYRSSLMFLEPGQIVTLREILLGLAVVSGNDAAVAAALRLAPTVNEFAGKMTTEARRMGLKITRFVESSGISETNMTTAAEFASFCRQYLIMHPQSLIDFHSVPEFAYPMAANVRDKNKSNPRTIVQENRNALLKFFPGVDGFKTGFIEESGYNIALTAHKNNTRFIIVLLGAPNSRDGAFIRDKDGMDLLTWAFNNFKTVRLKDIKIENAKLWKGRANT

SEQ ID NO: 94024 - protein, 71 aa, Unknown
  Obtained from environmental sample
  misc_feature (1)..(71): Xaa is any amino acid
MRTDTLIRTEGMDTLIKNLGLVEAERFVMLIQKDPFDYTKWQENLFKDMTIDEIYNNAAELRQKNNSSMRL

SEQ ID NO: 94025 - protein, 719 aa, Unknown
  Obtained from environmental sample
  DOMAIN (455)...(675): Methyl-accepting chemotaxis protein (MCP) signaling domain
  misc_feature (1)..(719): Xaa is any amino acid
AIVAVIAGGIAIIQLVRSSDIVINLARQKTMYLARQRANYWDGRLNGYIGTLQALSNIFNFYEEIRVTDRREQFEDNLDGIFEDMPDFVRLGTVWKPNAIDGQDSLYIGRPGSTPTGQFAYTLTREHGTIETITNGDVAGIMAMLNGPNSKVVNMSDPATMTNNGVETYAVRIAVPIINKRLNESVGVVLCQLDISIIQPRVEMTIKEFDEVTSMVIYSDNGFILANYIPSFIGKQIDTETQYGHQLNDVKEAIRKAEEWEGTEFDPELRENMVMAIANIPIGTSPTTWSVMLGSTETYILRDVNSLRSFVIILASIALVVAVVIIYFVLGNTTAPIVKVSNTLKDISEGEGDLTKSIEVHSKDEVGDLAVYFNKTIGKIKDLVLVIKKQAGVLSDIGSALSSNMTETAAAINQITANIQSIKGRVISQSASVTETNATMEQVIANINKLNGHVENQSRNVSQASSAIEEMVANINSVTSTLVNNAANVNTLIDASEVGKTGLQEVATDIQEISRESEGLLEINAVMENIASQTNLLSMNAAIEAAHAGEAGKGFAVVADEIRKLAESSGEQSKTIITVLKKIAESIKKITSSAENVLNKFEAIDSGVRTVSQQEENIRNAMEEQSEGSKQILQSASSLSQLTHQVKSGSEEMLEGSKEVMKESHNLEKVTQEITGGMNEMASGADQINVAVNNVNEMTQKNRDAIDILIKEVSRFKVE

SEQ ID NO: 94026 - protein, 375 aa, Unknown
  Obtained from environmental sample
  DOMAIN (21)...(312): Aminotransferase class I and II
  misc_feature (1)..(375): Xaa is any amino acid
MDISTICVHGCEKKFDETGSVAVPIFASATFAHPKVGKSTGFDYSRSLNPTNVHLEETVAALEGGNYAVAFSSGMAAVSALMELFSPGDHIIASDDLYGGTVRLFTHISQKNGVKVSYAATQEDIERKITPSTKAVFVETPSNPMMRVTDIAAVAAITKKNNALLIVDNTFLTPYFQKPFSHGADIVLHSGTKYLGGHNDTIAGLLVVKDGGLAEKIRFIAKTTGGCLSPFDSFLIIRGIKTLAVRMERQQETALKITHWLLEQSSVKKVYYPGLKEHPDYEISRRQASGFGAMISFSVHNGQKAKKILESVKIIKYAESLGGVESLITYPMLQTHADLPESERNARGINDCLLRLSVGLEAPDDLIADLEQSFR

SEQ ID NO: 94027 - protein, 178 aa, Unknown
  Obtained from environmental sample
  DOMAIN (3)...(178): Beta-ketoacyl synthase, N-terminal domain
  misc_feature (1)..(178): Xaa is any amino acid
MKRKVVVTGMGAISSIGKSVAEYGASLKEGKSGIGPITLFDTTGYDVTIAGEVKDFDPSLYMDKKEARKMCRFTQFAVAAASQALEDAKLLGEPNAEGKRTVNCDPLSIGIVMGNGIGGFEVVSESHKKLFNDGPKRMLPLTVPMMIPNEAAGNISMMYGTKGPAYTRLQPAPQAQTH

SEQ ID NO: 94028 - protein, 526 aa, Unknown
  Obtained from environmental sample
  DOMAIN (295)...(407): Pyruvate kinase, alpha/beta domain
  misc_feature (1)..(526): Xaa is any amino acid
MVENDGEVTINKGDDVVITTDDSFTTAAGNGKPAHIALSWKQAGEKLKPGHRVLIADGLLELEVTDTAGGIKCRADNTAVIGSKKNVNLIGVHAGLPIMAEQDKKDLEFGISMDLDYVAASFLSFPHEVTEIKKFLESHSSRMKIIAKIESGEGLENIKEIARLADGAMVARGDLGVQLPTEQIPLAQKHIINVCRRAGKPVITATQMLESMIVNPRPTRAELTDVANAILDGTDAIMLSGETSAGAYPIEAVKTMDKIACTIEQSDEFHKRMRNFHDECHSEVHNPKENLGVIMSRAGVEIATSVKAKAIVTPTRSGNTARILSVFRPDEPILAVTTDERSERIMQLYWGVNTCIRSLVDDSDSMILNTLNAVSEAGAAGITDKIVLIAGLPLESPNMINTVRVIIIGTVLARSSAGGYANPSITRAQGKIIHAANADEACKKIKSSGGGEILICNVLTEDYLSVISMVSGIICEGVSLISEQKLQLINPNLVWLTHIREAAKKLEPGLMVTIDGKELLVYEGTI

SEQ ID NO: 94029 - protein, 396 aa, Unknown
  Obtained from environmental sample
  DOMAIN (67)...(351): tRNA synthetases class I (W and Y)
  misc_feature (1)..(396): Xaa is any amino acid
LSCPRISALTELSGLKYAAYAEETVRHTAKRIITISRILNRLFITDSIEINRTIYNPLLKRYIVFMKKISLTGIKPTGDLHIGNYFGAIRPALELAKEYDARYFIADYHALNTMKNPEDLNFTIRQVAACWLASGLDPEKVIFYRQSSIPETFELTTMLMAFTSKGLMNRAHAYKDAVQKNNEKGDDTDAGINMGLYTYPVLMAADIIIFDSDVVPVGKDQVQHIEMAQDIAQSVNANYGKQVLKIPQAAVQENVAVVPGLDGRKMSKSYGNTIPLFAPEKTLRKTIMRVVTNSQAVEEPKDPDSSQIYMLYKLFASKEEQAALAARYRSGGMGWGEAKEELFRVANRELAPMRERYEAIMADIPALDRILEQGAEKARPIAAATVKRFRKVAGID

SEQ ID NO: 94030 - protein, 458 aa, Unknown
  Obtained from environmental sample
  DOMAIN (19)...(312): Putative modulator of DNA gyrase
  misc_feature (1)..(458): Xaa is any amino acid
MHQSIPKKILDFCLEAGADFAEIYEEETRKSRLTLKDNAMEDASASIIYGIGIRMLYGTEVLYGFTSDDSEEVLMNIAKNLSLSKNKKGEANFQFGKEQNYISYIKDSFKDPRKFGQEYKKDFLFAANSAARIDSKILQVEASIADAEQKINIWNSEGLQVCDNRARTRFSVNATAGEDSERASAHEGPGALGGFEFMDNLPVKELSRSCAERALRMLKAPYVKGGQMPVIMGNAFGGVIFHEACGHPLETESVRRQASPFCGKLGEQVAQSVLTAIDDGTLSGVWGSLEIDDEGTPTQKTLLIENGILKNFLSDRVGAKELGLPLTGSARRESYKYAPVSRMRNTFIAPGNSSLQDMLATVDHGFYAAKMAGGSVNPATGEFNFAVEEGYEIKNGKLGDAVRGATLIGLGHEILPKISMVGNDLELAAGMCGASSGHIPVTVGQPSIKVDSILVGGR

SEQ ID NO: 94031 - protein, 261 aa, Unknown
  Obtained from environmental sample
  DOMAIN (52)...(261): N-acetylmuramoyl-L-alanine amidase
  misc_feature (1)..(261): Xaa is any amino acid
MVLFDHRDILNLPLPYLEQGVLKFPETFLQQVKSTFNHYMEEDRDKFRIAAIIIDPGHGGNDPGTSWDHKIQGKTLKSVEKDITLKVSRMLYSTLVAAYPDKRILMTREGDTNPTKDARVSMANAVPLGVNEAAIYISVHVNSSLNASARGFEVWYLTPSYRREVIDQDRYQDSREVLPILNSMLEEELTTESIMLANYILKRMGEAVGKQSPSRGLKAEEWFVVRNARMPAVLVELGFASNETDALLMNDDVYLKNLSDA

SEQ ID NO: 94032 - protein, 364 aa, Unknown
  Obtained from environmental sample
  DOMAIN (108)...(260): ATP-grasp domain
  misc_feature (1)..(364): Xaa is any amino acid
LPGRKRILILGAGVMQGPALRIACEMGLETVAIDADSSALCVSLADRFEEIDLKDREGIEKLARSLLENGGLAGVMTAGTDFSASVAWVAEKLSLPGISFEAALDASDKERMRKRFKEACVPSPEFIVIDNKSSETGEAPALSFSWPVVVKPVDNMGSRGCRRVDGKAELKAAVAEAMAFSRSGRVIVEEYMEGPEFSVDALVYRGEITICGFADRHIFFPPYFIEMGHTIPSSLDPTVMRSLIETFNKGVKALGITNGAAKGDVKLTSRGPMIGEIAARLSGGFMSGWTFPYSSGVLPTRGAIEIALGTQPSGLENKWNWTSAERAFISIPGKVLSIEGIETAKVMPFVRDVFSRVKKGMAVT

SEQ ID NO: 94033 - protein, 202 aa, Unknown
  Obtained from environmental sample
  DOMAIN (8)...(146): Cytidylyltransferase
  misc_feature (1)..(202): Xaa is any amino acid
MAKFSALIYIGRFEPPHNGHLATIRTALEQTEKMMVFIGSHEVCRSLRNPFTSEERKEMLRISLTEVEQKKVIFIPIHDSNYNHIEWIKELKEKVLDNEPKIIERIGIIGYQKDRTSYYLDLFPEWEFLEMPLFANGLSSTEIRDKWFSGTLTEQDQIPLSVYTYLKYKENEIWAKNLREEYKLVEEYKKEWANTPYPPIFV

SEQ ID NO: 94034 - protein, 380 aa, Unknown
  Obtained from environmental sample
  misc_feature (1)..(380): Xaa is any amino acid
MSGKVEKIFVDYNDPIRKGDILAELNTDMLKLKREQQYAAVLKARANYELQRLNYRNQELLAEKNLISEYELKTSKTTLDNQAADLAVAESNLRVIETEINQYAYITSPIDGIVLDRRINIGDTVVDSSSNNSSSIFTLAENLREMQIEAGVGELDVASIQKGQQVRFTLESMPGRSFSGEVETLRMVPVVSNNVVSYTVIVKVENLDGSLLPGMTCAVDFIVESSENTLMVSNAALRYQPTSLNAETIAEMVFAASLENMNEEQRVAAMVNREQPRAQNVSQPPNTGGGTGITDLLSGGRGAGGFGGGQFVAGGRQGQGQGRNINTSAPSVVVRNLWYINDEGKLEVMQVRTGISSGSYTQVYAADELEGKQFILREKI

SEQ ID NO: 94035 - protein, 104 aa, Unknown
  Obtained from environmental sample
  misc_feature (1)..(104): Xaa is any amino acid
MPVIEMRGIKREYRMEGRKGEDGVVVRALRGVDFSAEAGEFVSVMGPSGSGKSTLMNILGCLDKPSAGTYTLDGIETSKSNSDTFAFIRNRKIGFVFQSFICWR

SEQ ID NO: 94036 - protein, 42 aa, Unknown
  Obtained from environmental sample
  misc_feature (1)..(42): Xaa is any amino acid
TAVNPVIVTVAVLFAVLIGVIFGFYPALKAAKLYPIEALRYE

SEQ ID NO: 94037 - protein, 268 aa, Unknown
  Obtained from environmental sample
  DOMAIN (44)...(236): ABC transporter
  misc_feature (1)..(268): Xaa is any amino acid
MKAVIEMRGIKREYRMESKQVEKDGAEAIVVRALRGVDFSAEAGEFISVMGPSGSGKSTLMNILGCLDKPSAGTYTLDGIETSSSNSDTFAFIRNRKIGFVFQSFNLLARTTALENVELPLFYRKHEKAEKKMNTKIRKERAMRALKVVGLEKRMDHFPSQLSGGQQQRVAIARAMVNDPAFILADEPTGNLDTGMTLEIMGLFQDLNRQGKTIIMVTHEPELAVYTRRIITLRDGELVSDKQVTERRNALEDLGQWKKDHALLAERG

SEQ ID NO: 94038 - protein, 155 aa, Unknown
  Obtained from environmental sample
  misc_feature (1)..(155): Xaa is any amino acid
MVALGEGSQRVIESRITAMGTNLLQIMPRRQINRSGQNTIMRMNAFTKKDIQKLRDESTFAAAVSGVVNSNANVTGGEGSAQVQIMGVEPDFSIARNYRVNAGAFFDDEDMRLRNRVAVLGRTTAKNLFGDVDDALSRQIRIGNVYFTVIGLLAR

SEQ ID NO: 94039 - protein, 200 aa, Unknown
  Obtained from environmental sample
  DOMAIN (2)...(192): Isocitrate/isopropylmalate dehydrogenase
  misc_feature (1)..(200): Xaa is any amino acid
MVYSRYEVERIARFAFEAAALRRKKLASIDKANVLTTSVFWREVVKEISKEFPQVELEHIYVDNAAMQLIKRPRDFDVMLCPNLFGDILSDECAMLTGSMGLLPSASIAEGAFGLYEPAGGSAPDIAGKGIANPIAQILSAALMLRYTFKEEAAAKAIEQAVEDVISKGIRTGDIWVEGQKKASTEEMGNAVMETLCSLP

SEQ ID NO: 94040 - protein, 98 aa, Unknown
  Obtained from environmental sample
  DOMAIN (12)...(98): Nucleotidyltransferase domain
  misc_feature (1)..(98): Xaa is any amino acid
MPKTTNECLELLKAYKKENASKYGIENIGIFGSFARGEQNSNSDLDVYLESNTISLFQIGSLLYDLENLLGIKVDLIHKHKRLRNEFLNTIKKDIIYA

SEQ ID NO: 94041 - protein, 73 aa, Unknown
  Obtained from environmental sample
  DOMAIN (1)...(61): Protein of unknown function DUF86
  misc_feature (1)..(73): Xaa is any amino acid
MARRIYLDKHSENKLLPKYPQIPWNAIMKTRDIIAHHYFDVDAERVFDTLKNDIPPLLAVIKLIREDWQISNS

SEQ ID NO: 94042 - protein, 241 aa, Unknown
  Obtained from environmental sample
  DOMAIN (8)...(240): Dihydrodipicolinate synthetase family
  misc_feature (1)..(241): Xaa is any amino acid
MQITNSSQLRGVFPALFTPLKNDDPACLRNSIDYDKAKKMIDDLIEAGVHGFVPVGTTGQSATLSTKQHLDFIKFVLDYVDGRVPIIAGAGSNSTRESVEMIKEIQKIKEVPMLCVTGYYNNPPQEGIYAHFKALSNETGAKIILYNVPGRTANYIHPNTIIKLAEDKNIIGLKQAVEFRIGEKYHEDTKSIAEHTKNLDFALISGEDGAFIDMLELGGVGLISSTANIPEASKIFVELYN

SEQ ID NO: 94043 - protein, 239 aa, Unknown
  Obtained from environmental sample
  misc_feature (1)..(239): Xaa is any amino acid
ARLFFSTLGFTPDSASITELGIPVIEDISQSYGSWLKPISKKDKQDDAQAPSAGKSEKEEPVVKFSGVFCILGLEERDMLTSGGGALLFAMNRKEGMLLRNFAGLAEEYFMPDINSALAIVQFKELHRNITRRHEIAQVYIQASLRTRHKRFIPINDGEYCNYSFSLVLETGLKDVTAYARKKEIEIENAFENTIAAFFHCDDCPVSGSLVMRTVLFPMYPRLRSQDVERVSRLIMTLP

SEQ ID NO: 94044 - protein, 237 aa, Unknown
  Obtained from environmental sample
  DOMAIN (4)...(237): ATP-NAD kinase
  misc_feature (1)..(237): Xaa is any amino acid
MSKKIILFVNNHKKNAEQVAGEIKSELEKLKHEVTLFSFEGKPKELPQGKWDIAFSLGGDGTVLYTARCLASLGVPILPVNLGTLGFIAEINKKEWCDVFLKWEKGEIVPTRRCMLEISVERKSKIIINEACLNDAVISYSERAKLIKLDVHINKDTALGSYRCDGLVVATPTGSTAYSMAAGGPILDPEMEALIVNPICPFALSNRPLVLPSKQTIMITVADEQRSEVLLTVDGQD

SEQ ID NO: 94045 - protein, 240 aa, Unknown
  Obtained from environmental sample
  misc_feature (1)..(240): Xaa is any amino acid
LVEYCYNTGNVTSTAGNTVGGIVGNNAAGSTVQNCVSLGARVTAPNYTGRIAGNSSGTLGNNYARSDIKIGASGAEAVVSPAGTNTPNGGNISITSGASLTVVFSGWDTALWNISGTFAIGGNLATLKTNTQSPAPTLPAAYSPLGSADNPFLVTNETELRKVGTETTTGGWTLSAHYKQTQDITMTGGNFPVIGTTATKFTGTYDGGGKTITGFSQSYTSSNVGLFGYIGAGGTVKNMN

SEQ ID NO: 94046 - protein, 49 aa, Unknown
  Obtained from environmental sample
  misc_feature (1)..(49): Xaa is any amino acid
MELTVRDAVYPLLITYHPAALLRNEELKRPAWEDLKLLRSKLDELTGGN

SEQ ID NO: 94047 - protein, 562 aa, Unknown
  Obtained from environmental sample
  DOMAIN (435)...(525): Helicase conserved C-terminal domain
  misc_feature (1)..(562): Xaa is any amino acid
LAAYFELVFDIPADHSFTYLIDDKAEAAAGKRAMVPFGKRDCLGFIIAQRESLPEGIKEDAVKKIRRVVDSEPLFDNNDVEIARWMAGYYLCSTGQALSAMIPSGRKMTVADISDNIEETEPRLSISNEQAAAICAITSANSAAVGSDDGGNNLPQMFYLYGVTGSGKTEVFLRAAQYMLNAGKSVIYLVPEISLTHQTADVIGKRFGSQAATLHSGMTPSARLAEWMRIRRGEAPIVVGPRSAVFAPVQNLGLIIIDEEHDGSYKSGNTPRYHARQIAFRRCQQEGARVVMGSATPSAEAWKLMSEGSIRRLDLSRRLSGGGMPEIKPVSLAGTTGCLSKELKDEILLTHQMGRQTILFLNRRGFAHFYQCPDCGWEQTCKRCSVSLTWHKSRNRCMCHYCGYSEAPPSACPKCGSINAGYRGFGTEMIEEEVRRTFPDLRLRRADADTAGKKGGLEEALLLFKTGMIDILLGTQMVAKGLNFPGVRLVGVVFADTGLHLPDFRAAERTFSLIVQVAGRAGRYFPDGKVIVQTLRMEDPVITRSCALDVEGFSKRNFTAQS

SEQ ID NO: 94048 - protein, 543 aa, Unknown
  Obtained from environmental sample
  misc_feature (1)..(543): Xaa is any amino acid
YRYIYTIASKTDGSFAFPALTVVIDGSDYSTRPLHFNVGGSGGGGGGGVSSGGGNNAGGNDQSAARNPDIRVTLNMPKKVLYVGEQTVLTLKVAQRAGTPIQTQRGYTGAVDQIEKAFNAGLSINRLFTNQVTQGQERIGNELYNTFTLSFAVFGLTAGEYRIGAVNFEYDEIVQSRSRPINPFFQDFFDMDFFGGRQAVQKSTQSAPFSVTVKPRPGGAPENFSGSVGKFTLSAAVEPQSVAAGEAVTLRISLKGNTRQSNVGDPVLPELANCDIFTPERQTAVDTGALGLSTRKTYRYLIIPKQEGALAVMPIVYHYLDPDNGTYKTARSDTLRVSVTKGLSVAKEQTRYLTQEEIRQVGSDIRYIKTPQKIVNQEERPYRAPLWYLLFPMPFLLFLIALLYRAQTRKSGENQIKAIRQKALGSAIKELKRASKAAADSEFLGRAAVVIEKYISRKFAFPATGRTLEELKDELLSRKIDEQTVNGLTALIEGINEYRFGGKTFNAQSRDEIVKKTVSFLSSMEKVAQKSKAPSSASQTSTM

SEQ ID NO: 94049 - protein, 169 aa, Unknown
  Obtained from environmental sample
  misc_feature (1)..(169): Xaa is any amino acid
VASALAAALITLISLIATAFTLVALIALVSLITFAALVAAAFTLAAALIALVSLITFAALITAAFTLVAALIALVALIPFAALVAAAFALVTALVPLITLIALVTVIAALAFITLVALVTVIAALAFITLVALVTVIAALAFITLVALVTVIAALAFITLVALVTVIAA

SEQ ID NO: 94050 - protein, 138 aa, Unknown
  Obtained from environmental sample
  DOMAIN (3)...(131): yrdC domain
  misc_feature (1)..(138): Xaa is any amino acid
NQDKRLLALVSDREMLLPWVSAAPPEDLACLWPGALTLVLPSRDHPFGWESVAFRVPDHAFLRLLTEYLAEPVYAPSANPQDSPPARNCDEAWEYFGEAVDLYIDGGEAPDTQASTLVSCLAHPPEILRQGAVRIPKN

SEQ ID NO: 94051 - protein, 320 aa, Unknown
  Obtained from environmental sample
  DOMAIN (54)...(320): Citrate synthase
  misc_feature (1)..(320): Xaa is any amino acid
MPFTRRVECEFEAQYLEELTEIAKKANHIEPELYKKYSVMRGLRKADSTGVLVGLTNIGSVHGYIMDEGEKVPVTGRLRYRGIDVIDIVDGFQRDKRFGYNEVAYLLLFGGLPNEGQLKHFRGMLDACRELPEGFMENMILKAPTPNIMNSLARSVLASYTYDLDPDSIDIKNVLRQCIELISRFTTFVAYGYQAKGHFYDNKSLVIHKPQAGMSTAENFLYMIRPDSAFTPLEAETLDLALVLHAEHGGGNNSTFALHVVSSSDTDTYSAMAAAVGSLKGPKHGGANIKVSGMIEDIKAGVKDWNDDDEISNYLGKIIR

SEQ ID NO: 94052 - protein, 459 aa, Unknown
  Obtained from environmental sample
  DOMAIN (16)...(457): Hsp90 protein
  misc_feature (1)..(459): Xaa is any amino acid
GHGTDVVVYLKDDEIEYAELWQARSLIKKYSDFIAFPIYLPNDKGESEVVNQTKPLWLRPASEVTQEQYEEFYHQALGGFGKTLCEMHSKAEGILEYSSLLFIPAQPAFDLFSSIERKHGVKLYVRRVFIMDNCKELLPEYLRFVRGVVDSEDLPLNVSREMLQKNAVIERMSKALVSKILGKLTEMAESDPAVYKDFWKSFGVVLKEGLYNDYENREKLLELARFQSSMGESDDFVSLKQYVGRMREDQKDIYYITAENRGVAEKSPHLEIFKAKSIEVLYLVDPIDEWIVGMGGIGEYGGKQLKSVTTGDLDLGDLGKEEAEKRKAAQAEFAGLSGRIKEILADSVEEVRVTSRLKDSPACLVAGAYAVGAHLEKMMKAMGQEVPVSKRVLEINAEHPIIKNINARYGEAPDDPEFADWVRLLYDGALIAEGRPAADPAAYLKRVNAMLEKASARQG

SEQ ID NO: 94053 - protein, 440 aa, Unknown
  Obtained from environmental sample
  misc_feature (1)..(440): Xaa is any amino acid
MGFTILRTRIPFRERLEGDTDPSLNDGFVVRKNDNTYDYTVNPNGTKTFNLNWNSWDISSTRNLIEQIKALGGQGPEKLTIMSAPWTVLNNRVTRWKEDITGVNARTNYTMNWSLPDRWGRLRRDKYNDYADLLADYVLNYESKMGAPLSILSVQNEPNWNAAWETTFWNGADLRDFIAIISRRFPMKGIQAGSGGINIMMPEFENFNINFNEMIKPSLDNPESEKIITHIALHQYNATSDSSSRAGSMEFPGITASGKRFWQTEVSGSGSALPPGPGIHNALFYARMIHWDMTLAQTNAFLYWWLWTNNPSGDFPGALIKVNDDAIITSQRLYAMGQYSRFIRPGWQRIDCDASPRGGIYSSAYKNPNTKEIAIVIINETITHFSVPLNLTGAEYDQLEIWRTSEKEKLKNIGKQQTSRNTAEVTLAPMSITTFYGKVK

SEQ ID NO: 94054 - protein, 219 aa, Unknown
  Obtained from environmental sample
  DOMAIN (14)...(217): Binding-protein-dependent transport system inner membrane component
  misc_feature (1)..(219): Xaa is any amino acid
MEIKTVIYFWIPQLLKGARVTVGLTVTAACAGLVLGFFLALGKMSKKFILNKLCGAYIFFFRGTPLLMQLFFIYYALPQIFPPFTIKSRFLAAFTAFALNSAAYCAEIIRAAIQSIDKGQFEASRVLGLSRAQTLRYVIIPQSVRRLIPPVGNEFIMMLKDASLVSMIALVDITKAMSNIFNSTSSALVYIPALALYLIITAVFTYIFHKLEKRYTLTS

SEQ ID NO: 94055 - protein, 285 aa, Unknown
  Obtained from environmental sample
  DOMAIN (20)...(282): Ribosomal RNA adenine dimethylase
  misc_feature (1)..(285): Xaa is any amino acid
MTMPNYNSPDDLQAFLNGKGMGMRKKFGQNFLINPAIRRALIEALDAEAGESVWEIGAGLGAMTGPLLEKGLCVQAFEIDQGFIGILNDFFSADGNFTLIEGDALKTWYAQPPAPYLLGNLPYNIAATLLADFIVKRRFFRRMVVTVQREVAMRMSAGAGTPNYSSFSVLCASAYHVKPLMVIKSSSFYPRPNVDSQAVLLEMRDGAEDCQLPSCFHSLLRGLFSSRRKTIKNNLAAFLAARGKYSEPMLAAILTESDLGGGKRAETLAFEDFVRLAEIINNMGL

SEQ ID NO: 94056 - protein, 102 aa, Unknown
  Obtained from environmental sample
  DOMAIN (5)...(74): 4'-phosphopantetheinyl transferase superfamily
  misc_feature (1)..(102): Xaa is any amino acid
MIIGIGVDMCEASRWQGLLDRYGHKAVRRMLSGDEANSLLSSPTSSLAEKAAGRWALREAVGKAMGTGLSGWDLRDLRYEKGKAVAAGKLKKKMDDMGIGRV

SEQ ID NO: 94057 - protein, 365 aa, Unknown
  Obtained from environmental sample
  DOMAIN (20)...(86): 2Fe-2S iron-sulfur cluster binding domain
  misc_feature (1)..(365): Xaa is any amino acid
MSNHYNMPKLPTASSPLVAITVDGKEVQVPGDTNLIEALKAAHIETPHLCYHGYLPVSGNCRQCLVEVDGPRGMALTIGCYTPIRPGMKVATPASSPRVADARKSVLEFLLVNHPLDCPICDKAGECLLQENYVMAGASNSRLNPEVGKLYHGNPEHASTDSHGQHRGGKRVDLGPRISLDEERCIQCDRCVRFMRHIAGDEQLQLASRGGHTYISTFPGEKLDHPYDRCVTDICPVGAMTDKAFRFRKRVWALSKVPTISMDDSLGANIYADHADGVVYRITPRCNAEVNRSWLSNAARDVVQHIHENRLLSGDIPKASQIIKEAKGKIAIVLGSSCTAEEIAALKKLAGKIGNKAQLFGGSFL

SEQ ID NO: 94058 - protein, 79 aa, Unknown
  Obtained from environmental sample
  misc_feature (1)..(79): Xaa is any amino acid
MEQENQNFSRKELEFAVFCIENIAENLGKSGNEVYKMLTEKSDILDSYVIPCYDVLHTQGKNYIVNDILDYMKKREVLK

SEQ ID NO: 94059 - protein, 862 aa, Unknown
  Obtained from environmental sample
  DOMAIN (119)...(383): RNA polymerase Rpb2, domain 2
  misc_feature (1)..(862): Xaa is any amino acid
SYERFLQREKISKKEKPALQGLQEVFEATFPIVSPNEDMKLEFEHYTFDEENIKVTEFECKQKGLNYAVPLKARINLVFQQTGEIRQKDIYMGDIPLMTERGTFIINGAERVVVSQIHRSPGVIFSHEKGIFSSRIIPYRGSWIEFEIDQKRDLIYTKIDRKKRILGTIFLRALGFSSREEIIEAFYVTETLKIKDDRETKEKISGMVLAKPVMIKDETSSKGAEKVLYRAGEKLHPHNVDELINHGIKSICYIDFEAEGSLNSPMILNCFEREDIKFVKEAGSEPAKDDALMAVYSVLMPGESITVDQADKDLTGMFFSDRRYDLGKVGRYKLNKKFSLDLPTNKFTLTIDDIIATMKHLIKVYVGDEYIDDIDHLGNRRIRSVGELMANQMKTAFSRMERIAKERMSLKETDTIKPQELISIKPIVAAIKEFFGSSQLSQFMDQVNPLAELTHKRRLNALGPGGLSRDRAGFEVREIHYTHYGRMCPIETPEGPNIGLIVSLANYTRVNEYGFLETPYRKVNKGIATKDIEYLSAMDEDKYYIAQASAKVNDNGSFADDQISCRSKGDYITRAPEEIQYMDVSPKQIISVSASLIPFLEHDDANRALMGSNMQRQAVPLVFPEAPRVGTGMEVKCAYDSGVLVKARRAGTVLRVTSQEVIVKPERAGNVKPAAQVSLDENGNDVYQLIKFQRTNQDTCFNQRPIVKAGEKIVSGQVIADGPATQNGELALGRNILVGFMPWNGYNYEDSILISQRVVKDDMFTSIHIKEFVVEVRETKLGPEKITRDIPNTSEKSLDNMDSEGIIRIGAKVRSGDILVGKVTPKSETETTPEFKLLNSIFGEKAKEVRDTSLKVPHGMTE

SEQ ID NO: 94060 - protein, 485 aa, Unknown
  Obtained from environmental sample
  DOMAIN (3)...(485): Bacteriophage Mu tail sheath protein (GpL)
  misc_feature (1)..(485): Xaa is any amino acid
MPIPIRQIPANLLVPGQYNEIDNSLAGSQGDVKKALMIGYKLATSEAEDGKPVNVLSAAKAHQLFGYGSPVAIMAETFLSLNKVEELYVLPIPEPTAGTAWKKRFTVSGTAAAAGAFHIAINGRNFEAAISAGANTEAVAAAITARINAEITLPVIAEAENGIVTVSANVKGETGNYNSVFINSIAAGISIEETASTAGTGVTDIKSFLKGLGEVRYNFIASDFNDTGNIRASSDELESRYGAMRQIGGRMYIALSGELGSKTDVGTMLAKAGEVNSPHIILIPRSVNPELPCVWAAAWCAVACRILADDPSANTYDTKIPGLIGGVEFNADERQKLLEAGIATYRLDTTGHVLIERLVTSYTENSDGGRDTSYLDVQVTETVDAIRTFINAEAKKRFKTWKLASTDENFGSGARVMTAGVFRSFLAELYQEVFIKEKQWSQDFDGYKKSIIVEIKAGSKTRLEYSHQPNLIGQFYIGAGLTQFK

SEQ ID NO: 94061 - protein, 89 aa, Unknown
  Obtained from environmental sample
  misc_feature (1)..(89): Xaa is any amino acid
MKLERVQRVISAALGELPIQEKGATFKPAGTKRETKAGEVPENTGYTESQTFAELKLKLNATGTLGIEELSKLGEDTLTIFTTRRQAVH

SEQ ID NO: 94062 - protein, 96 aa, Unknown
  Obtained from environmental sample
  misc_feature (1)..(96): Xaa is any amino acid
MKAYKAYIFDLDGTLLDSMSVWEQLDVDFLEKRGIAVPPDYMNAVSPMNPYEAAVYTIKRFALKDSADGLIREWNDMAAYAYGNTVQMKPMPKSIL

SEQ ID NO: 94063 - protein, 167 aa, Unknown
  Obtained from environmental sample
  DOMAIN (9)...(63): Helix-turn-helix
  misc_feature (1)..(167): Xaa is any amino acid
MREILAGNISRYRKEQGLTQEALGEKLGVSFQAVSKWETNQTVPDTALLPELARALNISIDKLLGYSAFSSDTSYYEDDYRKKDYYWGVVPSTMCLKVLELLPPENHVKILDIGCGEGKDAVFFARCGYDVSAFDISEAGLEKQTPGGQSKCKCADFSREFMGLSFR

SEQ ID NO: 94064 - protein, 231 aa, Unknown
  Obtained from environmental sample
  misc_feature (1)..(231): Xaa is any amino acid
VASKETTTIVALATPPGTSAIAALRVSGSAVKNVCKAILPNFKMQPRVASLTEASFNDKIIDELIAVFFSAPNSYTGEDVLELFPHGNPFIVRKLIEAICKVPGVQLAQRGEFTQRAFLNGKLDLTQAEAVGALLAANNSKSLSDAQRLLSGEISSEINALAESVKGASALLELEVDFAEDTEGETTSEVLLEHKILQHLQNLKKRFRASQSELPKAALFGAPNAGKSSLI

SEQ ID NO: 94065 - protein, 272 aa, Unknown
  Obtained from environmental sample
  DOMAIN (14)...(272): Histidinol dehydrogenase
  misc_feature (1)..(272): Xaa is any amino acid
MNIIQSCDFDSYWKNETKHSNDTKTEKSVKNIIEKVRSNGDAAIRKFASKFDKSSPRDLEVPLAGAKRALNLLRESDRALVDAMELAALHIKRFSDKQREQFADFEFEMDPGLVTGQRIIPVQRAAIYIPGGRFPLFSSVLMCMIPAFCAGVEEVILSSPPTQDGLPDKKIIAAAMIASEVANNDNVRIFAIGGAQAIAALAFGTESVPRADVIAGPGNKFVATAKRLLFGEVGIDFIAGPTDVLIIADGRANDGDIEKTADLVAADMLGQA

SEQ ID NO: 94066 - protein, 214 aa, Unknown
  Obtained from environmental sample
  misc_feature (1)..(214): Xaa is any amino acid
KNSSATNIVASGYFKRNPALIGKGFSETAEDKRLQTQALLWERENIVALLGKGEIGAEEAGHFLEVLDVRIRSVGCDRRMLHEIGWTIKHLIRFKHLTQRKAGRNDFRELLGRNSIFVLEKLKTIRNPENAKAVDKLMSSYELIAAFHKGLGIGGGVATKREEEESLVYEVAAKGFHIERGLIQEMFETGRLSWESAQEMRGNIAALEARLQAN

SEQ ID NO: 94067 - protein, 194 aa, Unknown
  Obtained from environmental sample
  DOMAIN (1)...(156): MatE
  misc_feature (1)..(194): Xaa is any amino acid
MQSLTTLLMNHAAGMYGDAVIASISITHRVFMFLASATLGFGQAFQPVCGFNFGAKRYDRVKKAFWFCLRLSAVMLIILAAACFIFAPKIIALFRHDDAEVLKIGTFMIRAQSLSLPFLGWILLTSFLLQTIGKALPASILAFARQGLFFIPLIFTIVPIFGVLGIQLCTPIADTCSFILALFLGIKVLRKDLT

SEQ ID NO: 94068 - protein, 651 aa, Unknown
  Obtained from environmental sample
  misc_feature (1)..(651): Xaa is any amino acid
KQDKESKGTVSTIKADGELTLKPTKADDTFGVRISDGKMAAINGTITLEDGEKITAPGFFSVADMAAWVSAQPDNTADTPYTVKLNVNDLASIVSTLKANDTKYVSLDLSGATFTNIEDNVFSGCTSLAGITIPVSVTGIGNDAFSGCTSLASVTFEGMITSDNFGANPFLGDLRAKYITTGGGAGTYTTTVPVGGSSVWTKQGNSGNNDIVFTSIADMAAWLSAQPDNTADTAYAVKLNVNSLGGDAKTSGSAGNALKANNTKYVSLDLSGSTFISIGDIAFRYCASLAGVTIGNSVTSIGNSAFSECTGLADVTIPDSVTYIGSNAFSKTAWLDNQPDGLVYAGKVAYVYKGTMPASTSIILLDGTKGIANQAFYQCTSLASVTIPNSVTSIGLGVFSDCTSLAAINVDSANSAYSSADGVLYNKNKTTLTAYPKGKTGPSFTIPNSVTSIGREAFARCTSLASVTIPDSVTSIGYGAFYQCTSLASVTIGNGVTEISERAFYQCASLASVTIPASVTSIQSNAFSNCPNLASITVDPNNPNYASADGIVYNKAKTQIIVVPQGITGNVTIPASVTGIGNGAFYNCTKLTSVTIPDSVTDIKADAFRDCTSLASVTIGNGVTGIGNSAFYGCTSLTSVTIPDSVTSIDN

SEQ ID NO: 94069 - protein, 401 aa, Unknown
  Obtained from environmental sample
  DOMAIN (175)...(246): His Kinase A (phosphoacceptor) domain
  misc_feature (1)..(401): Xaa is any amino acid
DIGWQERSFTGNVKFKLDSPPSLENGFPVRELPRDRDTIRYVQRQGQNSIIVINYNLGEDFDTGKDALENQTARFDTINLLRDNLRPLLFFFYGVFFLPTLLMTVIIAISFTRRITHPIVELTEATRRVAEGDFAIQILSRRNDELGLLIRSFNAMVQDLEKSRAALVKSEKISIWQNMAQQLAHEIKNPLTPIKLSAERVLRRWSNEPDKIGEILESSMMAIIQETEGLSTLLNEFRTLSKPMEPSQTWTDLREAAEELINAYSTSYPQVQFDINHVEIGITVKVEKHRIAQILTNLIINAIDAMNGTGSIEIRTDLVKKRDVLYCRISVKDTGKGIGKQDSHLLFTPYYTTKESGTGLGLPIVERIVNDHGGAIWFDSAEGMGTTFYIDLPAEKNEEEK

SEQ ID NO: 94070 - protein, 71 aa, Unknown
  Obtained from environmental sample
  misc_feature (1)..(71): Xaa is any amino acid
GVLDRLTVKTEVGPSIFMDDARPLNALKERIRETLQASISISPRVELHESGSLPVSEGKAVRVQDTRPKDV

SEQ ID NO: 94071 - protein, 391 aa, Unknown
  Obtained from environmental sample
  DOMAIN (10)...(357): Major Facilitator Superfamily
  misc_feature (1)..(391): Xaa is any amino acid
MVSAILLMIIYLSFISLGLPDSLLGSAWPSMYGGLNVPPHYAGYISMIIAGGTVISSIFSERIIRRFGTGIVTAFSVLMTAVALLGFSFSATVALLCLWAIPLGLGAGSVDAALNNYVALHYKAKHMSWLHCFWGVGASIGPIIMSFFLINKNSWNLGYRSIGLLQCCLVAVLFITISLWGKNKPQDKNGKNEPSKGIKFKELFQLTGVKQILIAFFCYCSLESTTGLWGSSFLVMEKNISPEIAAKWISLFYIGITSGRFISGFLTMKLNNRQMVRLGQFLVACGVIILMLPIGKLLLLPGFFIIGLGCAPIYPSLLHETPGNFGSEKSQTIMGIQMASAYIGTTFMPPLFGQITSFFGFNVFPLFIGGILTLNIIMVELVNKKVNKKAT

SEQ ID NO: 94072 - protein, 604 aa, Unknown
  Obtained from environmental sample
  DOMAIN (401)...(432): Putative Fe-S cluster
  misc_feature (1)..(604): Xaa is any amino acid
MSVALGSTKAPVYTDLAECHDCYKCIRKCPVKSIKVEKGQASILFDRCIYCGRCVMSCPAHAKHYRNDVKKVKLLLADGRKVAVSLAPSFVSEFTDWKPEELIAALKKLGFFAVSETALGADFLSARSARDLMSSNTPSAAPDKPSLMISSACPVIVEYIKLYKPNLVPFISPHASPLLTHARFLRSSYGGESHGKVAIVFIGPCFAKKHEADLYSAEIDAAITFEELRDWLNNEHITPKTISPSAIADCAFEPRRSAKGAFFPLEGGEITAFSAYVEKAAAEAGTRVRTLSASGFHAVGSLLDGFDPATLNAPLFLELLSCPGGCLNGPGMTGAVSGAIRQVLLKDYAFSADNTLDDDALSLSPQIDAGYTLAPLPPSEHTEKEIAEALLKVGRYSPADRPNCSSCGYDTCRDFAVALLDGRAEKSMCASYMRELANKTANGLIKAIPSGVAIVDRDLKIIDCNEQFARLMGSEAEELFAMMPGLVGADFAKVSPFPQYFQTIIDPSGPELAQTDVRVGSKIFHLTVFAVEKGIAAAGVVEDITAPRVRIEKTVERAREIIKKNVSTVQQIAFLLGENAAESEAILNSIIESYTIEEEDDGQH

SEQ ID NO: 94073 - protein, 81 aa, Unknown
  Obtained from environmental sample
  misc_feature (1)..(81): Xaa is any amino acid
MDTITVCMGSSCFGKGNSANADFITRFIEEHKLQDSVEVSGCLCGNACARGPNIKINDKLISGISEQTLADIIVKELGLQL

SEQ ID NO: 94074 - protein, 80 aa, Unknown
  Obtained from environmental sample
  misc_feature (1)..(80): Xaa is any amino acid
MKLTVCIGSACHVKGAGKIVEELQSLIAKKKCGDQVELTGAFCMGKCATGVSVTVDGEYHSLQPENTKTFFKEQVVKKLA

SEQ ID NO: 94075 - protein, 328 aa, Unknown
  Obtained from environmental sample
  DOMAIN (127)...(328): Queuine tRNA-ribosyltransferase
  misc_feature (1)..(328): Xaa is any amino acid
MTFNIASRDSSSSARTGVLKLPHGPVSTPVFMPVGTCGTVKAITVEDLKEIGFEIILSNTYHLYLRPGMEVMAGAGGLHRFMNWDRNILTDSGGFQVFSLSALRKVGSEGAWFQSHIDGSRHFLSPEKAVDIQCIINSDIQMQLDVCSGWGSSRKDSEQALAITIEWMTRAYSTWDMRRAEGYQGSLFSIVQGNFFPDLRKRSVETCNAAGTPGIAIGGLSVGEPPEIFSETLTLTAALLPDEKPRYVMGIGTPEYILEAIENGIDMFDCVLPTREGRNGRVYTRNGPFALKKSENRMDFMPIDKECTCKVCRQYTRAYLRHLYKTQE

SEQ ID NO: 94076 - protein, 375 aa, Unknown
  Obtained from environmental sample
  DOMAIN (45)...(366): Phage portal protein
  misc_feature (1)..(375): Xaa is any amino acid
MNIIQRLINSYERISKNHYMENKSFGKKSFSFSLTDYDDIYNFYNKDQIGEPYLINAWVNIAINILIRNIARADFTIKNGGEDVTNGKVYDLFRKPNSALSRYDLWKETAAWWHLEGEAFWWFGENYSGGLPNEIFILDPRKMRHEGELSGGIDFGFRHIPRRWFYHSGTELIPILSDEIIHFRDFNPFNPVRGVNPLLSLALELEQDFYANKANSQLLKNNAIPQGILKTEQTLRPEEADQLERRWESKYGAVKAGRKIAVLGRGTEFKPVTFSPDVIKLFELKKWNLYTILAKYGIPPRVANISDKTTSLSGKDTAEQHAAFWKYTLIPTLKQFEQILETQFFIRFGLKERGIFDLFDIPELPENEDQQSKRD

SEQ ID NO: 94077 - protein, 423 aa, Unknown
  Obtained from environmental sample
  misc_feature (1)..(423): Xaa is any amino acid
LKNLWSALCKLSLPTGASGMDKLIGVLTEAGGAPSEEIKKARGRYIDAMIDSHKHSAQARVAVFGDPDFVAAMVRLCCENGALPVLAATGSISPKLKEMLTNETEDCRKFHFAEEIRVLDDSDFSAIEKGCVELGANLLIGSSDGRRISRKLNIPLIRCAFPIHDYIGGQRTRILGFDGSLTILDQVANAMMEKTEGSFREELYEKGWTVSKAALGEPMGNMATNEQYLINPIYETQIMTDVAKKSVMMNLVRHRPMMGPSIFLPTRDRGGVQLHWLTAYGQKIEGSKPKGAERVELKAYTLAGYIPWFDEFEEDVFVDLGAMFIDEFIETYGQEFDRQCLLADEDPFTGAMMCSDLTEVAIKGNNINELTWKDFRDAVLKVPAEERKDCAWFINETVINHIANIEDTTGRPIGGVRPKQCRG

SEQ ID NO: 94078 - protein, 557 aa, Unknown
  Obtained from environmental sample
  misc_feature (1)..(557): Xaa is any amino acid
LSDQDSGIAAIMSNIEFESRVEAGLSIYPKKIEFRLAAPLSSSQTSLSRLLVQRSRVPGMAERIPSTAQYATILSAGTLEELYQTALVFTPGLDEALKTAESASRLVLGLTLSDLLFSWSGNEFAAMGLEGRPHPVYMIQIADEKKRKDVFDRAFQSAALTENTKLNLDGVRIPRIELPEFLQSLLRRWDIFIPSPYYSIYKDYFIVSESAETLLAALRAMQRNDVLPKTAAWRNIAGGKNVSSSFSLYYSLDLSVPFFLRKNTALSGFLSLYRQGLARMSFNKGLVEISLSLVPGSGGGITLVSGYPLDAGARPSNRIYGAGKGDESRIFYSSGNTAYSLKIADNSTGELSGQGNHWIIPAVDVTVKDAKGTVFAWVVTDRGRVTLVDSEMEAVQGFPMLTGLSLSSAPTAFMGKLYLCDEDGKVYSVDATGKQSVWQTSFTAALRSPPSFLSVSGKKGNVVYTAAYPKSFFGEMWLLDGEGKTLPNWPKPISVEKSDDEGGGSFGIGFGSPLLFAQNNKVYAAFVNQSGQLLVYDEDAILVPPFPVTLDGVFYQQ

SEQ ID NO: 94079 - protein, 145 aa, Unknown
  Obtained from environmental sample
  DOMAIN (8)...(122): Response regulator receiver domain
  misc_feature (1)..(145): Xaa is any amino acid
MAFFKKKKKILAVDDSEIDLELLEFMLKDKYTVLPTKSGKEALDYLLHFGNVDLILLDLIMPEMDGWETFSRIRDLGNITDVPIAFVTSVHGEEEQGRAKEMGAADYIFKPFSREELIKRIDIMFKKPHEKKAFTALKLDNLTDI

SEQ ID NO: 94080 - protein, 486 aa, Unknown
  Obtained from environmental sample
  misc_feature (1)..(486): Xaa is any amino acid
MKITEELKTFENEFLANLTKRSNDIGLRITEWQGGLEKRLSAIGEDSEKALRKLEHDHAEEMKKTLSAMDTSLVSELDRLKSATGAFEEGILAQMKGAYDSVASFKEQLNSGFEDAKIELQALVDKTRNEWRAERSDWETKDKAIGEERKKDLEAFTAKLDASKKQIEGFSMQANEIISSQETLLVKAAEEMKQKALETSAAKLEEYRRAQDVEFKRLETLADDSRKLDAELRRYMQELIGRLKEEFSDYRSEAEELRKAETENFSSTAARLEGEMTEIERELAALKLETRENVSGELKSFENEFFADLTKRGNDMDLRIMEWQGSLEKRLSTIGENSETALRELEYDRAEEMKKNLSALDARLVSELERLKSKAGAFEEGILDQMKAADDSVSSFKEQLNHGLEDARKEAEISIKAEIGNYSITAAETVKKYQRELDDAWTGLSARLRELDENVEEAHQRIRDLAAETDTRIASVRSSVEDAERH

SEQ ID NO: 94081 - protein, 276 aa, Unknown
  Obtained from environmental sample
  misc_feature (1)..(276): Xaa is any amino acid
MQELIGQLKEEFSGYQSEAEELRKAETENFSVTAARLNEEMTEIEKGLAALKSAAHENITEELKSFENEFMTDLTKRNNDIGLRIEEWQGGLEKRLSTIGDNSEKALRKLEHDQAEEMKKTLAAMDVRLTSELERLRSETGAFEEGILGHIKAADDSVSSFKEQLDRGLEDARKEAEISIKAEIGNYSITAAETVKKYQRELDDAWNGLSARLSELDDNVEEAHQRIRDLAAETDTRIASVRSSVEDAERHIREAREQTKIIDVAKAMKLDMERSI

SEQ ID NO: 94082 - protein, 355 aa, Unknown
  Obtained from environmental sample
  misc_feature (1)..(355): Xaa is any amino acid
SYASGNVTGSSNGYGYGYGGGLVGAATTLAITNSYASGNASGSGSVSYSYGGSGGLVGRANTSTIATSYASGTISGGTKGGIFGRYASGTNTYVYYNNEGASTAAGSGSPTGILAASSAMLKKQGTYINWDFSNVWGIIEDISYPYLKNNPGKITVPLSATIEAEYFIGQTYTGSQIKPEPTVKLKADGTILTKGTDYDLIYGTNINAGKGTVTIVCLDGDYIDFEETIEFDIIPKTLTISNATAQNKVYDGTTAANITGTLEGIVAGNNVTIGSGVFASKNFGTGIAVSNVAIVGTSAANYKLTQPADLTANITQKPLSITLNPKTVTIAKSDPMTKVTEKLVYNGLVSSETSS

SEQ ID NO: 94083 - protein, 349 aa, Unknown
  Obtained from environmental sample
  misc_feature (1)..(349): Xaa is any amino acid
LIDEWQAAPVLWDAVRVEVDKRGEDGLFILTGSTSVDDSKIMHSGTGRIARLMMYPMSLFESGESNGTVSLLKLFDDRGYDIDGAKSDLSVEQLIFAACRGGWPASLFKKTDKASLFTASSYIDNICESDASTVDGVSRDPRRTREILRSYARNISTLSGNQTIIKDITANFGTISENTFYSYLNALNRLFVIDEVPAWSPAIRSASAIRASRKREFIDPSIAAAALKISPEILMQDLNTFGYIFENLCIRDLKAYSHAHGGEVSYYHDRHGLEADCVLRLNDGRYTLIEFKLGSRQIEEGAEHLLTLQNLIRTYNAVESVKIKEPEFLTIITGGEMSYRRKDGIYIIP

SEQ ID NO: 94084 - protein, 279 aa, Unknown
  Obtained from environmental sample
  DOMAIN (54)...(87): Tetratricopeptide repeat
  misc_feature (1)..(279): Xaa is any amino acid
GRLDRAIAAFTEAIRLNGNHDIYYDRGSAYLNIRDYDNAIADFTKIIDSNAEYANAYNKRGIAYYNKREFDKAITDYTKLIKLNHNDAKAYSDRADAYRGKGDFESAIADYDEAIRLDPNHAAAYYGYGEAYSNPTKGDRDKAIAYYTKAIGLDFKYVVNYFEEGNVYKDSNGNMSYLAEAIKTCQDEFFDKLKTDREDTAKTFEKPSVRGVKKDMAEKYSDKVHFIYELLQNADDAMATSARFELLPDKLIFAHKGTRRFFISDPTSKGEEKDGESRY

SEQ ID NO: 94085 - protein, 290 aa, Unknown
  Obtained from environmental sample
  misc_feature (1)..(290): Xaa is any amino acid
FNDGDITAEFVTLIHNNDDKDDRVTPDNDTLWLFSRGNDNKRYSVGFFVDTYGSLVPTAEISAFCFFPTQVNTGLQFIIHAPFLLNSSREGILVNPHNDNMIKLLSELAADSLVCLKEIGESKTARLINDKIINIIPHNEEELTPPNGMEKTSFKPFYDKIKEAFETKAIIPSKDGYVAKENAYWATDIQIADLFTNEQLADLVDNPKAEWVFIEQPYREKLPNYDCKYIEDIVKLRLKWEHILDAVTPTFIEKYVEQYGETFEEFVEWLHRFYKWIDKDEKRFGRVKRR

SEQ ID NO: 94086 - protein, 371 aa, Unknown
  Obtained from environmental sample
  DOMAIN (6)...(340): Terminase-like family
  misc_feature (1)..(371): Xaa is any amino acid
IDETDGVKARVLEFTNGGKIIALSSAPTAFNSKGGKIVWDEAALHKDQRQMWSGASPAAVVWGYPIRILSTHKGKSTLFYKFCDSARKLKNDWSLHKVTIADAVEQGLYDKVAGRPTDAEERAEYIDRIRASCQDEDIFREDYMAEPVDGTTAYITYDMIDAVVSDGVPKTLAELSLTDNALYAGWDIGRERDLSVIVVLEEVHDFLCARIVKVFDRVKFSVQKAWLDDAMRLPTLRRLCIDKTGMGIPLTEEAQEKYGRYRVEGVTFTSGSKEVLAVDARNKIEDRRLILPDDDGLKKSLHSIKRVVTAAGNFRFDAERTDETGHADHFWALALAIHAKTGGPSGPAWAVSSGSVGDYGKFADPIPMGVY

SEQ ID NO: 94087 - protein, 354 aa, Unknown
  Obtained from environmental sample
  DOMAIN (241)...(287): Regulator of chromosome condensation (RCC1)
  misc_feature (1)..(354): Xaa is any amino acid
TWTERVAPTRVGAANDWAVVMAGYFYSLAIKTDGSLWAWGANNMGQLGLGYEGWGTEPTTPTRVGTDSDWKAVVAGESQHTLAIKTDGSLWAWGSSGYGGLGLGDVDYYSKNTPTRVGTDSNWAAVVCGLSNSFALKTDGSLWAWGNNENGRLGLGHATNRPVPTRVGTANDWKAVSVYRTHTLALRTDGSLWAWGNNNFGQLGLGSAADEWKNAPTRVGTASDWATVAAGCEYSLALKTDGSLWAWGYNGSGQLGNGGSSSNTPTRVGTDANWVTVYAGGNHTLAIRTDGSLWAWGSNGSGQLGLGDTNSRNTPTRVGADANWATAPPVDAAEYAAPIGSDGHAWAWEAAEEQ

SEQ ID NO: 94088 - protein, 395 aa, Unknown
  Obtained from environmental sample
  DOMAIN (163)...(331): Domain of unknown function (DUF303)
  misc_feature (1)..(395): Xaa is any amino acid
MTSKNQEKLCAAAIFSDNMVLQHGKPVPFWGTGGVEGSSVFVIWESTKNTVKKETKVRDSKWRLTLPPLTVGVSGEIIIKNETDELRFTNVITGDVWFAGGQSNMEMELVNCKNGKEELASCANSNIRFYQVVKRAVVDEDHLREESESCWKECEPDTAAMLSAAAFFFARKINAEVKIPVGIINCSWGGTSISAWMSEEQLNKSVAGKRFIDDYAQRIGNKTSEQYNAEMADYFEQWRQWDERIRLRREKEPDVSCEVLNKECGECPWPQPAGKTSPYCPANLHTAMIRRTAPFAMKGFIYYQGEEDDLRAADYREMMYYLVKQWRGDWNDNNLPFLFVQLTMYASRQEIDSGNPPRHWCLLRESQYLASLDIANSGLAVIIDCGELDNIHPFD

SEQ ID NO: 94089 - protein, 128 aa, Unknown
  Obtained from environmental sample
  misc_feature (1)..(128): Xaa is any amino acid
MAAITGKKLKKLKGGKRLNRSYGGDAFIITIIVVFGLFFAYPLIYAINNAFKPLNEIFLFPPRLWVRQPTTANFQDLFVILNKSWVTFSRYVFNTVFITAVGTVGLIFVASMGAFVVSKYRFPGSKLF

SEQ ID NO: 94090 - protein, 310 aa, Unknown
  Obtained from environmental sample
  DOMAIN (81)...(310): Binding-protein-dependent transport system inner membrane component
  misc_feature (1)..(310): Xaa is any amino acid
MSLARYAEKKKNAFFRLLRDAVQKRICYVFLAPFAIVFGLFFVAPLVISLFYSFTYYNILEPPRFIGLRNYINLLLGDDVFLKSVKNTFIMAAITGPIGYIMAFLFAWFIHELPRYVRAFVTLVFYAPSISGAVYMIWTILFSGDAYGYINGLLLNLKIVNQPVLWLSDPRFMMPVVLVVILWMSLGTGFLAFIAGLSTIDVTLYEAGLMDGIKNRWQELWYITLPNMKGMLMFGAVMAITQSFGVADVTVALAGFPSTDYAVHTVVNHLVDYGSIRFDMGYACAIATLLFLTMIVCNALIQKMLRRVGT

SEQ ID NO: 94091 - protein, 414 aa, Unknown
  Obtained from environmental sample
  misc_feature (1)..(414): Xaa is any amino acid
DRQYAQGIDTRRYRNTVPGFMFKIQGEHALYRSDPSLYAIYDRSSGATDPASVAKIKLNMIGGQSWRVAGQWIEWDFFVPEDGMYRFTIKGRQNYNRGFVSNRMVMIDGQVPCEELTAVPFTYSNKWKLTTFRDDQGDMLFPLERGQHSFRLQAAMGGMGEMLSVMEESIFRLNGMYRKILVLTGTEPDIYRDYRVETAYPDVITAMELESKILYKLVDDFIAYSGERNAQNTVPLTLARQLELFVSEPEIIPRSMNNFRQNISALGDSLLSLAQSQLDIDYIIVSAVDAKLPAVRENFFTGALHEIRSFLVSFFTDYSSLGNVYRRGDNTVEIWILAGRDQSTVLKAMIDDTFTPQTNIRVNFKLVAADALMPAVVAGTGPDAVLTVSQADPVNYAVRKAALDISQFADFRKP

SEQ ID NO: 94092 - protein, 154 aa, Unknown
  Obtained from environmental sample
  misc_feature (1)..(154): Xaa is any amino acid
MGDRLLFTSFVPPSWILKKSDQNKFLFKRGSIVLVDMGRYKEKKIPLRVIDGVVRFFTAQRQSIFSGKKQYYIKRVIALPGDEISMSNYVFKVKAAGSAYSLTEFELSEKPYQPYIPHTPELWDDSIPFSGNMDTIILGYNECFVISDDRKHTN

SEQ ID NO: 94093 - protein, 272 aa, Unknown
  Obtained from environmental sample
  misc_feature (1)..(272): Xaa is any amino acid
MTAKFVSAKNLTRQSISERYNVSSYETNTLFRLLEIHDKIEEHKDPVADCVKRLGLSEEEHLQACEEFAQRKNRLQQSIEEHHHKNEYDNTFKDNPLEDIQERVFTELRDQIKTLKAERIQTSNNDDIDNDVPVNAESIPTTSDGAGDEDDYYKPTVDVGKKIEKIKKQAAEEIQIIEDLEKLREQARHAQKYTYGWFKTLLELESLNSGEDNANSREISISFAKVEREKGTTRTLVLKQPNRYIPQYMEDLSNIPLELHLVDGAVPKITIE

SEQ ID NO: 94094 - protein, 168 aa, Unknown
  Obtained from environmental sample
  misc_feature (1)..(168): Xaa is any amino acid
MIKALIFDCYGTIISTGNGSVNATKIILDNLKSNIDPILFYKDWKKIHRENISNLKYFCNEKKIFINDLNILFKIYNINGNAKKNIKPMLKSLYKREFYDDVIINLKKFKKDFNIYIASNSDTKPLIHNIGKEKYLFNGIYTSEKIRAYKPSRIFFEKILKKIKFNKD

SEQ ID NO: 94095 - protein, 351 aa, Unknown
  Obtained from environmental sample
  DOMAIN (2)...(351): Beta-eliminating lyase
  misc_feature (1)..(351): Xaa is any amino acid
LDMLTDSGVNAMSENQYAAMMQADDSYAGSETFFRLEKVLSDMFGMKHFLPAHQGRACEHIISKAFVKPKSTALMNYHFTTTKSHITLMGGIVEELIGDQGLKIKSNEPFKGDIDINKLNDAIKRLGKENICFVRIEAGTNLVGGQPVSMRNLREVSKICRKEGIMFVYDASLLADNLYFIKVREPEYKDTSLNDITREIASLADIIYFSARKLGAARGGGILTSDENLYLKMRELVPLFEGFLTYGGMSVREMEAMAVGLRETLDIDVISQTPIFVEALCGELEAKGVPVVTPPGGLGCHIDAKQFCPHVPQTQYPSGALASALFIAGGVRGMERGTLSEQRNADGSERL

SEQ ID NO: 94096 - protein, 372 aa, Unknown
  Obtained from environmental sample
  DOMAIN (22)...(197): Penicillin-binding Protein dimerisation domain
  misc_feature (1)..(372): Xaa is any amino acid
MQILSGEQYRSQAQDISRRTEIIPSQRGEIYDRSYTQPIALNTDSFAVSIVPAEVPRSQIRELFAEVANILKIPVSDIEAKIPEQYYRLYQPVEIAVNVPYTLIASLAERKDSLSGVSWNSKPLRNYADLRSLSHVVGYVGDITRDELTQLYNQGYQQGDTIGKTGIERQYDVLLRGKDGRETRTVDVRGRRIAGQGTRVPPETGKNLVLTIDRQIQTLAEQALGERMGAVVVMRPNGEILALVSYPWFDPNMFTGTGRGQYNILVSDPNKPFLNRAIQSSYPPASTFKVIMTTGILAENVFPPEKTVDCPGEIDYGNRQWRCHVRKPGHGRLSLARAMAQSCDIYYWTVGRDNLGAEDIASYAKMYGFGSS

SEQ ID NO: 94097 - protein, 273 aa, Unknown
  Obtained from environmental sample
  DOMAIN (22)...(221): Electron transfer flavoprotein domain
  misc_feature (1)..(273): Xaa is any amino acid
VKILVPVKQVPESSNVKMDPATGTLIRTGVETVVNPLDLYAIETALRLKERFFQQEGEVTALSMGPPGAMRVLKETAAMGCDRCALLSDKRFSGADTWATSYTLAQGAKKLGPFDIIVAGERATDGDTAQVGPALAAWLDINVLTYVSKIIEIKGNEIAGGRIRAERLVEEGYEMLEAPLPCLITVVKEIAVPRLPTLKGKLKSKEMNIPVFSADDLGGNPLYFGLNGSPTRVAKIYTSSVSRGGRTIKVQDEDSLKLAVDALMDLLAEKGIV

SEQ ID NO: 94098 - protein, 283 aa, Unknown
  Obtained from environmental sample
  DOMAIN (1)...(193): Electron transfer flavoprotein domain
  misc_feature (1)..(283): Xaa is any amino acid
VWTLAEQHERRLKTVSFELLARGRSLADKLGVKLFSILIGPALEDACLEELILRGADEVIAVQDEELKFFSNESYSAILETLIREYEPEIILAAATSTGRTLMPYTAVKVHAGLTADCTGLDIEAKTGCLLQTRPAIGGNIMATIKTPDLRPQMATVRPRSSRPLEKDSGRKGTVTRFSLSDTLPSGKSFPRIKEPRTKVTGYRREASGFANLEEAEVIVAGGRGLKKPENFGILREIAAFLGGEVGASRDAVDRGWISFPHQVGLSGKTVSPKLYLAVGISG

SEQ ID NO: 94099 - protein, 512 aa, Unknown
  Obtained from environmental sample
  misc_feature (1)..(512): Xaa is any amino acid
ENIALGVQVFSELTGEAPGGFVPPFSNWEPSYIDILYGAGLKYAVVSNALLAEGSDKRGSGYWITESTGKSMAVFPVRSYHRRNAPQDLAEWVKGGHPNGAPRMLILKYMYSLEFSESDAVDGTVGGKRQKSRRADGNQSDDPQRAWLERSAAEIDKRILELQPMRFKDVVGDVTPLGLHYFPSGLVPPGDGPVTPYFLNYLHCHDQISVMQRKLMDAGDNVAALKDARTAARLKRDLFFAQDINRFLPNKEAGFVFMPDRLWTYGRLIDIEGELYERRGTSGGVIRLSEFLRNGNKSVVMANRALKLYIDHKNGGQVYELDYIERSFNACAAYNPVIRQSPEAVDPQESRLAFSDKIFIGQPTYDDYKNGNVADCGNFSCLPMEYTFKGSPGGVRILLNAAGGFTQEGRRNPLTIDKFISLEKDSPVLSYSYKLGNPTTVPYVFTFAIEFPLSLPGVPAQQAELKAGKQKFDINIDAPITVDDVTEWEINDEEAGVRIEFVTQKKVNVWLF

SEQ ID NO: 94100 - protein, 297 aa, Unknown
  Obtained from environmental sample
  misc_feature (1)..(297): Xaa is any amino acid
MPWNIYRLCRLLSALPIKLKSGDAVNDLGAGPLTLASSLWISRSDVREVPLEIRCLDKTASVLEAGKKFFAALTSGSGCSWTVKTIRGEIRGFGRQRGGALSVEIRGKPAALSAAANIYNELFWDFSPMDKEGLERFTQSQARLLSSLTESSGSVLVVEPGIPRSGEFVSLLRSSLIKEKRLPLSPCPHSGLCPLSGGRPASGGLQPKAKWCHFALDTEDAPEELHRLSAALKLPKERAVLSFILAGTAAEQKPVKLGARSEHTERVKARIISDSFPISADSPAARGYKNNTWGRYA

SEQ ID NO: 94101 - protein, 365 aa, Unknown
  Obtained from environmental sample
  DOMAIN (196)...(356): Transposase DDE domain
  misc_feature (1)..(365): Xaa is any amino acid
MKSISKIIAGAQALLGIDFELQSCFEESLTDDQKTFLQIIRVIEEMMPLAIRSKARTGRPPYPLKPFIRPLFAKNIFQTEKTKTLRERLVSEPNLRLLCGFEKVPSESAFSRVFTFLSKKDILEETHTAIVKKAHEGKVVYHVCRDSSAIAGREKAAKTAKKDKKLPKKRGRPGKNEIKPVKEPAVVEKQARQDAATSLGELDKACSWGCKMNSQGHGYTWKGYKLHLDVSDLGFPLTAVVTAANVHDSQLAIPMEKLTESKVVFCYSLMDSGYDAQAIDAFIRSCGRIPIIDPNKRNDKNRPPLDPAKQERYKIRTTVERSYSHLKDHLLPKNIFVKGHEKVSLVLMSAVICLSVLKHLQYFVC

SEQ ID NO: 94102 - protein, 396 aa, Unknown
  Obtained from environmental sample
  DOMAIN (1)...(351): Hsp70 protein
  misc_feature (1)..(396): Xaa is any amino acid
MALQRLKDAAEKAKIDLSAATSTNINLPFITADASGPKHLDLTLTRAKFDQLTSFLVEKTLGPCKKALADAKLKASDINEVILVGGSIRIPAVQEAVKNLFGKEPHKGVNPDEVVAIGAAIQGGVLSGDSSLKDVVLLDVTPLSLGIETLGGVMTKLIDRNTTIPIRKSQVFSTADDNQSAVTIHVLQGEREFARDNRTLGRFDLTGIPPKPRGLPQIEVSFDIDANGIVHVSAKDKETGKEQSIKIQSSSGLSEDEINKMVKDAEANAEKDRKSRELVDAKNQAEQVVYQVEKTLKENDGKLPADAVSQANAAVADLKAVAEKATSKEEIQSAMDKAQGVLGQILQAAQMGGAPGGQHQHGENCEGSCGDDCKNKSEKGKEGPVDADFEVVNEKK

SEQ ID NO: 94103 - protein, 98 aa, Unknown
  Obtained from environmental sample
  DOMAIN (5)...(67): DnaJ domain
  misc_feature (1)..(98): Xaa is any amino acid
MAKRDYYEVLGVPKDASADDIKRAYKKLAIKYHPDKNPGDKEAEAKFKEAAEAYDVLSDSQKKAQYDRFGHEGLNSGGFGGGFSSGGFSFEDIFSHFG

SEQ ID NO: 94104 - protein, 319 aa, Unknown
  Obtained from environmental sample
  DOMAIN (1)...(319): Protein of unknown function DUF111
  misc_feature (1)..(319): Xaa is any amino acid
EHHHEHHNHSDYHGIEHLMEHLKISDSVKKNVLEVYKIIAEAESHVHGVPVDKIHFHEVGEMDAVADITGVCMLMEELAPELVLASPINVGSGQVRCAHGILPVPAPATSLILQGIPIYNDDIKSELCTPTGAALLKYFAKEFCKMPMLTVSKLGYGMGKKDFEKANCLRAYMGNTSDKSEEIIELACNLDDITPEAVAYAQQLLFKEGALDVYITPTIMKKGRPGLLFTCICNAESKDKMLSLIFKHTSTLGVREHICHRHTLQREQKEVQTKFGPVRIKTSSGYGTTKSKPEYEDIAKIAQEKGISIREVLEGLEEL

SEQ ID NO: 94105 - protein, 136 aa, Unknown
  Obtained from environmental sample
  DOMAIN (2)...(135): Methylenetetrahydrofolate reductase
  misc_feature (1)..(136): Xaa is any amino acid
MKISDILNTGEITVSCELFPPKHGSGLAGAQNIVRKTAGLRPSFISVTYSAGGGSSDQTADLAAEVQKHGVPALAHLTCVSSDRRMIRDILSKLAEDGIENILALRGDIPNGHPFPTDEQYHHACDLMKEIQSVGG

SEQ ID NO: 94106 - protein, 702 aa, Unknown
  Obtained from environmental sample
  DOMAIN (599)...(702): Anticodon-binding domain
  misc_feature (1)..(702): Xaa is any amino acid
GFGWDCHGLPIETLIEEELKLNSKTDIEKYGVAKFNEACRASVLRYVKEWRQTITRLGRWVDFDNDYKTMNSDYMESIWWVMKSLWEKGLLYEGHYILPYCPRCSTVLSNHELNLGGYKDVNDPAITVRFKVLDASIPANTYLLAWTTTPWTLPSNLALTLGADIDYVLIEDKAEHYILAEARLSAYYKNDTEYKIVWRKKGAELKGIQYEPLFPYFKDAPNAFRTFLGDFVTTEDGTGIVHTAPGFGEDDARVLKGTGIPVICPVDEECKFTAEVSDYAGLFVKDADKAIMERLKAEGKLVKRDQILHSYPHCWRCKSPLIYRAVGSWFVNVEKIKQDMLDANSQIYWVPEHIKEGRFGKWLEGARDWAISRNRYWGNPIPIWRCPDCGKIICVGSRAELKELSGVYPEDLHKHFVDDITIPCSCGAKMKRVPEVLDCWFESGAMTYAQNHYPFENKEFFDSHFPSDFISEGLDQTRGWFYTLTVLAAALLKKPAFKNCIVSGLVLASDGKKMSKSLRNYTDPAEVIDTFGADALRLFLVHSAVVKADDLRFSDEGVRDIMKSIIIPLWNAYSFFVTYANIDKVTAKGASENPVNPLDQWILSETQTLVEKTGGALDAYDLSRAVDPILRFIDLLNNWYIRRSRRRFWRSENDSDKLEAYGALYEALKTLILVSAPFMPFTTDAIWQNLRQESDPESLHLA

SEQ ID NO: 94107 - protein, 419 aa, Unknown
  Obtained from environmental sample
  DOMAIN (11)...(417): Ribonucleotide reductase, barrel domain
  misc_feature (1)..(419): Xaa is any amino acid
MSAGRGGDGMLSACFVLPIEDSIDGIFSTVKATAMIQKAGGGTGFSFDRLRPTGDYIKSSGGTTSGPISFWRVLSEATNAIQQGAFRRGANMGMMSITHPDIITFIFAKQDLKAFTNFNISVKMPDLWMQAYKENPDGVHEVYNPRTKKGYVIPKQLIPGKYDISKLFKLEDYNALPEIERPEVWTKREVFRVIVDCAWQTGEPGLIFIDAINRANPTPNIGEIEATNPCGEQPLLPYEACNLGSINVSAFVYKDDDGKVEVMREAFVETIRLATRFLDNIIDVNKYPIPEIDTMCKGNRKIGLGIMGFADTLYRQEVPYNSEQGISLGERIMQVINEESHNASEILASERGKFPNWAGSVWDTVQKRPMRNSATTTVAPTGTVSIIAHCSGGIEPMFSLAFFRNVLDGQRLVEINPVF

SEQ ID NO: 94108 - protein, 300 aa, Unknown
  Obtained from environmental sample
  DOMAIN (1)...(129): GTP1/OBG
  misc_feature (1)..(300): Xaa is any amino acid
VPLGGPDGGDGGKGGSVYLRANEQYTTLLDMGNAYRYVAEAGASGETANRTGRGGKDVYVDVPRGTVVRDGEGRILTDLTEAGSVWLAAQGGAGGLGNTRFATAANRAPKQRTSGKPGEKRILSLELKLMADVGLVGFPNAGKSSLVRKISSAKPKVADYPFTTLEPVLGIVQSKNRSFVVADIPGLIEGASEGRGLGHRFLKHIERTRALLFVIDGFEEKAWKSYCTLKKELEAFHPKLLEKKFVVALNKSDLDISKAKKEFAKHKQKVIETCALSGDGCPALTAALSDIVFEGQAKKW

SEQ ID NO: 94109 - protein, 661 aa, Unknown
  Obtained from environmental sample
  DOMAIN (328)...(397): HAMP domain
  misc_feature (1)..(661): Xaa is any amino acid
MKENQNDKVRLSIGTKLITIISIIVILSLGSITALVSWMVREDLKIAAEENNFEANRRAAEEAEEMLSNMRAASGQLMYTINTVNSLQTSASRQAVSQQAVSLQSTADFFFTQNPRAAAFTYTLKDAQQAASQQAAARNVLVNKDYFLSRDIDQSLAETFFNDNENFLLRASQGETALLNAAPVFSMPVLALFFPYRMAGGQNGAGCVLITSEKLVDSFGSGTNQSFLINDKCDLLIHSDSVLLLNGVNVADFDFIREIQASGERNKQQLINAYFNFEPPLEPNSSKTSPVPRYYSAFTKLAYGGCIVITGIEYDRVFEGINATTRRNIYLTAAVLFISVMFIWFFSKTISIPLKTLALAARNIEGGQFKQQFEIKGRDEIGLLGASFHKMSGALNIFGRFTNREIAVKAMRGEIKPGGLHKHATIFFSDIRGFTALSENFTKTFGDKASDKIVFWLNNYLTSMVECVEKTGGVVDKFIGDAVMAHWGTAYTAGSPGKDAFNCVKAALMMRHALITLNKNRAENDPGDPPIRIGCGINSGIVTAGQIGSDLRMEYTVIGDPVNLASRVEALTKPLATDILITEDTFNLIGDSLITEEMPPVTVKGKVKPVRLFAVVNFVEAKGGPRTIAEVRKLLGVEAPELSNVDLDAEEKKYKIGGEQK

SEQ ID NO: 94110 - protein, 260 aa, Unknown
  Obtained from environmental sample
  DOMAIN (12)...(260): Aldo/keto reductase family
  misc_feature (1)..(260): Xaa is any amino acid
MIETNKVPVIKLASGRVIPSIGMGTFGSDRYSPKEVSAAVSGAIRFGYRFFDCASVYGNEDLIGKVFEEAIQTGSVKREELFITSKVWNDMHGPGKVMTSINKTLADLRLSYVDAYFVHWPFPNYHSPGCDGDSRNPDSVPFSADRFMATWEQMEEIYNRGLTRHLGMSNMTIPKLEAVLPRCKIKPELIEMEQHPSFQQQALFGYCKKNNITVIGYCPIGSPNRPERDKAPGDVFLWPGAKGWEDLRDLDGKIDTKYNI

SEQ ID NO: 94111 - protein, 248 aa, Unknown
  Obtained from environmental sample
  misc_feature (1)..(248): Xaa is any amino acid
MKENDESSHSRLPRGNFFPFWDDQTEYKDFLYVDGSSNLADDANPGTKDKPFKTINAAARIAKPGTKIIIKGGEYRETVKPARGGDNEKAMICYEAAEGENVVIKASVVVTNFKPSTDWCFRERFSDEPVPKGMAVWEIDINPDDFKGYNPFCAVNIIHDRLFIEYEKTDMTTYLNRRGMVFIDGKPLKQVPLCSHISKKDGAYWVESNGQKIHVRLPDDASPFDHKVEITNREQCFAPDTPFLSYIH

SEQ ID NO: 94112 - protein, 338 aa, Unknown
  Obtained from environmental sample
  misc_feature (1)..(338): Xaa is any amino acid
VLAVLDKYTAWIDKTFRKSNGLYRVPLAVTGISNSPREGTYYSLDFNAMMAINALYLSAMADILNDKDSSFQYKKQYFALKTRINALMWDPQDGFYHDIDRNEKRLPVKTIAGYWPLLAEIPNDEKAEKIIAKLSDPNYFGAPHPFPSLSLSEKSFDENGRGYHGSVYPHLTFMVIKGLERYQRWDLARECAIRHLYFMLDSMSPDGNHHRGNLWEAYLPTKEGPAKWPGKPDFPRAQYLSYDALSTICLTIENIVGLFISLPRKTVDWVIPNLEIMGIENLSLKKNMITILSHRSGRGWEIHMESEKLYYFTINILGKKKKTLPIPSGKCSMLIDKL

SEQ ID NO: 94113 - protein, 341 aa, Unknown
  Obtained from environmental sample
  DOMAIN (51)...(197): ATPase family associated with various cellular activities (AAA)
  misc_feature (1)..(341): Xaa is any amino acid
MAATNFDGTVVMDGVIGTDGRNEEGGHYFGSSPSIESVKSDVNSVAATDSAVLILGETGTGKSVLARKIHDCSSRSGKAFVDISCSALRGELLKSEVLGHARGSFTGAVNDRVGLVEAANGGTLFLDEVGDMPSEVQSLLLKVVEEKTFRRVGENRQRKSDFRLICATNRNLRIAVTAGTFREDLFYRINTFHITLPSLRNRREDIPGLVEHLLRKMGYTAPVSAETMEQLMLYPWPGNIRQLQNGLERALIYANGEPLAPKHFADILSPKDTPPSFSVDEEAEVGADDQALAGWNLSDIERVHVLRALERFGGDKMMASEALGISLSTLYRKLDKFWGKG

SEQ ID NO: 94114 - protein, 408 aa, Unknown
  Obtained from environmental sample
  DOMAIN (140)...(284): Carbohydrate binding domain
  misc_feature (1)..(408): Xaa is any amino acid
AFSEWVKMTAKKGDQSPAQYIYDKTYESKFLAEAESGNGWFEASFLKFSRTGNCGVVVPAGSYTLDLGLTPSNGGTVKKEPSASYYSSGSTVKVTATAASGWKFSSWDGDASGSDNPLTVTMNKNKVITAKFIPIIDPDKNLVTNGTFTSTSGWEFNKGSDYGNSEGTFSASSNKANLNITAIGKDPWNPQLVQNGITLVQGMTYRLTFDASADKSRKIVVMIQMASSPWTTYFEEEVDLTTTSKTFTYDFTMEEASDENGRFGFNLGQATGTVTISNVKLNYVDDSSGSSSSKAGSSSSKAGSSSSKVGSSSSKAGSSSSKAGSSSSKAGSSSSSSSNGATPIIQPQDKVLHIEINSPSVVEIYDLRGNKVERIEVSSASQTIKLSLPNGVYFAKVQGRKSFRFVLK

SEQ ID NO: 94115 - protein, 265 aa, Unknown
  Obtained from environmental sample
  misc_feature (1)..(265): Xaa is any amino acid
MKTLDLGLASDDELTQALDKAGEIELINKEDNLPAAVVPSGAVYADAVYAEWADAGQETAGASRENAYLLQSRRLARLAEEEFAVGNYDTSASFADEAARLARQSDVYVAIVSAKRCLDQAVASGASTRFPREYKEAENWYEQSSKARDNEEWDIAIDAANMVTQLLENPGASGSNPPVPGVLPATYTVRSWFESKDCFWNIAGLAGVYGNPYLWTTLYNANKLKLPDPNNPDTLEPGTVLDIPSIKGEVRQGAWESGKAYEPIR

SEQ ID NO: 94116 - protein, 267 aa, Unknown
  Obtained from environmental sample
  DOMAIN (97)...(126): Helix-hairpin-helix motif
  misc_feature (1)..(267): Xaa is any amino acid
MEIAEFKKIVLSNYQQQGRKFPWHFADPWGVMVSEFMLQQTRTERVIPYWENWMKLWPQPKALADASMENALRAWSGLGYNRRCRYLKESAAIIANDYDNKVPETPQALLSLPGVGPYMSSAIACFAYNYPTVFIETNIRSAVIHCFFPERNDVKDSEIIPILEAALNRSEPRTWHYALMDYGAFLKKTTANPSRRSAHYTRQSPFNGSFRQARGKVIKALVSMGQCGAEELKLASGLEEEKLYEVLEKLKEESFVAEDGGVYRIGS

SEQ ID NO: 94117 - protein, 298 aa, Unknown
  Obtained from environmental sample
  misc_feature (1)..(298): Xaa is any amino acid
NYPITISIFHETGGHPQPSANNPIYQYLNDKFNVTFTWDILVGDIAQKRGTMIAGGQYPDIMELRGNEWIDAGALIPLEDLIEKHGPRIKALYKDVWDKMKSSDGHIYYLVNYGVIQGLDQSPDYNGAAFWVQKAVLKDAGYPKIVTIDEYFDMIEAYYRKNPTINGQPTIPFTVVTHDWRAFELWNPPNFLAGNPNEGNGIVDPKNNFKYTTFFTMDMSKRWFKKFNEMNAKGLVDRTAFTDNYDQYSAKISSGRVLGQSVQGWQFMYAADGANRDRGETSAPSLLSGSIDSLYTAL

SEQ ID NO: 94118 - protein, 437 aa, Unknown
  Obtained from environmental sample
  DOMAIN (1)...(437): Formate--tetrahydrofolate ligase
  misc_feature (1)..(437): Xaa is any amino acid
LLPDIEIAKQAAANMLKITEVAEKLGILPDDLEPYGHYKAKISETLFAKVADRKDGKLILVTAVNPTPAGEGKTTVSTGLAQALTKIGKNAVLALREPSLGPVFGVKGGAAGGGYSQVLPMEDINLHFTGDMHAVTAANNLLCAILDNHLFHGNKLQIDQRRIMIDRCMDINDRALRNCVIGIGKKGDGIPRQDCFRITVASEVMAILCLASDLSDLKSRLGKILVAYSHDGKPVFARDLQAQGAMTTLLKDAINPNLVQTIERTPAIIHGGPFANIAHGCNSVRATKLALKLGDYCVTEAGFGSDLGAEKFFDIKCRCAGLKPSCAVIVATARALKYNGGVPKTELNHENIDALKKGAENLKVHIENIRKFGVPAVVAVNRFHTDTQAEIAAIQDICAETGVPAPLAEVFAKGGEGGIELAQTVCETIEKQDGAKT

SEQ ID NO: 94119 - protein, 245 aa, Unknown
  Obtained from environmental sample
  DOMAIN (33)...(217): ABC transporter
  misc_feature (1)..(245): Xaa is any amino acid
MNEENHILAVVDLHKRFGLKEVVRGVNFSMCNGEVAGLLGPNGAGKTTIFYMIVGFYRPSEGIVTMDEVDITTKPMYQRARLGIAYLPQEKSIFRKLTVEQNIMAILESRKDIDKKAKIERLDALLEEFDITRLRKQLGYTLSGGESRRTEIARALATEPKFLLLDEPFAGIDPIAVYEIKQIVRQLAKKGIGILITDHNVRDTLEITNEAFIIADGNIFARGDKDVILNNEMVRKVYLGSEFRM

SEQ ID NO: 94120 - protein, 329 aa, Unknown
  Obtained from environmental sample
  misc_feature (1)..(329): Xaa is any amino acid
MTRKILRILTIIIFIVCIPGIAALILLPSPWEAKKSRTEQQARVVIPRSLLTNTDENDNSAEYLAREDSMYSKVPLEDGEVLVTVMSGLFDGGPLEKQFVAYRNLLEIDSPIYVTFIDYNEMSRSYERTWSAKTAASRPGTVSLSTLDLVGDKSLCLLIGGMNAQGQHTLTIFRKIPPPQNTGHEAAEAEPFRKIAEFSIEGTITVKETERGLAYQSGQSSGVSFTISAFGRDYDSSNILDQVEITYVYNPGTGLYEQTKTSRIPGSQVEQRRVRELLGSRQVFEEFITGLWYYITPQGKINKNQYIYFSPSLAGIIFYGDEILQVFNW

SEQ ID NO: 94121 - protein, 276 aa, Unknown
  Obtained from environmental sample
  DOMAIN (1)...(276): TraG/TraD family
  misc_feature (1)..(276): Xaa is any amino acid
MIADILTSPADGKVDGSSRHWVDTAKDLLTGVILHVKFSNMSDKSLYGCLEFLSQAAAGNDKGAAMLDSMINAIHCDAKIHEIIANVARRNKSRPDDERGSVFSTAVTALQVFEDPMVRNCSSSSDFCLNDFKVFENPISLYVTVPFPDLDRLSSFLRIIVTFILRKFSQDEVQFGEQKLKHPILFLIDEFPTLGTFTTLEIMMGILAGYGITFYLICQSPSQIYKLYGEHTAIFDHCKFMMTYAMSDPKGAEMFSKITGTESVTFANVSNSGNKH

SEQ ID NO: 94122 - protein, 312 aa, Unknown
  Obtained from environmental sample
  DOMAIN (11)...(297): Type II/IV secretion system protein
  misc_feature (1)..(312): Xaa is any amino acid
MMINSGEETKKRELDNIRFNLRQLEGLFNDPQLTDIFCSKEGNISFKKFGRDIENSGIILPVSQRFQLLNQIAKYMELNINFFEYPVLEGTIPVPEWKNSRITAIFPPWIEAPSFTIRKPPEKIYTLEDYVANRQLTPDRYEIIVRNIKENKNIIVSGGTGSGKTTLVNAIIKKKCEFYPHHRYYIVQDVSELRCEGEYADMPVIRSEQATLAVLLSLRYTPNFIIFGEVRKGAVMAELLDAWNTGHPGGVTTIHANSSAATITRIRKLLLDHYPNESSLPDLNEYIDVIIYIQKNRKMGIVIDEILEMSKK

SEQ ID NO: 94123 - protein, 510 aa, Unknown
  Obtained from environmental sample
  misc_feature (1)..(510): Xaa is any amino acid
LLNGILIPGHRFVPFANPVVLQNRYEIYWKGALVPMTTTEAPPQDLYPYYCIFGEEFAPQYIARENPKNEEAFNADPYEDPPEVSIHTLDMRAIYRESSFVPGDRFLVRITDWCQCRFELEKIGKDEWSRADLHKWAETAESGFEKSFALLGPGMGTEEQISFAYWYGGKRMREVPAYSLEEFIYEKTDIIETVPYGIETRFWYAGKDIPDFKNLQNYTVPPDRTFIEELLFQKNIPISEYVILSYIKDAFFRNEKTIEEVINRIIPPVVPVEEIEWDYFADYLSDRMDDFQKSYSLFLDRAIGPIRQRVAELHTAVIDLSARLQKGEIEAAWLPRHTFIVLSQIQGHAAALLEDLVFDDSPLESDIVAMDNSLDNMVETYGDIKELINNAMDNFRRSNLTVIHGGSKTGPLYRMIQISISGLDVWRRAIITHEYTMAQLHNLIQISMGWKGQLDYHFYCETSEGGKDYLRDTIKLGEIDFHGKKEINYEYGTKWLIRIMIMSSYQPANN

SEQ ID NO: 94124 - protein, 732 aa, Unknown
  Obtained from environmental sample
  misc_feature (1)..(732): Xaa is any amino acid
MYTACKKKKEPFEIPRDENGLITLITSELSYNYDDNDDYIYRLERTPVKDKINPIDENPIKLPFTTNAHKKYLDDPLTFVNLPDGGIPQGPTAVVGSDVCLFYPIETVSIMEDLKKLPAGERIPFSTIIPLGKELKCSNSKHYANVFEFQGNYNYFYQTTWNGKQGIVFGADLYHVWEDISTSNEENRVNSILYKDNGFFKSFYSVTGYDAIREDIQNELKTNGLSFQEVKKSEYRLSFDYPDDMISLYIKIDDGSVVMSNVKVTPVFITTDLAAHSNHLVFDRLLQYCEEEYFFPQLHTLINEYIKTIEQKKGEIPDTVYNTSMLYFLTAKALLALAPKKVENEENYRKTIVYNDVNAEEVLSKYPQQVVKEIEQMNAQRFDSSAVFPGMKEDYSQYKVRGHYTKNGVLGAYFRALIWFGRINFNLGGENDSAKNAAEKLAPTALFITDITENSQQIKKLWQSLFDPITELIGVSDDISFYELAPLWNKIKGAGFSQWYNNPDKLKNFISKEYKELRAPSISGSSLFQGVHDGGNEAKDRLPPAGWRLFGQRYTLDSEIHHYASPPRFIIPKASANDQRHMVKGLDIMKVFGSKTADRLLKESDYPKYAGLERVMNSLQQNMTSIKDDYWFSTYYTNILYQIRTQALFENGTGFYFTEKPNWNLKAMNSAHGTWAELRHDTILYVKQVYSEYAGGGYSPSYRIKPLPKPIHYIEPNVPFWNTSAVGIQKLY

SEQ ID NO: 94125 - protein, 136 aa, Unknown
  Obtained from environmental sample
  misc_feature (1)..(136): Xaa is any amino acid
LLVFSAYAQLLSGSNIPAIKVGNVGISPGKIDSLTKQLAQVQAPGQNLPPETMTQLRWAVIDNLVGQELLKAEITKQGLKADAKKTDSLIALFKKQFPSEAVFKQELKKSGSTEVEFKQKIENQLLADQILEKKVP

SEQ ID NO: 94126 - protein, 179 aa, Unknown
  Obtained from environmental sample
  misc_feature (1)..(179): Xaa is any amino acid
VHDGSRGGSFLATPEAKDVGIEFNSLSKSYNLTGLRISFALGNRHIIEAFRKLRTNIDYGLSALDHAAAVAALTGPQDTVAQNRLAYRQRRDAFCAMLSKNGWNVPMTPATMFTWFPMPVKNMSSEAFCMDLLEKAGVICVPGSSFGEGGEGWLRFALIQPPERLEEAARRIGEYLKKQ

SEQ ID NO: 94127 - protein, 418 aa, Unknown
  Obtained from environmental sample
  DOMAIN (234)...(348): Response regulator receiver domain
  misc_feature (1)..(418): Xaa is any amino acid
MNAVIGISELAMREKDVPQSTYNLLVTIRQAGLNLLSIINDILDFSKIESGMMKIVPANYHFPSLIKDVVNIIGIKAANSMLDFQVSVDRQIPDTLFGDEVRIRQIFLNVLSNAVKYTTEGFVALTVTGRQTDENTVVIIIEVADSGRGIAQEDMGMLFDDFVQLDVAKNKGIEGTGLGLAITHRLVKAMNGDITVQSEYGKGSVFTVTLPQGISVREDFVAEAAAKAFIAPTARVLIVDDVRTNIQVAQGLLSFYEMAIDICMSGQEAIEAVKVHNYDLVFMDHMMPEMDGVEATRHIRELPAGRDLPIIALTANAVSGMREMFLQNGFDDFLSKPIDTAKLNSILEKWLPQEKQVEAALEDDGGESAPDIRHDRATFSLRGVDTDMGISRTGGSQENYLLTLSIFRDDAMAKAGEM

SEQ ID NO: 94128 - protein, 449 aa, Unknown
  Obtained from environmental sample
  DOMAIN (95)...(310): Xylose isomerase-like TIM barrel
  misc_feature (1)..(449): Xaa is any amino acid
MAEYYTGEKEYFPKIKKIKFEGPKSDNPLAFKYYDPEKKIGKKKMKDHLRFAVAYWHSFCADGTDPFGAATHAHPWVSDAKNPMEAAEHKMDAAFEFFSKLGADLYCFHDRDIAPEGANPAESEKNLFALVAKAKKLQKATGVKLLWGTANLFSHPRFMNGAATNPEFPVVALAATQVKAAIDATIELGGQGYTFWGGREGYMSLINTDLKKEKDHLAKFLAMARDYGRKQGFKGSFYIEPKPMEPTKHQYDFDTETVIGFLRHYGLDKDFRLNIEANHAELAGHDFVHELETAAAAGLFGSVDANRGEPRNGWDTDQFPMDYAETAKAMFTILKAGGFTTGGLNFDAKIRRNSVDPEDLFIAHIGGMDAFAVGLIVAQKIIDDGKIPAFIKKRYASFNSGDGAKFDKGQMTFEELAALGAKAGYGKTGITSGKQEYLESVLNQYLLGL

SEQ ID NO: 94129 - protein, 407 aa, Unknown
  Obtained from environmental sample
  misc_feature (1)..(407): Xaa is any amino acid
VKKLEVESIINALREGGDVASRLECFEPRQAQLDLMELVIKCFNENAIGAAEAGTGVGKSFAYLLPAMHFAVETGERVVVSTATITLQQQLFSKDIPLVKDAIKAKVKAVLVKGRGNYLCYRRLLDSLREPELTGSDEQEQLEDISRWAETSKGGGREELAFVPLEPVWSRVCSDAELCMGKACPEQGRCFVLALRREAAAARILVVNHHLLFADLAARRGGAGYESAAVLPPYSRVVIDEAHTIEKAATSFFSGEFSRIGILHYAGRLYRKRRAKKLGLLVRFCSLLGEGDDSLQTLVALLDDIRKAAGDLDRPGLELCASDGVFRFSPAGRGADGAESALFPPLLALRKKLLAFTARVREIIELLPENDTDDESSTEDPSVWELKAILRRFDGIADICSAFTGYR

SEQ ID NO: 94130 - protein, 283 aa, Unknown
  Obtained from environmental sample
  DOMAIN (1)...(134): FGGY family of carbohydrate kinases, N-terminal domain
  misc_feature (1)..(283): Xaa is any amino acid
IDPNLERELYMESGQTFALGALPRLLWVKNKLPDVYNKISRIGMFNDWIIFKLSGILAVEPSNGSTTGLFDLKTRTWDKSIALRCGLRDDIFPDVIECGTVAAKVSKTGAEQTGLLEGTPLVVGGGDCQLGTVGVGVVDTNEAVVFGGSFWQYEYNTDTGLCSPKCDVRVNCHAIDNLWQYEALAFNPGLVMRWYRDAFCAEEKRLAAEQHADPYALMDKAAANIPAGSYGMICTFSDVMNYINWKHAAPGFLNFELNPEKYNKFTFYRAIMENTALVTLGHL

SEQ ID NO: 94131 - protein, 352 aa, Unknown
  Obtained from environmental sample
  DOMAIN (52)...(88): Sigma-70 factor, region 1.2
  misc_feature (1)..(352): Xaa is any amino acid
MANNFDSMLVGGEEKGEELLVHSSREAPWPVKKGQKNRGPKDPHKTKNIKEADPLGLYFKQISKYPLLTVQDEQAIGEGIVKLRRQIADLEASYENRRKGVTFQTKRKALEDSLLDYKNRMIKSNLRLVVSIAKNYQHRGLSLLDLIDEGNIGLIEAVERFDYTRGCRFSTYGTWWIRQAIIKSIADKGRVIRIPIHMLNTIKKCYFAAKQLTQDLGRDPSNEELSEQLGLPVSKVKEIVKLSQETTSLDTIVDKGNLTRLADLIKDDNLTEPFEAVFSMTIQETIGDILSSLSEREMKIIQLRFGLTGESPMTLEETGKLLGITRERVRQIQEKATFKLRGLRELRELKDA

SEQ ID NO: 94132 - protein, 171 aa, Unknown
  Obtained from environmental sample
  DOMAIN (7)...(167): Outer membrane protein (OmpH-like)
  misc_feature (1)..(171): Xaa is any amino acid
MKKRILIFILLIVSSFLYAQQLTRIAVVDMPKVYTAYFKDSRAVRQFEEKSAKVQSDIDKMTKEIQDLKSRHADALLRDDQSEVLRLDNLIYRRSEYLREFYQTRTAELENEKKKLMQSGSFLDQVYDEIRYIAESEGYSMVMEKNNNILWFSNTIDITDKLITNLQKKQR

SEQ ID NO: 94133 - protein, 130 aa, Unknown
  Obtained from environmental sample
  DOMAIN (11)...(118): MutS domain I
  misc_feature (1)..(130): Xaa is any amino acid
MDTSGRPQQSSPMLEQYRRIKGEQKGNILFFRLGDFYEMFAQDAIEVSALLNLTLTSRNGLPMCGVPYHAARTYIARLLRLGKKIAICEQMTQPGKGQKVIDRDVVEVITPGTTVDEDFLDKGKLPLHLL

SEQ ID NO: 94134 - protein, 255 aa, Unknown
  Obtained from environmental sample
  misc_feature (1)..(255): Xaa is any amino acid
PDILSIATHPDSHYHYCRLAADHGVPVVICEKPLADNIREAQKIAKLAEKNSPIIITNHERRYSQDYINAKAILDEEKLGRLLAVRACLYMGKTTRLVDQLWHDGTHLADAIMFLTSSKLKHKRLWGTKLNRKSGTAWLEGELRKNKSAPHVPVIIESGAERDHLVFEIEFSCEKGRLRIGNGVFEVWESVPSPYAEKFRSLQNTGAQFNGPTGYFANMLKDAVMCAKDPKHRPRSCAKDGLRVIEYLNSVKKWR

SEQ ID NO: 94135 - protein, 54 aa, Unknown
  Obtained from environmental sample
  misc_feature (1)..(54): Xaa is any amino acid
MEMVNNINNNFTINYNNKIFRSIENTENGEAGKETVFIYRQNNEIVWAEYYGGT

SEQ ID NO: 94136 - protein, 447 aa, Unknown
  Obtained from environmental sample
  DOMAIN (221)...(447): Methyl-accepting chemotaxis protein (MCP) signaling domain
  misc_feature (1)..(447): Xaa is any amino acid
FAFFWRQGLSDTVFTGKAFTGSLDSTACSLGKYLTGDEVKKMTDPEAIALLNSIVEPHRLIHTKAGEIIENLKNGENDEAIRKLNDEIFPNTQTVISNLQDIQTRYGELLNDIITEEIATGVSSEHLIIVVIIAGIIISVLLSIFITSSIIKQISHTAEALKIIASGDLTKNINVNSNDEMGNLSRDINTTIDKIKSMIVLIKKESSNLSNIGNDLASNMTETAAAINEITSNIQSVKGRIINQSASVTETNATMEQVITNINKLNGLVENQAETISKRSAFIQTMVNNVGSVNQTLQKNIENVQNLKEASEVGRSGLQEVAADIQEIARESEGLLEINSVMENIASQTNLLSMNAAIEAAHAGEAGKGFAVVADEIRKLAESSSEQSKTIGTVLKKIAESITKITSSTDNVLARFEAIDSGIKTVAEQEEVNHHSMEEQAEGKHQL

SEQ ID NO: 94137 - protein, 94 aa, Unknown
  Obtained from environmental sample
  misc_feature (1)..(94): Xaa is any amino acid
QTIASNTKIESLFLFGSWAYGEPKPDSDLDIYLVIPDNDADICELNAEIRSALYKKLTLPLDLVIAKKSVFERRSKALTLESIIAKQGVHIYGN

SEQ ID NO: 94138 - protein, 102 aa, Unknown
  Obtained from environmental sample
  misc_feature (1)..(102): Xaa is any amino acid
MARVAEREGYPEIAEAYKRYAYEEADHASRFAELLGEVITDSTKKNLELRIEAEFGACAGKTDIAKRAKEKGLDAIHDTVHEMARDEARHCAGFKGLLKRYF

SEQ ID NO: 94139 - protein, 619 aa, Unknown
  Obtained from environmental sample
  DOMAIN (410)...(617): Methyl-accepting chemotaxis protein (MCP) signaling domain
  misc_feature (1)..(619): Xaa is any amino acid
GGYIDVLQTVSNIMNYYENLPAAERRQTYEDTMMSVFEDMPDFVRMFTVWKPDAIDGMDAENIGRVGSTPTGQFAYALARDTGEIKPLTAVVVNEVMAQITGPNARVVEMSDPAPFKNMGKDTYAVRIAVPILNKRLNEVVGAIGCQLDIGMIQPKVEQTIKDFEEVTSMVIYSDNGFVLANYLPDFIGKQIDTETQYGPYLKEVKDVIKNAQEWEGTAYDPELHTNMVMAVANIPIGVSPTTWSVMVGSTEAYILKDVNVMRNFVIVLASAALVAAVALIYLVLSRTTKPIVTVAETLKDISEGEGDLTRAITVSSKDEIGDLALYFNKTLEKIKNMIIHIKDEANGLTEIGNDLASNMTETAASVNQITANIQSIKGRVISQSASVTQTNATMEQVITNINKLNGHVENQSRNVSQASSAIEEMVANISSVTNTLVNNTANVKTLKDASEIGKTGLQEVASDIQEISRESEGLLEINSVMENIASQTNLLSMNAAIEAAHAGEAGKGFAVVADEIRKLAESSSEQSKTIGTVLKKIAESIKKITVSTDNVLTRFGAIDSGVKTVSDQEENIRNAMEEQGEGSKQILQSAGSLNELTLQVKSGSEEMLNGSQEVMKES

SEQ ID NO: 94140 - protein, 458 aa, Unknown
  Obtained from environmental sample
  DOMAIN (182)...(443): Glycosyl hydrolases family 38 N-terminal domain
  misc_feature (1)..(458): Xaa is any amino acid
MPKVEQRIGRYLNFLEKNAYRKIADLEFEMYEKEDARFRFRAVYNAPLSDNPLFLSVTPNEDTLAFIDGRPAGAFNMYHNEIRIDADGKEHTLHIESYSGGCLLERRRAIHSLFYDIRALYETAKIANPNSLRKTRIMKGLSLALNGISLNADGEELEKQAAAAAQTLAPLLALKNGPSTPAVHLVGHAHTDHAWLCNIAETGRKTARTFANMLEFIKEYPEFIFFQSQPCQLEIIKNEYPDIFAAVKEAFKNGSWEPNGGMWVEADCNIPSGESLVRQFLVGKKVNKELLDYEADTLWLPDVFGYAAALPQIMAGCRIKYFVTSRINWNDTTPFPYETFIWRGIDGTGVKTHFLSTMCPGADYNGRVVPEELAAVWNAVQHKEVQSACVKSIGEGGGGTLRADLEMARRLGDLEGTPRAAWKTVSAALAEIFDNGEFPEWRGELYLEPHGGTYTTQA

SEQ ID NO: 94141 - protein, 69 aa, Unknown
  Obtained from environmental sample
  misc_feature (1)..(69): Xaa is any amino acid
LKSRYGITPWGKWFIDVLDSYEMGERLDRGRSYANTDKVFSLEFKDGRANARVKGHYRPFYRVEIGFPP

SEQ ID NO: 94142 - protein, 501 aa, Unknown
  Obtained from environmental sample
  DOMAIN (58)...(101): SWIM zinc finger
  misc_feature (1)..(501): Xaa is any amino acid
MDFKDGQATAKVKGHYRPFYNVKITFPPLKNAERVYRMIEEDPMLLARIAAGELPENFLQKLKDKGIDLIPRKWKEMDRKCNCPDWGDPCKHMAALYYVIAREIDADPHVLFKLRGMDLADRFGKAAVHQIAPPFTITFAKKEKVTPLAEPLELAEIPNCGELISTLLPAAPPFCERDFAMVMAEFYHRFAMHQTWESAEANEAEIERLFSRSRWTVLCPDLGIGTELTLLGEDINGNKKRYSIHEAFDNFVRFSSEDGTESYTFLFYLFKFLNLVCLAGAFIPYVLVEKEKLKIIWRPFETLPLINKILEAVASRECGMLSIKTKGKKTKAEKQVSGRSVADLLASAFLNEMIRRRFLFFKEAFYKYGTGDEYRDLLFLFFQGIKIDVSSPAQRSLPVAIDRWLAPLHIHFDAYRYSLTVKAINASKVSETDLQYALSMDLLTETEDGIKSTPISQVKDLEILRAPTALSNYLPEIRELASPSTTKRGSAVPLSEERLVS

SEQ ID NO: 94143 - protein, 456 aa, Unknown
  Obtained from environmental sample
  DOMAIN (252)...(414): MatE
  misc_feature (1)..(456): Xaa is any amino acid
MNIESEIPLTVASPDWNNRRLFGLLWPLIVEQLLLVMMGLVDMMMVSYVGEHAVSGVSLVDTVNFLFITAFNALATGGSVVASQYIGRSDGKNACCSARQLVYVSIVISLVIMIFTMAACRQFLKIVYGNIADDVMNAAQIYFMVTALSYPFLALYTAAAAIFRSMGNSKITMKVAVLVNILNVAGNALFIYGMGLGVGGAALSTFIGRVIAAFILFYFLMGNRPQAINLHGISKIKFEPEMIKRILNIGIPSGLETSMFQVGKILVTRIFTVFGTAAIAANAVSGTINSLGFMPGSGYGMGLLVIAGQYIGAGDYNGAKRYTRKILIIAYITYLVINVNVFLFMDQIAAFFKLSPEAHDLCLDFLKIHCITSTLFWCFSFVLPNALKAAGDARYVMIVAASTMWLVRVCSAYIMAFPLGLGPVGVILAMGADFLFRGIFFGARWFSGKWMEKRVI

SEQ ID NO: 94144 - protein, 325 aa, Unknown
  Obtained from environmental sample
  misc_feature (1)..(325): Xaa is any amino acid
MKDGIETIEWSLSIDGNKGGIIKEKIINLSKNIPVLSYHFDGQNDIPEPLGQINIQSSALKYVAGTSNSTDEIKKLFFFLSDSTVFGLLSPDKIRSGNKQPNTRNIGAGGETLACYINKMDRPEKQQLDKMVSDLIGVRITIQTIDLGNKVELSVVFETTDDTMLINSLHISDGLLRIIAFVVISMEKKIKYLAANDGALLLTSSGKALVVSNDILKNGMVLLDEIEDGINPYMTEQIVSLLREINEKQKRQVIITTHSPVILNDFNQEEIIFLWKDKNGSAHSRKFFDTEEMKSLLEALNPGEIWINLEKEDILERLSFKEEGK

SEQ ID NO: 94145 - protein, 292 aa, Unknown
  Obtained from environmental sample
  DOMAIN (1)...(91): Phosphoglucomutase/phosphomannomutase, alpha/beta/alpha domain I
  misc_feature (1)..(292): Xaa is any amino acid
ARPTGMAIAQTMIPVLLASGCDVRFSGFTAAPEIMAWARAETNAAGFIYISASHNPVGHNGIKFGLTDGGVLPAEETNKLIVNFRSFFKKDDCIQKIEKLISAADPSSLKNVFDGETASKAEARKAYYDFCGVVAWDGGINSTCGIHSACDKEIVPVLKKSLAKRPLGVVCDFNGSARTVSIDKDFFSELGLKFKYINGKPGEIVHRIVPEGESLDPCKALLEKDHASDSSFMIGYMPDCDGDRGNLVIWDDAKSAVRALDAQEVFALACVSELAHLVRMGTELSKAAVAVN

SEQ ID NO: 94146 - protein, 304 aa, Unknown
  Obtained from environmental sample
  DOMAIN (202)...(248): Bacterial regulatory helix-turn-helix proteins, AraC family
  misc_feature (1)..(304): Xaa is any amino acid
MCPEGYVFWTSPFYSGERFAGALFSGGIQGLQKNSDKVKALAQMMLICADQISGLSFNQKNIPVLVKWQNPKNIQHAEEAKINPLLMDMERMLLASLRRGDNIHANQILSELLDVQFKELNGNFNVFKLKALEWAVLLSRTTINSNNINDDSLLETNNCYLKRIEESANFQEVKDILYSFTEQMAERIFSFQGVRHFSAIKKAERYIWENYTKKIGLREIADAAGLSASYFSSIFKDEMGENLSNYLNRLRVEKAAAMLTSTNIPISKIAAACGFEDQSWFSKIFKNNTGFTPGKYREQGNILS

SEQ ID NO: 94147 - protein, 322 aa, Unknown
  Obtained from environmental sample
  misc_feature (1)..(322): Xaa is any amino acid
MKENYEKKDDLLEKANKMMSDYNQATGSSICIYDSDYKPLFLDNIKDNNPEKIICPHCPHKDCNNLHKNSIKEAIKKGGSHIYQCNLGLVFWTSPIYTDGSFSGAIRGSGFLQEGKKDVDILLNAHNTHIVSNDKTAEETKERINSFPKADDEKIQSLAEMMQICAESLSTGSEDYHEILRRRAEQQEAIKKIIAELEKAYPENTEKPGYSLEKEKILLNTLRKGELAETRKQLNELIAVMIFSYQDQFKYMQLRTTELVVLFSRIEVGPVKNGSLSLEINNQCLKLIQEAKNTEELTDILHTVVDRILNNITSFRGIPHAA

SEQ ID NO: 94148 - protein, 415 aa, Unknown
  Obtained from environmental sample
  DOMAIN (6)...(171): Protein of unknown function DUF115
  misc_feature (1)..(415): Xaa is any amino acid
KRWVRNLSRNISAIRDYAGISRLAGLAADGAPVFLAAAGPSLDKARPYLQEIHKRCVTVAVDTSFRFFTDNGIKPDFVLVVDPQFWNSRHLDRCPCGNTALIAESAVYPPVLRLPFKNIFLCGSLFPLGSFVEKRVDPKGALGAGGSVSTTAWDFARALGSKEIWIAGLDLAFPGLKTHFRGAVFETRSNAASNRFNPAETWVVRALRDGYPFKAPCAQGGQVLTDRRLSLYAAWFENRFRQYPETKNYAVFQDGLAIAGIQPADAETLLSLPECRAETDKKLRAAFSQIDGDFNNPAEKQKRAERYAKAVTALINGLEDIKSAAEKGAGIARKALNGKADSGGQNKILKELDEIMRRITESEVKEVAGFLFPAENEIGKNENAEKDSFYAFLESSNKLFSSLAQTVEFNLKNFN

SEQ ID NO: 94149 - protein, 436 aa, Unknown
  Obtained from environmental sample
  DOMAIN (1)...(388): Major Facilitator Superfamily
  misc_feature (1)..(436): Xaa is any amino acid
MGSSLNLALPELAHAFGLDAKQLGWVTSAFLIATAIFQIPFAKIADLFGRKKVFLLGVALFGASSVACAWAWDFTSLIVFRVFSGLGSAMIFGTNLAILSSTYEARERGKAMGVLTAVVYMALAVGPFLGGILTHYFGWESVFYIPGTILVAQAISVPFLIKREWVEDSSKHFDKRGSIIYGLAVFCSIFGFSEFPNMFAYILVLAGILLFIFFYNYEKHREQPVFYVRLFGGNKIFTLASLAAFFSYAATTASFFILSLYLQFVRGFDARAAGLVLVSSAVVQSIAALLAGRLADKFEPSKIAMLGMSLNAVGLLGLVFSEMDSSIIIIVAMLLLLGMGIGLFGAPNTKVIMGSVEKKHISQASATVGTMRLSGQAFSMAIAMMSISIFIGDSPITPENFENFMQSWKFTFVFCAALCIVGAITSRACVKLPKHI

SEQ ID NO: 94150 - protein, 341 aa, Unknown
  Obtained from environmental sample
  misc_feature (1)..(341): Xaa is any amino acid
MDIFLGVILAVVIIQFIAMLSLFSKNRHSLQVEVAEFMRRLERNETALLDEFGKNKEETSKSVKDSVEELSSSLKSVSEQLPTVITNFSGLVDNKMSGIQGFVDSSLKSNREELSASLKEFEEKFSAKIEALAKDMNDGLGKTYDSVSKITDTQQGNGKKLDEIAQAMDSGLKSHHDELLESLKTLEVKSLTKIELLAKNTNDGLEKTRDSFDKKLTEIQQGNEKKLDEIMQTMDSSLKFHREGLSISLKGFEDRFSARIETIVNTVEKKLNEMGQIVGENLHATLETQLGESFKHVTEKLELVQKGLGEKQTLTNEVVNIKNVLLKTKEKLNTALSEIEM

SEQ ID NO: 94151 - protein, 282 aa, Unknown
  Obtained from environmental sample
  misc_feature (1)..(282): Xaa is any amino acid
AGVMGTDCKVVKVSGANVKMFGDIKIVFAAAFIAAAFASQGFAQASPETVSAQTESAAVRPEHSDSTAKDAAAEQAVSDGEDGDVEQASSDQRRSAGSPSRPRPMALGQPGHLDGIAAVVGDEIILRSELEAYAYMRLTATGQNPDSVDTKVLLNECLSDLIDNKVLLVRAMEDSTVNVRNDEVESTLNNHINMILRQNNITMEQLEAQLRIQQGSTIARFKSEMRRAIREQLYKQKLQQGYYFSAKINRRDVERFYARYADSLPEVGESFELLKLSLRLGT

SEQ ID NO: 94152 - protein, 402 aa, Unknown
  Obtained from environmental sample
  DOMAIN (1)...(231): EAL domain
  misc_feature (1)..(402): Xaa is any amino acid
MNFTQDNVIAYFQPIFSAETNDIYAYEVLGRYLDNDGKIKSLGPFFTNPDTSPDEALRVDRIVRKYAIKKYVEEKRKEYLFINIRLVWLLPFVENPEEMITLQLAKEFGIDPEKLVIEITEEDFNSSEEYLRAIVHYKRAGCRIALDDYGKEASNIDRLAKLQPDIIKINIDYIHNSETSYHYREYLRSIAVFADSVGIEVLYEGVETERQLDICISSKGRFYQGFLIAVPQPSMRDMVINSSVFSALIETEYKTIQSKAIYVDNVKNSLDDQVEHFLLKNPFDAEKINNDTYLVTLLHELPEVKRVYLCSRQGVQLSNNIERHLEDVIFREYKNKNWAWRGYFHESLTAFAMGKKSCLSNMYRDFMTKEQMFTYYYAISDDVFLFVDIARDTERMKAYAAG

SEQ ID NO: 94153 - protein, 319 aa, Unknown
  Obtained from environmental sample
  DOMAIN (209)...(319): Phosphoribosyl transferase domain
  misc_feature (1)..(319): Xaa is any amino acid
MKYFNPANLAVIACPGGEIFADEVIQHLRHKYHYSRKQTVEDISKRYNMSADQVDLQIELINKIVARGTASQSGIGKNSAPFKIPVKFSVFPNGEIKSEIQESIRGKDVYIFQDVENHYPVKFSGEAVNNLSINDHLMTIFVTIDAVHQAGAERITLVIPNYPYSRQHKAKGREGLTASRIGKIFESLGVDSIITLDIHSRDIMNIFNDLRLENLHASYQIIQTLINMDDILNDDFVVVSPDTGAVDRNKFYASALKKPLALIYKERDYSKLSKDATQSNISQIRLLGNVRDKTVFMADDILGTGGTLIKGMRHLKENG

SEQ ID NO: 94154 - protein, 258 aa, Unknown
  Obtained from environmental sample
  misc_feature (1)..(258): Xaa is any amino acid
LEPSCIDNEQKFDSRLPPSQSLVPLLSISNGSIVAVVGCGGKTSLIELMADRLRDKKVLVSTTTKIFPPKMKDIMLCETMRQCEEHEPQTGIQCMGLLNSASGKLEALPQAFLAELRHRYDIVLLEADGSRGLPCKGWLANEPVVPDFCTHTVGVITMSALGKKAGDSTVHRLPEFFALTGVGEGQAITAAALEAMVCAPTGMFKNSAGQCYVIVNQAEDDAATAVALSFLRAIKEKYPARFEKVLLGSVHRDAWQEV

SEQ ID NO: 94155 - protein, 423 aa, Unknown
  Obtained from environmental sample
  DOMAIN (133)...(212): Toprim domain
  misc_feature (1)..(423): Xaa is any amino acid
AEFYYQCLKSSKPAIDYFKSRGLSAETVKEFGLGYAPWSGLIDYLAGKGVPSQKIAECGLAVVKDDGTVYDRFRNRVIFPLCDLNGRVIAFAGRGLDADAQPKYLNSSESVLYKKSGVLYGLHKARDSVREQGYIIIVEGYMDYLTLYQAGVRNAAAVSGTAFTDDHAHLIKRFATKAALVFDGDRAGLSAAQRAAVILAPLGLQVSILALPGDDDPDSFVKREGADAFRELLAEARPAADFLIDKSISESDGSPYGKSRVMDELMPYARALTDEVVREDFLDNIARRLRIDKRLVSNRFAAGGNYSPSSGGAQPEEVTRGRGGALAIGKLEEDFLCMLIAAPELIASARQYLSPEILTDTLAENIYSIMLETYDRDGCLKGLLDACGEDESLANFVSKLSVKPVLLEHIEGELVQKIALCAK

SEQ ID NO: 94156 - protein, 350 aa, Unknown
  Obtained from environmental sample
  misc_feature (1)..(350): Xaa is any amino acid
MKKVILHAGELDNYLTDEDKASLKSMDALFNETLEIFPKMQEKNEEAKNTLISLYNKMGILMQEICQKNPRLHVYSFISPQEDHSEGSRLIAKLRDINTANNEFVYYIQRAYEMLFKTAWLSPGSQKNYLIVKTPVTNPVQNYAVHKIANIDNKIGNTVMCVLLRGALLPSMIMSKEIEEYSSTGYITPFALFKIYRDDSKSENDMEYILDLEKSFFNPESLDGKDLIFADPMNATGGSLVTVIKYLKDIGVKPRSITLFNVIAALKGALRIVRAVDNCNVYTLWMDGVLNDKAYIMPGLGDAGDRINGHDIGANPRNIIQLLADYGTGIANLYRSQFHEIEKIVLNRSV

SEQ ID NO: 94157 - protein, 315 aa, Unknown
  Obtained from environmental sample
  misc_feature (1)..(315): Xaa is any amino acid
TAIGGIAGTNSGSGIYIKNCYNTGTITATAAANTRAGGIAGDNLTSAVVEYCYNTGNVTGPASVGGIAGTNDTGCTVQYCVSLGARVTGTGTSSIGISRVSGTYGSGSTLTNNKARADMKVGLSGAEATATGASNNGNGADITVGSTTTQTSVFSGWTAVWSVSGNLTAGGALPTLTANTQSPAPTLPAAYSPLGSADNPFLVSNETELRKVGKETTAGGWTLSAHYKQTADINMTGGNFPVIGTTATRFTGTYDGGGYTITGFSQSYTSSNVGFFGIIGTGGTVKNMNVTGTVTNNGSSTSAIGGIAGMNEGTM

SEQ ID NO: 94158 - protein, 218 aa, Unknown
  Obtained from environmental sample
  misc_feature (1)..(218): Xaa is any amino acid
MARTSTLEITESDKIYFESLVRSRTIQAQILQRARIILLRAEGIPIDAIADKVGLNRKSVMLCIEKYKDGGAENALYDAPGRGRNPEITDDEKAWIINIACQRPYELGCAEEKWTYTRLASYINKNAEASGYTRLSSISRSSIKNILDHADAYSDLLEHPMRKHLNRSVEYLNTFPQILRTPMHQKSARMGEDSFSVVLLRIRTFKAAVSDGFPHGFA

SEQ ID NO: 94159 - protein, 232 aa, Unknown
  Obtained from environmental sample
  misc_feature (1)..(232): Xaa is any amino acid
MAENLNYQPKTGNSWCYDGDKSFCDKYGRLYDWKTATKACPAGWHLPSRNEWDILGRAAGGEKRPGEEYVAVDWYGAGKALKAKSGWIDPVDKSGNGTDDYGWAALPGGYYRYYDSSFTAAEVDGYWWTATESWNDRAHSRNMYYGNGYLSENGFHKSVGLSVRCLQDERKYTVTVLSAGADAKGGGGYVPDETITVTAGTAPGKQFRNWTTANDGVTFADAFKSTTTFIMP

SEQ ID NO: 94160 - protein, 490 aa, Unknown
  Obtained from environmental sample
  misc_feature (1)..(490): Xaa is any amino acid
MNDKQTLTAYKLRLTPAKCALDLGDGSERGEYVNQDYILNVLDKPHRGINLMYCYYPLDKGWPARASTLAEPGKAGFAWDYAYDDYFPYQGGIGAVGDNTDKEPFASMRDVRRHGQDVILTLTIDCAVSDEHLVQIAKELIPFGRLMLRINHEAAGTWFAFNKRYTYQQVADFYVRFHKIVKQHAPHIRTILCIGGALKTKSGKLDYEDEFAEAITEADMWSSDTYLSLHWGWPFDIAEPGGKSHKRSTNNDILEGLCFDFKRFAARAGKRKPFVLSEINADGDVNGPYEQAEQLTDFYRRIPKEAPDIAGITFYQFRDRGRLGLEMQDPNNSDVGIAQPILEDYKKIMTNDYYSPKMEQGEKIAFPAKLRWGSSEDSDGINIPIDFEDNPVFYEVMFTNPNDAEKLNAMMEINGKWFYKKPGVKSVDLSPAFFKNRLNGKQRLEFKLFAPPASGTNDPGQEEDWRINYYHTLNAAPEFRIRYEPAMKIG

SEQ ID NO: 94161 - protein, 464 aa, Unknown
  Obtained from environmental sample
  DOMAIN (341)...(384): S-layer homology domain
  misc_feature (1)..(464): Xaa is any amino acid
YTEAKALVNNNVLTAAALKPKVDGWVSVSVTEIVKAWVRADIQNFGFALFPLAGETQSVFADMYNNDENAPYLKVSGRVGRRPGGYGKFSFTRVPEKGRLDDTVNGNCLSYAVRDNVPVYLEDLGSSYPEVNRVLSESGEDGVAEYIGGLFEKYVEEHKAGLRVSKLRRIDDFNSSINPAKEYRIVMRLGCYAREDDPLSESARNFDFHFWSQLDDGRWSQKYGWSYSEIIPATCPGVSPGKYYWEMSKYGYLYRSKLIYYSVTKDIDEITVHRPSPFDDVELYDYLTSGVEYMFKKGFMIGTSDAPMLFSPDTALTRGMAVSSFYRMAGSPDAGRYANLFDDMDSANLYYDAVKWAAANSIVFDYSGDGKFAPDRKITREEAATLFFNYQRLSRLIPPDFLLEMEPTDADEISEWAREAAKKLMMQMIFRGSGGSFNSFIPKGEITRIEFAGMLRDYCEYSKR

SEQ ID NO: 94162 - protein, 522 aa, Unknown
  Obtained from environmental sample
  DOMAIN (356)...(442): Hpt domain
  misc_feature (1)..(522): Xaa is any amino acid
MLNDIITLVISRLGEKPVTFRLDIPDDLPNKLYGDDLRVKQILTNLLTNAVKYTRKGSIELSVRCTREAGSVWMDAAVTDTGMGIPKDEIGNLFLEYYKVAVNATRNIEGTGLGLPITKRLVEMMDGGISVESEHGKGSTFRFRIKQGFVNDVPLGAKVSEKLRTFCYSSDKRIVSKKLVRVNLSYARVLVVDDMQTNLDVASGIMRKYQMQVDVLNNGPAAIDRIREGKPVYNAIFMDHMMPGMDGIETADNIRAIGTEYARKIPIIALTANAIQGTEKIFFEHDFQAFVTKPIDVTEMDSVLRKWLYDPKREGTVLSEPAAAEEEEININIEIPGVDVNKALSLYNGDKSIYLPLLRSYITNTPETLEKLKNVTAENLPSYVISVHGLKGTSAGIGAENIRIMALELENMSRGGDLQGVLSKNGKLIAETEIIVNNVKKWLEENDVQAEKPRLTSPDKEILAKLRESCESYDMDGIEEIMNRLESAEYDENGDLIKWIREKIDISKMGEVVKRLEELKND

SEQ ID NO: 94163 - protein, 197 aa, Unknown
  Obtained from environmental sample
  misc_feature (1)..(197): Xaa is any amino acid
MTNANRMYEGFNANERRDLYANALNKSLEVFVSYSEKEFNDIMSKGLKPIAAAAGLDRITVFRIHNQEVIYSGEKYRWDRLKGGTAPIEEDLKELSLSPVLERWVSIMSDDICISLKRSGFKEDEAEFLSPHGVMSILLVPVFTEGEFWGVVVYNDITMERDFDSDCIAMLRSIARMCVSTIIRAEKTKNAKHAAET

SEQ ID NO: 94164 - protein, 265 aa, Unknown
  Obtained from environmental sample
  DOMAIN (1)...(262): TatD related DNase
  misc_feature (1)..(265): Xaa is any amino acid
MVDAHCHPFDLADCLDDAEEERRRLGVICATSATTLEEFEYCERLSSQAKQDKAAPLLPCFAVHPQMASIIKTTPNVTRYSLQDNLSVLDTLAAQGRLYAVGETGFDLYNDDFRETEKTQDELFSIHLEIALQYDLPLVIHSRRAMHKIFANSAEIKKCRAVVFHSWSGTAGEGEALLRRGMNAFFSFGAAIMLNHKEAVRCCAVFPPARLLTETDAPFQPLRGREFSRYADIAAILGAMETLRGGEKMQECIERNFNMAFGFKE

SEQ ID NO: 94165 - protein, 190 aa, Unknown
  Obtained from environmental sample
  misc_feature (1)..(190): Xaa is any amino acid
MPQPVPVQPAQPSQPTPPVKPAQPVKPVQPVKPVKERDPAVDKAARLNSLGVSVGTTFSAPWFVGTVSGTLAPSRYSFFDLGVDLGLISGLADVTYYSIYPFVHYAVFAPFKSAGGWYIGAGVGYMLSTYEVSGEIPEFMNNKEIRENIFAVDFSTGVIINNVFNISYTLRTDFQSASNKVSLGFVKRFK

SEQ ID NO: 94166 - protein, 556 aa, Unknown
  Obtained from environmental sample
  DOMAIN (1)...(169): Penicillin-binding Protein dimerisation domain
  misc_feature (1)..(556): Xaa is any amino acid
EIYDRSYTQPIALNTDSFAVSIVPAEVPREQIPELFAEVAGILKIPVSDIEAKIPAQYYRLYQPVEIAVNVPYPLIASLAERKDSLPGVSWNSKPLRNYADLRSLSHVVGYVGDITRDELTQLYNQGYQQGDTIGKTGIERQYDALLRGKDGRETRTVDVRGRRIAGQGSRVPPETGKNLVLTIDRQIQMLAEQALGERMGAIVVMRPNGEILALVSYPWFDPNMFTGGGRGQYNILVSDPNKPFLNRAIQSSYPPASTFKVIMTTGILAENVFPPEKTVDCPGEIDYGNRQWRCHIRKPGHGRLSLSRAMAQSCDIYYWTVGRDNLGAENIASYAKMYGFGSATGIDLPGEIDGFIPTPQWKSRRFHEKWLGGDTMNMAIGQGWTLVTPIQMANMVAFVVNNGKVYRPHLLKEIRDPATGAIEQIIAPELMRQSDINQKTFENVRRDMRGVISEGTAVYPLNIPKVQIAGKTGTGEVGLQDHWHSWFAAYAPYNSNKPEEQIIVSVIVEAVNQWEWWAPYASAIIFQGIFANQTYDQAVRSLGLQHLMPVQGRRE

SEQ ID NO: 94167 - protein, 270 aa, Unknown
  Obtained from environmental sample
  misc_feature (1)..(270): Xaa is any amino acid
MGEVLDKAYKRLKTSDNVSRYRQGIFKQVTALLKDDKWLEESAGKYMRILQTSREECRRKLMLMLEEIRDDLKSVDPLEDEIDRRNAAYSRSSTEIIKAYIEPDSTVAGKIGLLIKAIHGGNEEIQSQIAHGLYRIRFLSPSSLAFSQKRAEGDFITSPSKVDVEALNQTEKDFFERMKKRLSIKRINAWLDAQGGKENILIPEELITGEDSYIRFIYALLYGARDNFSYTVEEDDKEEAGSVKAADYVVPDIRFRKRLDNRVPVDGDEV

SEQ ID NO: 94168 - protein, 174 aa, Unknown
  Obtained from environmental sample
  misc_feature (1)..(174): Xaa is any amino acid
MSAEIIKVYKQDVPALRFIGKKYGDKDRVDGMFGKYWCEWHEKGWFDLIEKQADKELNSIYEDGDAYIGLMRWKEGEPFEYWIGIFMPENTSVPAGYEYHDFPKAALGVCWVYGKEPDIYMCEEDYVKKLKENGYEVIKDKENAQWFFERYGCPRFTTPDENGKVILDICYFIK

SEQ ID NO: 94169 - protein, 153 aa, Unknown
  Obtained from environmental sample
  misc_feature (1)..(153): Xaa is any amino acid
EFDNIHPFDKQTVGFRLALLALKKIYNKDIEADAPVFSWAEERGSALCLHFDNAGCGLELRSGAASSGAASSGAASSGADDIAGSFEIAAAGGKYYPAKAEIENGNVILSSDKVLYPKRARYAWYKYGPTPLYAKNGLAAMPFRTNRNESVDC

SEQ ID NO: 94170 - protein, 141 aa, Unknown
  Obtained from environmental sample
  DOMAIN (3)...(141): Tetrapyrrole (Corrin/Porphyrin) Methylases
  misc_feature (1)..(141): Xaa is any amino acid
MAVLYIIGTPIGNLSDISFRAVETLKKADLVACEDTRRTLKLLNHLEIKVKMISCRSQNEEIAAEKVITALNQGQTVAYASDAGTPALSDPGAALARMAAQAGHDVIPIPGPSAFAALLSVAGGRDKTVVFEGFCRRNPAA

SEQ ID NO: 94171 - protein, 475 aa, Unknown
  Obtained from environmental sample
  DOMAIN (190)...(468): tRNA synthetases class II core domain (F)
  misc_feature (1)..(475): Xaa is any amino acid
MTALGQEWKEKGSPEERIIELIKSAKGLRLPDIAQSLKMENKDIGSAFGNLSKLGVLAMDSEKKVVFSVPLESLDDPAKNQAAAHFALLRGLFKKINISEGGLLADALLNEDEKKIMSGLAKKRGAADAPFRQIDRETVFFGFTVLEDGSVPAAEAAQALKQAGITGDEIGILTQSMLEDGSWKGKKFRSYNVKTPPARLTPGRSNPYAKFLENVKDKLVSLGFEEFDGPLVETEFWNSDALFMPQFHSARDIHDVYSIADSSSKDGFARAKSIDEPWLSNIAGAHENGGKTGSRGWNYNFDREFTKRLILRSQGTVLSAKTLPTAKIPGKYFGIVRCFRYDRVDATHLPDFYQTEGIVLGEDVNLRTLLGMLEMFAREVAGAKEVKYVPGYFPFTEPSVEVHIKHPVLGWFELGGSGIFRPEVTESLGVNVPVAAWGIGIDRMALMALGLNDLRELFSHDIENVRLRRAKTSGA

SEQ ID NO: 94172 - protein, 280 aa, Unknown
  Obtained from environmental sample
  DOMAIN (1)...(221): Elongation factor Tu GTP binding domain
  misc_feature (1)..(280): Xaa is any amino acid
KISIHTALAHVEWNGKKINIFDTPGSSDFTGDVILAIRASEFVLLTVEGQTGVQIETIKLWRNLESRNKPRGVFITRLDGERADFNKALADVKEKCKIEPVPVTIPIGSGAGFKGVIDVINGKAWLAQGEAPEKEGPIPAEMQQAVDAAREKLFEAAAEGDDALMDQYLEKGSLTAEEMQKGLVLALAKNKYLPAFAGTALKNSGLIPFLNFMANIGPNPGTAKDVSVDKEGKEADVPIDSSNPLSAFVIKTSYDQFSGKLSWVKIIGGKLTADSEILNA

SEQ ID NO: 94173 - protein, 320 aa, Unknown
  Obtained from environmental sample
  DOMAIN (55)...(317): 4Fe-4S iron sulfur cluster binding proteins, NifH/frxC family
  misc_feature (1)..(320): Xaa is any amino acid
MEDQAEKLREIMRQKKNSSGKLYEQADGASRSDTLSGRMAQMRRNAEGGEGRKTRIITVTSGKGGVGKTNLSVNMALAFARLGKKVIIMDADLGLANVNVMFNMIPKYNLYHVIKKQKTIREIMVETEYGISIVAGASGFSQIANMGKKERHDFISELESLSFADIIIIDTSAGVSSNVLDFIAAADDAIIITTPEPTAITDAYSIIKIISTEYNTLNMELKLVVNRARGASEANIVADKMINVTNQFLHVKMEYLGFIYEDHTVQNAVRQQKPFMVVDPKCKASQSIQHLVVRMDKNQPIEPAGLGAMFRKMFNRSQGA

SEQ ID NO: 94174 - protein, 282 aa, Unknown
  Obtained from environmental sample
  misc_feature (1)..(282): Xaa is any amino acid
MPNCDERLLRSLPRVLRARDFHLYTEGGKRLVDLWLDGGKAVLGHKPPRVLLELKNAAERGLFTPLPHPLERRLTKALAVFFPDHSFRFYNDTLSMLQAINNYLPNECAFLKAETIHDPAFPGSNDRKTIAALWRPFVEPTPNAPILIPVLPWPLGPAVLALDKSLGATFPQGELIPPVLLAPAARALYNLAAKIGNPDRQRLYRIEKAIAGVVPGESAESGLWQCRGIYLTTRVDREKYTQLFQSFMEAGFLLPPSASEPAILPTSMSKGEETKLAELLGG

SEQ ID NO: 94175 - protein, 183 aa, Unknown
  Obtained from environmental sample
  misc_feature (1)..(183): Xaa is any amino acid
MARTKAKAKPVPVESGSKGISETELSQRVAVLKRFKELLKTQRDRFQAYLTALDKQKDVIQSGTTDDLLRHVELEEKIVADIFSIQKVIDPLEEMYQAVIIKKPAKSSPKPNVKEAGEEEVISLKEALDGLKVEAVMRSERNRELLAKRMAELRSEINSMKRNSYARRKFDTSTGPSYIDIKG

SEQ ID NO: 94176 - protein, 585 aa, Unknown
  Obtained from environmental sample
  misc_feature (1)..(585): Xaa is any amino acid
MKTDKVLKIERHGYDFIPAEYLPKGTDEYWLRNAQQAELFSKKEDSWRKLKPAEIEILIQNKNTCAKWDDFLVTDPFDPSLIRDSNFYGLVRIGALQNVLLKHHDFCIPAGIRYSTIVSCDIGDNSAIQECAYICNYIIGNNCILSRVDELQTTNHAKFGNGVIKDGEAEELRVWIDVMNEAGGRSILPFDKMIPADAYLWAAYRDDTALTAKLAEITQKQYGGLRGSYGVIGSNAVIKSCLIIKDTTVGESAYIKGANKLKNITIQSSAEEPTQIGEGVEMVNGIVGYACNAFYGSKAVRFIMGRNSNLKYGARLIHSVLGDNSTVSCCEILNNLIFPVHEQHHNNSFLIASLVQGQSNIAAAATIGSNHNSRANDGELRASRGFWPGLAVTLKHSSVFASFVIIAKGEYPSELNIPLPFSLVTNNVHKNRLELSPAYFWLHNLYALERNSWKSRARDRRIIKLQHIETDYLAPDTAEEIISGLSILEGWLADAGYSPMDLHGPEGAQDIRVIPCSHLEHSKRGQVIKYPLRAIAAYRQMLRWYAVKTIAVFFDSRPNLDYPGLCSLLAAGGERINDWVNMGGQ

SEQ ID NO: 94177 - protein, 194 aa, Unknown
  Obtained from environmental sample
  misc_feature (1)..(194): Xaa is any amino acid
AADANGAGAQEENLFRRTNLFLSLYQFAPYASEYGIKKHEKSYPLDRNTGGIYSADITVFRGSEKNGYCLLKKPFIVSFVTVPAIRSPELIERNGNLYIADNLVEPAKEKIRTIFRIAGKYKHDCLVLGAFGCGAFANPPNHIAELFKEVFLEKEFINRFKFVVFSIFEDHNSNKRHNPNGNVLPFLEVFDSIP

SEQ ID NO: 94178 - protein, 447 aa, Unknown
  Obtained from environmental sample
  DOMAIN (51)...(430): Citrate synthase
  misc_feature (1)..(447): Xaa is any amino acid
MEISGLKEHLAEIAGNDYIESKLYEKFNVKRGLRNADGTGVLVGLTRVGDVHGYIIDEGDKVAIPGKLFYRGIDVEDIVTNASKEGRFCFEETVYLLLFGRLPSKKQLDDFNALTSEFRTLPKSFAEDVILKTPSRDIMNKLASSILALYTYDEDPENQSPENVLRQCLELIARFPTIVAYSYMAMKHYFHKESLVIHQVDPSCSIAETLLSLIRPDQKYTQYEAQLLDLALVLHAEHGGGNNSTFAIHVISSSDTDTYSAISAGIGSLKGFKHGGANAKVIEMMDDVKKNVKNWENEKEVAEYLEKILKGKANDGTGLIYGQGHAVYTITDPRASLLRDKAEALAEEKGFIKELNLYRLIEKLTPAVFKKVKDSDKEICTNVDFYSGFVYKMLGIPPELNTPIFAVSRAAGWCAHRLEEIIAGGRIIRPAYKCIQLRRLYTEIDKR

SEQ ID NO: 94179 - protein, 322 aa, Unknown
  Obtained from environmental sample
  misc_feature (1)..(322): Xaa is any amino acid
MAESVNLEILSTRTGFNSAVRHIKRTMDILSKTNVNLGDIVYEMTDGELTSGQISLLLKMLLVDKLGYKSASTNLSSTVKNISGLAKEFEKWNGVDLVAAYYHPEIGLLIANPKVEEELAGFGELRRNELMVVYAGLQGDEPGEDCQKAAELALKLFEGSKVTAPSFLTRGKFSVKKVSKPQKASEADSTVKVKTKTAAKGKTSAKHASAKYAAAKTAASEKKAATIVQKSSGGPSKMTPRYGVIVQNELFHNGNVEAWKRIIASYKAKHPALEVFIYYENERILDINSLFKWGKVKHGSAIEFAIAGNDIQDVAKLQRYLA

SEQ ID NO: 94180 - protein, 105 aa, Unknown
  Obtained from environmental sample
  DOMAIN (2)...(105): Starch synthase catalytic domain
  misc_feature (1)..(105): Xaa is any amino acid
MKVLMVSSEAVPWAKTGGLADMVSALSINLAKLGHEVKIVIPRYYSIDRDKLKLLPGAMGTPMGAGIEEWSAVYCTDMPGTNKKNPVKIYFIDHEIFFGRTAFTE

SEQ ID NO: 94181 - protein, 314 aa, Unknown
  Obtained from environmental sample
  misc_feature (1)..(314): Xaa is any amino acid
MSDPNLDQNLNQDELNLDELDEPPAEEEIQEQFEDPKELTSFGRGSGAAPPWFNRKKALIFIFAGFSGAILLALIFNNNKPEKKSGSDASSGYAATVPSRELRRLMELSLESQTGFPDSFSENKENIAEEGHDEYGYPLVTINESPRSVSYPVSPAAYPQYPSQAPPAPNASGSTERQPQPQLSSLVPNMEGSMFRSASTAQTPQAQNPYAFNPMDLLSGSAPDFSSLASLASGIPGTENPYAVQNDQAGKQNFYSSASGGAVTGSFLQENMLWIGTVIPAVLETAINTDLPGNIIARVTQNIYDSLTRKNILI

SEQ ID NO: 94182 - protein, 291 aa, Unknown
  Obtained from environmental sample
  DOMAIN (159)...(248): GAD domain
  misc_feature (1)..(291): Xaa is any amino acid
MEELGFTELQTPILTSSSPEGARDYLVPSRKHRGKFYALPQAPQIFKQLLMVSGFDRYFQIAPCFRDEDARADRSPGEFYQLDFEMAFAGQEDVFRVAETVMHGVFTTFSKKAVSPAPFIKIPYAEAMLKYGTDKPDLRNPLVITDLTGFFADVDFQPFKSIPVRGIVAPGAALQSKSFFEKMLAFATEIGMKGLGYISVMEDASLKGPIVKFLSVEKQDALKKDLGLKENDTLFFIADAPDRVNNLAGQIRTALGNQLNLIKKDRFEFCFIVDFPMYGINKASSASREAE

SEQ ID NO: 94183 - protein, 303 aa, Unknown
  Obtained from environmental sample
  DOMAIN (79)...(283): PhoH-like protein
  misc_feature (1)..(303): Xaa is any amino acid
SLGGRIAARGNEIRLEGADDEGVRRFRTLMDSLITMVKEGEYPSPEYVRALTGTGDASGEPLLGESEEAFIHIPNGFGRVYPKSKNQAAYIRGMRKFDISFGIGPAGTGKTYLAIAQALSLVLSKKMRKLVLTRPVVEAGESLGFLPGDLAQKINPYLRPLYDAMESLVPFDIIHRMEENRTIEIAPLAYMRGRSLNDCVVILDEAQNTTKEQMKMFLTRIGQGARAVVTGDITQIDLPRRNDSGLLNAISILSGVEGLHFSYLHTADVVRNPLVKKIIQAYERSHHEISHDDADMTGKNNDA

SEQ ID NO: 94184 - protein, 453 aa, Unknown
  Obtained from environmental sample
  DOMAIN (57)...(307): 7TM-HD extracellular
  misc_feature (1)..(453): Xaa is any amino acid
MTPKEKTLINKLFTVSFPALFKNRSILAWVGAFLFCLVVILLSGNSSSSMRRSIDEFEVGKVAGRDLIAEYDITIEDEQATREKIETQERLVPAVFQYSNRVSGELKSRWNYFSTLAKKFFTEAQSAQSFALELRSEFPGEFSGEVLSLLYGSESRLEILGDCGAILDAVLEKGIYSIPQTGLEHLNSDVVELIRQTDSRIEQEKIPFWAVVTENYVAASVNSIIAAGSYVSGLSSFANELLKPFLKENVFYSPDDTARRISDARSGVEPVMREIKQGKQIIRKGFVVTEEEMEELRALQMSLKGNDLPKTFANLIFLFLLFGLLMFFSGSRIIDRKLTDSETYLVSGISALYITGSVLIRNIQIEFMPVSVLIPTALVMMLIAILIHPRLALMLAMSLPLGAFFTGSFNTPSFVFAVISGVVAAYSLQSAKKRMDLVKAGLIIAAAHLVVMT

SEQ ID NO: 94185 - protein, 434 aa, Unknown
  Obtained from environmental sample
  DOMAIN (136)...(313): Protein of unknown function DUF115
  misc_feature (1)..(434): Xaa is any amino acid
ALYLCPSPLYGYGLPLLLEKLPANSAILCVEADEKLFELSKRNIGTDAELLGASSIAKKEREIKAISLVQAKTVEKICAFVREIWEERVFRRVEVIRLTGGWQLYPRLYDDIENTLRREIAVEWSNAMTLIRLGRLYSRNLISNLAGFSRTETDEPDWSSAGILALGAGLSLDPILSELSGLCGGKIPEIGKRRFKIICVDTCLPALADWGVVPDLVVILESQHWNLRCLIGLQGREIDAAIDLSALPASTRVLKGKRYFFATVWSNLVFLSRLKEGGLLPQTFPPMGSVGLSAVALALKISSGPVITGGIDFSFSMDASHARSTPRRRDLENRQSRFRSLIDTDTGLRDGTCTAVSKTGKPVRSNPAMRKYRDLFEREFGGNSRLLDITGPGLPLGVKTVTVAEAFAVLNGAHDLPIAQKTVMSGGKKLLAGQ

SEQ ID NO: 94186 - protein, 130 aa, Unknown
  Obtained from environmental sample
  misc_feature (1)..(130): Xaa is any amino acid
LSFGQDYFIKEQIGDCEEEIVKIKSALSELEEKITLLRKNKQGLPEDLRIEKIRLVKLLEQENLKVFNLREKFEEHSESEICCRGTVFSGVVIESHNRYYEVQQKRSQVIFYFDRESGRIKEKPLVPEFE

SEQ ID NO: 94187 - protein, 117 aa, Unknown
  Obtained from environmental sample
  DOMAIN (39)...(72): Tetratricopeptide repeat
  misc_feature (1)..(117): Xaa is any amino acid
GTADDLPITDHSQVYDGRGDYDQAIADYTAALALNPATPEILCARGHAYRRKGAYDRAIEDYTVALGVKPDCRDALNNRGVVHYRMGAHKLAIRDWEAILKIDPNDATARQSIEIAR

SEQ ID NO: 94188 - protein, 275 aa, Unknown
  Obtained from environmental sample
  DOMAIN (1)...(275): Bacterial DNA polymerase III alpha subunit
  misc_feature (1)..(275): Xaa is any amino acid
MPDSITDDEYLYQLCLNALPEKYPEKGNAPLERLNFEIDVIRKMGYSSYFLIVWDFIKYSVREGIAVGPGRGSAAGSIVAYLLGITNIEPMKYGLLFERFLNPERVSMPDIDIDFCYERRGEIIEYVVQRYGSDRVAQIITFGTMAARAAVRDVGRALDLPYGDVDKIAKLIPPELGITLKKALNAGNELKKNYEENPVIQKLIDTAMALEGLPRHASTHAAGLVISKEPLTHYVPLQLSAEGFLTTQFDKDRIEEIGLLKMDLLGLRTLTVITD

SEQ ID NO: 94189 - protein, 388 aa, Unknown
  Obtained from environmental sample
  DOMAIN (124)...(353): Methyl-accepting chemotaxis protein (MCP) signaling domain
  misc_feature (1)..(388): Xaa is any amino acid
MRSITKPVKDIAAILKDISEGDLAKVIPEAGKDEIAALSRYFNLTLDKIKKMIIAIKIESNDLSALGNDLSSNMTETAAAINEITANIQGIKGRVINQSASVTETKSTMEQVISNIGRLNSQVENQAETISKRSAFIQAMVTNIDSVNQTLIKNLENVQNLKEASEVGRGGLQEVSADIQEIARESEGLLEINAVMENIASQTNLLSMNAAIEAAHAGEAGKGFAVVAEEIRKLADNSSEQSKTIGNVLKKIKESMDKITKSTANVIARFEAIDSGIKTVAEQEENIRQAMEEQGEGSKQLLQGTSNLNEITQQVKAGSEEMLEGSKEVVNESQNLEKMTQEISGSMNEMASGAEQVNVAVHNVNEMASKNRDSVNALILAVSRFKVN

SEQ ID NO: 94190 - protein, 335 aa, Unknown
  Obtained from environmental sample
  misc_feature (1)..(335): Xaa is any amino acid
MIYVHTLINNQLRGDKTRKRTALEELWKAQDSGIYSLKSPGLCHAPLRNAAYHSLLTAEKIIREKEKFTPSLSVFDFDLDGAGEYIFQDDKLNCFIKSRGAGIFELDYLPCAWNYLDTMAPKTESIKSGRRCSFVDWIAPSETLPEDLKEEGIKGGRFCGNEEYEATEIDRLHRRVVFSLPQKKDLLWGEIEIGKTWQLKKNSLALEYVLKNSGVKSLNFIFCTSVDLSFSGEGDKFFRVLSSNLNSNEGEKENLPIDNEGRTLRNIKILEFQDIKNETLITLESSRGFDGRIFPVHSGLACQEEYQSTCLMTELPVSLEAGKTWKTSFSLKISS

SEQ ID NO: 94191 - protein, 422 aa, Unknown
  Obtained from environmental sample
  DOMAIN (180)...(346): Transketolase, pyridine binding domain
  misc_feature (1)..(422): Xaa is any amino acid
LGKATRAAAVIGDGALSGGLAYEALSHAGQLALPMVVILNDNNMSIGPSVGALSKYLSRLSMKARYQRFRRAFDGMVKKIPFAGEFLFKIVVRLKRAVKAVFYTDNFFVDLGFEYVGPIDGHNIPQLVQVIKDARNLRKPVVIHVITQKGRGYGFAEEDPGFYHGIPAFRTDRDLKAGSGAKTFSAAFGNALLEAAGADDRVVAITAAMEEGTGLSPFRRAFPDRFFDVGIAEAHAITFAAGLAARGIRPIMAVYSTFIQRGVDQVIHDVCLQNLPVIFALDRSGLVGDDGETHQGIFDISLFRSAPGIAILAPAGEEEFVQMLRWALSCTGPVMIRYPKASCPSGDPAFFLPVEEGRGAWIRRTGANICIMFTGGLYAQVIQTEEILAKDEIIVDLYNLRFLKPIDEACLAGILDRYEYVV

SEQ ID NO: 94192 - protein, 113 aa, Unknown
  Obtained from environmental sample
  misc_feature (1)..(113): Xaa is any amino acid
MSVNKIKEIINKCIKETPCEINFYYNEPLKDHTTFKVGGPADCLLSPKGEGFRNFCVNILNTCRAQNVPVFILGGGANIVVSDKGIRGIALDMSGWKNENGTLYFNKGEIIFK

SEQ ID NO: 94193 - protein, 399 aa, Unknown
  Obtained from environmental sample
  misc_feature (1)..(399): Xaa is any amino acid
MQRNWIGRSEGADVTFKIEGHPETLEIFTTRPDTLFGVTYMVLSPEHHLIEKITTAEQKAAVAAYLEEAARKSDLERTDLAKEKTGVFSGAYAINPVNDEKIPIWIADYVLISYGTGAIMAVPAHDERDWEFAKVFNLPVRQVVAGEKPESGKNYSAEPAECTVAYGYSVNSGLISGLPTSEAQDKITKWLEERKLGKSAVNYKLRDWIFSRQRYWGEPIPLVHCDKCEAEHGSAIVPINEADLPLKLPDVESYAPTGTGESPLAAISSWVNTTCPKCGGPAKRETNTMPQWAGSCWYYLRYLDPHNDKVFAGRDKIDYWAPVDLYVGGVEHAVLHLLYARFWHKVLYDAGFVNTKEPFIRLVNQGMIVSFAYQRKDKTLVPIDQIEKRPDGSFVEKAN

SEQ ID NO: 94194 - protein, 472 aa, Unknown
  Obtained from environmental sample
  misc_feature (1)..(472): Xaa is any amino acid
MPPEILLQNALNFLRITPSFPDDDIFDYLYTALSDLKKAEKVIIQQERVWLPELYEAEKYIGTFIRSALNSGHLETLHSDAEINAAASSLEISYSNEQLKAIKDAVSNMFFVITGGPGTGKTTILKGVLHILNLQKKKVMLAAPTGRAARRMAEVCRFKASTIHRLLEIDPISGLFYRDEMNPLEANVVIIDESSMLDNELAADLMRALRPGTQLILIGDADQLPSVGPGNVLREILSCPEVAKARLSKIYRQGESSDIAENAHRILAGKLPNLQNGSHFHYMPYQNSEEALSILNRLSKNGELQVLTPMHKGTLGTQNLNAFMQKILNFNAYGFDYRNIHWQIGDPVMQLKNNYEKDIFNGDLGRITRVMPTAKKIEADFEGKTITIEGDEFEHLTLAYACTVHKSQGSEYKSVAVVLDYTHSIMLQRNLLYTAVTRAKENIWILASQGSLETAVRNNRERHRWTALAEFI

SEQ ID NO: 94195 - protein, 133 aa, Unknown
  Obtained from environmental sample
  DOMAIN (1)...(81): YGGT family
  misc_feature (1)..(133): Xaa is any amino acid
MIFGFLAAAAGVYSVLIFIRIIISWFGGSVYGKPVDILNAVTDPYLDWWRRTLNLRIGFLDFSVLAAIAFISVLQSVFFSLSRYEMITLGRILAIVLMSFWNIVSFILGFCFLIIVLRLIAYLTSRNIYSPFW

SEQ ID NO: 94196 - protein, 786 aa, Unknown
  Obtained from environmental sample
  DOMAIN (621)...(700): OB-fold nucleic acid binding domain
  misc_feature (1)..(786): Xaa is any amino acid
GRGSGAGSIVAYSLRITDIDPLKYGLIFERFLNPERISMPDFDIDFANEGREEVINYVTRKYGKERVAQIITFGTLGAKAVIKDVARVLGISIPESEMITKLISFDPEITLDKAKEDEPRLRELENDPRFTELFAIAHKLEGLNRHSSIHAAGIVIGKKPLIELVPLFQEREEKGGNIATQYSMNFLEECGLVKMDFLGLKNLDILKHSQELIRRRGGKYSNFNMENIPEDDKKTFKMLGEGKSHAVFQFASDGMQDILRQTKPTSIEDLTALNAMYRPGPMQFIPRFVECKNGKAPITYPDPSLEGILKETYGVIVYQEQVMAVARIIAGYSMGKADILRRAMGKKKKEDIDKEKIPFLEGAAKQGYSAQKAGEIYDILVPFAGYGFNKSHAAAYSVLAYQTAYLKANFPAEYMAATLIVEIKSADRLLYSIVETRKMGISVDPPNINFSDKLFTVVDGRIVYGFLGIKGVGDAPADEIVRARKDGHYKSFMDFLNRVDIKAVSKKVIELLIQTGAFDDFNVSRETLAGNMEKAIEYAQKIKEDKQLGQSNLFGDSSEAGMPDFKFTEFPPVGRAERLNLEKKLIGFYFSGHPLDEYKEIWQDVVSVNLGQVETYKTGNCVLVGIIKNIKQITTSKNGKMAFASLADYNGEIDVIFFPNAWEKYQNEIAPEKIVILKGKIDYQKDKDKYSFIADSIIDKQDADSEIPTEEIHIKLKTEAVDCDENLYPLRDYLAENTGSCLTFIHVPVQDGEKTVRIFSGINFLGNANVIDELKNNKCVAEVWRN

SEQ ID NO: 94197 - protein, 338 aa, Unknown
  Obtained from environmental sample
  misc_feature (1)..(338): Xaa is any amino acid
MAETKELTTVFDEMPAPAPKSNAPDYGSLKKQLAEANLLVDDIVLKNYLLKLTDLEVIPLDESLKKIDDIRLFKITEMVYQTDEYSTYKFASVFNAVQHLNCGVFVIADSDEKKTDFYMGVRSLDQERTPKSLKETLCNALCGQFPGVKTEDLLNSDAEKLFKNVQSKNITAVSCVAQNKDEEFTDNKRFIQGLEKLALAMQGRRYTAVVLARSMSASQLAATRSAYETIYTQLSPFANMQVSYGTNQALSISDAFTSGSSRGTSHSTNESTTKGTSYSKGTSVNESETITKSDNLGKQIGTIALGLVGGIAAVAAAPLTGGASIAAAIAISAGTSAG

SEQ ID NO: 94198 - protein, 199 aa, Unknown
  Obtained from environmental sample
  misc_feature (1)..(199): Xaa is any amino acid
MGAVQTANSPSFDSVWAILDRVSKKQEETDRIVKEVAELHKEYEQERKKDKAEFNERLGNYINLFGDFTEYTMAPKLREKFAEIGLDFPKANRNSNVKDKVNNISLEIDVMLENGDNAMLVEIKTKLTVERINDHIERLEKMRRYADLHGDKRNFLGAVAGVVVTDKERKHALEQGFYLIEPSGQDLSITPPSGKPKEW

SEQ ID NO: 94199 - protein, 95 aa, Unknown
  Obtained from environmental sample
  DOMAIN (2)...(94): RecF/RecN/SMC N terminal domain
  misc_feature (1)..(95): Xaa is any amino acid
LFLKSLDIFGFKSFPDKTRVEFAAGITALLGPNGCGKSNVVDAIKWALGEQASKALRAEKMEDVIFNGTEHRKPLNVAEVILTLGNDTGLLPLDV

SEQ ID NO: 94200 - protein, 162 aa, Unknown
  Obtained from environmental sample
  misc_feature (1)..(162): Xaa is any amino acid
ELEFHSKFFEINDIPHLSEHSIEILLPFVKYCFPEASIVPILMGQPKAQYIYDLAKALKEVIMPVLDETLIIVSSNLSSNTDQKTAQVLAEEVLRLFSEKNSPALASAILEERLNACGGALAAGLFESGLLDETCTCSVADKMVSAVSAENNTVYYSELSYI

SEQ ID NO: 94201 - protein, 297 aa, Unknown
  Obtained from environmental sample
  DOMAIN (168)...(297): Integral membrane protein DUF6
  misc_feature (1)..(297): Xaa is any amino acid
MQRIGELAAFGTAVAWTIGALFFEQGVKRIGVLSVNFFKVVFAFVLLTITAAFLRGMPLPFDAPLRAVIFLTLSGIIGFVVTDMFLFTAYGTIGPRITMLIMALSPPVTAGIAYVFLDESLGSMGALGMSLVIIGICMTVFGKQNSVSISKIDKVDMRGYIFAFIASIGQSVGMVLTKAGLGDYDPVSGTQIRGIAAIIGFALVALVYDRGRGLIKAAKSFDGLKFTFGGAVFGPFIGVALSLFAIQRISAGIASTLIGLTPVVIILPEILFFKKKIKLLEIAGAVVAVIGTAIFFM

SEQ ID NO: 94202 - protein, 164 aa, Unknown
  Obtained from environmental sample
  DOMAIN (27)...(102): OB-fold nucleic acid binding domain
  misc_feature (1)..(164): Xaa is any amino acid
MDTTKKLTVSALTELIRETLEGSFPAVVVEGELSNFRPSSTGHLYFTLKDSGASISAIMFRNRIRSLSFEPKDGMLLRVRGSLSVYAQRGTYSIVVEEMERAGEGDILAMLEERKRKLAAEGLFSEERKRPIPKFPETVGVVSSPTGAAVRDILNILKRRARGI

SEQ ID NO: 94203 - protein, 68 aa, Unknown
  Obtained from environmental sample
  misc_feature (1)..(68): Xaa is any amino acid
MIKPVSVAALPVAENFVIQKNRIENNTGPETASKRVCIVTGTHGDELEGQYVCARLAKILSDGKHKLS

SEQ ID NO: 94204 - protein, 194 aa, Unknown
  Obtained from environmental sample
  misc_feature (1)..(194): Xaa is any amino acid
SIEAIRRAKKEGLPVTCEVTPHHFALLDAEMARFDADFKMNPPLRTQSDIDAILGAIADGTVDAIATDHAPHAYDDKEVELASAPFGIIGLETALPLAIELLVNRGVVSLARAIELFTAGPARTFQLDKKGLGTLAIGSPADFTLIDTSATITVDRAFIKSKSFNTPFKGRELHGQVLGTWVAGRRVYEAGVGG

SEQ ID NO: 94205 - protein, 129 aa, Unknown
  Obtained from environmental sample
  misc_feature (1)..(129): Xaa is any amino acid
MPLLVKNVRLVDPAQNLDAQGALLVVDGLVAAVGDVTDGQVPPGTETLDGGGKLLCPGLIDLHVHFRDPGQTAKETIQTGCQAAVAGGFTSVCAMANTKPVNDSVAITELMLAKAAKANLCRYFPLGAL

SEQ ID NO: 94206 - protein, 431 aa, Unknown
  Obtained from environmental sample
  DOMAIN (46)...(422): Aminotransferase class I and II
  misc_feature (1)..(431): Xaa is any amino acid
MSTQAAEINQVIKDANPHVFDMLSRKGKRIFFPTAGILAQTAQAAGVAINATIGIALDDVGGVMQLPSVASQVPGGGADILSYAPNLGKPELRNMWRGMILKKNPTLRPDGISTPIVTAALTHGLHAAAYLFLDEGDSVITPDLFWENYNLVFTYAYGAKLDTFPMFNASNGFNTDALRDKLMSGPPGKRVVVLNFPNNPTGYTPTVAEAKVIAGIIIEAANKGNNIVALIDDAYFGLVFEEGIFKESIFSLLADAHERILAVKIDGPTKEDYAWGMRIGFVTIASARGGAAFYGAMESKLGGSIRGSTSSSSSIGQAMLLNAYKSPTYEKEKEEKYQILLRRYRKIKDILDNRKEYAEYIRPLPFNSGYFMCLKVLSGKAEEVRRTLLDRYDTGVIALYNLLRVAFSSTPYEQLEKLFDNIYRAAKEVSG

SEQ ID NO: 94207 - protein, 352 aa, Unknown
  Obtained from environmental sample
  DOMAIN (1)...(319): Glycosyl hydrolase family 20, catalytic domain
  misc_feature (1)..(352): Xaa is any amino acid
LDALSLHHISIFHWHLTDDQGWRLPVRQYPLLTEIGSKRRDHRRHDEFTGGFYTEAEIRDIVEYAALRHIEVVPEIDLPGHTSAVLAAYPGLGCTGGPYRVEDRYSIFEDVLCAGNDDIFSLTEALFDTLSELFPSKYVHIGGDEVRFNRWAECPKCKKRLHELDLKKPAQLQSWITSRLASMLQQRGKTAIGWDEVIEDTEKFPLPDDFIVMSWRGQEGGIKATARGHRVIMTPLTDGCYLDYKHIDQYEEPGQLSVSTIAQCFNLNPVTPEMDEAAASLVLGGQGNLWSEIIYAGKIAEYMIFPRICALAESFWSTGKDNNIEDFSKRLEIHQRRLDKLGLLQYRGPLKN

SEQ ID NO: 94208 - protein, 331 aa, Unknown
  Obtained from environmental sample
  DOMAIN (238)...(330): GMP synthase C terminal domain
  misc_feature (1)..(331): Xaa is any amino acid
VCGCNASWTMEHYVEELSRSLTARVNENPVLLLISGGVDSTVTGALLLKTLKSDQVYLMYMDTGLMRKDETISVKTSLERLGAKHLHIVYCEDEFLAALKGLTEPEAKRKAIGDLFITIQEREVARLGLPDSYFLAQGTLYTDLIESGKGVGKKAHIIKSHHNVGSPLVDAKRKAGRIIEPLDRLYKDEVRHLGRILGLDGEVTGRHPFPGPGLAVRILGEVTREKCAILREADAIFIEELKRRGLYNKIWQAFAILLPIRSVGVAGDGRKYGQVLALRAITSADGMTADVYPFETHDLLEISTRITNSVKEIGRVTYDISSKPPATIEWE

SEQ ID NO: 94209 - protein, 181 aa, Unknown
  Obtained from environmental sample
  DOMAIN (31)...(180): Histidine kinase-, DNA gyrase B-, and HSP90-like ATPase
  misc_feature (1)..(181): Xaa is any amino acid
MSTNDYSAQNITVLKGLEAVRKRPGMYIGTTGIDGLHHLVFEVVDNSVDEAMQGFCTNILVVLEGNDIVRVEDNGRGIPVDIHPAENVSALELVMTRLHAGGKFDKKSYKVSGGLHGVGVSVVNALSEWCEAFVHLNGKIHYQRYKIGIPEGPAHEVSADNLPYSYTPDRQGTVIRWKADA

SEQ ID NO: 94210 - protein, 323 aa, Unknown
  Obtained from environmental sample
  DOMAIN (4)...(323): Glycosyl hydrolases family 18
  misc_feature (1)..(323): Xaa is any amino acid
MIKGEYLTDLIISFALLEKNDVSVPYIPELKPLPDQPMFSNIWDEVAALKEKYPHLKITFSVGGYGADGFSDMANDPALRSAFTANVCKWLEDYNLDGMDVDWEYPVGPEWGQEIKSRPADRQNYIALLQELRNAMDLLGAKTGKRYSLSTAVPASGWFPKANDVKAAARIVDSLKLMAYDYYGGWSGTTGHHANLSNNPHDPAWGGWSTKQALDEYLWAGVPPEKITLGIGFYGRAWQGVGKGGYEDTPGLFQPYKSIPNSPPFDQGTVSWTDIKEFLKPGSGYKRCWDDMAQAPYIYNGDIWLSYTDGEQIKILTDFVKEN

SEQ ID NO: 94211 - protein, 342 aa, Unknown
  Obtained from environmental sample
  DOMAIN (6)...(249): Beta-eliminating lyase
  misc_feature (1)..(342): Xaa is any amino acid
VGRSTGFDYSRSLNPTTVHLEDTVAALEGGSQAIAFSSGMAAVSALMELFSPGDHIIASDDLYGGTVRLFTHISEKNGVKVSYASAENIEKGITPSTKAVFIETPSNPMMRVTDIAAVAAITKKHNMLLIVDNTFLTPYFQKPFSLGADIVLHSGTKYLGGHNDTLAGLLVVKDLSLAEKLRFIAKTTGACLSPFDGFLIIRGIKTLAVRMERQQETARKIVAWLLEQSAVKKVYYPGLKDHPDYDVSCRQASGFGGMLSFSVRDGQTATKTLESVKVIKYAESLGGVESLITYPMFQTHADLPERERNARGIDERLLRLSVGLEASNDLIADLNQALKNSV

SEQ ID NO: 94212 - protein, 350 aa, Unknown
  Obtained from environmental sample
  DOMAIN (1)...(344): Aminotransferase class I and II
  misc_feature (1)..(350): Xaa is any amino acid
MDFATPPCVQEALISRAKHGIFGYSEPDAAYFDVMRKWFEERFNWPVRSDWLTITPGVVNALYIAVRSLTEPGDGIVIQQPVYYPFESSIRKTGRQLLINELVYSDGHYSIDFQDFEEKIKQSKLFILCNPHNPVGRVWNADELIRMGEICLRHGVTVIADEIHQDFIFSGHKHIVFAALNQDFANITVTCTSPSKTFNLAGLISANIFISNKELREKFKEEYTRAGLSQPGVMGLISCKAAYQDGAQWLEQLINYLEGNIAFLKTYLSNNIPKIKLVEPEGTYLAWLDFNEFDLSSQKLDEAITQKGKLWLSAGHTFGKGGKGFQRMNAACPRSVLHDALERLKNTVNL

SEQ ID NO: 94213 - protein, 216 aa, Unknown
  Obtained from environmental sample
  DOMAIN (65)...(123): Transglutaminase-like superfamily
  misc_feature (1)..(216): Xaa is any amino acid
VSAAHTKSSNLVPSDDQQIKTAANLIVNREQNPYLKAKMIYDWIMNNMQISDKTTEKSLTESLGNKRANPYTIAMLYTALLRAAGVPAIPVAGVLVNQNGQTLRHYWTEFWVDSFGWVPVDPAMGAGAVKLKDASNRQIEEQAEKDLLNFYFGNLDNQRITFSRGELTLSQIEKRGRLVSRSQSYSLQNVWEESAGGLESYSSLWGDIIISGIYGM

SEQ ID NO: 94214 - protein, 199 aa, Unknown
  Obtained from environmental sample
  misc_feature (1)..(199): Xaa is any amino acid
MQCPLCKETVDDDSCYCDQCGEQIMVCSVCGRPGKGKRCIFDGKELVPVTGNTPATQSLPQSGGVSAPTVQTHGMQPIPQSGSAGSGVSLASGDKVKLASQVHGIMIEARDGDIIGRKNGAFTSVFSRFNFISGTHCKIVKTAAGWHIQDMGSTNGTICNGMKLVPNTLYPLISGNTIKIADVELIVTFDMTEGGTSRL

SEQ ID NO: 94215 - protein, 322 aa, Unknown
  Obtained from environmental sample
  DOMAIN (145)...(263): PilZ domain
  misc_feature (1)..(322): Xaa is any amino acid
MGVLLSQKISVYYERFKDIEVTYTKEIIQVTGLLTQQVHLKCGNDFWPCVVYTSSFEGAKVVANVKTGLLGKLHDTNNFVNLRFCFKPIGETNTVTFFIAGRVLSSAPYGNSQDINLFNIQFTNRPPDDFIEIMGRLLDATVNSSKRKDDRIQITVDNIRKLNLLSSESTVFIENVPRRCILRDLSFSGAKIIMMGIAKFLLDKEAILRIDFNDPRESFAIKGKFVRAENVEGKKEMVALGLYFTENAVPMGFKLRINDFLTAIRADYRSITEEELEAQATVKASAKPAAAPAAAPAGAKPAAPAAAKPAAPAAAKPAAPSK

SEQ ID NO: 94216 - protein, 97 aa, Unknown
  Obtained from environmental sample
  misc_feature (1)..(97): Xaa is any amino acid
MGENAFGACTSLTSITIPDSVISIGAATFVSCYSLTRVTFQGTITADNLGTDYDGTIWSPFNGDLRDKHLTGGPGTYTTTTPVPEVAETWNPVWTKQ

SEQ ID NO: 94217 - protein, 523 aa, Unknown
  Obtained from environmental sample
  DOMAIN (469)...(502): Tetratricopeptide repeat
  misc_feature (1)..(523): Xaa is any amino acid
SAFEEKLKKGLSAPLVMTLFFISAFMVLMVSVVVNIHVNRYVKMITTETQNHLMAAALAAAQFVSVEELDRYHTVEDSKDQNYYDLKMRLGRFAERYNVFYVYYLREYDEDNFQYIVDNDFDPETIVGTGDILPIQDIARSALAGNVIATDLGNYNPTWDGLIAGFAPVYDSNGNFYCVAGVDMKDSFIVDQRRYSQTMLILQLVALYVSVFCGFLNMLLYRKKAKESEDANIKLQYFNNNMRVAFSTYLSEDVVEEIISDPARLHLGGINRHMTALFSDIKGFTGIAEKLTPSHLVDLLNHYLSTMSDIILEQKGTIDKYQGDSIVSFFGAPLELDDHAMRACTAGIMMKRIEGDVNRYVLEKGISPSPLLTRIGINTGEMVVGNMGTQKKMNYTIISNAVNLASRLEGVNKAYGTWILASDTTIQETRGKLLTRRLDRVRVVGINEVVRIHEILELKSDSSDALFEQVYLFHKAMDLYEARNWKDAQDAFNQVIKLFPNDGPSPVFLERCRQYLEHPPKDD

SEQ ID NO: 94218 - protein, 562 aa, Unknown
  Obtained from environmental sample
  DOMAIN (171)...(240): HAMP domain
  misc_feature (1)..(562): Xaa is any amino acid
FTAFMGIYAIKNLETVSNATDTMYDIGAVPLGVFVDLADNVQELRVFARDARLAKTQADRDVILKKLDEKNNEINKNVEEQAKTSLAAGQEILKKVGDLTDKYIEQIRGYIRSCKNYSPSGTCEDDFSAEMSETASKMSEAVAAAKESKVKRVSNISDEASAQAAASIRAAIIILVVVLILAVGLGIFLTFSITTPLNVVVSVLSKIEKGDMTVRSDLERGDELGTLSKALDSVSSRLQSIFRNLRQNSDTLAGAAEELSSVGRQIASSAEENVAQSASVASATEETSVNINAMASGAEQAAVNANEVAGAAEQMSTNMNTIAAAIEEMSASINQISSNAGEANKVANQATVKSGDATGVMNELGAAAKEIGQVTDVIKKIADKTNLLALNATIEAATAGEAGKGFAVVAGEIKELANQSAQSADDIARRIEGIQSGTSKAVVVINDVSDIIVKINQSVEAITNHVTQQTKASNEIANNVSQANTGAKRVAGAIGEVAKGSKDIARNAGEAAKGANVINQNVAGIAQGAKDSVQGAKQINQGANELAKIAGELKNTMSQFKV

SEQ ID NO: 94219 - protein, 427 aa, Unknown
  Obtained from environmental sample
  DOMAIN (27)...(270): Glycosyl hydrolase family 3 N terminal domain
  misc_feature (1)..(427): Xaa is any amino acid
MDNEAKINELISQMTIEEKVSQLSYTSAAIPRLGIPEYNWWNECLHGVARAGNATVFPQAIALAATFDEAFIEEVASAISDEARAKYNEAIKQGNRGQYWGLTFWTPNINIFRDPRWGRGQETYGEDPYLTGRIGTAFVKGLQGNDPENMKTAACAKHYAVHSGPEKFRHTFDAVVSKKDLFETYLPAFKALVDAGVESVMGAYNRFRGDPCCASHYLLKDILRDRWGFKGHIVSDCWAIRDFHENHKVTAAPEESAALALNAGCDLNCGCTYPHLTVSLKKGLVTEEAIDTALRRLLRTRFKLGMFDPPYKGKYGKLGRKIINCEKHRKLALKAAEKSIVLLKNDNNLLPLDSSAKKIIVVGPGAANAHTLFGNYHGVSSRFVTILEGLGEKVKDKYGINFDYRQGCLMYSDIHSSNAEFGIANIA

SEQ ID NO: 94220 - protein, 258 aa, Unknown
  Obtained from environmental sample
  DOMAIN (30)...(217): ABC transporter
  misc_feature (1)..(258): Xaa is any amino acid
MITAIEVNELCAGYGTGDVIRNINFKAEKGECLCVLGPNGCGKSTLLKSIARIIDYRGSVLVDGGDISVIPRKRLAQKIALLSQNMQVYFPYTVYETVSMGRYAYSLGFLKNLSAEDAAIINETLKKLDLWDSKNRMIDELSGGTLQRVFLAKTLAQTPRVILLDEPANHLDLKHQIALLDYLKAWVKENDTSLIGVFHDLNLARYIGDRALVMDNGNVAACGMIEEVLNSAVLETVYGINIRAFMREALEKWKTNNK

SEQ ID NO: 94221 - protein, 482 aa, Unknown
  Obtained from environmental sample
  DOMAIN (1)...(260): RecF/RecN/SMC N terminal domain
  misc_feature (1)..(482): Xaa is any amino acid
MLEELTIRNFALVDSISLSFRPGFNVLTGETGAGKSIIVGSLGFLMGAKIEADVIRSGCEEASVSAIVSIGKGNNGAFEWLRSHEINSEEDTIIVRRNIKTSGKGSIYIQETPVTRTDLSGFMTLLFDLHGQHDHGSLLRKENHRRFLDSFAGIEEEVFAYNRVFIELAEKRKTLEASFSSQKDREARLEILRYAVDEISAAALRSGELRDLENEAQMLSGFEKLAAYINGASDSFFDGEASLVSLARRSRIAMDSAASIDTSLSVLQKRIEDMYYEAEDIAGELRSYRDSLTYDPRRQQAIDERLALLYKLKRKYCEATRSAATVRSAATAVGDSVSVEDAILAYRASAEAEIEALSNIEENRENLKAAIAELEKDIACKAAVLRQKRTAAAGALGQWISGILKRLGMPNARFSPSITPKTQAGTPQGILKSQTVVCGPWGAEEVEFLISANTGEPLKDLSRIASGGELSRVMLAIKSVLS

SEQ ID NO: 94222 - protein, 111 aa, Unknown
  Obtained from environmental sample
  misc_feature (1)..(111): Xaa is any amino acid
MMDIGPIHRTEYELENDRSEPVIIAEAPGRVHYLGEHGEPKAGLYLSSAIDRYIRVAVSGRKDSSLRFYAADLGERKRSTLVNLKYKREDRWANYIKVAIHLFAELGFPVK

SEQ ID NO: 94223 - protein, 357 aa, Unknown
  Obtained from environmental sample
  DOMAIN (24)...(318): 3-dehydroquinate synthase
  misc_feature (1)..(357): Xaa is any amino acid
LQFNFGTFQTTAHIMPVLPGIDEIIKNFGTEEGVKSLLICDTNTFRFAEKIRGNRDIPVCTLEPGESQKDWQSVETILRFAGSAQIGRDGIFIGIGGGVITDLSGFAASIYMRGCALALVSTTLLGMVDASVGGKTGFDLFGIKNLAGTFYPAKHVYIPLESLASLPPVEWKSGMAELIKTAVLEGDEFLAMVEGLNGGFTNTVIAPCINRAVQFKGRIVEEDPFEKGNRRMLLNLGHTFGHALEAAAGLGRISHGEAVAWGIARSCELGLALGICPPHRAKRIMSLLTAFDYETAAPHPFAAGDELIRALGSDKKKRSGKLIFIVPDEKSARPVTAEAPEFLNTVYRIIKGEMSLI

SEQ ID NO: 94224 - protein, 432 aa, Unknown
  Obtained from environmental sample
  misc_feature (1)..(432): Xaa is any amino acid
YTEASGLSAGTLTIAKATPVLAHYDIANLIQRYPAVNNTTVAAVTTTLKTPRTSYGTVKVYYEGVTTSGTTYAKSETKPDKIGTFAVTFDVAEGTNNVAATGINAGTLEINVFKAIDELGTWLGQQTANNAATAFPVALNVSSFGGIAGRADQEGSVGAMLLANLTKFVTLDLSGSTTFTAIPNNAFSVMTGPTSFNTCTNLVSVTIGNNVTSIGQDVFVRCTSLASVTIGNGVTSIGDNAFSSCSNLTAINVDPANTTYSSENGIMYNKAKTAIVLVPRRITGAITIPNSVTSIGGSAFYGCTSLTSVTIPNSVTSIGGSAFYGCTSLTSVTIPNSVTSIGGSAFYGCTSLTSVTIPNSVTSIGEFAFEDCTSLASVTFQGTIASSEFHGTAFNGIGDLRDKFYATDAANGTPGTYTTTAPVSSGSVWTKQ

SEQ ID NO: 94225 - protein, 523 aa, Unknown
  Obtained from environmental sample
  DOMAIN (255)...(331): Helicase conserved C-terminal domain
  misc_feature (1)..(523): Xaa is any amino acid
MPVQEQVLSHAFGADGHASQDGHASQDGHAAQDLYVQSQTGTGKTAAFLIIIFQRMLTEEALYKRKALIMAPTRELAVQTEEEAKKLGRYLPFKTGCFYGGVGYGQQEKLLKENAQILVGTPGRVLDLNKSGKMNLMEISFLVLDEADRMFDMGFYPDLRKLIKVVPSSDRRQTMLFSATLNAWVKNLAWEYTKSPFEIEIKPEVVTVEEITQVLYHVPSGDKMTLLLGILKNEQPESAIIFCNTKKHTEIVAKRLKLNGYSCEFIIGDLPQVKRLKIINDVKAGKTKFLVATDVAARGLDIESLAMVINYDLPVEAENYVHRIGRTARAGKTGKAITLASEQDVYELPAIERYIGKKIPSEIAMQEHYHNDASAGKFISIDNYDGNRTGGTKSAGARRDNFKRDDRRKHASSKTHNKNYSKNQASSNTEHKHTEHKKKPVEHQGKNRDLSRLTMEERMAMYKKKYAGETGKPQHAEHTNKKQYQQTKHKHQQAEHKHKQTADKSANIKTANAKPAEAKTVPI

SEQ ID NO: 94226 - protein, 597 aa, Unknown
  Obtained from environmental sample
  DOMAIN (25)...(297): ABC transporter transmembrane region
  misc_feature (1)..(597): Xaa is any amino acid
MSRPSVSLKEYKALIPYVSRYRIQYVFGVVCLIIVDGAQIAIPQFIRKAVDLISSGNYQWRQIIMLSIYMTGVMAVVACGRFLWRYFISGSSRRIEAQLRENLYGHLQKLSWDFYQKNKIGDIMARSISDLEAVRMSIGMGVVALFDFIFMSTSILIIIFVQDASSALFSIIPLPLVSALILLFGNLVGKKFRAAREAYSKLSDNAQETFAGIRVVKSFVKEWWFIKKFAGSNDDYRKANMELVRLFGFFFPFIQFLSGFTVLIMLAIGGMRVINGLMTPGSLVSMFSYLNMLIWPLMGAGFMVNMIQRGAVSLGRINEIFNTPPSIKESENPSAARPSETLFANVPALELSNLTFSYNDTNTVLDGITLKVNRGEWLGIMGRTGSGKTTLIKTFTRMIDPPPGSVRVFGVDARNWPLEELRKLFAVSPQDSYLFSDSIANNISYGYDGADTQKNAAVDKAVVFASLDKDLAIFQQGKDTLVGERGLTLSGGQKQRAAIARAVIMDSEFLILDDSLCAVDNETERKILEALRNERKGRTTIIISHRVSTLKYADKTLVLDKGKMIEYGTPEQLTSLGGFYSRMAAFQKLEPAEAQNV

SEQ ID NO: 94227 - protein, 255 aa, Unknown
  Obtained from environmental sample
  misc_feature (1)..(255): Xaa is any amino acid
LSSGIFADPDIVMEKLTETAKTLRTEMGFGGYIHLKVIPGTGDKMIREAGKWADRLSVNIELPTEKSLQCLAPQKSKKAIIGAMNDFSCLSREMEETKNKSRFLPQGKTSEVQFAPAGQSTQLIVGATNEDDRQIINLTSSLYNKFSLKRVYYSAFIHPGSIAHKENILDPRLPESSSPPLVREHRLYQADWLLRFYHFEAGEILTEDQPFLDAHIDPKTAWALKNLDFFPIEVNSADYETLLRIPGIGAKTARR

SEQ ID NO: 94228 - protein, 597 aa, Unknown
  Obtained from environmental sample
  misc_feature (1)..(597): Xaa is any amino acid
DLDICITVREENYAAAEIGFPDSVILIKNENKIMRGNIIGAPSNISDIAYTFEDEGIAGMTPQGLEVLLKGLEAGQTFLTVTSSRFNYYKKILVICLNSPEELEKLYYFTVDKMLYRIRKNEEIKINLTFGGNGFPESEKALIEWSDKSNNQTVLLTSPLGASNTIVGRNEGQAVVQVKSALMAKPVEITIEVTEEAVGSDFYKFVYTPIQQLTKNKVEMIPVSIYYGNQFYNDYDIYKPGIKLEQGYSAVKVDVSDTSVAEAAMAGQSLRVTAKSAGKTTVTLSHEMIHEDAKLLIVVYEGAVPPSSSEPVVFIPKTHWLIPEGHTREIALQTNSAAGLNGIIWNNHNAALFSVDSSDKSNATVTAIKEGSGTITIEAGGKVLDTIYVSVSAGNAPAINAATESIIILSMADINYGPYRTKVLAGGSSGNITMWIAADSSIVKIKPIDNYCDLTPVKAGLTGLTVSGLGYTRTIIVKVVNTEAEKMAAKLMNLDQRYYKIKKGETIVLNPYYKAVRPSYPVSPTLIYDNKVIQCTPTSAGVSITGKNAGIEKLKLYNEDCENKSFEVEIEVDETITGGFDEIKNVVYMTTRRTVSL

SEQ ID NO: 94229 - protein, 89 aa, Unknown
  Obtained from environmental sample
  misc_feature (1)..(89): Xaa is any amino acid
MIRIEIIANHSVEENILEALKKEDAGKYYTKYPGIFGVGSAGSRMGDAIWPEENFAMVIWCEEDEARAIKRAVDSVKEKFPGEGIKLFR

SEQ ID NO: 94230 - protein, 103 aa, Unknown
  Obtained from environmental sample
  misc_feature (1)..(103): Xaa is any amino acid
MQRILNNPDDIVDEMLKGFVKVHSDIVAVTDNPRVIRRKNIPDGKVGVATGGGSGHKPAFIGYIGENLCDAVAVGEICTSPTAAAFLDAFRAANKGKGVACLY

SEQ ID NO: 94231 - protein, 96 aa, Unknown
  Obtained from environmental sample
  DOMAIN (64)...(94): Ribose/Galactose Isomerase
  misc_feature (1)..(96): Xaa is any amino acid
MRTIVIGCDNAAVPMKAMLINFLEAKGVIVENMGCDSADDPTNYPTVAKRVCEKIIASNYEKRGILVCGTGIGMAMTANKFKGIRAAVCHDNFPPS

SEQ ID NO: 94232 - protein, 71 aa, Unknown
  Obtained from environmental sample
  misc_feature (1)..(71): Xaa is any amino acid
ISHVIALDVSEDRDAYIHRAGRTGRAGKKGVMASIGDEVEMRRLAVLEKKLGITVYPKELYGGRIREPEIE

SEQ ID NO: 94233 - protein, 546 aa, Unknown
  Obtained from environmental sample
  DOMAIN (17)...(538): tRNA synthetases class I (I, L, M and V)
  misc_feature (1)..(546): Xaa is any amino acid
VYKSVDPKVNFPKLEEEVLAFWEKNKIFEKSISQREGKEEFVFYDGPPFATGLPHFGHFIPSTIKDIIPRYQTMKGKKVERRFGWDCHGLPIENLIEKELNLNSKTDIEKYGVANFNEACRAAVLRYVKEWRRTITRLGRWVDFDNDYKTMNPDYMETIWWVVKSLWEKGLLYEGYYNLPYCPRCSTVLSNHELNLGGYKNVHDPAITVRFKIKGTGDWGLGTGEGTTPLNAYFLAWTTTPWTLPSNLALTLGPDIDYVLIEDLPTSHSQLPIPHDHYILGEARLSAYYKKESDYKIIWRKKGAELKGIEYEPLFPYFSWAAESNAFRTYLGDFVTTEDGTGIVHTAPGFGEDDARVLKGTGVPVLVPIDEECRFTSEVPDYAGLFVKDADNAIMARLKAEKKLIKKDQILHAYPHCWRCESPLIYRAIGSWFVSIEKIKQDMIEANNQIHWVPDHIKAGRFGKWLEGAREWAISRNRYWGNPLPIWKCPDCGKTVCIGSRAELKEYSGVAAIDDLHMHFVDKVTFPCSKAPGEKNCQGTMKRVPE

SEQ ID NO: 94234 - protein, 287 aa, Unknown
  Obtained from environmental sample
  DOMAIN (1)...(287): tRNA synthetases class I (I, L, M and V)
  misc_feature (1)..(287): Xaa is any amino acid
RSRAERHRVRAALSVFSWAAENNAFRTYLGDFVTTEDGTGIVHTAPGFGEDDARVLKGTGVPVIVPIDEECRFTSEVPDYAGLFVKDADSAIMARLKAEKKLIKKEQILHAYPHCWRCESPLIYRAISSWFVSVEKIKQDMIEANSQILWVPDHIKAGRFGKWLEGAREWAISRNRYWGNPLPIWRCPDCGKTVCVGSRAELKEYSGVAAIEDLHKHFVDKVTFPCSKAPGEKNCSGIMKRIPEVLDCWFESGSMTYAQNHYPFENKEFFENHFPADFISESLDQTR

SEQ ID NO: 94235 - protein, 244 aa, Unknown
  Obtained from environmental sample
  misc_feature (1)..(244): Xaa is any amino acid
ALKVMGIEPIAISLDDYYVGTDKTPLDEKGQPDFECLEALDIPYLNQQLLSLLAGKEVTLPVFDFKTGRRRESGGRKIRLDRRTMLIIEGIHGLNDALTPQIKRETKFKMYVSALTQLNLDDHNRISTSDNRLLRRMVRDYQFRSAGAARTFNMWPSVRRGEMKHIFPFQNSADAAFNSALDYELAVLKVYAEPLLRTVKPGMKEYSEAARLLSFLENFAPIPPQYVPGTSILREFIGESEFKY

SEQ ID NO: 94236 - protein, 149 aa, Unknown
  Obtained from environmental sample
  misc_feature (1)..(149): Xaa is any amino acid
MLEKRKIKTNQVSGNAAMPRKKRRLKYIAVLPSFITLMNGVCGFFAIIIASRSPDIRWNFSFIPGAGMSPFTLAGVLIFLAMVADMLDGRVARLTRTTSSFGGQLDSLSDAISFGIAPAFLIVQLVELHLTYVILEPRQLSMILERGII

SEQ ID NO: 94237 - protein, 440 aa, Unknown
  Obtained from environmental sample
  misc_feature (1)..(440): Xaa is any amino acid
LYGLCLILLFTSVCFNIQAQTRTNIRDDTQAALKYEQWIQQAIDENRWDEAHAAAIRAMDFSDIMSDIPYLLAVIQAHYKDSIRQKTVIENLNMAIDANRWFRYSAYYNAHLLKAQMLISMREYNDAIICLDQITASDSRADAAMLRLLALRGMASGKEPGYDYAYALAQFRSQVLLAMDGFPRDPRPLRIFFEYAHNRKPQASELPESDISLLELALKRLSFLQEADPELAWMAAPFMRNIDDARRSAAAYRSGNLSNDENFKPNPASIPVALNLGLIDDKTAIEEVFPSVTENEPAIKKDLIVDTYKLLRSEEGRDSFTRKLLVFSGFIITDDENDGYIENIVHYKTGFINYLVDNLSNNILSFKVDFGPDNDPEKVSVFISKNNSSRERDLSRRIDLQWERYPSVKQAELENETFNFGPVFFNYAPINFIELGGSDK

SEQ ID NO: 94238 - protein, 269 aa, Unknown
  Obtained from environmental sample
  DOMAIN (61)...(223): 5'-nucleotidase, C-terminal domain
  misc_feature (1)..(269): Xaa is any amino acid
TTSFTITGLTPDTTYSIAVSATNESGEGAKSSPITATTTATAPALDWDNVASYDKDDGDLILGTATAAFDGTNGRYQETVMGNFTMDGLAEYARYISGERIDFALHNDSFMRNNPTLSAGEILNSDITGISGMTDTLVVATFTGKQVKDVIDGFVNSSSTGSWNRNCAVIVSKELSYTIDMTTNPPHAANVKVNDAAIVEDRDYRIAVGNFIGDNTAAGRFLPVLDAEKKTKYTTTVSQAVAMYVLAKGTIDPSDYPLGRYTGVVPELQ

SEQ ID NO: 94239 - protein, 298 aa, Unknown
  Obtained from environmental sample
  DOMAIN (212)...(245): Tetratricopeptide repeat
  misc_feature (1)..(298): Xaa is any amino acid
MNRKTITVKTAAFAFLLAVCASAAYAEGPADRSAGEAGTPQTAEEFFESGNMYFDKGEFDLAIADYSAALKIKPDFLDALISRGSAYTEKKDYDNAMSDFNALLKTEYNIYALYGRGIVCVHRGDYDQALLEFNTALKINPDFIDALAQRGSVYLLQEKYDLAIADFNAVLEIEPNDAHALYERACSYFFKSEYDLALTDYNAALEIQPNNSKILNGRGYLFMNDGKYDLAVKDFNQAVLFSPNDITPCVNRGYAYLEMKDWNRAIADFETALTLNPGEEHIATIERWINDAKEARGR

SEQ ID NO: 94240 - protein, 274 aa, Unknown
  Obtained from environmental sample
  DOMAIN (157)...(272): Peptidase family M28
  misc_feature (1)..(274): Xaa is any amino acid
MALRFATPSMTAGTKGVQTGPVMLAPEKAEDVEKMKDKIRGAWLLWPGKSEGFARDGRKKTEITPLVRACIDAGALGTVQSAPEPLQAMDGNVASWTDLPVLPDIKLDEKQYNEIKTLLDKGDAVELQFDIRNHFKMGPVPYCNVIAVLDGREKPDEYVVLGGHLDSFDSATGACDDGNGATSAMEAARLLAAAGVKPRRSIMVVLFAAEEMGLLGSLDVVKKHPEWNDNISLVSARDGSPHAITGASVSPSWYEDFERFTAPLKDMNPKFPFL

SEQ ID NO: 94241 - protein, 245 aa, Unknown
  Obtained from environmental sample
  DOMAIN (53)...(222): Glycosyl transferases group 1
  misc_feature (1)..(245): Xaa is any amino acid
MPNSLRRLDRIIAVSEWVKQELVQRANVKENLIEVVPNGIDHSAFYPRNRNEESVLLIQPFSFRRPYVLYASRIDHPIKNHIRLIEAFGIFKERTKFPHRLVLAGADSNNAAKVKEAAASSPWRADIFFTGHFPTKSLPELYAGSDFVIIPSMYEGFGMGALEAMASGVPVLCARAASLPETAEHAALYFDPLNIEDMADRMVNISTNREMYNDCRRLGLERAKLFTWEQCVKRTLQIIYETCGK

SEQ ID NO: 94242 - protein, 408 aa, Unknown
  Obtained from environmental sample
  DOMAIN (36)...(398): Aminotransferase class I and II
  misc_feature (1)..(408): Xaa is any amino acid
RSGLKIINKSSKLDNVCYDIRGPVLKEAKRLEDEGCRITKLNIGNPAAFGFNAPEEIIHDMARNLQNAQGYGDSHGLFAACKAVMQDFQLKGVMDVGIDDIFIGNGVSELIVMAMQALLNSGEEVLVPMPDYPLWTAAVTLAGGRAVHYLCDEGANWNPDLDDIRSKISSRTRAIVVINPNNPTGAVYERSILEGIANIARENNLIVYADEIYSRITYDGAVHIPMSTIAPDILTVSFDGLSKSWRATGFRAGWMVLSGDKKKAADYIEGLDMLANMRLCPNMPAQYGIQTALGGYQSIKDLIIPGGRLHEQRDAVINLVNEIPGLSVVKPKGALYCFPKADIKRFNITNDEKFMLDLLREQHLLLVHGTGFNWKEPDHFRIVFLPDKDMLTDAMLRLALFLDGYRQS

SEQ ID NO: 94243 - protein, 182 aa, Unknown
  Obtained from environmental sample
  misc_feature (1)..(182): Xaa is any amino acid
MKKQGFNPFLPSWEYIPDGEPHIFDGRVYVYGSHDKFNGYVYCMNDYVCWSADENNLTDWRYEGVIFKKTDDPFNADGSMNLYAPDVTRGPDGRYYLYYVLDKTDVVSVAVCGSPAGKYEFLGYVHHPDGTMYGRKEGDLPQFDPGVLTEADKPIFIRANAGRAIKQKKALLRRFWMPICLR

SEQ ID NO: 94244 - protein, 297 aa, Unknown
  Obtained from environmental sample
  misc_feature (1)..(297): Xaa is any amino acid
MLTITQGPFFIIPGSCYSEGTGFEGHEFFEASSIRKFNDTFYFVYSSVTLNELCYATSKNPLKDFSYGGVIVSNTDMHFGKPMNHNGNNHGGIIEIKGKFYVFYHRHTNGRDFCRQACMEPIEIDKDGKIKQAMMSSCGPNKGPLAGFGEYPAYIACNFFSVTENDKQEWDLIPKGKWPRRDTRLPYVSQDGKDGDEETGFVTNINDNYGVGFKFFDCKGVTGIKVKTRGYSRGFFEVKTSLNGEPLGTIAIVSSNIWKEFSADIAIPDGIQALFFVYKGTGSATLGWIGLEKCPAV

SEQ ID NO: 94245 - protein, 373 aa, Unknown
  Obtained from environmental sample
  DOMAIN (6)...(309): Aminotransferase class I and II
  misc_feature (1)..(373): Xaa is any amino acid
AYTGCKKKFDTTGSVATPIFASATFAHPGVGQSTGFDYSRSLNPTNVHLEDTVAALEGGTEAIAFSSGMAAVSTLMELFSPGDHIITSDDLYGGTFRLFEKVSQKNGVKFSYAATPKDMEKEITKSTKAIFIETPSNPMMHVIDIAAVAEIAKKHNLIFIVDNTFLTPYFQKPFSLGADIILHSGTKYLGGHNDTLSGFLVVKSNNLLEKLRFIAKTTGGCLSPFDAFLIIRGIKTLAIRMERSQETAKKIVNWLLEQGTVKKVYYPGLKEHPDYEISLRQTSGFGGMISFSVQSGQTAVKILESVKMIKYAESLGGVESLITYPVLQTHADIPESERKARGIDECLLRLSVGLEAPEDLIADLKQAIGDSNI

SEQ ID NO: 94246 - protein, 290 aa, Unknown
  Obtained from environmental sample
  DOMAIN (78)...(290): Glycosyl hydrolase family 10
  misc_feature (1)..(290): Xaa is any amino acid
NAGKKITWTSSDPSIVSVHENGKITATGVTDFLTEKYMFIPATGTAVITGTTVEGKTTSITVNTTVKPQTATVDSVPAMKDQFKNYFMMGNIAGSANDINGTGITATRLKRHYNILTAENIMKPNSLTNFRDASTGVINYAWTTNPNNNTDSFVNACTTNGFKVHGHTLLWHSQNPQWVWEQIAGKTGTIASGMDKTRALTVMREYITEVMTHFKGKVYSWDVLNEAFPDNARSSANWKDAIRKNAGGEGQDANPWYIAIGSDFVYEGFLAARKADPGAILYYNDYNTDN

SEQ ID NO: 94247 - protein, 287 aa, Unknown
  Obtained from environmental sample
  misc_feature (1)..(287): Xaa is any amino acid
IREVIKANHQKVKIWNLSISVKDQISETAFSDFAIFLDQIQETYNVLICKSVGNCDNFKYGRPRGKLHKGADSVLSLVIGSIAHAKGSYDLAEIDNPSPFSRIGPGPEFIIKPELVHYGGNAGVKPDGSVTITGVKSFTVDGDITQSVGTSFSTPRIAGLATGLYQEIDQEFDPLLIKGMIVHSAKYPDNLTLPYAERTKYVGFGKPPSVPEILYNDPHEITLILRETLLKGSFLDILDFPMPSCLISNGFYTGQIIATLVYSPILEQSQGSEYCQSNINVYLGTYD

SEQ ID NO: 94248 - protein, 149 aa, Unknown
  Obtained from environmental sample
  misc_feature (1)..(149): Xaa is any amino acid
MWDYEFYGDETVRTFEIEAFRYAASLPINVVTFQNSPSSKGWKLKIIDITKEAGPSVKIDLPLSDIRRPVAGKTPLKTINNYQYSGTISWSPNTSTFTNGTAYNATISLTGKAGYTFDGIAANGFKVIGASNVTHATGSGNKMTITASF

SEQ ID NO: 94249 - protein, 259 aa, Unknown
  Obtained from environmental sample
  DOMAIN (65)...(259): Mechanosensitive ion channel
  misc_feature (1)..(259): Xaa is any amino acid
VNFDFNFTRFWGDYGKSILEIGRKIIIVLLIAAGGEIAISVSKKLAGRAAAGKIRLDENLRSVLRMAFRYGIVIVCLLMILDTLGINTNGLVALLGAAGVAVGFSLRDTLGNIATGIIILFLRPFQKGDFIECGSIAGSVREMGLFATTLETADGIFISAPNSSLWGVPLKNYSRNPYRRLDIQVSISYSDSIDEAFKVLNEIINEESRFLKEPPSQVTVQSLGDSGIGITLRAWVRGSDYWGVYFDQMKNVKERIEGA

SEQ ID NO: 94250 - protein, 246 aa, Unknown
  Obtained from environmental sample
  DOMAIN (88)...(234): Papain family cysteine protease
  misc_feature (1)..(246): Xaa is any amino acid
TATITATAQGSNNTASCLVSVLEQAPINPDYLEWLAKEEERAQRIKDGLPVEERDPRLGFIPSPYALPSIDGQGVQIGPMAANIKASYPAKYDLRQLDYLSSIRDQGQYGTCWAFASLASLESNIKKTTGQNTDFSEWHLAYYTYNSLNGLPAFAGAPGAEAYHRGGNDALSTAIMSRGKLAGGPVNESSAPYGGSTPSPSAATTAAIKNVYRFNTQNRDIIKGMVQTYGAAYIIFNIVQNSSYYN

SEQ ID NO: 94251 - protein, 128 aa, Unknown
  Obtained from environmental sample
  DOMAIN (3)...(123): PIN domain
  misc_feature (1)..(128): Xaa is any amino acid
MELLIDTQSFIWFMEDDIKMPIKIKEIMNDENNALLLSIVSLWEITIKTSIGKLKMQRSIDDVIKNISADGFKILSIKPNHLLALSKLEFIHRDPFDRMIISQGIAENISVISADSVFREYPVQVIYS

SEQ ID NO: 94252 - protein, 370 aa, Unknown
  Obtained from environmental sample
  DOMAIN (106)...(336): Transposase DDE domain
  misc_feature (1)..(370): Xaa is any amino acid
MQEILNSLPSGWRAKAHELRAMRRDRGAIRSPESLFRLNMLYVTNGGSFQMAATGMSLTENISMSKVAAFKRIKNSAGWLRWMAKGVCENSSLSLPKPSFLGRRRVILVDASSDAVKGSKQSDYRLHYAFDLFNFQCRSMELTGIKEGEKLSRYKFGSNDIAVADRIYCTISGMEHVLSQGASFILRFKSKGFHFYDAEGERLDILPRLRHLKAFGSLSIRCHYRLPDGTLRPLRIVAMKKNGKSIAASERRMIRKVSRKQERAVQEDTVELNKYIVLATNLEYSDAQILELYRARWQIEQLFFRLRSLFGYGDVPSVRDDTAQAWFYGKLLLAAICEDILKRMSFPPGLGAAIGDIVGAKLVERIMPGS

SEQ ID NO: 94253 - protein, 326 aa, Unknown
  Obtained from environmental sample
  misc_feature (1)..(326): Xaa is any amino acid
MKMKGYSTKEIAEITGCSRITVYLLWHKWNKAKGKKEKENVIALKKTGRKTGSGRTLTEKQENIIKKTIIKKYPDQIDLDYALWTREGIQQLIQKIFSITMPIRTVGEYLRRWNFTPQKPKKYAYERDEEKVKEWVEKEYPRIKKQAKRQKAEIYWGDETGITTTDVRGRGYAPEGKTPVVQQRGKKKSMSMISAITNQGKIYWKLFEGSINSGKFLEFVKRLTMNKSRKIFLIVDNAKPHHSLILKEWLKKNKKKIELYYLPSYSPDLNPDEHVNADLKYGIGSRAPKSTKENMINAAGEHMQLLKQTPERIMKYFKDPTISYAA

SEQ ID NO: 94254 - protein, 247 aa, Unknown
  Obtained from environmental sample
  DOMAIN (2)...(247): Protein of unknown function (DUF935)
  misc_feature (1)..(247): Xaa is any amino acid
VGVIDDIKKWFNKKDASNSSDSDEQASAVQYTNRHPWGDFSLLNSLTPERLATILNDVRRGECPAEYLELSQDIELRDLHYRSVLSTRKDAITGLEIKVIPAGEGEKEAELAAAVERDIVKNSSAKLRSLIRNMLDALGKGFSVNEIIWDTGSVPWKPKAYKFRDPRWFQYDRETGDNLMLRTPYGNDLEPLKPFQFVVHEPHLISGKQITAGLALPALFYWMLKTYDVTSWAAFIDRYGYPIRIGK

SEQ ID NO: 94255 - protein, 40 aa, Unknown
  Obtained from environmental sample
  misc_feature (1)..(40): Xaa is any amino acid
MTEDVLLPYQKAWIEDKSSVKVWEKSRRIGASYVEALDSA

SEQ ID NO: 94256 - protein, 97 aa, Unknown
  Obtained from environmental sample
  misc_feature (1)..(97): Xaa is any amino acid
MENIFLPLRRIIILQGIEAAPGRELSNEMIQRLLKSQCHACSIAEVNEQINWLENRGYVKATRLDDSGFINVHITRPGIDVAQGNTRADGIDPPPEI

SEQ ID NO: 94257 - protein, 551 aa, Unknown
  Obtained from environmental sample
  DOMAIN (303)...(534): MutS domain V
  misc_feature (1)..(551): Xaa is any amino acid
MINKLQFDKLTLAEKTQILLEYPKILENAAGFAVSEEAAIIIKDSKPFYDTGKAAEIKEIVYAIYTLIKSRNDEPRSWLPSIAFLLPKTETPGAVLALDEALAIGLFIERAAELTNWLIKDRGDKEQETRGRRMLLAMIGGEALPGLEPAAAEIFKVIDREGSLRDLPSLRAIKKRISSLEKELKTAVLRYTAQDEYKRMLQSPLPSQRDGRTVLAVKANFRARISGIVHEVSSSGQTVFIEPLDVVEKNNDILLEKRNLDAEVQKILRELTEKINAYAENLKTLHTTVVELECLRARAKYSIVTKGHFAKDANGEQEALILKKARHPMLKKAVPINIEMKNTTRTLIITGPNTGGKTVALKTLGLLAMMNQSALALPLEEGSVLPMFDGIYADIGDEQSIDQSLSTFSAHITKISAITAFATENSLVLLDELGSGTDPEEGGAIAMAVLDYLIEKNSRMIVTTHHGILKNYGYTRQSVENASVEFDAQTLSPTYKIINGLPGESRAIDIAASNGLDGAIVNSARKYIDEKKSDVSGLIKGLNKNKGSLSG

SEQ ID NO: 94258 - protein, 341 aa, Unknown
  Obtained from environmental sample
  DOMAIN (5)...(335): NQR2, RnfD, RnfE family
  misc_feature (1)..(341): Xaa is any amino acid
VPDKKIIFLNKPQINISCPSALRMWLVCACAFLCVIQSAFSDGGKSLVVALTAFFSALIIELLFTHKKYGAAKIKDGSAAATAMILSMLLPNQIQPVLVFLGVAFAIIVVKYSFGGLGSNWLNPALGGWLFIRFSWASAFKDAFGGSTPSVSEMVTTADISALDSPVTEFFNNSIFSVAGVQLPSGYINLLFNNDAGLITDRGLFFLLIGTVIITAVGINRGWVPLVFLAVYGFLVRFAGDLSGMYWNGDMLYGIFSGGAIAAAFILAAEPSSSAKLKPGIIFAVVLSAFLSWFFRYKCMEYYGCFIALALTNCITPIVRLLEDKIILFRINRDSFRETSL

SEQ ID NO: 94259 - protein, 691 aa, Unknown
  Obtained from environmental sample
  DOMAIN (1)...(535): Carbohydrate phosphorylase
  misc_feature (1)..(691): Xaa is any amino acid
MLNADGFQQESYPENDWYNMPVEKKVGKDGQPLKISVDLAGRQAVAQIWEVRVGRSSLYLLDTNIEENAPDIRNITAALYGGDKETRMQQEILLGIGGIRALRALGINPAATHMNEGHAAFMGLEKIREIMSEMNFTFAEALEAVWPTNIFTTHTPVPAGNERFDISMMEKYFRSWPQVLGISWKDFLGLGRINVNDEHETFCLTVLALKMVAYANGVAKLHGVVSRDMWKGLWPGLPLNEVPIGHVTNGVHTRTWISSGMLDLLDRYFGPKFEDRPTELNIWERMDRISDEELWRTHERRRERLVAFVRERIREQYKRTGAVERRIRQAEDVLSPYSLTLCFARRFATYKRGNLLLRDPERLLRLVRDNDRPVQLIFAGKAHPHDMPGKDLIRDIIHFAEKYDVTNRIVFVENYDMSVAKYLTSGGDVWLNTPRRPMEASGTSGMKAAMNGVLNCSILDGWWDEAYNPEVGWAIGHGEQYNDERLQDDIESKALYDLLEREIVPMFYDRGRDGLPREWIKMMKDCMKQIGQSMASHRMLMDYSNQFYFPALKNFRRFSKDGYAEAKSLAAYFSKLQQSWGNLKIVKIDSNAKPVMQRGDMLTVTAFLDLGNVSPNDLQVELYHGTVSNQNKEITDARKVEMKWLKSEGNLNLYQVRVECTDTGMQGHTVRILPKHDALIHPYRCGLIKWA

SEQ ID NO: 94260 - protein, 448 aa, Unknown
  Obtained from environmental sample
  DOMAIN (337)...(370): Tetratricopeptide repeat
  misc_feature (1)..(448): Xaa is any amino acid
LVITHESLAKYIDALSNRPTVIKLHRDLLLQPKSGEADVSTLSEEWKNSLQKIMDIYIPIVIGYDGNDGSLMGFLESIASKNKTIYWCYKRDNQVNDRIKKLLEEYQGVLVPIEDFDNTMYLFGEYFGYKFSEETIQKITSERAEKLIDKYNEWMKNRKESLKTMEKLNDTESMVFDSFKSSSKRNISEFENRSLNEPENAINYNEIGDNYFFQNDYNKAVEYYTKAIELDPNNAKYYYNRGVSYHRLKEYEKAISDKSKAIELEPDDAEYYNNRGVSYHKLKEYEKAISDKSKAIELEPDDAEYYNSRAASYNKLHEHEKAITDETKAIELDPNNAKYYYNRGINYDWLNVNKKAIADYSEAIKLDPNNARYYCFLVRVLCRTSDFDNALINLNKIMSIDGKSAICYNARGYIGMKKAKHDKVKCEADVLDDLNKAIELNNEDSLAV

SEQ ID NO: 94261 - protein, 159 aa, Unknown
  Obtained from environmental sample
  misc_feature (1)..(159): Xaa is any amino acid
SLAGLTDAKSFAEALAPGVGGDISPVIAAGLTLQLPILNASAKERRRRSEFSMEQQRLSIENYVRLIDYEIRSAHMEVLRAKRQIETAKTVSALQLQKLEAEQEKMNAGKSTGYAVLQVQRDLVSANLDEAQARTSYVAALLTLYTKDGTFLQRRGVKF

SEQ ID NO: 94262 - protein, 398 aa, Unknown
  Obtained from environmental sample
  misc_feature (1)..(398): Xaa is any amino acid
RASLARRCLALALAATLLIICGFIPFWRRVSRLLFDAEDLWAVLLLAASLFLSVTCAFATTAVKMHKRGHLHSIGQIFAALVNIAVTAAYAVWVSPTFHAIVCGAAALQFVLTAVPIIFQWRFWTLPPPRAPFDRAEAARLLRYGLPLVPAFIITSVFQGMDKMALRAYASFEEIGLYAAASKFAFLLTIMQTGFYHFWQSASMERYEADHNDVRFFEKTFKYAAVAALTSAGLLLLVKDIVKYLLASTYWDSVRIMPFLLIVPLMNLLSEITGSGIRFKKRTHLYVATAAVGAAANFAGNYCLIPILGARGAAISTGAAYTIYFLTQTWIAGRLFAANYRIYRMIPAFLTVVIFMTLNTFYAVPWWCNIAPVAIVALMHRKTFAEVLDYIKTKKIFY

SEQ ID NO: 94263 - protein, 329 aa, Unknown
  Obtained from environmental sample
  DOMAIN (8)...(312): pfkB family carbohydrate kinase
  misc_feature (1)..(329): Xaa is any amino acid
MISGHDKEYDLLVIGESMVEFTCDGDVVNSNSFKMDVGGADIVVAATAARLGSKVQLISAIAHDQFHNFMRERLTAQKIDISLVTTCQRSYNGLYFTSKKFPEYREYLIHHPGTASKHITPTLVNITDYVDNAKIIYASSELQSVSRQTERAIFNAFLFAHTNKIMVAYDPNVRLARWSLEDSTMSMWNVLPLVDVFFVSWPVESKALFGFDRALDVIGFLLNRNVGIVVVKMGASGCMVGTERSIKTFPQPTGGDEDNPFNTPALAGSAFNGAFLNCIANGYDPFAAAEFANSVALFKGIKGWGIDSLPTVNDLVKRNRPHELSINRP

SEQ ID NO: 94264 - protein, 222 aa, Unknown
  Obtained from environmental sample
  DOMAIN (2)...(197): CobQ/CobB/MinD/ParA nucleotide binding domain
  misc_feature (1)..(222): Xaa is any amino acid
GVCLIDADPQGSATGWIGPDGLDSELADVLLKTTPAKKAIVKTEFPGLSLLPTAGLGGHLKVFSEGPALQQPFCMKNLVKDIAAAGFRFCIIDLSPGWGPIERAALIAADEVITPVMGDSFAADGLEIFADNLKRLRQDMDTDRPGYKRVIVNALDGRIKQHGEMLGEIKANAGGLRVYSVPVDPAFRLGQRKGVTIQALTSAKPETRDAIRALTADILQEG

SEQ ID NO: 94265 - protein, 471 aa, Unknown
  Obtained from environmental sample
  DOMAIN (395)...(441): RNA-metabolising metallo-beta-lactamase
  misc_feature (1)..(471): Xaa is any amino acid
MNVRLYSLGAAEEVTGSKHVIEVDGLSYLIDCGAFQGSRKDTNDRNKKIGISPDRIESVILTHGHHDHCGLLPLLVKQGFKNNIYATPATRDIASLIMMDSANIQARDAVYLKNKADKNGEEFDWTPLYDEQDVIAAVSQTIGVSYNRPMFLDNVVSIEFYDAGHILGSAIADIKIKKGGEELNILATGDLGRKGKPIIRNPEIPKSAPDYIIMESTYGDRRHDSTDDALKKLAEIAKRTVEKKGKILIPSFAIERTQELVYYFHILTDEGIIPEVPIYVDSPMATNATTIFQVHPECYGEEIKQAFIKHHKNPFGFNSLHFITSVDESKALNEQKGPLIIISADGMCEAGRIQHHLIHNIQDPNTTIMTVGYMAENTLGRRIRNRESEVKIHGEWFKLKAQVEEINAFSAHADYYEILEWLKALDTSRLKGIFLVHGEKKAQAFLQKYLKENGFPNVDIVKYGKTYELTS

SEQ ID NO: 94266 - protein, 436 aa, Unknown
  Obtained from environmental sample
  DOMAIN (77)...(386): Pyridoxal-phosphate dependent enzyme
  misc_feature (1)..(436): Xaa is any amino acid
MQFRSTKSDFPLVSYKDAVLNCLPDDGGLYVPDQTADIRELLFSMNEKTTFNSMLSAVAPSILEGGIDPAAASKIAASAFNYEPELINLDDNFSLLKLYNGPTGIFKDFGIAFLSAILEEFMKGREQSMIVSAARADTAVSMAHAFNGRKGISLVLLYPSGQIRGLDPSAFAQNGGNIIPIQVKGTFDDCQRLVVEVIKDREFSTRYNVTSSNTINPGRLLPQVFYYLYAFIQIKNKFSKDLFFSVPCGNFGNLIAGLYAWKFGMPVNGFIAAMNINNSFGDYIRGKKFRPKPLVTTKSPSLDVSYPLNYERLASFYAEAPAIMRNIVYPASINDDLTLQTMELVYKKYGIYIDSNTAVAFASAREIADEYKLNGHAHTIVLATGHPAREASLTGDAVGQSINVPEAILALKKRCDPIAIIQPQLDAVESAIASCF

SEQ ID NO: 94267 - protein, 142 aa, Unknown
  Obtained from environmental sample
  misc_feature (1)..(142): Xaa is any amino acid
MKKLFVLIALVYLFLPLSFSSAQEKDQTETSDVESADVKSAEEKPAEVKPAEKPPMEKTPEEKKTKEIISEEENKKEEKYKDKASANKTASDEHEEEESEHFVLNINFFVRLVIVIAILIILALLIRLVWFLFRKLNDKIEK

SEQ ID NO: 94268 - protein, 455 aa, Unknown
  Obtained from environmental sample
  DOMAIN (7)...(166): ABC transporter
  misc_feature (1)..(455): Xaa is any amino acid
VYPKGSYEGWVSFKGREAAYHSVKDSEKEGLSIIHQELALSPYLSIYENIFLGHMQTKFGIIDWNHYIKESKKYLDIVGLKEPPETIVSKMGVGKQQLVEIARALSKKTELLILDEPTSSLNDDESEKLLNLILEFKKQGITCVMISHKLSEVLKVADTVTVLRDGKSIRTFDVKGDNLTEEMIIKDMVGRDLTHRFPERKSTPGETVMEVKNWTVYHPDYHDIKVVDDVSFFLRKGEILAFCGPMGAGRTELMMSLFGNSYGNRSEGELIINGKRQKFNSPHEAISSKLGYISEDRKSLGLVLIQDIKTNITHSSLNKISNFLGIIDEQKEITEAERYRNDLNIRTPSINQIVRNLSGGNQQKVVVSKALLADPEILIVDEPTRGIDVGAKTEIYGIMNNMITAGKSVIMVTSELPEALGMADRIYVMNEGHIKGVLNKSEATQEKIMHLALVG

SEQ ID NO: 94269 - protein, 278 aa, Unknown
  Obtained from environmental sample
  DOMAIN (49)...(231): yrdC domain
  misc_feature (1)..(278): Xaa is any amino acid
ALTITKNGNLPKWRKIIAAQKYCGGFSFIVLLGMEILSPSDQDIERAAAAIVKGFLVAFPTETVYGLGADAFNTNALARVFTVKNRPHFDPLIVHIAEPKSIGRIADLGLLGNEARERFSVLAEKLWPGPLTLILPKQKEVPSLATAGLPTVALRFPAHPVAQKLIRLSTGAVAAPSANPFGSLSPTRASHVKASLGNKVDYIIDGGKTSVGLESTVLDLSRLSPVILRRGGTSREAIEALIGAVELSPDSGGAPLSPGQLKGHYAPKTPLILCPSGE

SEQ ID NO: 94270 - protein, 222 aa, Unknown
  Obtained from environmental sample
  misc_feature (1)..(222): Xaa is any amino acid
MKNKRFLMAVLAMLTVFALIGCPNPGDDPPPPEDETPGTGPIGTITITYNLNDFPAAQLSPKYVKGGEEIGRDALPKLSSAGHYWLGWSEKPNGTPVTVNAIFNNDVTLYARHAPNKGTVTLPPPLVFEMPYDLHPLRTDVPDDFIRGADISNCLEIEEHGGVYRNFDGQAEDIMKILTDAGVNWVRIRLWVDPTKDSEHYTGDGNNHIGVAKVIASRAKAA

SEQ ID NO: 94271 - protein, 295 aa, Unknown
  Obtained from environmental sample
  DOMAIN (91)...(177): Fibronectin type III domain
  misc_feature (1)..(295): Xaa is any amino acid
ANRFVADSGIVITNSRFEGNIENQARGYRAFMDAVAAAGGAGVMWWGADWFAPVTGLNSNVENSAVFDSTGKALPVLKVLGGIKGANAAKPGKVTNLKAAVSGTTVTLTWDTVNTAITNRYSVERAVSGSGTWAAINDNVAGNNTGTGTFSDTGLLDSTTYNYRVRANNSVGWGNYSDTASATTTGFAAETPTGLRVSAITADSVTLAWNTVTGAASYKVYGAQAASAPADSAYTELGNPTAASYSHTGLTSGNTWWYKVTSVYTSPTSTESARSTAVSATVGAAVDLKSTISMA

SEQ ID NO: 94272 - protein, 425 aa, Unknown
  Obtained from environmental sample
  DOMAIN (1)...(414): EPSP synthase (3-phosphoshikimate 1-carboxyvinyltransferase)
  misc_feature (1)..(425): Xaa is any amino acid
IAVTGNKNEALPVIAAALLSNSPVRLKNLPDIGDVRNMLDIASLLGAAVVNANNNECEITAASIVTSELPVDLSNKIRASALFASALLVRTGKAVITQPGGDHIGRRRLDTHFLAFRALGAALEIEHHTSGSDVTMETAFILTAPAGGLVGADIYLDEASVTATENALIAAAGARGKTVIANAASEPHVQGLCRFLQEMGVEIEGVGSNLLTVHGRGDFGGAVHEIGGDYIEAGSFIGMAALTNSDLTISGVDAGVMRMILFQFERIGIVAETDPAARTLRVASNQPLKVRKDIGGAIPRIEDSPWPGFPTDLLSILLVCATQSEGTCLIHEKMFESRLFFVDKLVGMGASIILCDPHRAVVAGKSQLYGTAMSSPDIRAGMALLIAAMAAQGHSTIKHIEQIDRGYQRIDERLNALGASVVRHD

SEQ ID NO: 94273 - protein, 364 aa, Unknown
  Obtained from environmental sample
  DOMAIN (10)...(364): Family of unknown function (DUF490)
  misc_feature (1)..(364): Xaa is any amino acid
ASLRFSDSTVVITALNARWGRGILSASGRTAWNLEKFADVNLNVRGQDLSFELPDVINVGVSNANLRISDRGGGIVIDGRVVMGHTSYVRDLNVVEMINQMQVAADVRRTPNPFLQSILLRIDLDLANNVSVDMNVGTLLADGRLTIAGTAGAPGIVGEVKIVDGFVYYLDRKFTIADGVIFNPDHSRLNPTLKITAKADVITFTPDSRSEQFTITLNVTGTMDNPVVRFMAEPALSELDILSILTFGERMGGMGSDINNRLMNIAAQQAIGLGTRRLEKLLNLDRVSVSGDVLGTGNSQSAGATIGVSKRFTSRLNVTYETNTNKLSDRKVTAQYRLLPNLFLEGLTTSDGENALDLILRYSR

SEQ ID NO: 94274 - protein, 257 aa, Unknown
  Obtained from environmental sample
  DOMAIN (113)...(191): Surface antigen variable number repeat
  misc_feature (1)..(257): Xaa is any amino acid
MLSGRTLTRSELKEFERQQKEERKRREQRMWHVRSVNIKGNKAYGKKDLQSLMELKRKSRFTNYLMKSDLSALTAFYKNGGFEYVSVKSESVERDSVKRRVAIHISVEEGPRIHVSEVNVDAERFAPGPSVMRRLATKPGAPLVHSDVRQDCRKLKEIAGERGFMEAIVEPEVMVDTVEHQASVVFKVREGPVVTIGDINIKSKGFKSYTIRRELSIRSGDTLNLRNVRESERNLYTTGLFNYVQIKPDVRFHRRRR

SEQ ID NO: 94275 - protein, 413 aa, Unknown
  Obtained from environmental sample
  DOMAIN (205)...(403): ABC transporter
  misc_feature (1)..(413): Xaa is any amino acid
GIGMVRQHPGFIKGLRVWENCILGSERKGRLLFNSGLSKKTVEEKASQWHVNIPLDVPAESLTVGQRQKAAILALLLRDVKWFIFDEPTAVLSVEETESLFQLFRRLCGEGRGIIFITHKLKEALAIANRVTVIRCGVARETRKTSGLSAEELRKEIFGTENFTKQTKDSIQNPHCEPILVIKDLHLEPPGLPAIKNVNLRLTPGMIMGITGSRDGGYETLENAITGFYKIGDKNANHGSGSITLNGHDITGMGVHAFRDAGGAYLGADRLGSNLARELPLFESLIIHAYRRERFGIFLNMAYLKAWCGKIMNCSGVMRSVGDKPVSFSGGMVQRILLQREFAENASLLVLTEPGSALDQINRAALADMLREYAGGGRAVLVFSSDVEELKFFTDEIMTIKDGTLIKWGEDEI

SEQ ID NO: 94276 - protein, 87 aa, Unknown
  Obtained from environmental sample
  misc_feature (1)..(87): Xaa is any amino acid
MSDTTPFFIHESSYVDDGAEIGEGTKIWHFCHIMSCAKIGKNCSIGQNVNVGSRAIIGNGVKIQNNVSVYDDVIIEDDVFCGPSCVL

SEQ ID NO: 94277 - protein, 455 aa, Unknown
  Obtained from environmental sample
  DOMAIN (15)...(386): Protein of unknown function, DUF608
  misc_feature (1)..(455): Xaa is any amino acid
MSFLPEATVWDKDDRFLVRECADYPFFNSLDVYFYGSFSLLALLPRLDGCVMRNFADAVLAVNPQIRRHNSYVNLPYADLPDQKLEGPRGVKGAVIHDLGSPFDALPDAYDWHNVKEWKDLAPKFVLMVIRHYQMTGDISVLSYCRDAVYAAMEYLEKLVEPGQVFPLTHGTDDTFDNLASHGISVYCGSLWIAGLRAAAKIAETLGDHDRATHWNGWAADAQRVFHEVLWNEKEGYFHFYVDKKNGTNEDVFADSLAADTYLRLLNLEPIMDSKKAKRTLTKIYNTNYKKNSPLIGAANLVHKDGSPLEEHNFQAHDVWTGIQYCLATAMYMHGMKHEAEDLIEASFRNLYKEAKIPFAAPEGFNGSCRLHISKIITKSLYSELKKKGALQEDGRISPDLPRDLKKFEREFKTICSKHKIKCNELFVILHNTALKYTAGKYLRPGMVFAVARVM

SEQ ID NO: 94278 - protein, 360 aa, Unknown
  Obtained from environmental sample
  misc_feature (1)..(360): Xaa is any amino acid
ASINPNISTDANVAANPNISVNAAVNRSVDPAINSNINIAVNPDSNPNPGVNPSVNPVVNPGVGTNVNAVDANTNINPNADVNPAPSATDSRPDDFLQIARRIWANTEKLRAGFREAFSTLELQNRASPLDKPADTSTAGVVRRSADSLRTEMLLDVSRALRDVFSSVDELNEIVSQLSSGSKTLPEVEAALLRAVRALEHQARQSGTEVMERLKDVLRELNRLQAEAARVQEQGAAAGAMRSSPADAIRSAALTAARSLENLQLLSTQTRAAETEQHLLALPAKIGGEWTEVQIKFVKKRKGEKGEAKDGHVSIYLNVAPSALGQVTAHLDYHPPNLKLAFQFEKPEVTRWFRQRSGEL

SEQ ID NO: 94279 - protein, 292 aa, Unknown
  Obtained from environmental sample
  misc_feature (1)..(292): Xaa is any amino acid
MIFAVITLWAAFVHGIDRPAFLDSTKVGVVLKDSPAWIAGFMAGDSIVSINGTPVSTWEQVDMHLSQQLGSGYNIALLRAGNPLELSLHVERTGAHLPKMLSGGLMPARYPPVIGGVKPKSGAEGLLEVGDTLLALKGVPVATFDHFAMLMRDYDPDADGEPAASINIKRGSELMHVFVIPTYDSTEHRYLLGIEPTPEPTRIVRYGAMTALGPTINKTWEYSAMIFDVLGKLTSGKVPASQLAGPLNIIPVSGMMAFQGLSSILNFMALIGINLAVLNLLPLVITDGGLLM

SEQ ID NO: 94280 - protein, 194 aa, Unknown
  Obtained from environmental sample
  DOMAIN (4)...(44): Bacterial regulatory proteins, tetR family
  misc_feature (1)..(194): Xaa is any amino acid
HRGKLFFTKGYEETTINDILEAVKIAKGTFYYYFKSKEDVLDGIVKRQIDAGLEKAQAIAADPQLGAEEKLLSVIMAQRLKKPIKKNILPIIHKPANALLHQKIISEYVLRLSPILTDIVQEGIAKKDFNTPYPKEITEILLTAGLVIFDTAYFRWTQEEQTRRISAFIYTMERLTGAKPGSMAQLSGMFKTNH

SEQ ID NO: 94281 - protein, 697 aa, Unknown
  Obtained from environmental sample
  DOMAIN (119)...(196): His Kinase A (phosphoacceptor) domain
  misc_feature (1)..(697): Xaa is any amino acid
MFYITYLLVYDVIYFHFRDRQKGEKADLPIGSILVGMVLGYVCGLIDILDNILFLNISIELFPYSIFAVHTGMAFTLSQRFSGMYKRLEKSNIMLEMAVQERTVELERQTSIAVQASRAKSQFLATMSHEIRTPLNAVIGLSEIELQGSDARCEAGSQANRLPDSSRENIMQIHQSGASLLGIINEILDISKIESGSFELVPAEYDTASFINDTVNLNMVRIGSRPINFVLEINGDFPARLIGDELRVKQVLNNLLSNAAKYTDEGTVTLCMAWSAHSAGKVKLAFTVRDTGIGIRAEDIKKLFASYAQLDTGAKRKAGGTGLGLAITKNLVEMMGGSIGVESEYGKGSAFTAEIIQGIAEYKPIGDETAEALRNFRYQPRGQTGSLGKNIAPLWLGPQVQVLVVDDLPENLLVAQGLLAPYGLKVDTAASGREAVELAKSHSYGLIFMDHMMPEMDGIEAAGAIRKVEGHAHTPIVALTANALRGMREYYLEQGFDDYLSKPISPEALDAIINKWINEQITNNSEQLSESLGQNAKPSDDNSLFIANRSLLIEIEEKRIDKLNHYRAAFEISKTSGGLEIDAEYYGRFTALVGSFDNLPDGLQADKAMLMEAGRNGDAQRIRETLPAFCESLAAMHRSKADSGGTEDETVGLLFRRLKKAIRDGDAAASKKIVAELGAKSLSPRERELYLKLYDLR

SEQ ID NO: 94282 - protein, 183 aa, Unknown
  Obtained from environmental sample
  misc_feature (1)..(183): Xaa is any amino acid
MQTSNKSNRLTFGLGTFGRDMVYSLVSMYLIFYLTDVIKLSISTLWWVAGIILAARIFDALNDPIMGCIVDNTRTRWGKFKPWIVIGMPVSAVVTVLLFTDFGLTDTAYIITFAVFYLLWGISYTIHDISYWSMLPSLSIDQKEREKIGAIARICANIGLFLVVAGIVPLTNLLGDRFGSCKR

SEQ ID NO: 94283 - protein, 230 aa, Unknown
  Obtained from environmental sample
  DOMAIN (89)...(229): Peptidase family M48
  misc_feature (1)..(230): Xaa is any amino acid
MKNIAAMIVLAAMCSVGGCAQGGKTFVDRVAEAAAKGAQTFKVSDAEVVAYADEYMKWKDANNPLCTMGSYDREMRAVAARLEKITSAIPAKLARELNLKIRAYYVPNVNAFSCANGDIRVFSGLMKCMTDDEVLAIIGHEVGHVANKDSKNAFLLALRIAVLKDAVGSIGGRIGEQLSNSQLANIAEELGKARYSQKQEIKADTYGYSFLKRCGKDPANMASALGVLLR

SEQ ID NO: 94284 - protein, 284 aa, Unknown
  Obtained from environmental sample
  DOMAIN (3)...(140): 3'-5' exonuclease
  misc_feature (1)..(284): Xaa is any amino acid
MGDPDEYWQKLAPHLDSRNLPFAAVKAILAPLFADRSIGKCGQNLKYDVQVLARHGMPVNGIAHDSMVLSFLLGSASRHSLDHLSAVLLNIKPIEFESIVGKGKAQKRFDQADFHAAAQYAAEDADLAYQLVQHLAPKLKDEKLKTLYHEVDLPLVEVLAELEMAGIRVDVEVLGDLERQFNREKTEVESKVFGLAGETFNIASPAQLGKILYEKMGLPVYARTAKTKAPSTDEDVLHELAIKDGSEIACQLLRHRQLSKFLGTYIEALPLLVNPITGRVHTKL

SEQ ID NO: 94285 - protein, 382 aa, Unknown
  Obtained from environmental sample
  DOMAIN (168)...(325): D-isomer specific 2-hydroxyacid dehydrogenase, NAD binding domain
  misc_feature (1)..(382): Xaa is any amino acid
MSIIRDKSLAPAGLAKIEWVKDFMPVLNRLEKEVSKEQPLKGLKVAISVHLEAKTAYLGLVLRAAGAQIAVTGSNPLSTKDEICAALDSLGVDVYAWYNATEKEYHDHLLKTLEFCPDIIIDDGSDLVSLLHDEVPQYAKNLLGGCEETTTGIHRLRVRSDAGKLNFPMFAVNDAKSKYLFDNHHGTGQTTWEAIMYTTNNMVSGRTVVVAGYGHCGSGIAARAKGLGANVIVTEVDRFKALEALMEGFCVMPMMEAAKLGDIFVTATSCNKVITTEHFNVMKNNVLLANSGHFDVEVDKAALEKLCVKKERRKPFIDGYRLPNGKVLNLLAEGRLVNIVAGNGHPADIMDLSFGIQLLGVLHVAKNAKQLKPMLYDIPKEI

SEQ ID NO: 94286 - protein, 217 aa, Unknown
  Obtained from environmental sample
  DOMAIN (26)...(197): Glycosyl transferase WecB/TagA/CpsF family
  misc_feature (1)..(217): Xaa is any amino acid
DEKGHNIVLLSLWDLLRTRRNSEYRNYVTKASLVIPISKSIINGIKFLTGQKAFRYMPFDFIVSVLTSLEKKEYSCYLLGGRNKVLHKTEKNIRQTFPKLRVVGRFPGYYKRQEEATIIQAIKKASPSILLVGKGIRGKERWLSRNNASVGKGMRLWCSDIFDVFAEKKKHPSRAAFNKGLEWIGYCFQKPYKFFRIFPYLYYKILLLVYKIKSRKK

SEQ ID NO: 94287 - protein, 500 aa, Unknown
  Obtained from environmental sample
  DOMAIN (69)...(147): Bacterial Ig-like domain (group 2)
  misc_feature (1)..(500): Xaa is any amino acid
GWTSSARAIPGVGFISPNGTTQWSDITSTPIQPVFGPNSWGASGTNPNAPVSTASVCLKAFTEPAANVSVTGVGLNKTAMVLEGLSQEQLYATVQPDGATNRAVYWMSSDSSIATVSSNGLVTGVSVGTAEITVITQDGNHKAKCAVTVVPVATTGVGLEDSQVLIGSQEQLSPIFKPSNATNRNATWASSNSTIATVSASGLVKGVSLGTAEITVTTQDGNFTATCTVTVMPVAVTGVSLNRLTADLAVGNQMLLSATVQPSSATNKAVTWASSDSAVATVSASGLVKGVGAGAATITVTTKDGGKTAVCTVTVTPAISVSGVSLKKTMLLVINGQETLTATVQPSHATNQAVTWASSDSTVATVSASGLVKGVGAGTATITVTTKDGGKTAACTVTVTTGEVAGVSLNKSATALALGYKEQLTATVQPSNAKNKTVIWSSSDEKIAAVSTSGLVTGVGAGTAVITATTQDGGKTATCTVAVATVASKEAYVDPNGHLA

SEQ ID NO: 94288 - protein, 218 aa, Unknown
  Obtained from environmental sample
  DOMAIN (22)...(51): IstB-like ATP binding N-terminal
  misc_feature (1)..(218): Xaa is any amino acid
MIQQTLQYLKEMRLSVMETEYRRQTELAAWNELSFEERLSLLVDSEWRERKNKKLRRLLKAACLREPGACLEELDYSGGRGLEKALVARLSDCAWIREGRHMLITGPCGTGKTYLSNAFANAACRAGYEVKCFRVSRLLVDLQTGRGDGSWAKTLSEMKKPDLLVLDDFGLENLETIHCRDFLEVVDDRSSSKSILLVSQLPVSSWHGVFSDSTITEA

SEQ ID NO: 94289 - protein, 213 aa, Unknown
  Obtained from environmental sample
  DOMAIN (145)...(211): Transcriptional regulatory protein, C terminal
  misc_feature (1)..(213): Xaa is any amino acid
MKRILIVEDDENLSRGIAFAFEKDGHSLITETTLNGGRSALEQQDIDIIILDLGLPDGDGMELCRYVRAQSNIPIVMLTVRELETDEVAGLTAGADDYITKPFSLSVLRARVETVIRRLDANNNQMIYSGKYRLDTGLCKLYRGGKEIPISTMEFRALKYFMSNAGQILSKEQILAALWDSQGNFVDENTLHVNISRLRAKIEDDPKTPKILK

SEQ ID NO: 94290 - protein, 331 aa, Unknown
  Obtained from environmental sample
  misc_feature (1)..(331): Xaa is any amino acid
MKKTILYAAAITTAVTAATAVIVGCGAEQTNAAATSYNAATPNSNTATPYNNAAAPADTATPYVPVSTVKVVSAGAGASGNGVYPAGATVTISAGTLTNIHQFKEWTTESDSVTFADAESSTTTFIMPANGVTVTANFLYNGACDYVVIGGVTWMRKNLNVETLSGSWCYGNSSDSCKKYGRLYDWETAMTVCPTGWHLPTKEEWEALIMAVGGYNTAGKALKATSGWCFDGGGTDDFGFSALPGGILSRKIQPYQTPPDSKLDFSYGGGDGFWWTATEAGKTWKDDDRFGFSQRYYHMFIECYENHVNFGWGSLDWNDIGHSVRCVKDIR

SEQ ID NO: 94291 - protein, 84 aa, Unknown
  Obtained from environmental sample
  misc_feature (1)..(84): Xaa is any amino acid
MKNAMPKLPVARALWKPYPNLSDAAEAWIISGGTHHSVYSSALTLEYLRDFAEMSGIEFVVIDKDTKTDRLQDELRRNDTYWSH

SEQ ID NO: 94292 - protein, 78 aa, Unknown
  Obtained from environmental sample
  misc_feature (1)..(78): Xaa is any amino acid
MDRKEILEMYKDFRVTDVRDGMDWCGYHHYGTVHHSIKPLWRTRAIGFARTARYLPYEGPVPMVTGDEYTKWVGWYYG

SEQ ID NO: 94293 - protein, 464 aa, Unknown
  Obtained from environmental sample
  DOMAIN (142)...(464): Glycosyl hydrolase family 3 C terminal domain
  misc_feature (1)..(464): Xaa is any amino acid
MTAYNEVNGIPMMLHPMLNEIVKNEWEIEGNLVTDGGDFLQTVNAHHYFETHAETLAAALKNGADSMTDDSVKIIEAVNEALDKKLITEADIDEHLKRIFAVRFRFGHFDPAGKCPYDTIDESCLMKDEYREVSREAVRKSAVLLKNEGDMLPLRPDKVKGSIAVIGPLADTLHLDWYSGHPVYLRTPLEGLLDLFGKNKIVHADYRDIVSFTTEDGRPLVLADTGNEKGKLLSVGRQNQPPARFYMEDWGWGAQTFVDEESGLYLESPFWRKEPGGSIENEQCIVAASGKSTLSWFGFSIFNLVPQENGFVLIRTFDNRRIAAPSEAGQVLLHDDPAPCAGELFRMKLERDGLSNAVSAAQKADQVIIIAGSNPMINGRECTDRPSLNLPPCQEELIHRTFDINSRTALVLISGYPFTCIDIARKIPAILWMAPGIQETGNGLADIIGGGYSPAGRLPLTWYE

SEQ ID NO: 94294 - protein, 230 aa, Unknown
  Obtained from environmental sample
  DOMAIN (86)...(198): GTPase of unknown function
  misc_feature (1)..(230): Xaa is any amino acid
SYRLRFSVASPPFRPRFIDRVLAQAEIAGIPAAIVCNKQDLAEDDLDDLDMEERLSDFQRIGYPVFRLSAKTGTGLDEFRHFIAGKFSVLVGQSGTGKSSLINALIPELQVKTGEINEKYSRGKHTTTQGVLLESMDKGGEVNSIRIIDTPGIRRFAIAGLEEKDLIFFMREFAPLAGKCSFGLSCSHRTEIGCKIMEAVHAGVIHEDRYESFLRIQDEISGRNSYPDTD

SEQ ID NO: 94295 - protein, 210 aa, Unknown
  Obtained from environmental sample
  misc_feature (1)..(210): Xaa is any amino acid
MNEKATKLLEFDAIRSSVAALALSEESGRIIMGEEPQSDKEEVQKQKSLVLAVMKRMAYAGGEIRETFPELKEILLKLEVGGAVLEMDEAYALGIFINRAEVFRQWLLKPYRSLDGGEILREDPLTENARVLPNCGDVAKEVFKILDLEGKLRDLPEFKELRRRIRALQKNIESTASRYAGNEEKRRMLQSEIPSQRDGRMVRRLRRIPR

SEQ ID NO: 94296 - protein, 811 aa, Unknown
  Obtained from environmental sample
  DOMAIN (296)...(522): MutS domain V
  misc_feature (1)..(811): Xaa is any amino acid
MNEKTIKLLEFDAIRSNVAALALSEESGRIISGEEPHSDKEGVRKQKSLVSAVMKRMAYTGGEIRETFPELREILLKLEVGGAVLEMDEAYALGIFINRAEVYRQWLLKPFRTLDNGEILREDPLTESARVLPNCGDVAKEVFKILDLEGKLRDLPEFKELRRRIRALQKNIESTASRYAGNEEKRRMLQSEIPSQRDGRMVLAVKANFRSRIKGIVHEVSSSGQTVFIEPEEVVEMNNELLIENRRLDAEIRRVFRELTGRISSRREDLGTFYRGIVFLETIRAKARYGYENKLIFSEDPEGEGKLVLKQARHPLLGRRAVPLDLFMENGVRTVIITGPNTGGKTVALKTLGLLALMNQFGLALPAGEGTLLPVFDCVYADIGDEQSISQSLSTFSAHMTNIAEIISSSTEHSLVLLDELGSGTDPEEGSAIAMAILDHFIEKKASLIITTHHGILKNYGYTREGVENASMEFDSRTLSPTYKIVMGIPGESRAVDIAAKNGFPPALVKQARSYLDEERSDVSTLIAGLKEKHRELEAAANAGKKEEMRLLEERRLSDLKELRLKQKEYQLRSEGVGSLGNLLGESRKTLENLVRELKEGELDKDKTRRVKEFLSGLEANFKAESAKLESENLALASERRRLEEASPAEDEQSYTAGMEVLAGEGRRRGRIVRLDKKGSGEEASSWIVEIGSLKMSFSENDLVPVSSEAPGAARRKSASWAVDLAPSTPVVQAELRLRGMRFSDAMEALGKQLDAAVLSGLHQFAVIHGKGEGILGKGVHDFLKNDPRVADYFFARPEAGGFGRTEVILK

SEQ ID NO: 94297 - protein, 953 aa, Unknown
  Obtained from environmental sample
  misc_feature (1)..(953): Xaa is any amino acid
MNIEYTAKNPCTFIVEEEAFEGVKRIAKKVAKDFEKVCGALPAINEKPGNNENAVVFATLGHSPLLDTLASARKFDPSLIRGKREVYQIKFIDNPFPGVSKALLVCGSDKRGTIYGMFALSEFIGVSPLHFWGDVEPEKKEKIEITPEIETVSKEPSVKYRGFFINDEWPCFGNWTFSHFNGFTAEMYDHVFELLLRLKGNYLWPAMWTSCFPLDGPGNLNEELADIYGILMGASHHEPCLRASEEWDKVRGRNSIYGNEWNYYKNKNGLLKYWEDALIRSGKYEKIITIGMRGERDSSMLGDDSSLKENIDLLKDIIKNQRELIKKHVNQNIDEVPQVIALYKEVEEYFYGKEGVEGLKDWDELNGVICMLCEDNFGFMRTLPTADIRERKGGFGMYYHFDYHGGPISYEWVASTSYERTWEQMCMAYDYGIKDIWIVNVGDIKFNEVPLNYFMDLAYDFEKWGTKAPNRIDEYTSLWFNKNFPSVKKETREKMADVLQGFLRLNAARRPEALNSDIYNPCHYHEADRILLLAEKIDSLNEEIYSSLSKSEKNAYYSMIYFPAKSSVNLLKMHLYAGKNRHFAGQGKKLANKYADLVTACIEKDRSLKNEFHDFNGGKWSGMELEQHIGFTKWNEDNCRYPVRIQVEPAYKPRLVVSRKDREGIYTKTYGNPMTVIVDDFLFAGNDEVILEIANDGIGKLDYTIDFLNNEYPWLEISSKKGKVEFQEEIIIRCKRDKLDKQREETAVFIIQDNESRVAVEVKAKVINTDLPEKTFLENNNVIAINANHFCGKKDVSKGAFMELKNYGRSGCGMKVFPVTSDFEESEEKPSLTYRFLIEKSGEYAIEVWTTPVNSVQNKRPLRCQLETSKGEKRIIVTVPDDFRAGSPGDARWCQGVLDNIRITKTSFNFEKGVQEISVSALEAGLVLERIIIYPKNNPPLKSYLGPLESFFR

SEQ ID NO: 94298 - protein, 280 aa, Unknown
  Obtained from environmental sample
  DOMAIN (1)...(235): Nucleotidyl transferase
  misc_feature (1)..(280): Xaa is any amino acid
LAGGSGTRLYPTTIAVSKQLMPVYDKPMIYYPLTTLMLAGITEILVITTPEDGAAFKRLLGDGSQWGIKLSYAAQSRPDGLAQAFIIGEEFVGGGSAALILGDNIFWGHGLVERLQMAFDRPDLATIFAYRVNDPQRYGIVEVDKTGKAVSIEEKPVAPKSKLAVTGLYFYDAEVCELARTLRPSPRGELEITDLNRLYLERGKLQVVDLGRGIAWLDTGTHESMLQASLFVETIQARQGLKVASPEEIAFRRGLIDAGQLIKLAENMRKNEYGRYLLDV

SEQ ID NO: 94299 - protein, 401 aa, Unknown
  Obtained from environmental sample
  DOMAIN (24)...(158): Histidine kinase-, DNA gyrase B-, and HSP90-like ATPase
  misc_feature (1)..(401): Xaa is any amino acid
MTESNSGYIKVLPPEEARRIAAGEVVDRPAALVREFLDNAIDALSLNIEVSIEEGGCKKVEVADDGEGMNRGDLELCSLTHATSKIRCLDDLDFAHTLGFRGEALAAAAAVARLEIISSTDGKEAWRLETGPGDSRPLKSEQTRRTKGVTVRALNLFESIPARKKFLKREGSEAALCRQAFIDKVLAFPNINFRFIQDGKLKDFFPAVSSRKERFAAVNGSENFLHEINVTGTGFSAAVVIGGPQLYRNDRRQLFVFANGRRVNDYSLIQAMEYGTQGWFPNGTHPIGAVFVEIDPALADFNIHPAKREVRFRDPGAIHHAVSGGLKSFFHLNAIQNSPHKYEHKFKEHKESPYENHHHASETFKEKQQTHEDQGQDFKFSYNTSVFDTARVKERFSEIKF

SEQ ID NO: 94300 - protein, 89 aa, Unknown
  Obtained from environmental sample
  DOMAIN (14)...(77): Exonuclease VII small subunit
  misc_feature (1)..(89): Xaa is any amino acid
MAKKTTPAKSGGMKSFEERLGRLETLGEQIRRTDIPLDEALKAFEEGIRLAKALEKDLEKIDNRIEILMNSADAPIGETPELELFDDGE

SEQ ID NO: 94301 - protein, 350 aa, Unknown
  Obtained from environmental sample
  DOMAIN (1)...(348): CobN/Magnesium Chelatase
  misc_feature (1)..(350): Xaa is any amino acid
IYPYIVDDVGEGLQAKRRGRGVLVGHLTPALVTAEGYHEYAELQALVEAYTQAVAVEALTAPAHLENIRTKARSLGLDKDLSLGAIDGPEAVRSIADYLEQLATGYVPYGLHTFGRSPEGEALDGSVAAVLSQNGDLKKTDVAAGFNASGPRETAMLLKGLSGGFIPPAEGNDPVRNPAALPTGGNFYGLAPNRMPTQAAWSLGQKAAEEIIGKYQAEHEGAWPEKVAVVLWAVESLRNEGLNEATVLALIGAEPVWNPSGQILRTQAIPGPRLGRPRIDVVINASGLYRDLFPDKILFLDEAIRQAAVQDDIENFIRRNDEKIKRNLMEAGLGEDEAGRFSRARIFSKP

SEQ ID NO: 94302 - protein, 304 aa, Unknown
  Obtained from environmental sample
  misc_feature (1)..(304): Xaa is any amino acid
MIITSGVLNALRTALRDEFSTRMADIDAKPIWKLLATIITSSTKSNTYGWLGAFPQLREWIGDRVIKDIAEFAYQIVNKKYESTLGVDRTDIEDDNLGQYRVLAREMADEFERFMNRNVAALIAGGFTSLCYDGQKFFDVAHPVYPNADGTGEAAEVSNIVGAGNGSPWALLSLSGSLKPFIAQQRSQPEFEEITDTKNDRVFMQDKYLYGIRYRGSFGYGLWQQAVGSKTPLNTDNYQTARERIQSLKRDGGDPLGIVPTHLVVGPSHEAAARRIVEAQFLASGASNIHYKTAELVVIPHLAA

SEQ ID NO: 94303 - protein, 328 aa, Unknown
  Obtained from environmental sample
  misc_feature (1)..(328): Xaa is any amino acid
METGSLFLSLNFEGEIPSRITLVPPDRTIKGRDGREWKNPNPKQVALNSIARLSLLPIDENHSTDLAAPKGGSSPAFGWMKNLCADASGAICADVEWTERGREALAKKEYRFISPVFLFNEKSEINCILRAALTNSPNLDLPALNSEQVKNNILEVSMNRELLAALGLPETATEAEALAAAKALNASKASASAQTDTSRVDLTAYAPRADLCAMEARAVTAEKQLAELNAAQLKKDAEAAVDEAIKNRKFAPASRAEYLALCSTQAGLESFKKIAAATPAVISADAQAPEGAPPASGRGTALNAEDVSVRKALGYSDEEIKKLKGDAK

SEQ ID NO: 94304 - protein, 89 aa, Unknown
  Obtained from environmental sample
  misc_feature (1)..(89): Xaa is any amino acid
MKYFLDSAITDEISYALENWGIDGVTTNPRHIQASGKPFYTVIKEIADLTKDIPGFTVSVEVNPHFRKSEDMIGMAKKIAGLSPNFVIK

SEQ ID NO: 94305 - protein, 102 aa, Unknown
  Obtained from environmental sample
  misc_feature (1)..(102): Xaa is any amino acid
MAKIARSSAVKEALKALKYGKFPLQIEHAEGAFPGILISLIYASTKGKILAVVPTDTEAALLEQDLRSVNTPVSIFPWWGGMPYRDMASLSAVFGERMRVLA

SEQ ID NO: 94306 - protein, 540 aa, Unknown
  Obtained from environmental sample
  DOMAIN (12)...(339): Cellulase (glycosyl hydrolase family 5)
  misc_feature (1)..(540): Xaa is any amino acid
MACNSTNTSIETQTPDAVLNAAPFSRGINFSQWFETPNAQSIQFTRFIEQDFINVKSMGVDVIRLPIRMHSMTRGAPEYVLDPLLLKLLDTVVDWAEKHQMYLIIDNHSFDPVAPTDTNIDGILLKVWAQIAQRYKNRGKYVVYEILNEPHGISDSRWGEIQGMAIETIRKIDTTHAIIVGGTDYNSINKLFSIPEYSDPNLIYTFHFYDPHLFTHQGASWGEPSLASLAGVPFPADVLRIPKTPDDLKGTWVDGALRNYKNDAAFSRLFASLDKPVAFSRERNVPVFCGEFGVYMIQSPAKDRVKWYEFITGALERRNIARASWDYFGGFGIFNNQTGGDFSADVNVDVVRAMGYVPPPQRTLALKPINSGFTIYGDYPSRDFSIGYWGENAFFSMYDTNAAEGEYSIRWGNAARYDTFWIEFNRNGDFSHLAESGYCLEFRARAEKPVNFDIRFVNPENASSIPWRMRYSINEKTLPPDGKWHLIRVPLADMAEHGAWVNATQTWLGPQGKFSWKDVKQLDFVAEEGDLKNCILGLIP

SEQ ID NO: 94307 - protein, 213 aa, Unknown
  Obtained from environmental sample
  misc_feature (1)..(213): Xaa is any amino acid
MPRLCVLTVFDENANIIDCSDVTLRTLGTTREYYKEHFREFLPEYQSDGVKSIDKAADLVRRVLNGEKLVLEWNNCTTSGEIIPFEVTMVRVMYKGNRMILGYQYDLRKIRKMTESIREQGEQLKTKLEQQELISELSRGFISSGDSQTLVQEAVAKLGLYHKVSLVFVFAIDYDRKDTRLAYHWCADGAPPRMAIANLYEYLIDLFPETLPD

SEQ ID NO: 94308 - protein, 206 aa, Unknown
  Obtained from environmental sample
  DOMAIN (33)...(176): GAF domain
  misc_feature (1)..(206): Xaa is any amino acid
MSDENTALLEHYASMSKALSNFIEIFSVNIEETFEATMTTGIREIADVFKLDRFSIWRNSLKPDAIHVTQIYRWDRESGGTTMPTKGLEDVTYAQLAPRWEKLLASGETINSPVRFLPEAAMLKSFGCVTAFITPLFINNSFWGFALLEDRRNERFFEKDDIGMLRSAAFLCANTVIRADMEREIADANEFNSATLDASPLCFNRF

SEQ ID NO: 94309 - protein, 592 aa, Unknown
  Obtained from environmental sample
  DOMAIN (113)...(519): Bacterial extracellular solute-binding proteins, family 5 Middle
  misc_feature (1)..(592): Xaa is any amino acid
MKQVCIFLLFLLLALSSCTKNEELTLEELEALSAEGLQELLAKTQTKPWRGEDFVPGRLGGTWNSSMIKDPKSFNHLIAERDAETAGILRMLTDFLVEYDVVRREWKEHCAFPQIIVNEKEQTLDVVYTLRDNLYWSYYNSDKKIPVTSDDVVFWYNEIEGDEECQSSAYNGQFLTMEDGSEARVTIHKIDDKRFRFHFPRIVADPLLTTNRDFGPRHVYEPAKKANGVQGVRDLFSVASDPKLIPSMGQWFLVEYVQSQRLVFKRNSDYWKKDGAGLSIPYIEEDIVQILPDQNTEYLVFKEGRLETYNARPEDLNELVNKQNTGYTVFNAEGNIGAGMWSFNQNPQNSSEPYYDWFTKKEFRQAMSCLLNRQRINAQVYRGLAEPKLDFFPPPNPFYNPDIVLEYQYNPARALDLLKSVGFTRDNRGSLIDEKKRRVEFDLTFSADNNVTSDIASIIVDELGKIGIKVNIRVTDFQKMVEQLTSTYDWQTLMIGLGANFFPSQGSNVWPSTGNLHIWHPLQDKPFTEWEARIDYLYNEGSYTIDKEKAFAIWDEYQRLLLEQCPVIYLMRSRRFWAIQNRWDFTNVYFDN

SEQ ID NO: 94310 - protein, 264 aa, Unknown
  Obtained from environmental sample
  DOMAIN (1)...(257): Homocysteine S-methyltransferase
  misc_feature (1)..(264): Xaa is any amino acid
LWCIDRPSDVLDVAKNYIDAGADMVETDSFGGSSFKLAHFKLDGRAAEINEAAAKISRQAAGDNHWVIASIGPTGKMLVTEEVTEEELYEAFKTQAVAFEKGGADAACIETMSDIQEACQAVKAVKENTKLEIICTFTFEKTVQGEYRTMMGVDPVSAMNAAIEAGADIVGANCGNGIERMIEIVTQMRSVNKTIPILVHANAGLPKNVNGQTVFPESPEDMAAIAPKLAAAGANIIGGCCGTTPAHIKAIKESLNNGISKNLG

SEQ ID NO: 94311 - protein, 150 aa, Unknown
  Obtained from environmental sample
  misc_feature (1)..(150): Xaa is any amino acid
MMKTKFLSTAIGSMPFEDPIYAVGVSLKSMDAPIWPQLPKLGLLEQMEVQYSENMPCAVVDTEKNRLYFKTDEDYSEKFAEFYEAYMSATDGGTNDFSKMAISEKYSKGIYALLKTLKEKGGKMPWLTVQTTGPITFALSIVDENKRAMY

SEQ ID NO: 94312 - protein, 292 aa, Unknown
  Obtained from environmental sample
  misc_feature (1)..(292): Xaa is any amino acid
GIIAFVAIIGFSMAACDTGDNDGGGGGTDGTGGTGDGGGGGAHTHQWGEWTPTTAPTCTTAGEEKRVCAFDATHIETRTVAALGHSYGNWTQTTAPTYTSEGEETRTCTTDSSHKETRKSDPLPITTAAEWDTATTAIKNGGNDKTYNINVTGEFSIDGYDTFTNGTGPTFGNVTGITVNIRGAGTITLAASYTNRSLLRIIANQTVSLKDTHLVGHSSNNYELVNVRGTFNMTGGTISGNGGISSEGVYSATSGGGVLVEGTFTMSGGNISGNTAFNGGGVCVSTGTFNMT

SEQ ID NO: 94313 - protein, 77 aa, Unknown
  Obtained from environmental sample
  misc_feature (1)..(77): Xaa is any amino acid
MEKDLIEYLAKSLVDDPSQVQVNIVEGEKSTILELRVAENDIGKVIGKHGRIAKAIRTVLQAASARTGKHTVLEILD

SEQ ID NO: 94314 - protein, 223 aa, Unknown
  Obtained from environmental sample
  DOMAIN (10)...(196): haloacid dehalogenase-like hydrolase
  misc_feature (1)..(223): Xaa is any amino acid
MDTQEKPFLPAAVIFDMDGLMFDTENLTIPLWEIAGKPFGYNLTREIVLRMVGISGERAQQLLLEEFGSDFPYEAIRDEYRILVSKEIEKNGVPKKPGLMYLLDRLRAANIPLGVATSTRSPRAIDLLERAGILDRFKTLTCGEDITNGKPAPDIFLLAAKKLGQPPCNCVGFEDSTAGLMGLHAAGIRSVYIKDVLDPPEEVLATVWHRCNDLSEAAVLFGL

SEQ ID NO: 94315 - protein, 874 aa, Unknown
  Obtained from environmental sample
  DOMAIN (103)...(385): RNA polymerase Rpb2, domain 2
  misc_feature (1)..(874): Xaa is any amino acid
VALQGLEEVFQSTFPIDSPNGDMKLTYEYYTLDEDAIKFSEQDCKQKGITYAIPLKARVNLIFQNTGEIRQKDIYMGDIPIMSERGTFIINGAERVVVSQLHRSPGVIFSHEKGIYSSRIIPYRGSWLEFEIDQKRELIYAKVDRKKRILGTIFLRALGFDSREEIIKAFYVTETIKVKDDRETRDSISGRVLAAAVWVKDATGRKSGKNTDDHEGMKKLFRAGEKLHPHNIDELLSNGVKSIEAIRFIDLEDSSDEKSLNYSLDSDILLNCFEREEIKYTKEGNEEPTKEEALMAVFAVLMQGETISIDAAEKELTGMFFTSRRYDLGRVGRYKLNKKFGFDPPLDDFTLTKDDIIATMKFLIKVYIGDENFDDIDHLGNRRVRSVGELMSVTMKTAFSRMERIAKERMSLKETDTIKPQDLVSIKPIVAAIKEFFGSSQLSQFMDQVNPLAELTHKRRLNALGPGGLSRERAGFEVRDVHYTHYGRMCPIETPEGPNIGLIVSLANYTRVNEYGFLETPYRKISKGVATRDIEYLSAMDEDRYFIAQASAKLRENGSFAEGQISCRRQGDYTNRAPEDIQYMDVSPKQIISVSASLIPFLEHDDANRALMGSNMQRQAVPLVFPEAPRVGTGMEAKCAYDSGVLVKACRSGTVLRVTSHEIIIKPDKPGALKPLSQVLIDEEGNDVYKLVKFQRTNQDTCYNQRPIIKVGEKILAGQVIADGPATQNGELALGRNILVGFMPWNGYNYEDSILISERVVKEDMFTSIHIKEFPTEVRETKLGPEKITAEIPNTSDKSLSNLDKEGIICIGARVRSGDILVGKVTPKSETETTPEFKLLNSIFGEKAKEVRDSSLKVDHGIEGTVIDIQRLKR

SEQ ID NO: 94316 - protein, 87 aa, Unknown
  Obtained from environmental sample
  misc_feature (1)..(87): Xaa is any amino acid
LHEEIRELSQQAAYKVKEEGKDNDLLERILSSKKFALEKSDLERILDLKKFIGRAPEQTEEFVNLEVKPLIESFDDWKNVGEGEVLV

SEQ ID NO: 94317 - protein, 91 aa, Unknown
  Obtained from environmental sample
  misc_feature (1)..(91): Xaa is any amino acid
MKTSDFSFHLPEELVAQFPPEKRGQSRLMTLDRVTGKSSHRMVEELPEILSAGEFLSKDGRLPLLVFNNSKVRKARLIGVSEESGARVEFL

SEQ ID NO: 94318 - protein, 60 aa, Unknown
  Obtained from environmental sample
  misc_feature (1)..(60): Xaa is any amino acid
IDTEVILEWGKIRARTERQMPVADSLIAACAITNHAFLVTRNTKDFDDIEGINLLNPWEF

SEQ ID NO: 94319 - protein, 52 aa, Unknown
  Obtained from environmental sample
  misc_feature (1)..(52): Xaa is any amino acid
MSAEISMVAEVDVSLDNDGTAKVLRLIDKLEENDDVQHVYSNIAIPEGFEAE

SEQ ID NO: 94320 - protein, 232 aa, Unknown
  Obtained from environmental sample
  DOMAIN (74)...(232): Cellulase (glycosyl hydrolase family 5)
  misc_feature (1)..(232): Xaa is any amino acid
MVYCQLCLGSVLIIKAWRFGGFMRPYKLIVITALAVFYITACFDVPDKNASGEPDRIITAKDFVKDMGLGFNIGNSLDSWGGETAWGNVAVNQAFIKALKKYGYKTVRLPVTWADKMGPSPDYLIDEAWLDRVETIVNWCLAEDLYIIINIHHDGHGNAKSWIQNAQKNYPNNGENVTAVAKQLAAVWTQIAGRFLQYPDKLIFEGMNEVGFDDIWNRYSGGQAERKTEAYR

SEQ ID NO: 94321 - protein, 224 aa, Unknown
  Obtained from environmental sample
  DOMAIN (1)...(223): Binding-protein-dependent transport system inner membrane component
  misc_feature (1)..(224): Xaa is any amino acid
MSGLGILTSWIPVLFAILLTEFKNERYKKIVQTLTTVPNFISWVMVYSFAFMLFSVDAGLVNRLLIDLGLIEKGVNFLLSGNHIWLKMTAWGIWKGLGWGAIIYLAAIAGIDQELYEAATIDGAGRWGQIWHITVPGLLPTYFVLLMLSIANLINNGMDQYFVFRNAFNQETVEVLDLYVYYVGFGKGSTSGIPFATVISMLKSIISVILLFSVNGLSRLLRKE

SEQ ID NO: 94322 - protein, 280 aa, Unknown
  Obtained from environmental sample
  misc_feature (1)..(280): Xaa is any amino acid
VLTSRKILLSLLITIILFTAFTVFAFIGMFDLIETHFYNPSVTAHMTSENNRNAKIVEEFFKSVENSLSDTLKTDAVRRGLMYDQNQEDFSALYSAFSLLDNSFGKIQWVRLIDSSGTKLYFSTYGLDIINHDYESPVYNNYNDPDLPYNLIAVQNGGTPKYTLDGKSGRIFFSFALYDSFDIYCGTALFSLALDTVLEKLLIEGRMISGYEIMLVQNPSGMVFRVMTAGENITSSQISSAWETTGLKLARITSSDSDIPFILISTKTSQDLYVGSLIKE

SEQ ID NO: 94323 - protein, 189 aa, Unknown
  Obtained from environmental sample
  DOMAIN (21)...(140): Dynamin family
  misc_feature (1)..(189): Xaa is any amino acid
HLKRQRQVQRKKRERSGIPVCALVGYTNAGKSSILNALTGAGVLAEDKLFATLDSTSRRLHLPQGTEVLLVDTVGFIRRLPHSLIKAFRSTLEEASHAALILNVLDASDIDSEIQYETTLSVLRELNAGEIPMITVLNKADRVDSIQTFLNRYPESIAVSALKGSGLAELCARIENTLASQKQLNQIGA

SEQ ID NO: 94324 - protein, 74 aa, Unknown
  Obtained from environmental sample
  misc_feature (1)..(74): Xaa is any amino acid
EKPPGSPVRGKVNTLIFPDLQAGNIGIKLIQRIGKIDGFGPFLQGFAKPISDLSRGTSVDEIVNTCAFTLAQVK

SEQ ID NO: 94325 - protein, 671 aa, Unknown
  Obtained from environmental sample
  DOMAIN (262)...(531): Penicillin binding protein transpeptidase domain
  misc_feature (1)..(671): Xaa is any amino acid
AVISDRNGVVLRVLPADNGVKREWVPLSEIPPGAVRIFIRAEDRRFYFHFGIDVFSLAASIYRNLKAGRTVSGASTITMQLARLVHPHSGGLRGKIVEAWDAIRLEAHLSKKEILELYLNSIPFGSNIEGLAAITRARFGSSIRELDDNRAALLASVPRRPLFYDPALNPDAAVSAAMALSARCRLGLREEELRQAVKEAAFPSSGQDDPRAPFFAPHFTERLKMVPGTILRSTIDLALQLYAEEELALEISLLSEKRISNGAILAIENETGAVRVYVGSGSWFNEEASGKIDGVRFRAQPGSCLKPFLYAMALDTGFNPADILPDLPTVFGSREAYVPSNFNNRFNGPVRLRIALASSLNIPAVYILERLGVRTFEEYLVGLGFDSIIETIGTHGTGLALGNAEVSLEEMVRAFSVFPRMGTPAQLRWTEDEKPEQAAPPVMSPYAAWMIADILSDRSSRFVGFGPAPALATPFESMFKTGTANQFQHIWALGATKRFTVGVWMGNFSGETVIGSTGSSIPARIAAKLLGALEDSAGQEKRLVSNRVTDNLAGSLPLGTTEVRICALSGMAAGPYCTGLTREFIRNEKIPAVCNWHTQAGLFYPSEYRPWLSERFRSGGVRQEGSGRIRTPVSGAVFYLDPSLPAEAQALRVETSGFSSGALLFSDGELL

SEQ ID NO: 94326 - protein, 421 aa, Unknown
  Obtained from environmental sample
  misc_feature (1)..(421): Xaa is any amino acid
DYHRGGRGDGELQTLSGNITISPASPNKGTELTATYSGSETVSYQWKLNGSAVSASPANKYTPTAGGTCSVTVSAEGYHPKTATVDVNDPDLSTLTGTITISGGSTVGTPLTATYSGSETVTYQWKKDGSNVGTNSPSYTPTAEGSYTVTVTATGYNSKTSAPVTVTAGGGGGSGGDPTQWTEVSDSTFGTGFILAIAYGNGKFVAVGGGGKIAYSADGITWTAVANSTFGTGLIEAIAYGNGMYVAVGDNGKMATSTDGTTWTAVPNSTFGTDSIFAITYGNGMYVAVGASGKMATSTDGNTWTAVPNSTFGTASIFAITYGNGMYVAVGTSGKMATSTDGTTWTAVSNSTFGSNYISKITYGNGMYVAVGASGKMATSTDGTTWTAVANSTFGTGLIAAIAYGNGKFVVVAEGEYGGKI

SEQ ID NO: 94327 - protein, 93 aa, Unknown
  Obtained from environmental sample
  misc_feature (1)..(93): Xaa is any amino acid
MILIRENERQKDYTKQNFAWKGVSRMPEQRIVVTIDANGKINAETHGVKGEVCVSELQELLGEMADLESVTKTDEYYQRNELHVQKTQNVGRQ

SEQ ID NO: 94328 - protein, 96 aa, Unknown
  Obtained from environmental sample
  misc_feature (1)..(96): Xaa is any amino acid
SGRGIRWGNINKQQYKTVSDFLRQVETSYNEVYRKRMEELERLRLEAERLRLEQERQDFVEKQRQTVIANAKKKGYAIREERVKDKIKLVLVRNTY

SEQ ID NO: 94329 - protein, 89 aa, Unknown
  Obtained from environmental sample
  DOMAIN (14)...(77): Exonuclease VII small subunit
  misc_feature (1)..(89): Xaa is any amino acid
MAKKSVPAKSGGMKSFEDQLARLEKLGEQIKKTDIPLDEALAAFEEGIRLARTLEKTLEKIENRIEILMNSTEAASDESPDLELFDAGE

SEQ ID NO: 94330 - protein, 288 aa, Unknown
  Obtained from environmental sample
  DOMAIN (119)...(166): Regulator of chromosome condensation (RCC1)
  misc_feature (1)..(288): Xaa is any amino acid
MTPTTIAAGVAHLQALREDGCIWSWGQKEDGLFGNGSNINWNAPAQVGKDTDWTAVSAGDSHAMAIKADGSLWAWGQNDYGQLGDGTKLNRIAPARVGKAKSWAAVAAGSRHTIAIKANGSLWAWGSNEYGQLGDGTNISQTVPVQVGADKDWKAVSTDCRHNMAIKADGSLWAWGENCCGQLGDGTNTDRNAPVRVGEAKDWAVVAVGASHTLAIKNDGSLWAWGSNHDGEIGTGDSDATQYAAPVRVGSGKGWKAVSAGDGYSAAIKADGSLWAWGFNIFALLGSL

SEQ ID NO: 94331 - protein, 224 aa, Unknown
  Obtained from environmental sample
  DOMAIN (111)...(140): Helix-hairpin-helix motif
  misc_feature (1)..(224): Xaa is any amino acid
MPSGKIIKWDAVFSALEEWRRTLGTKDPSVNTVAEHYKRSPWAVLASTIISLRTKDDVTLAASERLLEKAKSPAELAALKQNQIEKLIYPAGFYRNKAASLKKIAAILLENYGGKVPSSMEALLALPGVGRKTANLVLNEAFDLDAICVDIHVHRISNRCGWLCSKNPEETEMILREILPKKFWKRINRLLVLYGQKLCRPISPFCSRCVIAKFCFRCDVKTTR

SEQ ID NO: 94332 - protein, 97 aa, Unknown
  Obtained from environmental sample
  misc_feature (1)..(97): Xaa is any amino acid
MKTKVKTPGTLLIEFINKNGLNCNRVAKRIKCSQTALRLISLDKSRITASVAVRLAKYFDTKPELWLLTQMKYDLEKVAENKTLNYKLKNILSDYKK

SEQ ID NO: 94333 - protein, 303 aa, Unknown
  Obtained from environmental sample
  DOMAIN (5)...(257): PHP domain
  misc_feature (1)..(303): Xaa is any amino acid
MPRFSGLHNHTIFCDGRDDIETMCRAAFEKKLCAVGFSAHAPIKKKTGIESHWHLKDEKLEEYSEQVLAAKKRWKGKLEVLLGFEIDYIKGLRCALDSDITEINPDYLIGSVHFLVPANGAKPFTVDGPQEEFLQGLNEGFSGDARALMNSYYDAQLEMIALGGFEILGHADLIKKNCIGKNLWPPEEEIYRQKEIAHAIGDAVGDAAGKMGIIAEANTGGINRNKINEVYPSETFLRFFRENNTPLIITADAHCADEIIGNYDTAVKTLLSAGFSEHIIIFRKSGKKIKYIKEKLLNFLADQ

SEQ ID NO: 94334 - protein, 281 aa, Unknown
  Obtained from environmental sample
  DOMAIN (190)...(280): GTPase of unknown function
  misc_feature (1)..(281): Xaa is any amino acid
MKKNLPVVALAGRPNVGKSTLFNRLLHKRRAITDPTPGVTRDAVAMDTVMMERRLTLVDTGGFKLDRERDSEAGELERVVVERTLEVLKEADLIVLLFEAGELTPEDEEFIGLLRPYQSKLIAAVNKTEGGRREADAWNLLSYGFEKVYMISAEHGDNIEELEEAIISRLDFSEVEEPALPVTEQDEAPIRIALLGKPNTGKSTLSNRLTSSSASIVSDIPGTTRDVVEGAFTWKKRNFQVLDTAGIRRKSKVNESIEYYSVNRAIKTIDGADIVFLIMTP

SEQ ID NO: 94335 - protein, 395 aa, Unknown
  Obtained from environmental sample
  DOMAIN (13)...(393): Histidinol dehydrogenase
  misc_feature (1)..(395): Xaa is any amino acid
MKIIESVNFDSYWKNETKRSEDTKTEKAVKNIIAEVRAKGDAAVRKFASKFDKSSPQKLEVPLSEAKHALEQLRANEPSLALALELSAKHIKRFSEKQREQFADFEFEMEQGLITGQRILPVERAAVYVPGGRFPLFSSVLMCMIPAFCAGVEEVILSSPPTKDGIPDKKILAAAAVAAEVAGNKKVRVFAIGGAQAIAALALGTKSVPRVDIIAGPGNKFVAAAKRQLFGEVGIDFIAGPTDVLVIADGQADGGDIEKAADLVAADMLGQAEHDPDARARALVPSKELAEKILAAIEKRIKKLPTEKTARASLEAGGLIVVYETRDEAIRIANIIAPEHLELQIADADNWIPQLKNYGSLFIGSLCAEVLGDYSAGINHTLPTSTSARFTGGCL

SEQ ID NO: 94336 - protein, 160 aa, Unknown
  Obtained from environmental sample
  DOMAIN (51)...(158): NlpC/P60 family
  misc_feature (1)..(160): Xaa is any amino acid
IGIFSIACAPLRPLGPDMNLSARTAAAQKWIDSRNITGISEWDDVLLPWLGTPYKYGGNTKRGTDCSGFVSSVYMEKERMSVPRTTKDGFKNGKSVDRSSLVVGDLVFFSREGRGNKVNHVGIYVGDGNFMHASTSLGVTITPLDDSHWKTLYLGARRYL

SEQ ID NO: 94337 - protein, 285 aa, Unknown
  Obtained from environmental sample
  misc_feature (1)..(285): Xaa is any amino acid
MSSYAPAWVKTNPERFPRARTATGQPMEMLSPSGSENQKADAAAFAALMRHLKEVDAQHTVIMVQVENEVGMIPGARDHSEAAQQAWQQPVPPELMHYLATHRENLQPNLKTQWASSDFSQNGTWSQIFGNSPATEELFQAWQFATYLDQVAQGGKAELNLPMFTNAALIRTGTQPGQYPSAGPLPHLADIWRAGAPHLDFIAPDIYFPNFAHWADAYVASGNPLFVPEALRSVDASANALYAFGKHGATGFAPFGIESITGNAATMLAGAFDLVRQLTPLITAA

SEQ ID NO: 94338 - protein, 518 aa, Unknown
  Obtained from environmental sample
  DOMAIN (465)...(512): Threonyl and Alanyl tRNA synthetase second additional domain
  misc_feature (1)..(518): Xaa is any amino acid
MLGNWSLGDYFKDGAIKMSYEFLTSPEWLGIPAEKIGVTVFAGDENAPRDDESAEVWRSLGFPENRISYRPKEDNWWGPAGTTGPCGPDSEMFYDIGKEPCGPNCGPGCSCGKWLEIWNDVFMQYNKNAEGKYIPLSRKCVDTGMGIERTVTILNGKSSVYDTEIFAPIIAAVEAATNYKYGTESEKDRSLRIICDHTRASTFILGDPKAVSPSNVGAGYVLRRLIRRAVRHGRKLAGKEIVPLLSPIAAVIIDKFKGPYPELTENKAYITKELNEEEERFMETLQKGEHEFEKLLPDLLKDPKKIMDGRLAFKLYDTYGFPIELTEELAAEKGMKINRVEFDEAFKKHQELSRVGGEQVFKGGLQDHSEIVTKYHTATHLLQKALKIVLGDHVAQKGSNITAERMRFDFSHNAPMTDEEIKKVQDLVNEQITKNLPVSMEIMDLESAKAAGASALFGEKYESQVKVYTIGQKGQHFSMEVCGGPHVENTGTLGKFVIQKEQSSSAGVRRIRAVLEQV

SEQ ID NO: 94339 - protein, 480 aa, Unknown
  Obtained from environmental sample
  DOMAIN (41)...(317): Protein tyrosine kinase
  misc_feature (1)..(480): Xaa is any amino acid
METQIIDLASGTQILSGGSTTETSANFTGGLLQIHEQVAGWEVTGKLGTVSGEADIYVAQKDGQKGIVKYYRSTTRPRTEILEKLKQLNHPDIVNIYDFGLYNDRFYEIMEYAEGGSLDTRNADGSYRYLPLPEEKAEGICKEVINSFKTCHEKGIIHRDIKPANIYFRTLEAEEIEGDEGEGKKTVYRGDDVIIADFGISSVMDETEQLHKTRTGSRTTGYAAPEVLSGLIGPKMDYYALGITLWELLTGKDPFTLDNGKRRNDAHLLRDTIEGRIADDILSKEPRVSQKMERLIRGLLILDPEYRWGYDEVTRHLAGETVDIHQEAKKTWSFSIGGIDCTTLEALGSAIMENPGDARKYIFKGRLGAFLEDYYPDISKQIEQIAEETSAANEHDKGVIKVAYILNPGLPLEIANDYKIQNLDDLISLLENAPESVVPSLRDAKSKLYTWMDIMGYKDNASEIKKLPGLSGGMGDTELA

SEQ ID NO: 94340 - protein, 332 aa, Unknown
  Obtained from environmental sample
  misc_feature (1)..(332): Xaa is any amino acid
MYDACENCGAIINPILEKAFAQEAPVELAAMSDAEAEKIEADFKAMKSNESAEFKAFQKKLVERQILLEERDYFNKREKRIIKTFGSRPFTLELPDPAEEAFRMKAYAALEKTVIEREEKAIEAELDRLFPAPPAADTSAEDARLAEIERNRAEMEKKFNEALANVNGEVDDFRKEEERKRIEEERRRLEEEARRLEEERRRKEEEARREAERQREIERQRLEEERRRRRFQGDYYHMSHSGMLTAELRIGSDRAECWYRCTVCGRATVVYSVSIRGDNITLTGGRKRGDYCSFQEYKLVENYSGTVNSSGTILRGYWYNNGASVPIVFYKC

SEQ ID NO: 94341 - protein, 478 aa, Unknown
  Obtained from environmental sample
  DOMAIN (1)...(199): HMGL-like
  misc_feature (1)..(478): Xaa is any amino acid
LQMLLRGQNLVGYRNYADDVVDRFVALACKNGIDIFRVFDALNDTRNLEAAIRAVKKHGAHAQGTLAYTISPVHTIEKYIQYAKEQVELGIDSLCVKDMAGILSPIMAERLVSALIKELDIPVQLHCHASSGMGTAAYVEGVRAGAGAIDCAISSMAGTSSQPPVETMSAIFSETNYSAGLDVDALERIAKYFADLAPRRSAAPLSIMPIDPGILIHQIPGGMISNFRSQLQMQKALDKLPQVLQEVSQVREDLGYPPLVTPTSQIVGTQAVMNIISGERYKIVPNEVKDYVKGLYGRSPVPIDKGMIKKILGDEKPISYRPADKIAPMLPKATDGVDPALINAEEDILSYVLLPEPALEYFKWRAMPAGERSEIPADAEIRKITGEAAAKSDAGKITQAPVSVAQASSPQSLPLQLPLDGLAAEIIGKIDGLVIEEVVFRKGESTISVKSHAVPQAAFATAGWTLNAAPERVSASVQ

SEQ ID NO: 94342 - protein, 638 aa, Unknown
  Obtained from environmental sample
  DOMAIN (4)...(598): Hsp70 protein
  misc_feature (1)..(638): Xaa is any amino acid
MGKIIGIDLGTTKSCVAVFQRGEPVVIKNAEGELTTPSIVGFTSKGDRIVGAPAKNQMITNPENTVYSIKRFMGRRYSEVSSEMKRVPYRIVEQGDDVRVKIGDKPYSPQEISAFVLQKMKQTAEDYLGESVTEAVITVPAYFNDAQRQATKDAGKIAGLDVKRIINEPTAASLAFGFNKDQKKEKTIAVYDLGGGTFDISILELGEGVFEVKSTNGDTHLGGDDFDLKVLDWLIEEFKKDTGIDLGKDRMALQRLREASEKAKKELSSTQTTEINLPFITADQNGPKHLQKSLTRAKFEQLVSDLLEKTKEPCRKALSDAGLSEDQIDEVILVGGSTRIPAVQAIVKDLFKKEPNKGVNPDEAVAVGAAIQGGILGGDVKDVLLLDVTPLSLGIETLGGVMTRLIPRNTTIPTRKSQIFSTAADGQTAVSIQVLQGEREMAAQNRTLGRFDLVGIPPAPRGVPQIEVTFDIDANGIVHVSAKDLGTGKEQKIRIESSSGLSDNEIDRMVKEAELHAEEDKRERERAEVRNDADNMIYSTEKNIKELGDKISGADKSKVEEAIADLRKALEGGDIENIKSKTEALKQVSYKIAEEVYKQAGAQQGGASGGPSGGGSAGTGDNTKSAEDADYEVVDDNK

SEQ ID NO: 94343 - protein, 445 aa, Unknown
  Obtained from environmental sample
  misc_feature (1)..(445): Xaa is any amino acid
ICTLLVTMPGLPMFGHGQIEGFEEKYGMEYRRSYRDEKADGYLVDRHEREIFPLMKRRALFSGSSEFRLYDVFTEGGSVNENVFAYSNRAWIHGHEERALIFYNNSYYETAGWIKMSDPAIPHGSGKQRDSLHQALALHDGDNWFTLFRDQRSNLWYIRSSKAISENGFFVALKGYEAQVFLDIYEIEDDAKGRWARLHHDLQGRGVDNPQSAIMDIYLGDLYYRFLKPLKPELVNQLHEFFTAGTVDKQKAHAFVESLKETAEKYFETVAYFIKGADGKYEAWTGTGDSGLGTGEKKKGVKHQTVSDKKEQRTENREQRIEPWEEFKGYVERLIALVGYLNATDKTPAERMLKELALRMKERQLVCAAALGYGLLSVLRPIIGKADGSLTANLAFEHWDLDRKLKEQFRIFGANDDEVWRLGEICKAVLYRTGADNAVNAGAAG

SEQ ID NO: 94344 - protein, 280 aa, Unknown
  Obtained from environmental sample
  DOMAIN (60)...(278): Binding-protein-dependent transport system inner membrane component
  misc_feature (1)..(280): Xaa is any amino acid
MIKIKKRKIIDGLIYGIMAAAMTAVLAVLLFVIFYIFKSQAGFFNLSFLFGKENGILPMIVTTLYVVLVSIAVSLPIGIATAIFLNEYSGNSSWIKILRLAIETLAGIPSIIYGLFGLLMFCRLLNFGQSIIAGAFTLSIMILPVIIRTTEESLKSIPDTFREGSLALGATKFQTIIHVVLPSALPGIVTSVILAIGRVVGESAPVLLTVGLTKNIPRTIFESGRTLTIHLYYLTNEAVRPEDFGIAFATAFVLIILVVIINTATKIMTANFRKKLGDVQ

SEQ ID NO: 94345 - protein, 170 aa, Unknown
  Obtained from environmental sample
  misc_feature (1)..(170): Xaa is any amino acid
MGSAPGWFLEKKAFFFHGSSLLLPEELPAGGASHSDGASHSDAMDWETPLCRAADFPHPESEAGYAGFPDGEIYYISIKPETPIPPRWQAIPVRQAVSLLSGNTANGNIQSSRMLRAFHIAQWREESRFCGSCGARNTDSPDELARLCPACGRMEYPRIAPAVITLIIND

SEQ ID NO: 94346 - protein, 294 aa, Unknown
  Obtained from environmental sample
  misc_feature (1)..(294): Xaa is any amino acid
MYNRTQSAYRKALRRKRLIFTAAVLVFVGFAVFASVHIAGKFREWASKGDRKEMLRLWDAGDFNEVFNISQSALDSRPTDYFLLTMHGFSAYQLGISQINSQNAEQYFDKCIWSLRQAMLDKKSGNDGRLYYVLGKAYSYKGEDFADLTIQYLEKARELSDSTADIPEYLGMAYFAVGDYRKSVAAFSEALGTSAEGPSGPLLLFIARAYIALEEFDNARPYLQRCIEVSRDFRTVLEARLLLAEALKKDDIDGAIKQLQEINAETGDNAEAHYQLGELYNSRGDITRARAEWR

SEQ ID NO: 94347 - protein, 208 aa, Unknown
  Obtained from environmental sample
  misc_feature (1)..(208): Xaa is any amino acid
MEDVLAVYARPYDKKRPVICMDEKPYQFLSLSQKPIPMKPGSPEKEDYQYIRLGTCSIFIFTEPLSGWRYAQALPQRTKKDWAHRIRWLLNEQYPYVEKIVLIMDNLNTHKISSLYETFEPEETFRLAQRLEIHYTPIHGSWLNIAEIELSAMAAQCLGQRRIPDLMSMNEELAAWYTQRNQSQKGVDWHFSTKDARIKLKRLYPLIM

SEQ ID NO: 94348 - protein, 235 aa, Unknown
  Obtained from environmental sample
  DOMAIN (128)...(185): Bacterial regulatory proteins, luxR family
  misc_feature (1)..(235): Xaa is any amino acid
MESVFNDCGFYDVTQISLEKKALALKLNEIKPKYVFIHSEFYSCVTPYMIGCHLLKCPDLNIIVVNFGYFHNDDAEHFIFHGAVSYLDINYGVEEFKRGLKKIRNGDGYYSPGVERKISVLDDKPEYKKGITKRQWQVLLFICKGYNKKKIIANLNIKKRTVDTHIYNLKKLFYASNMVDLSNKAACMGWVKKEDLGIQNIKIKTPQLLLKKKRKKITPARGGGIVNQRNLSKYG

SEQ ID NO: 94349 - protein, 270 aa, Unknown
  Obtained from environmental sample
  DOMAIN (6)...(240): Cellulase (glycosyl hydrolase family 5)
  misc_feature (1)..(270): Xaa is any amino acid
HSNGLKLILDLHECPGHDFSEAAKGPVQKLFAGDDVYIKKTEKIWACLAERYSKDDNVLFETLNEPVAPEAEIWNNVKDRLCREIRLHAPWSTIITGSNMWNSPAAFEGLTPFDDDNVIYSVHFYEPLLFTHQNAPWIDSPEIKMARSYPGDYGPGIVRKYGFPHSAGVWNKDRLAKEFAPVNAFRKKYKARVICNEFGVYAPVELESQLRWYEDLLSVLREMDIGFSYWNYKNLDFGIISIGEKLHENLLQYDNSDRINHQVLDVLKKY

SEQ ID NO: 94350 - protein, 68 aa, Unknown
  Obtained from environmental sample
  misc_feature (1)..(68): Xaa is any amino acid
MGAKDGMNYAPKGKPNPVVKKGEFVFSAIALDHGHIYGQCNGLIEAGGTLKSVYDPDPKKVTDFAKHI

SEQ ID NO: 94351 - protein, 102 aa, Unknown
  Obtained from environmental sample
  DOMAIN (1)...(68): Protein of unknown function (DUF820)
  misc_feature (1)..(102): Xaa is any amino acid
GSPDIMVVYDKNKIGDEGCRGAPDLVIEILSPSNTAIEMERKFSLYQEAGVREYWIVDPKNNILRVHCFRDGDVLTNTYKSPNMVPVAVLPGFNITLEQVFA

SEQ ID NO: 94352 - protein, 379 aa, Unknown
  Obtained from environmental sample
  DOMAIN (291)...(357): Oligopeptide/dipeptide transporter, C-terminal region
  misc_feature (1)..(379): Xaa is any amino acid
KRKVRSEKGKVRNETENREQRPMSNEQLAISNEKEREVQDKTLDTSHFSLLTSHSSLLNITDLQISFTILRGNKLSSVLAVRGLSFTLNKGDCLGIVGESGSGKSVSTQAIPGLLPKNASISGSILYEGNEMIGLDTKALREYRGKKIGMIFQEPGRSYDPLQNMGSVFFETFKNSEPAITKDEAFEKAAALLAETGLENGRERLGNFPHQFSGGQLQRIGIALALAQGCELLIADEPTTALDVTIQKQIVELLKTLRRTRGISIIFISHDIDLVAEISDRIMVMYGGMEMEAAPSEEIINNPKHPYTKALLASSPRFGSHYSLGRLSAIPGKVSDPATEITGCPFAPRCSQAVEKCHQTTPPLSKIEGHEVGCWKPSE

SEQ ID NO: 94353 - protein, 356 aa, Unknown
  Obtained from environmental sample
  DOMAIN (58)...(356): CorA-like Mg2+ transporter protein
  misc_feature (1)..(356): Xaa is any amino acid
MKNILVNEQSIGLSSAKSVHTGDSASLTHGISVITYNLSSAEMHNLSSVDELLSYNNDSTILWINVNGLKDTGSIKKLEKMYNIHPLTIEDALDTRQQPKVETFENYRFISLKSIRHEKKIHLIKQEIKKRYSIRNRKKIMEQLEDMKEFVIDHTNIIIMKNVLITIQEIPGDSFGDIRKRILENIGQIRKMGTDYLAYSLIDTVVDEYFITLAHLENDIEDLEDRAVKTDNDAFISEIQETKKFLFYIKRAMLPLRENLMIISRQDMLLANEELKPFLQDLRENLSNAIDSVETYREWLTNIMDVNLSVLSYQLNKVMKILAVISAIFIPLTFIAGIYGMNFEFMPELTQPWGYP

SEQ ID NO: 94354 - protein, 153 aa, Unknown
  Obtained from environmental sample
  misc_feature (1)..(153): Xaa is any amino acid
MYFRRKYILLNIILLLSPGFLLFQSCATGSFAVVDNELESNSHTGGANYVASIKTLEKNRNILYKNGDKILYYLDKGMLQHYAQQYSESSKLLQEGERAIEEAFTKSISQEISTYLVNDNVRDYGGEDYEDIYINVFNALNYYHRGDSERGMV

SEQ ID NO: 94355 - protein, 349 aa, Unknown
  Obtained from environmental sample
  DOMAIN (3)...(179): Integrase core domain
  misc_feature (1)..(349): Xaa is any amino acid
MHVEHKPGERMEVDWAGDTAFILDNISGKPIPVYLFVAVLPCSGYAYAEGFLNRNMESWITAHVHAYEFFGGATRLLIPDNLKTGIEKADWYSPVINKTYHEMAEYYGTAVIPTGVRKPKEKASVERAVGMLSTWITAALRNRQFFSPWELNEAMRQKLADFNRKPFQKKPGSRESAFAEERPFLMPLPCKPFELSVWKVATVQLNYHIAADKMNYSVPYEYIKHKVDVRLTAHMVEIFYQGKRIASHKRLYGFPGQYSTNVEHMPEKHRQYSQWNAERFIKWASDIGPCTEQTVKAIISSRKVEQQSYKTCIALLKLADAHSTKRLEAACEKALCYRCCPSFRSIKTI

SEQ ID NO: 94356 - protein, 91 aa, Unknown
  Obtained from environmental sample
  misc_feature (1)..(91): Xaa is any amino acid
MGSRHKERILAFQALFAWDTADDKDVALKELLDFPWEEKGSPAAPVFSRLLAVGTAENIEKVDAMIREHLANWDFSRLLRVDRALLPPGCL

SEQ ID NO: 94357 - protein, 529 aa, Unknown
  Obtained from environmental sample
  DOMAIN (362)...(441): Fibronectin type III domain
  misc_feature (1)..(529): Xaa is any amino acid
SRTVTAKSGKSNGTVTVLYNGSTTAPSAAGTYIVTFNVAEATNWNAATGLNAGTLTISISTFTTAPSLTLTAGDRSLKYTWTASDPAADSYDIYWKAGFDLSVAEVKTGTKITGATSGGSITGLTNDTTYYSVVVTANKAGYAAIDSTVKIVLPTAPKNFYNAPVLQDLRAASESLYYSWTHSSPAADSYDLYWKAGNNLSAAEVKAGTKVTNASIGEGIKGLSNDTPYSVVVTANKEGYASIDSYVKTGTPSQWTNSEFFNRPVGFTLTAGNGSLKYSFMDSIPTADSYDVWWKAGSNLYEIDIRNGGIKITGVTSGGSISGLTNGTAYSVLVVANKAGFQASYSEVRTGTPYVTVTPTFTTAPTLTLTSGNGSLSYSWTASNPVADSYDIYWKAGNNLSAAEVKTGTKITGATNGGRISGLTNGTAYSVLVTANKAGYTAIDSAVQEVMIVQALWARTVSAGIGEFIATAVDSSGNVYVAGYQRGNGTYTYGAGVSAQGTYSEENAVLVKYNSSGTAQWARTVSVET

SEQ ID NO: 94358 - protein, 279 aa, Unknown
  Obtained from environmental sample
  DOMAIN (142)...(246): TonB-dependent Receptor Plug Domain
  misc_feature (1)..(279): Xaa is any amino acid
LQYEYRFSLRDVITVPKSYVNLSGALIERGTRRPIADALVVLRVVDTLSDTSLAMPFSLYMEQIGAIEGQSWEDSRLVATTDSAGAFRFYSLPSGKVEVSVQAPDYVPYFTYERISKLEEVKVLYYVTRLDYADYELVVYGKAEEKEVSRHRISMSEVKRVPGLGGDAVRVVQAMPGVARPSFGGTEVVVRGAPSWASRYYIDGMTVPMLYHMSGATAIYPSDALDGVDFYPGGFSSRYGGAVAGVIEMNTRSPKTDRLHGYADFSMLASALFFEGPRK

SEQ ID NO: 94359 - protein, 294 aa, Unknown
  Obtained from environmental sample
  misc_feature (1)..(294): Xaa is any amino acid
MINASCNDLFLDMENVFKYLLFDSKEIYMTGGYVNGSLDIRGPLSDPEFFGSARGTSLRFMIPSFIPVEIRPIPCTATVEGNEIRLGQVQASAGKGACTVSGRFIIDRWIPDIFDIYINVPRETPIPYSLGVASLAARGDASGKLKVSMENKTIDVSGDMYVNNTVLGMDADDAGGQFSGDTRALVNLTVSSGPVVEFCYPNSKFPILRANPDMGSKLHVTADTITRQYSVTGDVKIRGGELFYFERSFYIRSGLLVLRENELRFSPRLTARAETRDRNEDGPVTISLFVDNAP

SEQ ID NO: 94360 - protein, 371 aa, Unknown
  Obtained from environmental sample
  DOMAIN (37)...(230): ATPase family associated with various cellular activities (AAA)
  misc_feature (1)..(371): Xaa is any amino acid
SRDLTEAARRGKLDPVIGRDDEIRRMIQILSRRTKNNPVLIGDPGVGKTAIAEGLALRIVRGDVPEGLKSKSVVSLDMGALIAGAKFRGEFEERLKAVLHEVTERGDIVLFIDELHTVVGAGAAEGAVDAGNMLKPMLARGELRTIGATTLDEYRKYIEKDKALERRFQTVLIDQPSVGDTISILRGLRERYELHHGVQIKDSALVAAAVLSDRYISERFLPDKAIDLIDEAAAKLRTERDSSPVELDEAMRRQMRLEIEIEGLKKENDKGSKEKLAKLQEELSAVRETASSLKSRWETQKSQSDRLQKIREEIDAARVELERAEREYNLRAAATLRHGRIPELERKRALIEAEIKDSGDGTRLLKEEVGE

SEQ ID NO: 94361 - protein, 295 aa, Unknown
  Obtained from environmental sample
  DOMAIN (5)...(114): 1-deoxy-D-xylulose 5-phosphate reductoisomerase
  misc_feature (1)..(295): Xaa is any amino acid
MKKRISILGATGSIGKSALDVISRNKDIFDVVLLSANTKGEELEKLKNLWPSAVCVLSGVQGGKENLLAAIGNVNACLTINGISGAGGLEPSLAAIESGSDLALANKETLVMAAPLVFRLAKEKNVKIIPVDSEHSAIFRLIQAHAGGEKETVSEIILTASGGPFRKMGLNDLKKVTAKDALSHPTWKMGPKITIDSASMANKGLEIIEACALFDMPQEKIKVVIHPQSIVHSMVKLCNGAIYAQLSKPDMRNPIHDALFWPKTAPLNMEAINFDSLTLEFEKPDNQKFPMLDLA

SEQ ID NO: 94362 - protein, 262 aa, Unknown
  Obtained from environmental sample
  misc_feature (1)..(262): Xaa is any amino acid
MPEYDIIAAGSLLGVFLHEGVSFPVGKVEFMKLYPMSFREFLEAMDEEQLCGLLDTRDWAMIKTFKDKFISYLRMYFYIGGMPEAVLRFTTNKDFAAARDVQKQILEAYTADFSKHVPGIHLQKVVQIWDSIPYQLAKENKKFIYSEIRKGASAKTFEAALEWLLRCGLIHRVSRVSKPTIPLKGYADSTGAFKLFLCDIGLMSAMTKIDVHVLLEGDALFTEFKGTLTEQFVCQELKLIDDIDLAYWSNEAPARSEVDFIL

SEQ ID NO: 94363 - protein, 226 aa, Unknown
  Obtained from environmental sample
  misc_feature (1)..(226): Xaa is any amino acid
IPPDIFEKAQKQGKTKPWGTAHALLCAADKIDAPFAVINADDFYGREAFEVLGKYLQGSYGAGEPSGDPAIVPYRLDKTLSSQGTVARGVCQIKDDYLVTVDELTAIGEKDGVIINTNPDGSIRRLAADSPVSMNFWGFPPSILPEFKKYFDEFLKTFAADIPAQIKSECFIPKAADYFIKQGITKIKVLRADSDWFGVTYREDREAAVKKLSHLTRAGVYPESLW

SEQ ID NO: 94364 - protein, 166 aa, Unknown
  Obtained from environmental sample
  DOMAIN (18)...(145): Putative small multi-drug export protein
  misc_feature (1)..(166): Xaa is any amino acid
VNTAFFGTAILSFMPISELRGAIPFAIARGIPWYWAYFFAVICNILIAPVCWLFLATVHKLFYGTETRNGITWYKNIFDKLIERARKKLSAGFEKWGWLGIAVFVGIPFPLTGAWTGTLGAWVLGVSRRRTMLAVIIGVIISGTIVTAVALGAVKGFNIFINEKWR

SEQ ID NO: 94365 - protein, 168 aa, Unknown
  Obtained from environmental sample
  DOMAIN (31)...(149): Response regulator receiver domain
  misc_feature (1)..(168): Xaa is any amino acid
ISIADILNGKTDKFSYDDNNELIASFTAPQANILVVDDIITNLNVAKGLLSPYETQITLCKSGMMALNAIKSNHFDVIFMDHRMPDMDGIETTQRIRAAGDENPYYKNVPIIALTADAVSGIEQMFLENGFNDFISKPIDTIKLNSVLEKWIPKEKQHGSVIINRKGS

SEQ ID NO: 94366 - protein, 438 aa, Unknown
  Obtained from environmental sample
  DOMAIN (76)...(270): FtsK/SpoIIIE family
  misc_feature (1)..(438): Xaa is any amino acid
VKEFNIQVEVTGIRKGPVITMFEILPAPGIRLARIESLADNIALRLAAQSVRIVAPIPGKHAVGIEVPNAKRNIVSFREIIEGELSKDGKKAEVPIVLGKDITGEAVTVDLVQMPHLLIAGATGAGKSVCVNSMILTLLYQKSPAECRLILIDPKIVELKLYNDIPHLLTPVITEPKKAFQALQYCIYEMERRYSCLDSMGVRDIRSYNKRIVEREIATEYMPYIVVVIDEFADLMATTGKELESTVARLAAMSRAVGIHLVLATQRPSIDIITGLIKANIPSRIAFMVASKMDSRIIIDMVGAEKLLGKGDMLYAGAVDPFPVRMQGAFVSEEEVERVVDYVKGLGEPDYIDDEIFYDEEEENADPSLFSEGDDPLYEKALEIVMQQGRASASYIQRRLKIGYNRAARLVEVMEHHGVVGPAQGSKPRELLRGTAIN

SEQ ID NO: 94367 - protein, 613 aa, Unknown
  Obtained from environmental sample
  DOMAIN (10)...(344): Glycosyl hydrolase family 57
  misc_feature (1)..(613): Xaa is any amino acid
VKEKNKIYLIIGSHAHVPSGAPESEFEFVYENKIRPFVTNLYRYSNIQAVLHYSGVLLYWVERTHPEFFMIIEDMINRKQTELLGGGFYEPSFPLIPLQDRIGQVELMTTYIRKHFGKRPLGCWLPQMAWEQHLAGALSSSEIDYTFLSQEQFAQAGIKGSGLFSPCISEDQGKLLTIFPVSLTVEKDLAEKSFSLVFVELKNKFEEICGKCESEKIISVFPEKILSSPEEAPDTAWNRFFEEISLSEDIVETTLPSKFLRGHKTYKKGSFPNSSAAENNFSPRKFIIEHEEAGGIYSKMIFTNVLINQLKGDKSRKLSAREELWQAQDSNLFSPGNGYLRNELRKSAYSSLLRAEMLTRETGKFIPSLIQYDFDFDGVKEFIFQDSVINCYIQPKGAGIFELDYLPKEWNYLDCGSGDFGRRAAFADILVPLDIKIDKHEDAITEDSRLCFNEVYESIEQDKKGKICFKLPASGDTPFGEIEINKCFLLKKDVLTVSYNLKNTGKEPISFKFIPIICFSFANITDEYVRFYKIDANGKDIHLGREFDTDNFKILDVKNEVQILISSAKTFSGNLAPVYSNDYYQAARIMPIFSASLKEGGSWLNEFTIKFSH

SEQ ID NO: 94368 - protein, 103 aa, Unknown
  Obtained from environmental sample
  misc_feature (1)..(103): Xaa is any amino acid
MKRRLITSALPYVNNEPHLGNLIQVLSADAFARFCRLRGYETLYVCGTDEYGTATENKAAEEGISPKELCDRYHAIHSGIYKWFNIAFDKFGRTSTPIQTEVT

SEQ ID NO: 94369 - protein, 208 aa, Unknown
  Obtained from environmental sample
  misc_feature (1)..(208): Xaa is any amino acid
AAFLHGIGWPAAATIWQTNNGVAKYQLEKVFGPSYSTDSIQGSMNAISSNSRYKAEALRLLELVNTDHKLRDMLAFGIEGVNFSYVKPNVVRLLTADQWNLARYQQGTFFQMSTMEGDPEDAWDQVRRQNEQAESSVLLGFIFDNKAVINEVANCKAVFDRYKNELLTGASNPDTAVPAMMRDLNAAGFQKIMDEAQRQVNAFRGRTF

SEQ ID NO: 94370 - protein, 501 aa, Unknown
  Obtained from environmental sample
  DOMAIN (13)...(401): Alpha amylase, catalytic domain
  misc_feature (1)..(501): Xaa is any amino acid
MGTQWWEKAVVYQVYPRSFCDSNGDGIGDINGIASKLGYIKELGVGVIWLSPVYQSPMRDNGYDISDYRAINPEFGTMADFDRLLGQAHELGLKIVMDMVVNHSSDQHSWFKESRSGLENPKRDYYIWRDGKNGGPPNDWKALFGGSAWTLDETTGQYFLHVFSPFQPDLNWDNPALRSEIYDMMRWWLDKGIDGFRMDAISFISKPQNFFDGDSKKTIPNGPHIHEYLREMRREVLSKYDIMTVGETGGVTVDQAIQYAESGGGELDMVFQFEQVELDGGESFKWNDRKINLVELKEVFSRWQTRLHGRAWNSLYWCNHDQPRIVSRLGDEGAYREKSAKMLACCLHFMQGTPYIYQGEELGMNNAPFTDIGDYRDLESINAYNTLVIQEKRIAKADMLRYMRLKSRDTSRTPMHWNNGPNAGFSTGTPWIMVNPNFKQINAEEQTRRAGSVYSFYKALIQLRKKMDIITLGSFELLLPDDPDLFVYTRRYRREELLIVC

SEQ ID NO: 94371 - protein, 290 aa, Unknown
  Obtained from environmental sample
  DOMAIN (82)...(171): Elongation factor G C-terminus
  misc_feature (1)..(290): Xaa is any amino acid
VKLNDSSLIWEPEASGALGFGFRTGFLGLLHMEIVQERLGREFNVDIITTVPNVEYRVFMTSGEMIPIESPSKLPDASRYDHIEEPYIKAQIFTPKDYIGSLMQLAEEKRGTFETMEYLDENKVILRYELPLAEVMFDFYDRLKSVSRGYAGLDYEQAGYRENPLVKLDILLNGDPVDAFSVIIHREKAQHYAQAICARLKDLIPRQQFDVAIQGAIGGKIISRTTVKAVRKDVLAKCYGGDITRKRKLLEKQKEGKKRMKNIGSVEVPQKAFLAVLSLSSPSGSSDDDD

SEQ ID NO: 94372 - protein, 414 aa, Unknown
  Obtained from environmental sample
  DOMAIN (1)...(414): tRNA synthetases class I (I, L, M and V)
  misc_feature (1)..(414): Xaa is any amino acid
MKGKKIERRFGWDCHGLPVENLIEKELGLNSKTEIERYGIAKFNEACRASVLRYVQEWRQTITRLGRWVDFDNDYKTMEPDYMETIWWVMKSLHEKGLLYEGHYILPYCPRCATVLSNHELNLGGYKDVHDPAITLKFRVMRNEELGIRNKGEAYFLAWTTTPWTLPSNLALVLGPDIDYVLIEALSDPSSSSPQSPVPSPQYYILAEARLPAYYKSPAEYKIIWRKKGSELLGVEYEPLFPYFKDAPNAFRTFPGDFVTTEDGTGIVHTAPGFGEDDARALKGTGIPVICPVDAECKFTAEVPDYAGLFVKDADKAIMDRLKAEGKLVKREQVLHAYPHCWRCGHPLIYRAVGSWFVSVEKIKKDMLDANSQIYWVPEHIKEGRFGKWLEGARDWAISRNRYWGNPLPIWRCP

SEQ ID NO: 94373 - protein, 490 aa, Unknown
  Obtained from environmental sample
  misc_feature (1)..(490): Xaa is any amino acid
MDYVAFGYYNSCIMTWDQDYEKAMQKLANLRTVIESAGFTCKEESFNAYNAFLGMTAGDVHRNIRRPLINSGNFSHVLPLSAVWAGMAQNIFTGEVCGVDSPLVTCSTNYGTPFFLNLNDGDVGHSLIFGPTGAGKSTIIGLLAASFLKYPDGQVFIIDKGASALTMTLAAGGEYVDPSATEHCFQPLGDIDTEPDKAWACDFITTLLEMQGITVLPKMLVQIRVTIELMSAMEKQRRTLTTFKQTCMYRDENTGQNPIDDAVQPYTLEGPYGRIFDGDTTRINDSRWILFEMSELMELKDKVVAPAIMFLFHFLEKRFKGQMTLLVVDEAWRFLDNEAFRSKMRQWLKELRKKHVFCVFATQEVADGANSPIASTLIQNCPTKIYLADPEAYNNAEAYMKFGLTEDEVALLTMARKKRDYYFKNPQGTRLFQLSLGVIFLSLMRAQDAQVRTVKGEVIRWADYCKSPAGIEKLRRFKRFTEEILDIQGV

SEQ ID NO: 94374 - protein, 608 aa, Unknown
  Obtained from environmental sample
  DOMAIN (583)...(606): 4Fe-4S binding domain
  misc_feature (1)..(608): Xaa is any amino acid
MAEKTAYKHYILTCGGTACESNKGNEIHDQLIAEAEKQGVKSEVQIVKTGCFGFCEMGPIVKVLPEDSFYVLVKPEDAKEIIAEHIIKGREVKRLLYKDEGHIKASDTVEDIQFYQKQVRVVLRNCGTIDPESIDEYIAREGYKGLEKVLFEWNQEQIIAEVKTSGLRGRGGAGFPTWLKWDLARKAQGDVKFVICNADEGDPGAYMDRSTIEGDPHSVIEGMITAGKAIGANQGFVYIRAEYPLAIDRLKIALKQAQDYGLLGKNILGSGFDFDIEIRLGAGAFVCGEETALIKSVEGNRGMPVPKPPFPANKGLWGKPTIINNVETLANIPVITAKGGAWLARLGTEKSKGTKVFALTGKVKNSGLVEVPMGTTLREIIFEIGGGIKNGKKFKGVQTGGPSGGILTEKSLDLPIDFDTLTANGSMMGSGGMIVMDEDDCVVDVARFYMDFCVDESCGKCSPCRIGTTQILRLLEKIANGNGEDEDLAKLEEIGVAMTKASLCMLGGSAANPTLSTIKNFRDEYLEHIHDKKCRAGKCKKLLRFMISTDKCIGCGMCAKKCPANCITALDPAKYPGKKKPPYAIDQNACVKCGECLKNCKFNAVSRG

SEQ ID NO: 94375 - protein, 144 aa, Unknown
  Obtained from environmental sample
  DOMAIN (4)...(68): 2Fe-2S iron-sulfur cluster binding domain
  misc_feature (1)..(144): Xaa is any amino acid
MINLKINGVPVQVEEGTTILEAAKKANIIIPSLCYNPDLPAWASCGICIVRVAGSPKLIRACTTPVDGGLEGKDIITHDGEIIATRRVVLEMILSNHPNDCLQCPRNNNCELQTLAAEFGIRESPYKKITEGLPVTIQPGDILT

SEQ ID NO: 94376 - protein, 331 aa, Unknown
  Obtained from environmental sample
  DOMAIN (1)...(276): Amino acid kinase family
  misc_feature (1)..(331): Xaa is any amino acid
MIVMKFGGSSVADAERIRHVASIVKTQITKKPVLVLSAMGDTTDHLLEAGNLALKEGKVDIKQVEKLHLETVKKLKLPVQKEISSLLDELTRLLSGIALIRELTPRTKDYLVSFGERLSVRVAAAFFKASSMNARAFDAWDLGFISNSDYTRAELLKESWDLIPEKTLPLIKGNVLPVVTGFLAKDEKSSITTLGRGGSDLSATMIAAACRAEEVQVWKDVDGILTADPRIVKDAKPVQFVTYEEASELAYFGAQVLHPRAMQPCMKTGTPVLVKNSYNIEAPGTRIESASTTAKKGPPVRAITSKHNVTLVDIVSTRMLGQYGFLAEVFS

SEQ ID NO: 94377 - protein, 142 aa, Unknown
  Obtained from environmental sample
  DOMAIN (3)...(142): Dihydrodipicolinate synthetase family
  misc_feature (1)..(142): Xaa is any amino acid
MTEFRGAYTALVTPMTQSGEIDYEGFRKLIQFQIAEGIDGIVPLGTTGENPTLDEDEEDKLIEIAVKEAAGKIKVIVGAGSNDTKHMVKYVERAKKSGADAALVVTPYYNKPNDSGMLRHFEAAAKPGIPIIVYNIASRTGK

SEQ ID NO: 94378 - protein, 237 aa, Unknown
  Obtained from environmental sample
  misc_feature (1)..(237): Xaa is any amino acid
GRLCRAENLTNIDVNGTVTLAGTELLKGAFKGLGAKPVTGTFDFKESILTGLPRDRLQSLDFTRKGRGTLYYTASLRYALPFELQSFRDEGIGVFINIYDINTGEEIKGTALNNGKTYRARVRVSSNRDRTYLALRVPVPSGAEILDATFVTTASYQEKGGASGNEEIRSSSWLSYQIIMDNEIQYFWDQFNKGESTVSFLFRSARRGVYPTPPVQAECMYEAEIFGRGAGLLYTIE

SEQ ID NO: 94379 - protein, 59 aa, Unknown
  Obtained from environmental sample
  misc_feature (1)..(59): Xaa is any amino acid
FSRSGGPGGQNVNKVNTKVTLRLRLADVDGLSEAELDRVRELLANRITNGDEIIINADE

SEQ ID NO: 94380 - protein, 1260 aa, Unknown
  Obtained from environmental sample
  DOMAIN (317)...(479): Alpha-2-macroglobulin family N-terminal region
  misc_feature (1)..(1260): Xaa is any amino acid
SESGGFYGSINIPDDLNPGSYRLVYKRNDGISKQAIANIPITVAYFERLKFQASLSAPAAAIISGDDINLKLQATYLSGGSLAGASWEGSWYDEMTGFQSRSPETKGYEFGPRRVWDSKRYIASESGVLGGQGTATLSQKTGGGKITGAPYLYQAEARITDISNQMISAYRSVIVHPARFYIGLYQGAGGFARKGQELSYDYIIVNTAGEKTAGNGLFLQTGENAGQLKVELIREEWRRVQQRGVNDYIYDEYSREQVTDNVQKIAIKNGGGSIKIKPSSAGYHTLRVSAQDREGRTALTEINFYVTGSGGYWNMNNPNELRLTPDQEMYNPGDTAKVLLQSTLPEGRYLITVEREGIFTEEVRHFTEPVSVIDIPIARNYVPVVYVAVSSYSVRSGPPTHEYGSPDLDKPKGYFGVTQIHVNPRARAFSVKVESDKKTYRPGEEVIMTLTASKDGKPLPNAELTLMAVDRGVLDLINYHVPDPIQYFYSEDRFKLMVAGGDSRSWLMDPVTYSVKDLAGGDADGGSKIEERKDFNPTAVFEPMLITDNSGKVICRFKLPDNLTTYRITVFGVRGDIFALKESEIAAQNKINVREVLPRRTRERDTAEAGVLITNLDSSSHTLSVRLDIGPPLPNDDSSGMKKISGQAFVDGIVERRITVKSGENAVVYFDVAAVKEGNVTLNFTVNADILNERLIRELVIEHPYVMETVTTTGSVDKDSGSEGIVIPSFADNGVGSLSVTLDATRLSLLDSAITYLFRYPYGCMEQRSAAIMPLVIFGEYLDALGLKSEVSNPRQVVENELKSWAKVQLSGGGFPYWPSGTEANFYVSLRIAHIIAIAQSKKIKVPSSLNTADLNAYLTREYQELQGWRVNSSSYYYQSYLQSYMLYVQALLGEKVDPSRLAEILSRDNVDPSTLAFAGMTYRALGRSADAATTAQRLRNLVRMTARGADITDPLDKHRYNYYGGMVEQLALTLQFFVAQYPGDEINTRLLFSLLENKRSGREYWESTAVTVRVLSAVDALIRAENLTNLDVNGTVTLAGTELLKGAFKGLGAKPVTGTFDFKESVLTGLPRDSLQPLNFTRKGRGTLYYTASLRYAIPFEIQSFRDEGIGVFMSIYDINTGEEIKGTALHNGKTYRARVRVSSNRDRTYLALRVPVPSGAEILDAAFVTTASYQDKGGADGGANRDEKIRPSSWISHQLIMDNEIQYFWDQFNKGESTVNFLFRSARRGVYPTPPVQAECMYEAEIFGRGTGLLYTIE

SEQ ID NO: 94381 - protein, 305 aa, Unknown
  Obtained from environmental sample
  DOMAIN (99)...(176): Helicase conserved C-terminal domain
  misc_feature (1)..(305): Xaa is any amino acid
DIDDKGMTLEEVLEHNPKDAITGKPITTLDELKKYYESTDYESDLLMPDRIYKMSKDLFDSLEKKGTVEQKTIIFCVRDIHSERVADELNNLYNDWCKKNDRKKCEHFAFKCTSKSSGSQYIADMKGSKTDYFIATTVDLLSTGVDIPEVRNIVFFRYVKSPIAFHQMVGRGTRLAENKLMFTIYDYTDATRLFGNKLISPPPGGGGGSGGGEDGPKIVQIEGIDVEVSDEGRFLVTEVDGNIKRVTVDEYKQRLADRLLTDISSLDDFRKRWVNPNVRKQMLEELIVGGYSPDTIRKVDKLNDF

SEQ ID NO: 94382 - protein, 98 aa, Unknown
  Obtained from environmental sample
  misc_feature (1)..(98): Xaa is any amino acid
MDSAFERRFLYKITFEKPVAESRKGIWNALLPDLPDDKAAELSQKFELSGGQIENIARKVEVDAIINGGGLFMDTLIQYCRDEMQNGLNTCKKIGFGE

SEQ ID NO: 94383 - protein, 462 aa, Unknown
  Obtained from environmental sample
  DOMAIN (287)...(375): Hpt domain
  misc_feature (1)..(462): Xaa is any amino acid
DTDTGEVSLSVNAEYSSQQWAQLTLIFRITDTGHGMSEEQVVKLFDEYTRFSMEANKKVEGVGLGMSITKHLVHMMNGEIKVESKLGKGSVFTVSLPQGILGTEVLGKELSENASKFTVGRSAQINNAPQFVRDFMPYGKVLVVDDVETNLYVARGLMAPYGLSIETASSGFEAIEKIKNGAVFDVIFMDHFMPKMDGIETVKKLRNMDYTHPIIALTANALAGQAEIFLDNGFDGFISKPIDIRQLNVLLNKYVRDKYPPEVVEAAQRQAIKNNMVKKIQQPSDPELAAIFARDAEKAIARLDAIYVNTFRRNEDIRQYVIDVHSMKSALANIGETELSAKAFKLEQAGKAEDKTVMMSETPVFLKELREVVKKNKQKANANDTTVTEDSPDALAFLKEKLPLIQKACEEYDEVTAATALSELKQISWSHSVEETLDTISEHLLHSDFEDAAALAKDRLHR

SEQ ID NO: 94384 - protein, 316 aa, Unknown
  Obtained from environmental sample
  misc_feature (1)..(316): Xaa is any amino acid
MKLNTLLFIGTAAILVAGGGGYWYFTRDTSEVKWRTAKVEMGNLQKRVSATGTLSAIQQVDVGTQVSGMVMTIGADFNSIVKKDQVIATIDPTVPQQTVNQREIDVERNRINLDEAEKQLTRYQNLAEKSLVSVSDLEGREVSFRTAKLQYENSLIQLDQARTNLGYCTIKSPVDGIVVTRKADVGQTVTASMTTPNLFVIAEDLSKMKLEITMDEMDIAEVEVGQIANFTVEAFRETPFQGEVAQVRLEPVTSQNVVNYKVVVEVTNKTKQQIENENQARRSMMSAFGGGRGPGGQGADGQARPQQGQGGRDGQA

SEQ ID NO: 94385 - protein, 348 aa, Unknown
  Obtained from environmental sample
  DOMAIN (210)...(345): NUDIX domain
  misc_feature (1)..(348): Xaa is any amino acid
VLYGAGLRMQGALAECVQGGGPDQLLLLEHNPVYTLGRNATRADIHVPDAFLAESGIEVHQIDRGGQVTYHGPGQIVAYPICNLRGQSVSNLVNDLEQAMIETAKGFGVHAERLEGHPGVWVETARGWEKLGAIGLHLKKWVSTHGLAFNLAPEMEHYRWITPCGIADKGVCSLRTLLGDGCPSWVEASASLERHLLEVLGLEPLPTAEPSRSVSITVWRRGAKGLEILMLPRHPEADQWQSGVTDMVEPGETFDAAARETVEETGLHGRLVNLDFSHTRCLGPVPALGHEPFFNTEACFHLEVLPDAAVRLDKAERVRWCPPDEAMSLMAHEGGREVVRLLIRSCIL

SEQ ID NO: 94386 - protein, 146 aa, Unknown
  Obtained from environmental sample
  misc_feature (1)..(146): Xaa is any amino acid
MFIRSYGDTLDDGAVQLSFTLPVKCDAKGREAARLYVEKMGFSHVDVVHSAELSDGFSFYVAYGKTTLAIDFDQIHVEEATGEKLYSMQEANDAIKERIGRKLVVVGACTGFDAHTVGIDAIMNMKGYNHHYGLERYSEVDAHNLG

SEQ ID NO: 94387 - protein, 190 aa, Unknown
  Obtained from environmental sample
  DOMAIN (8)...(190): AMMECR1
  misc_feature (1)..(190): Xaa is any amino acid
MDFTIDNEEKKILLSQARETIAAELERRKPVYGDIPANADSALNKQCGAFVTLHKINGAEHDLRGCIGRMAANQPLIETIRQMAKSAAFDDPRFPPLRREELEKCQIEISALSPMIPCDNPRKVKVGVHGLYLSRGGRSGVLLPQVPVEQGWNLDEYLDYICIKAGLPPHSYEAPDAQLLTFTAIVFGEE

SEQ ID NO: 94388 - protein, 510 aa, Unknown
  Obtained from environmental sample
  DOMAIN (299)...(510): Methyl-accepting chemotaxis protein (MCP) signaling domain
  misc_feature (1)..(510): Xaa is any amino acid
YTWDPPKRDWHQVAMGSPDKIILIEPYVDAETGKIVISFSRTVKNSAGTIIGVIAVDVTLDNLSEIVTSDKITEDGVTVLVEKNGLFIVHPDQSYVLEKNIFDGALSTDKDTVLKNQVSVIFHGDNYICSAPVGGTDWFLISTGSLNSMRMETRMILWTVLIVVFIMAMVSAGVAIALSHSLAKPFRHLVSSFNVFSSGDFTASTPDYASREASALSNGFNSFADNISGLVRNVKNSANDIDKVAEDLSLSVNDTQTVIIEVKETVDFIHSDVDMENQSIAQNEAAVNHVMEEIKNLNAKIKEQSAQISGASSAITEMVANINSIDSNTTLVNNRMLELVKSSQEEKKRLSETAEATKQIETDSLALAEMNKVISNVATQTNLLSMNAAIEAAHAGEAGRGFAVVAQEIRKLAETTAQQSKSSQDTIVSLLERIKRIAVASGHVEESFGNMLDMIHEVEGITANLKNATEEQGKGSNQLLSSISVINSITHDVETGALTMNSSASEAVAA

SEQ ID NO: 94389 - protein, 113 aa, Unknown
  Obtained from environmental sample
  DOMAIN (20)...(74): Helix-turn-helix
  misc_feature (1)..(113): Xaa is any amino acid
MAKKNEIDEKYVFKLISSNIKRLRSLNNMSQLTLALNTGLTHNFINDIENCKKGVSAKTLAKLSMALNAEPYQFFLPDGMANNEIISYVKDFNDSLQKVVSDLTHHYLSGDKK

SEQ ID NO: 94390 - protein, 434 aa, Unknown
  Obtained from environmental sample
  DOMAIN (128)...(367): Transposase DDE domain
  misc_feature (1)..(434): Xaa is any amino acid
VIKIKPTKETIESKGGLILAGKIAKKVGIGAIKSLFVKNAGVIIASLFGLMVEGKSDYESMGEKRGSLFFEKALGLPYVYAKETVRLYLQRMAEDADAVIEQLRGSAVKIICQAPLHGLWIDGKQYLPVDIDTTTMDNSKTKKEGVSRTYQGFDGFHPIMAYVGKEGYMLDCELRPGSQHCQKGTVEFIEGLKGRLQNIQLSKRILFRMDSGNDSFDTLKAVTGEGRYCIIKRNKRRENDEKWLTRAKRQGKRVESRKGKKVWIGTAQIHPRKKGEVLKDVICVFEVIERKTDSQGNRYLFPEIEVNSWWTNLSCQAEKVIELYHGHATSEQFHSELKSDMGVERLPSGKFAVNKIVLAVAMNAYNALKMLGQKSIEKGNGKKVKRKRLGKVIRDLICVAGKLVKHGRELIFKINEKDPMLPVFLRLNALLGCP

SEQ ID NO: 94391 - protein, 429 aa, Unknown
  Obtained from environmental sample
  DOMAIN (1)...(406): FHIPEP family
  misc_feature (1)..(429): Xaa is any amino acid
IYWISAAVLMCFALLPRSPLSLRVVLVLLGALMAFAGYSVGRKKKKAASFNEMMAKSKDPKKGKEDSSEMSPIVPLDALSLEIGYGLIPLVDKEKGAELLERVQGVRRQSALELGLVIPKVRIIDNMVLDPSEYCFKIKGVDVGRSKIRMGYFLCIIPGTVTEELPGDKTVDPAFGLPAQWISENRRDEAERAGYTVVDPPSIIATHLTEIIRRHAAEILGLQDTQAILDTLRKEYPAVVDEVLRPELGMPVIKIQKILHGLLRERVSIRNMVTILEAIAEYAPLSKTVWFLTEKARQALGSQICHQYTDENHKLRVLTIAPELEQKIIECKYETPSGVICALDPPTQAAWIKAVSKAAAAVKSRGFLPVILCSEQARFLVRNSTDRELPDLAVISVPEITPDIVPEAVGVIRLESAAPSQGAPLQGGG

SEQ ID NO: 94392 - protein, 245 aa, Unknown
  Obtained from environmental sample
  misc_feature (1)..(245): Xaa is any amino acid
LGQGISIPAKQSQLKKQPAAMAEIEENEENDSNLVDFAERKKQILTAAGKDPNKVMRQMKQQEDREASQQLIIDKLNEIMEKQEQINAKNIPKQDHPSLLRITQMLRQNEFSERYINGLLDRARKELPLETLDDFTAVQNQALVWIGESIKIYSMPRREEGSSISADFAAGRVLVLVGPTGVGKTTTIAKLAVVYGIGSADRPSPLSVRVYTIDTFKIGGTDQLEKYCEVMELPFGIINNQLELR

SEQ ID NO: 94393 - protein, 380 aa, Unknown
  Obtained from environmental sample
  misc_feature (1)..(380): Xaa is any amino acid
METIEQSASQINDQTGEIVFDTASGISLEEQQEILAGINAMTSGSLLPSGNRLASEIVVTEAKKKGFLFPLFVNIGAFVLLVSAFFLLAYLNFNDEQEMRESSSTLGLTELILIQQIRKDTDRQIREKEIQISDVLLRLQAVDAEYKDLQVSVENMTAAQKQRAASLLVLSEEYQRMLLGLNDEKARILEDSRQREADLWAQAGEKAKALTFGTEQDWSELDEALEELKKLGTEQERINRAEREMNGFYVTLNSQIESGRLDEARATINSIREFLDAPSLRGISVFETRRQTHLAAIDAMEKAIASSTGGVVIQNSAQEETIAELTALAAAQERMLAAFTAEGAGQNKIIAEYAAALSRLESSNAEQKDALNNKDSEIQA

SEQ ID NO: 94394 - protein, 522 aa, Unknown
  Obtained from environmental sample
  DOMAIN (10)...(522): tRNA synthetases class II (A)
  misc_feature (1)..(522): Xaa is any amino acid
MPNTPKTSAEIRTSFIKFFESKEHLFVRSSPVVPQDDPTLMFINAGMNQFKACFLGDNPNSYKRVANSQKCIRVSGKHNDLDEVGRDTYHHTFFEMLGNWSFGDYYKKEAIEWAWELLTEVWKLPKERLFVTVYQDDDEAWQIWKNVSGLPDARIMRFGEKSNFWEMGDTGPCGPCSEIHYDKGDLATQEATFADPVQGVNGANARYIEIWNNVFMQFERIKSGELLPLKNKNVDTGMGFERVCAILQGKDSNYETDVFSPIINKIAELSGVPYNADQSGMPHRVVADHLRALSFAIADGALPSNDGRGYVLRRILRRASRYARLLNQKEPFICRLVQTLVQTMGEAFPEIRERADFVTEVIRSEEERFIRTLDAGLERFEKITHELSSKIIPGTQVFLLYDTYGFPPDLTRILAEEKNLQIDEAGFETEMEKQKERARASQKQGLSAIGSEGWTIFAEGSTEFLGYEASTAQVKILRYKEDKGSYSIVLDRTPFYAEMGGEIGERGTLVKILVQPLKFLIP

SEQ ID NO: 94395 - protein, 260 aa, Unknown
  Obtained from environmental sample
  DOMAIN (51)...(240): Phage integrase family
  misc_feature (1)..(260): Xaa is any amino acid
RTKPDNYKGNFSSELSASYKNKILLTGKIALNWAFNEELITTNPAARKVNFQGKPKKRKVLTPQEAELIFNNIQWNDRRAYIGALLSITTGMRAGEVLGLRKNDIDPVKNILYCEHSFSTYDGLKTPKNGETRKIPLLPEVKKQLLELLEQNPHKENENPFIFYGLLEDKPMDGKILLYGLKAACKTAKIDEVIFHSLRHFYAARLLDVMTADKIMRISGHKTRAVFDGYADHLTDENINEMAQAAGTVFQKIIPFRAAV

SEQ ID NO: 94396 - protein, 176 aa, Unknown
  Obtained from environmental sample
  misc_feature (1)..(176): Xaa is any amino acid
MKNIIKQICVIAFVAIIGFSFFACGGDDGNGNNNNNNNNKNKPQTPETPQPFDNITAVQLVAKIKVGWNLGNTLDATDYGEGWLSKTSTIQQLETAWGNPVTTKANITAIKNAGFNAIRIPVSWDKAVDANYNIRTDWMARVTEVVNYAVDNDMYILLNTHHDETTFKFTNSAIDK

SEQ ID NO: 94397 - protein, 353 aa, Unknown
  Obtained from environmental sample
  DOMAIN (37)...(198): Mannitol dehydrogenase Rossmann domain
  misc_feature (1)..(353): Xaa is any amino acid
MKLNNNSLKNRAFWEKAGITLPRFDREAMIAATHAAPKWVHFGAGNIFRAFPAAMAQSLLEEGLEKTGIIVAEGYDGEIIDKSFTAIDNLTILVTLKSDGTTEKKVIASVAHSLRMDKEMDALKKIFASPSLQMASFTITEKGYAVKNRGGELFPDIAEDIKNGLASAKSYLGRIAALCHERYAHGALPLAMASMDNCSHNGDILFAAMETIAKGWAENNATDGGFLDYVRDKNKLSFPWSMIDKITPRPDDSVRDMLISSGLEDMQGTVTSKNTYVAPFVNAEETQYLVIEDTFPNGRPALEKAGVLFTDRETVDRVEKMKVCTCLNPLHTSLAVFGCLLGYTRISEEMKDA

SEQ ID NO: 94398 - protein, 368 aa, Unknown
  Obtained from environmental sample
  DOMAIN (2)...(313): Major Facilitator Superfamily
  misc_feature (1)..(368): Xaa is any amino acid
MLSIAYVGFSVIAGIFLGRFGIKPSFLFGFSALCTGLFSMFFMPGFFLTAAALFVVFAGFGFFEVGLNALATRLFITKAALLMNLLHSFYGIGAMIGPKAAGLIAGNARFGWRYVYLFSLPLALVFFILAIIIRFPEESRGPASTAEAGQLHAPRKSFFDALKSPMVWLMSITLGLCVAVEMSSSNWGVMYFNDVYKINPSTDGATFLSAFFLLFTVSRLVCGLFVEKIGYMRALLLSAFIVLAVFITGFLLGEKGIYLLPSLGFFVAQFWPTLMAVAIVSFGRDAPVFSSAMIAISGLLNAGIQFIIGLTNKIFGSAWGYRSTVVYTLFLIAALVLLYRRLGTGGTSTEPRSGEGSPLDRGLGTEDR

SEQ ID NO: 94399 - protein, 395 aa, Unknown
  Obtained from environmental sample
  DOMAIN (10)...(237): TraB family
  misc_feature (1)..(395): Xaa is any amino acid
MNDTKMIISLGGKEFVLIGTAHVSRESIDEVSAIIREEKPDLICVELDEGRYASITQKESWENLNMIKVFKEGKGFLLLANLVLSGFQRRMGAELGVKPGEEMKAALDIASELGIPYALCDREVQVTLRRAWTGCGLWSKSKLLSALLASAFTTEKLSSEEIENLKKRSELDGMMEELADYLPEVKETLINERDQYLAAKIWTSTPAEAKRIVAVVGAGHMQGIKTWMEKIAAGEKSDDVSALKEIPPRSFFSRALPFIIPLAILALFVSGFFRGGAGVSLSMLRTYILWNGSLAALGAIIAGGHPLAILAAFVFAPITTFTPFIGVGLFSGVIQASLKKPRVADAQSIIDDVGSLKGFYRNRITRALLVFFLSQMGGAAGTFVTIPALAGLLAR

SEQ ID NO: 94400 - protein, 223 aa, Unknown
  Obtained from environmental sample
  misc_feature (1)..(223): Xaa is any amino acid
GSDDQRKELFGERRLLAALNANRDPPFKELLPAVKREVDKFAEGTEQADDITMLALKINDNTVHSEEAPENGASQSDGASQSDAMKKLEIKASLENLNKALDFINAELEQCGCSQDIQGKIEVAVEEVFVNIADYAYAADGGADGAVVIFISVTDKIVIRFEDTGISYNPLEKPEPDLDKPLMERDIGGLGVFLVKKLMDNVEYSRVGNKNVLVMSKGLGIRD

SEQ ID NO: 94401 - protein, 239 aa, Unknown
  Obtained from environmental sample
  DOMAIN (1)...(234): Acyl-ACP thioesterase
  misc_feature (1)..(239): Xaa is any amino acid
IRFGAIDRSDRLTLDCVFQLFQEMAMSHAENLGVGREDMAGTGQVWILSRMSVLVKSRPKFCETVTVRSWPCGWEKLFAMRDFDIRDKNDTAVVAARSAWLIVDIEKRRPLRPQSVMDNLPKNEGVTALTPEDNGTAALEERKDLQKAAERKALYTDIDYNGHVNNVRYVQWIEDALDPQILEKADKFRIDINYMNEIMLGETAELLSAPISGENNAFAFEGRKKESGQTAFRAELRLW

SEQ ID NO: 94402 - protein, 648 aa, Unknown
  Obtained from environmental sample
  DOMAIN (8)...(31): 4Fe-4S binding domain
  misc_feature (1)..(648): Xaa is any amino acid
MNGSEKKLQVNHDMCIGCGNCINACTHKARTLIDDTDRFMEDLKQKKKIIAVAAPAVASFFPDQFLNLNGYLKSLGVEAFFDVSLGAELTVITYLDHIKEKNPRTVIAQPCPAIVTYIEIHHPELLPFLAPADSPILHTIKMIKNFYPKYKDHKIAVISPCIAKRREYDETGLGDYNVTMIELKNLLDSQKISLSSFPKVEYTGLSAERAAGFPIPGGLLDTAERFKPGIRRRTEKIEGVHNIYPYLNEISKILNINAKLPLLVDCLNCEKGCIGGPGTGNAEKPLAELKEPVLKRMDELEKKQHSLIGNDTYKKYHNALGKYWKKGLYNRSYRNLSENNTIKHPSETEITEIFHTMKKFKKEDIYNCTCCGYGSCKAMATAIYNGLNKHENCAHYILALLKENQEHIANASNLIGNINELIQELNDTISSQAEAVDNSATETEEIITSIKSTSEVSHKQQESLHGLIEVAEQSKESMEKTIQSIHEISQSVEGISSAIRIISSIAANTNLLSMNAAIEAAHAGDAGRGFAVVAGEIRRLSETTRENSVSISRTLKNIINGISDTTKQSGVTDARIAQMSKEISGFAETMSVFMNTFNELSAKSENITASLVSLKEQSSAVKTSYAQMIEMTDKLAKALKDLSELSKR

SEQ ID NO: 94403 - protein, 273 aa, Unknown
  Obtained from environmental sample
  misc_feature (1)..(273): Xaa is any amino acid
LKKPLKDRIRLKTPNFTEISFDNGRSFIKTSKAFAKDVDYRFRLEDSEMPEGYHYIVIRTTMKNGEFAVTRMIVQIDKTFPVIRLISPEEGSKYNEKIAYSASAADDIELVSLTYHLRKGDKAMYAVPGFLQGLYFEGIIPPFVRQIAPDTVPTVFAGGATYTDIGFGLSFYDDNVKIQGQYGIMTQDLREALGGTGPMRFGGNVFGFKILANVYSLPFGSFAGPDFDWLHASFSFGANFSYFEIAQSGEPTWVSALLAQMEFPKVKVPKKEF

SEQ ID NO: 94404 - protein, 429 aa, Unknown
  Obtained from environmental sample
  misc_feature (1)..(429): Xaa is any amino acid
VQIVLPVEDEVITNDFLVSGVMFDDDGVKQYQWRIDSDPWQAKDAEYGFYIPIALSTLADNEHTVTVIAEDIYGVKSNPVTRKFRVSLKEPAATMDAPLYDTILKEGIELKGTASDRNGIKDVKVSFDNGSSFNTVKGSYGTDAETIQWSYQFNTTILKDGAHSVFIRVWDRYEIPATYAFLINVDNTRPEIIMDSPGDGSITVNNISVMGRVLDPNLNEVSIELRSLDGVTIPANLRLRKLELSSLIRENIDIAAMADGQYNVAIIATDRAGNMTRLSRNVQMARQTYKNYIEILYPLENEETSGEFNLYGYAGGANPAGTVTLRINGTDVDTVHVDDSGYYVFKMDSEKLNSGVNAITVNSNFGGPTLVSSRAYNLIYRDGGPWVTIDSFKFAEFAYERPYLFGRTGYVLSEQDKELLADKTVEKAA

SEQ ID NO: 94405 - protein, 446 aa, Unknown
  Obtained from environmental sample
  DOMAIN (246)...(408): MatE
  misc_feature (1)..(446): Xaa is any amino acid
SRRRRENEMMTTAPVAPLICKLAVPTITGMLVSSLYNMADTYFVSSLGTSAIAGVGVVFSLMSIIQAVGFFFGHGAGNLISRSLGAKETETAEKMAATSFYTAFAIGLIIAIFGTIFIKPLALLLGSTVTILPYAVDYLRFILLGAPFMVSSFMMNNLLRYQGSALFGMMGMTTGAVLNIILDPIFIFVLKLGVQGASLATMTSQCVSFSILYFFACRKKGNIRIEFRNFSPSKKYYHEIVRGGTPSLLRQSMQSLTTLLMNHAAGMYGDAVIASISITHRVFMLLASATLGFGQAFQPVCGFNFGAKRYDRVKKAFWFCLRLSAVMLIILAAVCFIFAPKIIALFRRDDAEVLKIGTFMIRAQSLSLPFLGWILLTSFLLQTIGKALPASILAFARQGLFFIPLIFTIVPIFGVLGIQLCTPIADTCSFILALFLGIKVLRKDLT

SEQ ID NO: 94406 - protein, 187 aa, Unknown
  Obtained from environmental sample
  DOMAIN (5)...(149): MatE
  misc_feature (1)..(187): Xaa is any amino acid
VDDHAAGMYGDAVIASISITQRVFMFLASATLGFGQAFQPVCGFNFGAKRYDRVKKAFWFCLRLSAVMLIILAATCFIFAPKIIAIFRHDDAEVLKIGTFMIRAQSLSLPFLGWILLTSFLLQTIGKALPASILAFARQGLFFIPLIFTIVPIFGVLGIQLCTPIADTCSFILALFLGIKVLRKDLV

SEQ ID NO: 94407 - protein, 89 aa, Unknown
  Obtained from environmental sample
  misc_feature (1)..(89): Xaa is any amino acid
MRRKDREITGIDEKLEIIAKCKVCRIGLSENNYPYIVPINYGYSFNDRKLALYFHCAPEGKKIDIIKKNNNACFEIDCDTKLIEGIKGL

SEQ ID NO: 94408 - protein, 61 aa, Unknown
  Obtained from environmental sample
  DOMAIN (1)...(59): BRCA1 C Terminus (BRCT) domain
  misc_feature (1)..(61): Xaa is any amino acid
GTSREEAKAILEANGAKVTSSVSKKTSWVLAGENAGSKLENAKSLGIPVYGEEWFREKITN

SEQ ID NO: 94409 - protein, 430 aa, Unknown
  Obtained from environmental sample
  DOMAIN (37)...(157): Type III restriction enzyme, res subunit
  misc_feature (1)..(430): Xaa is any amino acid
MPLAKLSIPHLSPEESRPGHLNICPPSEPTPFLLKSPYAPAGDQPQAIEAITKAFQDGEKFQILLGVTGSGKTFTMANVIRNLAKPTLILTHNKTLAAQLYHEFKTFFPENAVEYFVSYYDYYQPEAYIVSSDIFIDKDASINEEIDKLRLRATKNLLTRRDTIIVASVSCIYGLGSPAEYFELMVRLKVGEERDRDRILKDLVAIQYDRNDYALERGTFRVRGDRIDIYPSYDDIGLRIELFGDTIEKLSWFHLVSGETIKNVGEIVVAPAKHFVTREERRNKIINKIQKELDLRLYELQAEGKDLEAARLNSRAHYDMELIRETGICPGIENYSRIVENRRPGTRPFTLLDYFGKDWLMIIDESHASIPQVGAMSEGDKVRKTTLVEYGWRLPCALDNRPMNFTEFEYELPKNVLFVSATPADYELKK

SEQ ID NO: 94410 - protein, 81 aa, Unknown
  Obtained from environmental sample
  misc_feature (1)..(81): Xaa is any amino acid
SQRNVLPSDTPTVKLEAGSYGILDLLLAAGAFASKGEARRMIQNNGVKINGSAIADQNMNVVVGSGEVVVQTGKRKFYRIT

SEQ ID NO: 94411 - protein, 236 aa, Unknown
  Obtained from environmental sample
  misc_feature (1)..(236): Xaa is any amino acid
MRYKELFTVYPRKLKTVTVFYYQCYDNNGKRICGHSTGQRTKTAAKMYCMELYRAGKLIPENKPVSFAEFADGWWNIKTCKYLEWRQAQNPLAPSTIDHYKTNLELHIKPFFGKIKLNDITAELVQNWIMGLSREKYNNSSINTLIATLKVMMKEAARLRLISSNPMERIKKLIALNKEVQILKNEEVQKLFPEDWRKIWDSYEIYTFNKLAACTGMRFSEIIGLQISHIRDDHIH

SEQ ID NO: 94412 - protein, 206 aa, Unknown
  Obtained from environmental sample
  DOMAIN (156)...(189): Tetratricopeptide repeat
  misc_feature (1)..(206): Xaa is any amino acid
LGNKSEWFNSQQRSLASELAAMQREALGKKPEADPDGKKEKAEHKPKEDKKLNEGKRLFHKKSWEDALKEFQQIDEDKADTSIQAELAYYLGLCYTKLDHFNEAGYYLEKVVASGNNPLRTYQCRMTLALIYLRTNRAKMAEFELKRIKSSGFASAPMYNAMAYAAFLQKRYRQAIDYYEKTLEIDKNNATAINSMGYILADRGFD

SEQ ID NO: 94413 - protein, 346 aa, Unknown
  Obtained from environmental sample
  misc_feature (1)..(346): Xaa is any amino acid
MKIRIFLILIFAFFSLLPLQAAFNTAYTPSLFPAFTSASEEKLVRELAKKKLSSFTFLDASLIASGAGQDGLEGYRQKYRGLAEKIRRDLPTIGLTAMSRAEKIFELMFKHGMSVYKSEQTTLLEILNEGSFNCVSATLLYNLLMEEYGYETQVVVVPAHVYSQIRVNGSWIDAETTASGGFHPLRTRENTASNRYYIEDRGKNGQKAYIPTQKLIALLYYNRGTLAHQQGNDQVALGLLFRGLTIFPEHIESQENFLSFMIDWARKESKAGKSAAALGICDEAERALGPHKNLTLLREALVFESAEYSAQKGDYASAVSAIEQYLKNQKTKKPEHEMILRGYLLK

SEQ ID NO: 94414 - protein, 78 aa, Unknown
  Obtained from environmental sample
  DOMAIN (42)...(77): UvrB/uvrC motif
  misc_feature (1)..(78): Xaa is any amino acid
DAIAIALRFTAPIYVSKAVMENAAIILSPENEGEEEEKTESVEPASSLKRELDIAISEERYEDAARLRDELKKILNKN

SEQ ID NO: 94415 - protein, 413 aa, Unknown
  Obtained from environmental sample
  DOMAIN (1)...(413): Protein of unknown function (DUF935)
  misc_feature (1)..(413): Xaa is any amino acid
MKKPVIKSLTTQIITDNVMGSFLNYMPNPDDLVPGTLSSYDTYRQMRNDPRIKSLLNKLKTAALNFPIHITQPEGCPDNVFAFVKGFELWGKTYQKLKRVYSGLDYGFSVSELVWRLEDGMYIPDNIITRKPERFVFDRNWKLYLNEFGARKPLDQPFKWLEFHHDSDDENPYGTSVLRCVYWPYMFKKAGYEFWLQATEKFSVKTILAIFKGEGDDNKIRETAKLIAEQLLAITSGSAAAVGNVDSITDVGMSGDLIGFASLVDACDTQISYGLTGQTIATSKTEGGSLALGEVQADLFYEDAKGIALEGQALIQRIINWAVELNGFGNVVPPLAEVDTERKASFDQVMKAIDHGIAVSRDAMYDRYGLPRPRDDADTFIKETSASLALSDSNKSENGKKKALQPKPMIRIL

SEQ ID NO: 94416 - protein, 473 aa, Unknown
  Obtained from environmental sample
  DOMAIN (1)...(473): Formate--tetrahydrofolate ligase
  misc_feature (1)..(473): Xaa is any amino acid
MVALREPSLGPVFGVKGGAAGGGWAQIIPMEDINLHFTGDFHAIGAANNLLAALIDNHIYQGNSLNIDPRKITWRRCVDMNDRQLRFIVDGLGGKANGVAREDGYDITVASEIMAILCLSSGIDDLKARLGRIIVGYTYGKQSDGSEKPVTAAQLNAQGAMAALLKDALKPNLVQTLEGTPAFVHGGPFANIAHGCNSVMATRMALQCADYVVTEAGFGADLGAEKFFDIKCRFGGFKPSAVIIVATVRALKSHGGVKKADLEKENLAALEAGLPNLLQHIENITGVYKLPAVVAINAFPKDTKAELDLVEAKCRALGVNVALSEVWAKGGEGGEQLAREVVRLCEQPNSFEFAYDINLPVREKIEAIARKIYHADGVTILPNAQKQIEQIEKLGLDKVPICIAKTQYSFSDDPSLLGAPRGWTLTVRNIKISAGAGFIVALTGEIMTMPGLPPVPAAERIDVDSSGKISGLF

SEQ ID NO: 94417 - protein, 194 aa, Unknown
  Obtained from environmental sample
  DOMAIN (4)...(130): PEP-utilising enzyme, N-terminal
  misc_feature (1)..(194): Xaa is any amino acid
MKTFTGIPVSTGVAYAKAFVYATDETFEVPRHSLSEAEIAAELKRLKNAISEAATEAKSLHERAKREMSKEQADIFHAQLLMTEDEDFHGQLIDRLKDSLCNAEYVVREVSHELSQKLMQSPDAVLRERAIDIDDVSRRIVGCLLSDARGRSPLADLDEEVILVSKNLMPSDMVNLNKDRVKGIVMDEGSGTCH

SEQ ID NO: 94418 - protein, 221 aa, Unknown
  Obtained from environmental sample
  DOMAIN (1)...(161): RNA pseudouridylate synthase
  misc_feature (1)..(221): Xaa is any amino acid
MVVHPGAGNWQGTLANALYHRRLELCHLTDDGAHTEAPRPGLRPGIVHRLDKDTSGVIIAAYDDEAPAFLAEQFKSRKAKKTYIAIVSGIPKEKKGRIEAYIARDPKDRKRFTVSAPGLGPGKGRASLTLYSVIKTWRAHSLLLLRPKTGRTHQIRVHLRHLGHPVMGDIVYGFTDPVAPNASLMLHSRSLAITLPGEAEQRIFKAPLPERFTTMIKLLAK

SEQ ID NO: 94419 - protein, 478 aa, Unknown
  Obtained from environmental sample
  DOMAIN (47)...(216): Transglycosylase
  misc_feature (1)..(478): Xaa is any amino acid
VTKKRQFVRILKYVTKKRLIIVGALLVLLLAFIFSLPRPLFNVPYSPVLFDREGNLLGAQVASDDQWRFPGTDKVNEKFALALIETEDRRFRRHIGVDPLAIARAAYQNIRGKRIISGGSTITMQTIRLARGARKRSFFEKFIEAYLAIRLEAGNPKNKILALYSANAPFGANVVGLEAAAWRWFGRNSNDLSWAEAAVLAALPNSPALIHPGRNRDTLKAKRDLLLNKLFKKGYFDEETLALSIAEPLPDEPLPLPRLAPHLLERFILDTEKNPSLKKSAAFVTTVDRNIQMRVTEVLNRASDRFALNGIFNAACVVLNTKTGETAAYVGNTNTLHASDVDIPSSPRSSGSLLKPFLYAAMLDSGDILPSSLVSDIPTRIGSFSPENMSRNYLGVVPADEALSRSLNVPAARNLRIFGVERFLQFLRSLGLTTLFRPANEYGLPLILGGAEVTLFEITKLYAALGRATDPSSKDSKL

SEQ ID NO: 94420 - protein, 274 aa, Unknown
  Obtained from environmental sample
  DOMAIN (40)...(209): Transglycosylase
  misc_feature (1)..(274): Xaa is any amino acid
VRILKYVTKKRLIIVGALLVLLLAFIFSLPRPLFNVPYSPVLFDREGNLLGAQVALDDQWRFPGTDKVNEKFALALIETEDHRFRRHFGVDPLAIARAAYQNIRGKRIISGGSTITMQTIRLARGARKRSFFEKFIEAYLAIRLEAGNSKNKILALYSANAPFGANVVGLEAAAWRWFGRSSNDLSWAEAAVLAALPNSPALIHPGRNRDTLKTKRDSLLNKLFKKGYFDEETLALSIAEPLPDEPLPLPRLAPHLLERFILEAEKNSSLKKSA

SEQ ID NO: 94421 - protein, 1760 aa, Unknown
  Obtained from environmental sample
  DOMAIN (891)...(1040): Alpha-2-macroglobulin family N-terminal region
  misc_feature (1)..(1760): Xaa is any amino acid
GAVSWQDEYTLVFTPEENYKPGQRYDVAVNITGIPPFNFDFTAAVPVFSVELEPVQLGDNNNVLISGIVTAEQDAEISKIEQTVSSRELGKPTWTHTDGVHRFSFAPVKRGEASRTAEVTWKGKPVGSEADGGTTVMIPGLDIFQMLDLKFANNIIEVSFSSNLKANQDLRGFISLSGSTDVRYTMEGNVVKIYGNNTGGIPSGAELLIQDLIDIDGKRLITPIQFTVPDKWELPEIRFTGNGAILPTSQGAQLVIETKNVSGILVEAFQIYNHNTFQFLQVNSLEGTSQLDRVGEPVWTKAIDFQWAPSDQNRWVRRGLDMAELSKKFPGGVFHIRISFRKRHIKYLCDKNHQDFSGLNFPDDSFSRYSTASSSESSYWDNYDDDDDYSWSEWYNYRNDPCHPAFYVNMSGHNITKSRNVLVSDLGLIAKRSLDGSWIIATTNLITARAAPNTEYKVLTYQGRVLHQGKTNSNGIAAIPASSDTASGSRLFVYAESNLGRAYLRANDSLALSVSHFDISGGTPSSGIRGLIYGERDVWRPGDNIYLTFLLADPLGTLPQNHPVTFELEDPRGRPVINRTYTTSVDGFYALAAATASDAPTGDWTARVRVGGKTFNKNVKIETVMPNRLKIDLDFGANEFIKSGSHKIPLESQWLYGAPASGLKADISVTYSDKETTFKSYTDYSFRDPSRRVSTERHEIWSGSLDSAGKALVTMNFNPGSAVPGKVTTRFLTRVFEPSGASSSEQISKEYSPFSRYVGIKLPKGDAARGMLLTDTDHKAEIVLLDEDGKPFQGNVDLDCAIYKISWRWWWEKGDEESAEFASSLSRSAISQQTVTAVNGKASFNFNIKYPDWGRYVVIASDSKGGHAGAQIVYIDWPGWAGRAQDGGQGSQSMLTLTAGKQTYNSGEKAQITFPSNKEAAALIVLEKGGNVLKSEWVTCQEGTTKYEFVAEPSMVPNIYVHVTLVQPHLQTQNDLPIRLYGITPVMVEDTRVVINPQIKTQDNWQAESKVSFTVSEMNGRPMAYTVAVVDEGLLGLTRFNLPNPKNTFYARDASFIKSWDLFQEVIGAYSGKLETLLAIGGGDDDNEVDPEKETQRFKPVVRFFGPFEIAKGSQKTETFDLPPYIGAVRIMVLAASATSESQTGRSLRGYGTAQTTVKVTSDLMVFASLPRVLSPGDNFEVPVYVNAQKDGRRSVKVNFSAPGAAIQGASSQDVSFDKSEEKLIRFKVKAPDKPGSIKFTVTAESAGLKTAQQVVDIEVRSTAVPVTKTLQTLISAGGTWKGNLEYPGIDGTNTLVASFSRLPPLNLESRLDYLIKYPHGCAEQTTSGSFPQLYLDKVLALDDKQKADIRTNVNGGIERVLGMQLMSGGFSYWPGESVVNDWCSSYIGHFLLEARRLGYEVRTTAIKSWVNYQKNAAAQWQTSSSKFNEQAYRLYTLALAGETDLGSMNRLRSQKLPVQASWRLAAAYWLSGQRDTARNMIKGLSLPEGNYRELSATFGSNLRDKAMILETLILLNSPEEVGRTKQLFEEITNTLSQDKWLSTQETAYALIALVPYMTGNAGNGALSLDYTAAGKTGNVSFSSPAAERQLGSVSGTSSALSVANRSSSPVYVRFTAKGLPAEGKEPALSEGLSLNVEYRDARSNVIAPENLKLGEDMVISVSVRNTFTQPVEEAALIVPLPASWEIVNTRVGGSSSSSNFRYQDIRDDRVMTYFNLKRGEERTINFRVNKAYEGSFFRPAIHVYAMYDESIRALIPGTR

SEQ ID NO: 94422 - protein, 98 aa, Unknown
  Obtained from environmental sample
  misc_feature (1)..(98): Xaa is any amino acid
TIMQSGSSLNGVVCMGADFYENEAQKAKNAEERIPNVGIGHGVIIKGAIIDKNVRVGEDCRIGIDDMRRTDGNYGHYYIVDGIIVIPKNTILYPGTVI

SEQ ID NO: 94423 - protein, 618 aa, Unknown
  Obtained from environmental sample
  DOMAIN (396)...(610): Beta-galactosidase trimerisation domain
  misc_feature (1)..(618): Xaa is any amino acid
MEKQINKVLYGGDYNPEQWPREIWREDMRLLGIAGIDVVTINVFSWALLQSSEEIYNFSVLDEIIETVSAAGMKICLATGTATHPAWMARKYPEVLRVNSDGSKRKFGDRQNSCPNSRIYRLFSEKLARKLAERYGKLENLIAWHVSNEYGGYCYCANCEEAFRKWLIRKYKTIEALNKAWNTSFWGHTYYEWEDIVVPSYLGGEWPPNRTSCQIQSIDYRRFYSDSMMDCFLAEAGALKEVTPSIPITTNMMGTFMDLDYFKWGKHTDFISWDNYPSPSSPYTRTAMSHALMRGCGGGKPFALMEQTPSVTNWQPYNSLKRPGIMRLWSYQALAHGSDTVMFFQMRRSRGCCEKFHGAVIDHCGHENTRVFRETAVLGEELKKLGDVFLDSVLVCETAVLYDWDNWWATQLSAGPTIDINYPEEVYRYYDAVAKQNIPVDIIGVDTPLEKYKVLFAPVLYMIKPGYAEKLKAFVSNGGILVTTYFSGMTDERDLVTQDGYPGELRSLCGIWVEETDALPSGKANGFVIKDPPWDKTTLAGTWKAEMLCDIIHSEGAQVIAVYENDFYAGTPVLCRNNYGKGQVWYFGARPQAALLERTAAFICNESGIKPVSPRRKE

SEQ ID NO: 94424 - protein, 131 aa, Unknown
  Obtained from environmental sample
  DOMAIN (1)...(130): YicC-like family, N-terminal region
  misc_feature (1)..(131): Xaa is any amino acid
MVSMTGYAYCEKSAENLSVSVEIKGYNSRYLEIYVNLPSWLSTLEMKIRSLVSSVCGRGKIEIHVHIHEHNTPVKIDVNRNAVKAYYDAITVLNDELGIKEKPNLSLMLGMEGVLEIEKNRDDEHCWKEIE

SEQ ID NO: 94425 - protein, 675 aa, Unknown
  Obtained from environmental sample
  DOMAIN (442)...(675): Caspase domain
  misc_feature (1)..(675): Xaa is any amino acid
RQGNRTFSGHTDVVNSVAFSPDGKQVLSGSTDKTIKLWDAVSGREIRTFSGHTKDVRSVAFSPNGKQVLSGSWDNTVKLWDVASGREIKTFSGHTHYVKSVAFSPNGKQILSGSTDNTVKLWDIASGREIRTFSGHTDFVNTAAFSPDGKQVLSGSWDSSIKLWDAASGRLIRTFSGHTDTVNSVAFSPNGKQVLSCAIDSTIRLWDLATGKEIAQFVSFSGSDAQLASASRGLTVEIQNTSSTMDGEWLVITPDGYYQASPRGDRYLNVRVNNTVSGIDSFRSIFYNPDVVQARLQGRPDPASKSSFTIQDAAKFIPPEVTIQSPANFSTTNTATANLSVNITSQSQPVKNIKIIVNGRLIGKDELAAVKGTGLQAQKASLTVTGNQKTVNLSLPLELEPGNNRIEVVAFNGYSENRRFVDVTRNAPAGEKSPLPNLWIVAVGVNGYDNAGTKLQGLTSLNFAVADAKGLVDSLKAQEGKRYAKVNSMLIADGEAASPTTANIRQGLKFLEGADPRRDIVILFLAGHGISAQENKFFFLPKDAVFTGNRIVDANKAISGDEIMSVLDAPGNRLVFIDACQSGGVDNDRMVRSLMDTNAFVFTASRGNELSYESRELGHGFFTYSVMSALKGAPAALAQGNVSVLSMSGFVKDDVPKKTGGRQNPSAYSLGFYDF

SEQ ID NO: 94426 - protein, 700 aa, Unknown
  Obtained from environmental sample
  misc_feature (1)..(700): Xaa is any amino acid
MSNEKWKKVTNNREQITKDKRFTLPPLLFVIYYLLFAAVFCASCEPKESHATPVSVDQYTAQQASASGAANETVQLANAAAVQAAFALDFRPQTAEGEDEAEFLSASDLSGGAEEGSGRGTILGGGLRKLSEYKTVYFDPEKERSRIEAIRAAQEKGGEGQLKAKNAGPLTVIDWGPRGNYSSAIQRPSVYVIFSYPMTALASLGEQSSTSPIVSINPPIKGSFRWYGTSFLSFEGDEPCQSQQTYTITVAANAVSIYGEPISGERVFTFFTETLSVKKISPGEEFRKQTRFQFDNNSVPPEAAKQIGMEFNYPVQADAINQYLEISNGKTPFKFTLAQDNEYKITASLIDSVEFETTVRITLKRGARSQNGSRGTETDQVFTFKTPGPFKVDRHRRNAGYGKYRNLVEIDFSYALNESTVRAALSTEPAMPIGKDNIEVWGSSLRLYNLPVGYGAKFKVLVAASLEDVYGRTLGKAWSGDVEVPDEPPPQGEARFLDYGHAMLEAQFPPRFLFEYKNIAENSSYLLMKKDNPWNEVFYTSNRISLTPGKVNNTYFEEIDLSPYLNEQRRGFVSFRANLQLLTWERQRDDTYRTDTREIKNELNIQVTDLGLTVRYGFNKATVLVTSLSTGKPVENATVKLLPPALVKNGEDVSAIAHFGEAQTDKNGLAVLRIGEWRTTLRDNTVNTQTWRGYDTPFVL

SEQ ID NO: 94427 - protein, 640 aa, Unknown
  Obtained from environmental sample
  DOMAIN (232)...(394): Alpha-2-macroglobulin family N-terminal region
  misc_feature (1)..(640): Xaa is any amino acid
SWESAWYDEMSVFQPKTPETKGYVFGPRRVWDSKRSIASGSGVLGGQGTATLSQKTGGGKITGAAYLYQAEARVTDISNQMVSAYRSVMVHPASFYIGLYRAAGGFARKGQELSYDYITVNTAGEKTANNGLFLQAGENAGKIKVELIRDEWRRVQQRGVNGYIYDEYSREQVTDSVQNMAIRNGGGSIKITPGNAGYYTLRVSAQDREGRTALTELNFYVTGSGGYWNMSNPSELRLTPDQEMYNPGDTAKVLLQSTLPEGRYLITVEREGIFTEEVRHFTEPVSVIDIPIARNYVPVVYVAVSSYSVRSGPPTHEYGSPDLDKPKGYFGVTRLSVNPLARAFSVKVESNKKTYRPGEEVTMTLTATRDGKALPNAELTLMAVDRGVLDLINYHVPDPIQYFYNEGLFRLMVVGGDSRSWLMDPVTYSVKNLAGGDAAGESKIEERKDFNPTAVFEPMLITDDSGKVTCKFKLPDNLTTYRVTVFGVRGDIFALKESEIAARNKINVREVLPRRARERDTAEAGVLITNLDSASHTLSVRLDIGPPLPNDDSSGIKKITGQAFVDGIFERRITVKSGENAVVYFDVAAVKEGNVTLNFTVNSDILNEKLIRELVIEHPYIMESGYNYRIRGQGFGKRRR

SEQ ID NO: 94428 - protein, 333 aa, Unknown
  Obtained from environmental sample
  DOMAIN (71)...(234): DHH family
  misc_feature (1)..(333): Xaa is any amino acid
MKWDKKDISPEQVKEISVKYGCDLLTASILVRRGFCTGDSIRYFLEDDLTSLRNPFSMDGMEDAVERILAAKDEGEKVLVFGDSDVDGITGTALLAGYLESIGMDVTWRIPTGDESYGLSLDAVENFAANDGTLIITVDCGISRFAEIKKANELSIDVIVTDHHEPQEELPEALVIINPKLKNSTYPFRNLAGCGVAFKLVCALRFAQRSDLYGQQVCLLNTRPLNDAWVIEIAKTRNLTVVDTLIETVVPGMISISETRLPAFLEGQNILCWDAAFAQTNFHKTFRQRRRSGNDGYFSADWKRNTANGGSEFTADKRTFQNSEVQRQGIKRA

SEQ ID NO: 94429 - protein, 419 aa, Unknown
  Obtained from environmental sample
  DOMAIN (220)...(284): DHHA1 domain
  misc_feature (1)..(419): Xaa is any amino acid
MDISQQIGKEIPQTAGASLLRIKELSKIAKYSDKELSELDVFVNLFTSYARLKEKNAEEAEKESADIQLAALGTIADIMPLLDENRIIVRRGIDALEKKPRPGILQLLQKLDLAGRHFDAKDISWKLCPSINAARRMGKAETAAALFFEKDLLKRERLASELASMNEKRKDLEEEIWAIIEPMAFKSFDEYEKKFVLVHSDKINKGVTGLMAQRASRTFGVPAMAISIGEDICTGSIRSTKGYNIQILFEQCGSLFIDCGGHKAAGGFSMVMGNWDAFMDKLKKAVDAIEFEEQPDEEILNIDAELPHDYLSPDILKLVDKFEPYGNENDPLVFMTKKITVKEINFIGKPDAKHVKMMLDSGKYKWPALYWQSADRVTNKEFGINDKVDIVFNLSRDYFKGNETPQMMILDLKKNNGGL

SEQ ID NO: 94430 - protein, 214 aa, Unknown
  Obtained from environmental sample
  misc_feature (1)..(214): Xaa is any amino acid
MKRNLFFVFFSLVFSTIVSAQIRYTVLPETPRPGEPVTIGINSSDATEEVKEALLFVNGRQLAKSAFFSVPAEAWKPGFLAAVITVPSTANPGSATIKVNGETDLILEIPITISSRDFVSEVIELDPVLTGIRVDPDPKKTEEANKLWGILSTNGSKIYHTGFFVPPVESTRRTSFFGDRRVFKYSNGANDMSIHAGVDFGVPKGTRVSACANG

SEQ ID NO: 94431 - protein, 266 aa, Unknown
  Obtained from environmental sample
  DOMAIN (196)...(266): Peptidase family M23
  misc_feature (1)..(266): Xaa is any amino acid
MIRRIIFIFLTGLLLSTCAGQGQPAISAQVKYAIIPESPRPGDPVTIGVNAPIKEVVVFVNGKQVSKAACFSVPEEGWKPGFTAAIVTIPSTVDAQEAIIKLNNASGTIFEIPITLTPREFRSETLVLNPSLSKLVGESTPEKTAESEKLWEILTTTGNEVYNPGKLVLPVTSKRRTSLFGTRRINQYSDGRKTTSIHAGVDFGVPKDTEVRACGRGKVVFARMRILTGNTVIIELAPGVYSSYYHLDSIIVQEGSMVEVGQLVAL

SEQ ID NO: 94432 - protein, 497 aa, Unknown
  Obtained from environmental sample
  misc_feature (1)..(497): Xaa is any amino acid
SDPAIPHGNGGRQRDSLHEALCLHHGDKWCTLFRDQRSNLWYIRSSKQINENGFFVALKGYEAQVFIDIYEIEDDAKGRWARLHHDLQGRGVDNPQSAIMDIYLGDLYYRFLKPLKPELVNQLHDFFTAGTVEKQKAHAFVESLKETAEKYFETVAYFIKGADGKFEAWTGTGNSGLGTGEKKKGVKHQTVSDKKEQITEPWEEFKGYVERLIALSGYLNATDKTPAERMLKELALRIKERQLVCAAALGYGLLSVLRSVIGRADGSLAANLAFEHWDLDRKLKEQFRSFGANDDEVWRIGEICKAVLRRTGADNPEVINDTVVNKKTSAFDAGRFAASLFINNHSHDDFRRLIGINVFNDVTWFNKEAFETALFYGKLFFVLETDSAYQQPCVERTRPERTARIAEVTELIKKAEIDCGYRLDKFLQLLSGEEEPSQEPAPQASAPQASAPQASAPKLSATKKPAPKKSETKKPETKKSETKKSETKKPGVGKTNA

SEQ ID NO: 94433 - protein, 399 aa, Unknown
  Obtained from environmental sample
  misc_feature (1)..(399): Xaa is any amino acid
VKKVAVVITVLCVLMAFNACGRQASRARAVVLYENDGSTEDCILENEFLEFRFLPRTTEIILTDKASGAQWRSNPLDAAHDPLADTVTKDFLESQFSLEYADIAGVGMTLYSSVNCVALGAYGYTLEDNVLEVRYTIGDIPRSYIIPPAAPEQRMLTFLEKMENDDRRKVEACYRLYDINNLRSSDDKSTLLANYPDLSRTKIYVLRDTTQEYMKEIMEGLFAQAGYTYDDFSEDSSLYAVSEDADKPAFNITLRYTLDGRSLLLHVPFDRIAYRSAYPITQLSLLPYMGAGGVGDEGYLLVPDGSGALIYFNNGRQNQIAYNNNVYGWDEAMPRPGDAIVNDNKAPFPAFGIQKNGSALLCVIEEGASYAGVRADVSGRNSSWNNVYSRFSIVHGAII

SEQ ID NO: 94434 - protein, 808 aa, Unknown
  Obtained from environmental sample
  DOMAIN (120)...(535): Alpha amylase, catalytic domain
  misc_feature (1)..(808): Xaa is any amino acid
AAIEEIKAHFKELPPFGPFNQSLWDMLRSPALASDSLSGQLEYMRKHWGALLGKFASRMLFGLDIISEEEKPSFMGPGPSEVMSFAGLDEYERFSPDQEWMPNTVLIAKSTLVWLFQISQKYGREITKLDQIPDEELDELARRGFTGLWLIGLWERSKASRTIKQWMGNPEAAASAYSLYDYDIAGELGGWGALANLRDRCMKRGIRLGSDMVPNHTGIDSRWMVEHPDRFLQLPYPPFPTYNYNCGNLSGRDDITVQIEEHYFNHSDAAVVLKRIDNNTGHTRYIYHGNDGTSMPWNDTAQIDFLNPEAREAVIRTIIGVCQQFSIVRFDAAMTLAKRHIQRLWFPVPGTGGAIASRAEHSISNDEFNRRIPNEFWREVVDRCAAEAPHTLLLAEAFWMMEGYFVRTLGMHRVYNSAFMNMLKNEDNAKYRATIKNTMEFDPEILKRFVNFMNNPDEETAVAQFGKGDKYFGICTLLVTMPGLPMFGHGQIEGFEEKYGMEYRRAYRDEKPDGYLVDRHEREIFPLMKRRALFSGSSGFRLYDVYTEGGSVNENVFAYSNRAWIYGHEERALIFYNNSYYETAGWIKTSDPAIPHGSGVRQRDSLHEALCLHHGNNWFTLFRDQRSNLWYIRSSKQINENGFFVALKGYEAQVFIDIYEIEDDAKGRWARLHHDLQGRGVSNPQSAIMDIYLGDLYYRFLKLLKPELVCQLHDFFTAGTVDKQKAHAFVESLKETAEKYFETVAYFIRGADGKFEPWEQGTGNREQGRKEGTASSRVSENMQQCGSPKNGRSIPDKREGFSLSSGRS

SEQ ID NO: 94435 - protein, 470 aa, Unknown
  Obtained from environmental sample
  DOMAIN (50)...(76): NHL repeat
  misc_feature (1)..(470): Xaa is any amino acid
MICFFPHFSLFASPTNYTYNYDFWEEQVASPDAYYVGAYILGTSLGIGNFLDPQGLFVRDNRVYICDSGNNRILLLVYENGEHRLITAVDSVVINGEKSPFNYPMDIFESRDGFLFIADTNNYRILKLDRNWNYIASILKPDDESIDEHAEFLPLKLAVDFAGRLFVQARNINKGLMEFDSRGQFSGYMGANKVKVNILDYVWKLISTQAQKERMELFIPTEYSNLCLDRDGFLYVTNASGQTDPVRRLNAMGQDILIRNGYEDPVGDLAYGNAGGINGPSKFIDVAAMDNDSYACLDRTRGRIFMYDFQGNLLYAFGGLGNREGCFMKPTGLAQMGHSLYALDSDTTALTRFDMTNYGVMINSALDEYHAGRYEASAAVWEEVLKMNGNYDLAYIGIGRAALRQGEYQKAMKYYKLKHYREGYGKAFQLYRKQYMEENLWKMLLVLAVILLAPPIIRTVVKIVREVREA

SEQ ID NO: 94436 - protein, 546 aa, Unknown
  Obtained from environmental sample
  DOMAIN (10)...(545): UvrD/REP helicase
  misc_feature (1)..(546): Xaa is any amino acid
LSVKDLLSNLDDEQIKAVTLEINGVVTAGAGSGKTRVLASRYAWLVMGKKLKPEEILTLTFTNKAVSEMYNRIYRYLLDQADPEAAKALENFHKAKISTLDSFSANVARTAAARYGISPDFSNDDTALRGLAREAALRFVLDHRETPAIRQLLVDHKIKNLAEEIFAKVVLNYSPISSPLNLNKNLSSQKREIIRTWREKVQEITGITGLITEALRTLAELKKSINFTKSLGDILLERPPPPLPDISPLLEFELEISAKTDSDWGAELPPSETRLAIKKYFDYYSAVISARIPGRYGDDYTLLVEYYKLLKGKDGDGLFHELEAIANYAFNFDLCAGIFELVKKFQDEFNLKKREKGFLSFNDIARLAVDALKDYPDIRKAYKDSLRMIMIDEFQDNNSLQRDLIYLLAENSGRTEKGIARAEELENNRMFFVGDEKQSIYRFRGAEVAVFRSLKSAMGLRTESIELVHNYRSQPNLISAFNYIFRDVFLQPGLGVPDYEAAYNSMKPYDSVESYDSTESYGSSDEKDGSSLAHFCFLNGDALPKD

SEQ ID NO: 94437 - protein, 66 aa, Unknown
  Obtained from environmental sample
  misc_feature (1)..(66): Xaa is any amino acid
YPIGLYVLLSNGKKGQVINANPQTLQYPIVQVFGLKTPDGKNKIIQTSQDGITIVRPLTKEEAGTT

SEQ ID NO: 94438 - protein, 358 aa, Unknown
  Obtained from environmental sample
  misc_feature (1)..(358): Xaa is any amino acid
MKNQKYTFLALILLTGFAMIAADFLILLFFENTFSQLRFRLGIPALIFFVLYCLILGRGARYFDHEYFTKLDGEQYLLWLKKIGAVPIKRIALNVVSHAAFLGIVFSGDYLGIEPSIKGPLFLALLSFGMLVGTFIYVAGDSIVSGTLLAHNFTRYPADCRERRQEAKAWIIPMAAVMVTLLFTCSVTMLGIHQAGGTLDALKGTTVSSMLIPLIVFFVCILCMALTLKKNTGMSYNSVIAQLENLSSEQKDLTKRISICSVDELGTIAGMVNAFCEHLSGGIGTIKYKINGLNHTSFELSANMGKTSTAVQQITANLDNMENIMIKQESGAEEAGKAVTDIKINIDNLKKMIEEQTD

SEQ ID NO: 94439 - protein, 558 aa, Unknown
  Obtained from environmental sample
  DOMAIN (84)...(164): Cache domain
  misc_feature (1)..(558): Xaa is any amino acid
SIQNLVRRGDGAAELNAYNIDISNHLLFKNHNTISPNGPYGYIEKSPEGPFFFNGTGWEAPDNWLPDDRPWYKGAIEAGDCVAQTEPYLDSLTGDIVFSYSRCIYDNNGNRVGVVALDIEAGHIGEKVANTSLTKGGYGILTSRDLTVIGHINTDFLGMKMYDPRIPVSFLTDELVRTGKITGAEWVNWRGEKVVGFLKTLSNGWTLGLLAPKYIYFKPVYKMALTLSLLGGALASVLIIVLIRVDAAKNKSNMESRRKSAFLANMSHEIRTPMNAIIGMTTIGKTASDIERKDYCFTKIHDASNHLLGVINDILDMSKIEANKLELSLVEFDLEKLLQRVVNVVSFRVEEKRQKFSVHIDQAIPQTLIGDNLRIAQIITNLLGNANKFTPEGGSISLCARLLEKDNDLCTLQISVTDTGIGISEEQQVKLFKSFEQAESGTTRKYGGTGLGLSISKNLVEMMGGSIWVKTEAGKGSTFAFSMQLKRSTEKRQAYLSENINWTNVHIIVVDDDPDILLYFREIAQRFGLFCDIAISGEEALALVEKNGDYNIYFIDWK

SEQ ID NO: 94440 - protein, 267 aa, Unknown
  Obtained from environmental sample
  misc_feature (1)..(267): Xaa is any amino acid
MSPEFSSLRKNINSLASFVRGLLEQIQKENEDDPVVWEIRSALRRLDSVSSVCTSFLEYMENSDDVMWIERRGAEAGSLSARKHASEGPWAVFNVTPLDVAPHLKEALFEPNKTVICVSATLTTGRSGDSSFDYWKSRSGLSLIAEREILCGIFNSDFPYDSNVLLASPSGAPLPTDSSYEAFVNAATASLAEVSGGSALILFTSYQALRSAYDTAKPLLENQGIRVLKQGDDDRNRLLASFLKDESSCLFATDSFWEGVDAPGDTL

SEQ ID NO: 94441 - protein, 148 aa, Unknown
  Obtained from environmental sample
  misc_feature (1)..(148): Xaa is any amino acid
MNLPKLSVTRRVTVTMLILIMVLFGALSFVRLGLDMMPDLEFPILTVATAYSGAAAEDVEQLITRPIEGVVASIKGIDKLTSTSSEGLSTINVTFKWGTDLDVAGQDIRENISRIKTYLPSGINDPMVLKFDMSQMPVLLYGVSGMEN

SEQ ID NO: 94442 - protein, 61 aa, Unknown
  Obtained from environmental sample
  misc_feature (1)..(61): Xaa is any amino acid
MNEIKRPIRFFNTTGPCNPYDHYMLPPEDRLVGAQLHRYIRDKLYWVLHAPRQTGKTTFYE

SEQ ID NO: 94443 - protein, 441 aa, Unknown
  Obtained from environmental sample
  DOMAIN (2)...(437): Protein of unknown function (DUF1703)
  misc_feature (1)..(441): Xaa is any amino acid
WKNIRVIRIDLNPGNYPKGGVDTLYEIIDIALESCARKYSVSLNGNSCTGRFIRLIETLHETQREKVVVIVDEYDKPLLATMDDPLLHAKMKDELKGFYGVLKSSDDYLRFVFLTGVTKFFHVSVFSDLNHLVDLTLDPRYADLCGITHEEMEQNFGPEIEAVLEDTGKSRETYLGELRRFYNGYRFSRKVLSVYNPFGLLNHFDKSGEFLPYWYETGMPTFLINLIIKQKINIIDMTNMRVGYEDFRKYDIETMRVEPLLYQSGYLTIKDFDEELQQYILDYPNEEVRVSFSKSLLELYLQPSGEAARGLSTLLPAALVKGEVDEAMNALKSFLASIPYDIIKDRENYYETAIHLIFTMLGLNCRSEVRIASGRIDTLVETKRYVYCFEFKLNGTAEEALAQIDTKEYLLPWTVSGKQLFKVGVEFDYGKRNIGKWKSSS

SEQ ID NO: 94444 - protein, 111 aa, Unknown
  Obtained from environmental sample
  misc_feature (1)..(111): Xaa is any amino acid
MSIFIHESAYISPDAKIGDGTKIWINSQIREHASIGKNCIISKDTYIDEYVIIGNRVKIQNGVSVYHGVIIEDDVFVGPNATFTNDHVPRSFNSSWKISKTIVKKGASIGA

SEQ ID NO: 94445 - protein, 372 aa, Unknown
  Obtained from environmental sample
  DOMAIN (13)...(367): DegT/DnrJ/EryC1/StrS aminotransferase family
  misc_feature (1)..(372): Xaa is any amino acid
MKVPFYEAAREYRLHKTEFDNAISNVLASGAFILGKQVQEFEEAVCKYTGAKYAVGVANGSDALVIACDILGFKNGTEVLTPVFTFFASASCIARLNGKPVFCDVDEDTFCMDMKDAENRITGKTKGILPVHLFLQTADMSACMELAHKHQLAVLEDAAEAFGMRAFYNGEYKHAGLIGDFGVFSFFPTKTLGGYGDGGMIVTNNEELYKKAKSYRTHGSSKKYHHDYIGYNSRLDTLQAAILNVKLSHIDNAIQKRANHAANYREMLKGVAGIKLPFVKDGNKEVNYVFCIQAEKRDALEKHLQSKEIGTSIYYPVPLHLQKCFEYLGYKKGDFPVAEKLCETVLALPMFPELTEDEVNFVCESIKEFYKK

SEQ ID NO: 94446 - protein, 295 aa, Unknown
  Obtained from environmental sample
  DOMAIN (70)...(184): Oxidoreductase family, C-terminal alpha/beta domain
  misc_feature (1)..(295): Xaa is any amino acid
ADIVTVASESGKHCEIAIDCLNAGVHVICEKPMALSTKDADKMIAAAKKNKRKLAVCFQNRFNAPVQRLRTALEEGRFGRILHGMVQIRWNRNEAYYAEAPWRGTWAQDGGTLMNQCTHGIDLLQWMMGENAARVQAQTRRFMRPIEAEDFGAAIVEFKSGAVGIIEGTADVFPVNINETLSIFGEKGSVVIGGLAVNKLETWRFADAQLVGDTEERVLNPNEKDPPTVYGFGHTALFENFIDSIETDSEPLVSGESGKKALEIILAIYKSQKTGKAVDLPCDFSTLEMEGYFNQ

SEQ ID NO: 94447 - protein, 652 aa, Unknown
  Obtained from environmental sample
  DOMAIN (8)...(443): Nitrogenase component 1 type Oxidoreductase
  misc_feature (1)..(652): Xaa is any amino acid
MSGNLVNLNVNPCKMCMPMGAVSALCGIKGCMSILHGSQGCATYIRRHAATHYNEPVDIASSSLTEEGTVFGGEENLLKGLRNLIDLYAPEVIGVCTTCLAETIGEDVGAIVKKFLAQNPDAGVKIITVASPGYGGTQNEGWFAAIRAVLEQTEPNDAPNDKINVITPMISPADVRYLKNTLKSFFPGKGTEYIILPDISENLDGATEKRYNRLKTGGTPIASVAAMGEARLTIEFSEFTDAPNSPAEYLNEAFGVPFVKLPLPVGVRGMDTLVNAMIEAGGRVNPGLTKSRGRCLDAMADAHKHCAEARAAIYGDPDFTVAMVKLCCENGILPVVAATGSVSPKLRKTLTSEAAECAEYHFEDNVTILDDTDFAAIEEVCRKRGANLLIGSSDGRRIARSMNIPLIRCAFPIHDYIGGQRVRVLGFDGTLNILDQAANAMIERTESTFRASLYGKLYAKPEDEVKANVVNTDTVSTNVINNDTVSTNIVNTDDTTISTNIISADIVDVDVDVDMDVSIDVGNDNDDGDRNVSGTNIIGKNIVDIEDTVVTADVVDVDEAAAIINEIINTKAVDKDGDVADKGDAAVVGTDKMIANAVDKGEAIVITADTIMADIIDMEIVDTDDTVSTNVVNNSVDNDDTVSTNIIHTDIV

SEQ ID NO: 94448 - protein, 272 aa, Unknown
  Obtained from environmental sample
  misc_feature (1)..(272): Xaa is any amino acid
MRSPREVNIDIKLIDFVDSFKFPEHVMKCLKLLLANEELQFSQEYANTVSIIRLGYNDHGPVHMRTVTYNAVIMLDLLKKAGIKTSLESDGCGTYEDSFIGVMLASMFHDLGMAMGRQNHESHSLVLSMPIIDKVLAQVYPDDLKKRVMIRALALEGIAGHMGTITISSLEAGLIQVADGCDMTKGRARIPISISSNNAKVGHIHQYSANSIEYVDITAGGEKPIRIDVNMSSEVGLFQVEEVLMHKIAQSTAKQYIELYAKVGEDAPKRYL

SEQ ID NO: 94449 - protein, 497 aa, Unknown
  Obtained from environmental sample
  DOMAIN (49)...(463): Bacterial extracellular solute-binding proteins, family 5 Middle
  misc_feature (1)..(497): Xaa is any amino acid
GKTGGTWFAVMNEDPKSFNHLKKEEDSSTSAVVGNMLDYLIDYNPVSKEWEPRVASARTVVDEKNGSMQVIYTLREDIYWSYYNSDKKIKVTSDDVIFWYDEITGDPEFQSSHYYGQYLTMPDGEEAHIDIKKIDDRRFSFHFPRIVAEPYLSTNMDFGPRHVYEPVKTQDGVEGVKNLFSVAVDPQTIPSMGEWFLAEYTPSQRLVYKRNKDYWKKDTKGVTLPYPEEMIIRIIPEENTKLLMFKNGDIETYGLRPEDVDGLINRGDGSYTVFNSEGALSASFWTFNQNPVNEKSPKYEWFTKKEFRQAMSCLLNRDRINAQVYRGLSQPKVNIYPETNPYYNPSLTLQYLFDTDRAIELLSSIGIKRDKRGIMRDWKNRKLEFDLTIRSESSVSQDIASIIRDELSKVGIKINIRVLDFQKQVQQLFTTFDWDSMLMGLSGSNTFPSQGSNVWPTAGNLHMWYPKQPSPATEWEARIDYLLHEGKFTIDAKKAQE

SEQ ID NO: 94450 - protein, 276 aa, Unknown
  Obtained from environmental sample
  DOMAIN (1)...(89): SIS domain
  misc_feature (1)..(276): Xaa is any amino acid
YRDAVINEKTLVILISQSGETADTIAALREAKSKGAFTLSIVNVVGSTIAKEADICLFTSAGPEIAVATTKAFSAQLVLLYFLAVWFAVKLGKIPKETEQELLSQISTLPEKTENILKQVDSIQMYAASCIGCKSIFFIGRNIDYAITMEGSLKLKEISYIHSEAYAGGELKHGTISLIEEDTLVVAISNCASLYGKIMSNVEQVISRGAKVLLIGNCPAPKSDEKIFHIALPESQDLFSPSLSVIVLQLFAYYVAANKGLDIDKPRNLAKSVTVE

SEQ ID NO: 94451 - protein, 118 aa, Unknown
  Obtained from environmental sample
  DOMAIN (10)...(117): Aspartate/ornithine carbamoyltransferase, carbamoyl-P binding domain
  misc_feature (1)..(118): Xaa is any amino acid
MMETVPDLPKDLLDLDDYSPAQLNLILDLAESFKEISQRAIKKVPTLRGKLVVLFFHENSTRTRLSFEVAAKRLSADTVALSASGSSLAKGESLLDTARNIAAMAPDALVIRHGTSGA

SEQ ID NO: 94452 - protein, 217 aa, Unknown
  Obtained from environmental sample
  DOMAIN (48)...(130): Peptidase S24-like
  misc_feature (1)..(217): Xaa is any amino acid
VRGKKPEKTDPDKARPTFGQVCLEYGQAIALAVILAVLIRSFLFQAFQIPSGSMIPTFLEGDRVLVEKFTYGLRNPWNNRLWLETGRPERWDVVVFISPEDHDKDFVKRVVGLPGETVALAGGELFIDGRQVEDPYGHYDPRSISPLRDRPPLRLGENQYFMMGDNRDHSSDSRAWGPVDFDLLRGRAWRLYWSWDSREGLNLGDRLRVGRVGQKVE

SEQ ID NO: 94453 - protein, 762 aa, Unknown
  Obtained from environmental sample
  DOMAIN (699)...(756): Bacterial regulatory proteins, luxR family
  misc_feature (1)..(762): Xaa is any amino acid
AANVTLSRALSKIDFPDNKEKIRHYKALLQDYFFDKKRILVIDDYHCIEDPAVLRFMEEGFFRNMLPGTTVILISRSISRLNIAGITYRDQIFNVNESDLRFTENELAQYFRRMDISLRTESLREIMQDTEGWAFAINLIARSYQKAPGYGGYVRSAMKQNIFRLLEMEIWAALSEPLQIFLVRLSLIDHLSVDLFIQLAGKEEKIVEELEKQSAYVRRDSYINAYLIHPLFLEFLRTKQYSLPEKQRKKVYVVSGDWCAHNGFKIDAISYYEKAGLYQAIVTILDGLSVKMPLNIAQFVAPILDNAPPDTFDKVEYLAEMHLRTHLCQGHWQKSLDLLQFYEAKFLKLPEDDIVRNRTLGQLYDCWAYIRVLMSTMDDIYDFGIYTEKAIKFASTLKDPGKFGPYYPGAWSNYAGSSKKGSMDEYVATVINIGKSMPRDFYKIKLMGQLELIQAELGFYRGDVNSALTLLTLSVKEARAGNQFSFLNRALFYTLRIAVSQGNFTLAEQALKDIKAQQDKTAYLYRFIDYDIAISWYYCFLGMPEKTSEWLQEDFSPYIHPAFVENLGNQIKARFCYVTRNFAPLLANIEEMKGRESILFGRVEMLAMEACVHYLMKDKERAFAALRNAYENAYPNEIVMPFIEMGKDMRTLASAYLKTADKSIPKPWLEDISRKSASYAKRRARIIAGYAQAHSLTDIISITPRESDILKDLSQGLSRAEIASGRGLSINTVKMVINSLYSKLGAENVADVIRIAAQRKMI

SEQ ID NO: 94454 - protein, 308 aa, Unknown
  Obtained from environmental sample
  DOMAIN (176)...(308): RNA polymerase Rpb1, domain 5
  misc_feature (1)..(308): Xaa is any amino acid
VFNEELPKDIPFINYELKDKELRALIEHIFKIKGSWTTVQMLDAIKATGYRYSTVFGATIGVDDIIIPKEKAEMINKANKEVEEKQKQWVGGLITDGERYNSVVNIWTKTNEELTEITMKTLESDRDGFNSIYMMANSGARGSRNQIRQLAGMRGLMTKPTGEISELPVRSNFKEGLSVIEFFISTNGARKGLTDTALKTAEAGYLTRRLVDIAQDMVVNEDDCGTINGISYSAIKQGEDIIEPLKDRVIGRFTLERVKHPITGELIVDVNEEITEDIANKIELAGVETVYIEDGFNLRGKIRSLPQM

SEQ ID NO: 94455 - protein, 1446 aa, Unknown
  Obtained from environmental sample
  DOMAIN (478)...(644): RNA polymerase Rpb1, domain 3
  misc_feature (1)..(1446): Xaa is any amino acid
MRDIQDFDSIMIRLASPEMIRSWSYGEVKKPETINYRTLRPEKEGLFCERIFGTTKEWECYCGKFKSVRYKGVICDRCGVEVTHFKVRRERMGHIELAAPVSHIWYYRSVPSRMGLLLDLPTSQLRSVLYYEKYIVIDSGDTNLKKCQLLSEEEYNTAQEQYGGGFTAGMGAEAISVLLENLNLDQMVSDLRAKMIEKGAKSDKRLLKRIEIVENFRNSNNKPEWMILSVIPVIPPELRPMVQLDGGRFATSDLNDLYRRVINRNNRLKRLQGLNAPDIIIRNEKRMLQEAVDALFDNSKKKKVVKGSSSRPLKSISDMLKGKQGRFRQNLLGKRVDYSGRSVITVGPDLKMWQCGIPTKMALELFKPFIMKKLVDKDVVFNIKKAKLLVEQETPEIFAILDEVVKEHPVLLNRAPTLHRLGIQAFEPVLVEGKAIKLHPLVCHAFNADFDGDQMAVHVPLTQAAQMECWTLMLSARNLLNPANGRTIVFPSQDMVLGINFLTRVKPNGKRPESSNPEAKNKPPYYSSPEEALMAVENKFLDWGSLIRVKPVKFPIWDKIDHEAVIPADGIIETTVGRLIFNEEQPKEIPFINYEMKDKELRALIEHVFKKNGSWITVKMLDAIKSTGYRYATVFGATIGIDDIVVPKEKPEMIDKANREVEAIQAQWRKGIMTQEERYNKVIDVWNKTNEELTNIMMKTLEADRDGFNSIYMMANSGARGSRNQIRQLAAMRGLMGKPSGEIIELPIRSNFKEGLSVIEFFISTNGARKGLADTALKTAEAGYLTRRLVDIAQDVVVNENDCGTINGISYTAVKEGEDIVEPLSDRIIGRYTIEPVKHPFTGEIIVDVNEEITEEIAKKITAAEVNSVRIRTVLTCEAKHGVCRMCYGRNLATNRTVDIGEAVGTIAAQSIGQPGTQLTMRTFHIGGTATKISEENRTFLKYPVYINDVIGTHVVLDDGRWLFTRRGHAIVSKVMHEYVLEDNDKIMVESGQRVNPDAVIIKRGSVDIKAPDSTYVQILDNPDGTHSKILYLIGKEQKIEIRNGSDFLVKKGTVVEKEKTIATFDPFSDPIIAEHSGKVKYEDIISGTTLKEEMDEVTGNIQKRITEFQLENKQPRIHILDDNDDELISYHLPGGAILQVEDGDKIKAGRTIAKILKESARAMDITSGLPRVGELFEARKPRSPAELAKVSGVVFFEGVAKGKRKITVKDTFGREYQHFIPMAKRVLVRDGDSVEAGEPLCAGNVNPHDVLTIMGESYLQTYLMDEIQQVYRLQGVSINDKHIGVIVRQMMRKVQICFVGDTRFIYDQMVDKYRFHEENARVIKEGGQPAIARPLFQGITKASLNIDSFLSAASFQETTRVLTNAAIAGSTDYLRGLKENIIIGHPIPAGTGMKRYRDIKLYDEDSQDLEKQMQEILEQRRLEAEFAAEAAKAAEMMPVEDTEED

SEQ ID NO: 94456 - protein, 491 aa, Unknown
  Obtained from environmental sample
  misc_feature (1)..(491): Xaa is any amino acid
MLVCTGLYAQEERQEQEEQQERDEKKSGREYKPREQKLYIDIPLTFAEVMTINLIGNGYWRLWGPDSEAAYFTAESIRRNLNPKVWTFEIGQGGDTFFTNQFIHPYAGGLYFASARSNNINFYWSFLSSAFGSITWEALGETDSPALSDLINTAFGGIVIGEILHRLYIELDKGGIGGKIASFFVSPTDRITAAIRGYGPEEGPSKIFRSDLAFGFSMINARFFDDNEEEPKTWNSPAGFLNYDLVYADPYTAHSKTPFEQFDFNTSLTITVPLIHNLIFIADGYLASWLLADDDVNQASNGITLHFDDFVTDKGLLDLNNGRENLSFNAQSLDYSVKWRHGYNLNKPFDFSLKTHIGCSPWAITDYNGGDINPKTGEKTDYNLYLFGGNIKLFMELREMNEDGGMKNGQVMSLSLCFYDTWNIPKIPGFDVNTVFLFSKIAYSFPLTGRLSLYAADSFLLLHCRLTRDAGENPDITRWFNSAQLGLKISF

SEQ ID NO: 94457 - protein, 291 aa, Unknown
  Obtained from environmental sample
  DOMAIN (48)...(148): Peptidase family M23
  misc_feature (1)..(291): Xaa is any amino acid
MRKFVLHITAVLIYFCVVFSVHALNWPSENAVLVRNFGSNDRGLPVLGMIFSGGTDVLAADSGEIIFSRKKNDNASRLPSPLGAWTAVDHRDGLISIYSRYAEPVRTVTETQVEKQQAIAISGISGWSTQNGFYFMLFDRRERRWINPSMIITPQKETRPPQILSVDLRNNQGQMMQSRNLTQGRYTVIVNAPGGVPLTQNLASRQYAPQKIICLINGTEVSSLNFEAVSARDGVLMVYRNGLVPAKQIYSSLTSFEAAEIFLTRGQVTMEIIVQDISGASRNAINRLIIN

SEQ ID NO: 94458 - protein, 81 aa, Unknown
  Obtained from environmental sample
  DOMAIN (7)...(81): Cytidine and deoxycytidylate deaminase zinc-binding region
  misc_feature (1)..(81): Xaa is any amino acid
MIDNNQMDQLFVQARQIADKAYAPYSNFRVGAALLCEDGTVITGVNVENRSFGLTICAERNAICAAVAKGHLRFAALAIST

SEQ ID NO: 94459 - protein, 266 aa, Unknown
  Obtained from environmental sample
  misc_feature (1)..(266): Xaa is any amino acid
LGWEALPAAKEADDFRRRPTVRCDWDEATCTQVVWLYNEIKERFHHNADELFRLLGRPRVLKPGEGGGAELASLRLASIDMGAGTTDLSITTYALHNPGQSSPLIKPHLEFREGFNVAGDDIMHKIIQTQFIRKIAQAAAGRGLKDAESLVGDLFRVTPKIGVLSDERNRERRRSQFVTRVAVPLALEILKLYEGFDHRGDGLSEKLTVRGVLGDEAAGRLGGVLSYLEDPLNLALKEAGLSADFSLLDQALEIDFHEVDAEVQFV

SEQ ID NO: 94460 - protein, 287 aa, Unknown
  Obtained from environmental sample
  misc_feature (1)..(287): Xaa is any amino acid
VYTRLYKALADLDFPETAFCGLTALFDEEAGRKFTVLHVNRLDGLLADGPPDDDKTGPPVKVVSAEGRAAVLSRPVLSALIAELYVKVKEKPGETLEHSDLLDFPGYRAREKLENLDEDLRKPEILKNCFLRGKVAYLFERYMARREIAAMLLCIGYSVQNNPDLPHIVSAWVRDTHGENPARRAGRPVSLFLVLTMFDQHLPQGTSSSDTVTRWETRLNASLLDFFKGHDWPRQWSESAGRAVPFNNVFWLLNLSYASSFLELDEMDDQGSKFYRAKGVRPDQARG

SEQ ID NO: 94461 - protein, 238 aa, Unknown
  Obtained from environmental sample
  DOMAIN (6)...(238): CTP synthase N-terminus
  misc_feature (1)..(238): Xaa is any amino acid
MLKLKSKFIFVTGGVVSGLGKGITAASLGRLLLAHGFTVTMQKMDPYINVDPGSMSPYQHGEVFVTDDGAETDLDLGHYERFIDTPLSKWNSVTSGSVYSNVIARERHGDYLGATVQVIPHITNEIKERMVRAARDNDSDVVIVEVGGTVGDIESLPYIEAIRQFKNELPRGSAINIHCTLVPFVETSGEHKTKPTQHSVKELRSIGIHPDIIVCRSAARLSRELKNKISLFCDVRPE

SEQ ID NO: 94462 - protein, 49 aa, Unknown
  Obtained from environmental sample
  misc_feature (1)..(49): Xaa is any amino acid
VHTLNGSGLAVGRTFAAILENYQNADGSVTIPEVLLPYMGGVTQLTPLK

SEQ ID NO: 94463 - protein, 70 aa, Unknown
  Obtained from environmental sample
  misc_feature (1)..(70): Xaa is any amino acid
MLDQKLLRENPEAARALLSKRNFDTALLDDFLTADQKWKTAQLELDNLRAQLKAASKTKPTPEIIAANKK

SEQ ID NO: 94464 - protein, 528 aa, Unknown
  Obtained from environmental sample
  DOMAIN (202)...(384): Anticodon-binding domain
  misc_feature (1)..(528): Xaa is any amino acid
MTQAWMRDGLKERAITRDLKWGIPVPKPGYENKVFYVWFDAPIGYISITGTLGEEKGNWRDFVNYWWKSPNDVELFQFIGKDNIPFHTVIFPSSLLGSGEKWTMLHHMSSTEYLNYENGKFSKSRGIGVFGTDAKETGIPADVWRFYVYYNRPEKSDAMFTWSDFQEKVNGELIGNLGNLVNRTLSFVTRYYDGIIPEGKSDGAFWAEVVRLENSITEKLDRAELRDAFREIFELSSFANKYFQDNEPWRLRNDDPEKAKSVIRDLTYIVRDLSVLIEPYMPSAAEKIASFLGLKLRSNLNWKDIGKADGIGNIKIKSEILFNKLEDELIETLRVRFSGSQKERQESDNAQTAVSKPFSSVVDLRVAKIEKIERHPKADKLYIEQLEVGEGVTGTREERTIVSGLVPFYTEDQLLGKKIIVAYNLKPAKLRGIESKGMLLAAGDKNGVGPAGEAVERVEVLDAGDCPVGTRLLPEGEEAGTPPVEIDIDTFFSYPIIVKDNEVLNGGKKLCLNGNAVRTKAIPNGEVH

SEQ ID NO: 94465 - protein, 271 aa, Unknown
  Obtained from environmental sample
  DOMAIN (52)...(178): Phage Mu protein F like protein
  misc_feature (1)..(271): Xaa is any amino acid
MAETDRVPRPIEAMEFLSRKANIDTDRWDDLKWGEHSHAFTVAHSVDGDVCDKIHGLLNKAVSNGESFGTFKKGMLEMMGKEGWYGGAGHTKDEKAYINWRLRVIYDTNMKTAFEAGRYRQQVRHAEMRPIWEYVSKLVGKNRRQEHIALHGKAFPHDDPIWNEIYPPNGWGCECTVVTKSVSGAERDGVEVLHSDSEGNPPPMQNPDGSPMDWNKFSPNEWKYNPGQEALAPDFDKYKNIPKEMRDEMKAKYHRDMSEASLTEGEFTALM

SEQ ID NO: 94466 - protein, 251 aa, Unknown
  Obtained from environmental sample
  misc_feature (1)..(251): Xaa is any amino acid
LGISVSIWNNTATLRLLEELHKVWSSTGKRPVVVLGGPEVSHLRTDAEIFRYADYVIRGEGEETFRELCENILTNRLQDGQSSSVIPPQFTNAENADVSKIKSGYHLYTDEDAAKKLIYVESSRGCPFNCEFCLSAVREQGGALREFPLEPFLAEMDGLIRRGVRTFKFLDRTFNINIERALRIMEFFLEKIKEKNERQDSLVVHFEMVPYLFPLELREMLSRFPQGTLRLEIGIQTLNSEVASRIKRSRR

SEQ ID NO: 94467 - protein, 282 aa, Unknown
  Obtained from environmental sample
  misc_feature (1)..(282): Xaa is any amino acid
GGGDSLTGRYFPFTAHPVSAREAVGAAVNLDSIFQKPARIPADVIDTLLVFGGFPEPFLKANKRFYNNWQLTRRVQIFREDLRDLSRVQDVRQIEVLGELLAARAGSQTVFANLANELRVKDDTVKTWITLLESLYVCFQIQPWSTNVANSLRKQPKIYLWDWSTVADMGARRENFTASHLLKAVHWWKTCGLGDFGLYYLRDKQKHEVDFLIVRDKKPFMMVEVKTSSRRSISPNIEYFQKTLKAPYAFQIAFDMPASGIDPSELGRPVIIAAADLFKALV

SEQ ID NO: 94468 - protein, 324 aa, Unknown
  Obtained from environmental sample
  misc_feature (1)..(324): Xaa is any amino acid
VSTLKKTALVLIISGLLYAGMVYLLDFEPLDFVRTHFYNPSFVSSVVKENEKAAEIVQNHIQELQNKFAASLNEQAVKSSFLYNQTAADIYERSKVFGILLESVSGLQAVQFVDSNGVRIHYSTSARDLLSQSSNSASYRNYTDDSRALPYDDISVGANEKTKYTMDDSGDRIIFSFPFYDSMDVYRGTALFTLSVRALAERLITAGCLNPTDDISVIRLPRGIVFGSPNTSKSVILDKIASVWNAGFQEYITLDAEDAGVKYALISVKTGSDLFFGRIINDSIFSIPDSMSFIFKFSMFLTLFLTLYFLTNFKPHPRTLVQNR

SEQ ID NO: 94469 - protein, 525 aa, Unknown
  Obtained from environmental sample
  misc_feature (1)..(525): Xaa is any amino acid
MPETAQTQSSYVDTLQQALIARKDFMEREEMQKLKDELRSFHTSFASLYNIYLKKKLIDEDPYKQEAKINELEVPDASPFNEQKRIEQMSIRLANYDNQLDYLTNFYQLGIDFLNLDRIKRIVGLVRYIDWVALSPDSQSLMTKAVAEISINSKAGVDPITLSIIGESLSRLSKTTASSMTILKNLSIYYRECYKLDIRQKITQGMTPNEATLENIKKKMPSAMPGSPFYRELVEELIKEDYSKDGQDMKDMVLNALKVPATKQKAVKAPVNFKNILLDGIQVIGGSSASLTEIMTKLDDNQAIMESPKKGLMHMIKELIRQITNAEPEEVIYTVEYLDQTKDVPVKEKVSFHQYRDELEKKIRFLASLMKGPAYQKLAQMTEEQIIGYLEKNINEVQNYHKILGALDDFFKAKVTPENRDKIKGIKPELTTLKNSYVKANQMRYEYSAQKEEEEQLRRLGVHMEAAAAATASPAAGAPAASPAPAAGKTPAAGKPPAAGKSPAAGKPPAGGKPPAGGKVSTAKT

SEQ ID NO: 94470 - protein, 284 aa, Unknown
  Obtained from environmental sample
  misc_feature (1)..(284): Xaa is any amino acid
DPVNITYYLSNKLRTIVPTPGEIEDMLKEYTAYSKGKIRLTVRDPLKDGLSKADELGLQPRQVQTVEQDNASLITVYSGIVIEYLDRMDVLPWVISTDTLEYDLTSRIRSLVNDTERWIGVIVGDSFRQWREDFGYLEAILAEAGYRVRLISLGDEISDAVPALFVLGGADDLDDWMLYRIDRYIQLGGKVLFAVKGVYVDTVSGSVEATLHRNQTLLDMIASYGAIIRQELALDRNALTLQYQTRTPSGGVQYRIVRYPLWIGVLGDNGNDKHPVCSSFLGVD

SEQ ID NO: 94471 - protein, 124 aa, Unknown
  Obtained from environmental sample
  misc_feature (1)..(124): Xaa is any amino acid
MALCRAGLDVQYTQGFNPLAKLEIVSPLSVGISAGGEIAAVEFLHATQPQEFLEKMNATLPEGLKITKAECYCIPSGSKKHSLSSLLWGFGYAGTDGETVYVPAAAEKAHREKYLSSGQTFFRC

SEQ ID NO: 94472 - protein, 327 aa, Unknown
  Obtained from environmental sample
  DOMAIN (263)...(296): Tetratricopeptide repeat
  misc_feature (1)..(327): Xaa is any amino acid
MSRKQKIIIISAGVALTALIVLGIIFFVKGKKQDPDGEGTAIASQSDSKRQNTLKLIERYLTQGEFDRALDLVDRLLIENPDDEEANELQQRILMADRHKDSDGLTELQRQLLEEQRRQNERIAASMQKSMSSPGLASGESEAAAERRAAAEAEAARKKAQEEELAKVSRELQDKMRKVNELVADAKAKLNAGDLAGAERIFSEARKIMPENEPRFESQKLADMADAYYEYNTKNTNTANGKEAARRAETLASEAVTKDATQALPHHTLGKLARDEHKNDKAITEFREASRLDSNNYLYSHDLGRSLFIAQRYQEARDAFQNAVKHN

SEQ ID NO: 94473 - protein, 89 aa, Unknown
  Obtained from environmental sample
  DOMAIN (3)...(72): ACT domain
  misc_feature (1)..(89): Xaa is any amino acid
MNAIITVVGSDKVGIIAKVSAFLAERSINIEDISQTVLSGNFVMMMMVSLGSCSTALEDIKKELVVLGDTLNVSISLMHEKVFSAMHRI

SEQ ID NO: 94474 - protein, 210 aa, Unknown
  Obtained from environmental sample
  misc_feature (1)..(210): Xaa is any amino acid
MALTDHNSSLNCPAFAKLCPLFGIIPIFGMEATTSEEIHVLCLFTSLEASLAFGEFAYSILTPFLNNPEKTGDQVYVDEEDNIEGEVEYYLVNPLDISVDDIGAKVAEYGGIVIPAHVDRAAFSMTSQLGVIVKGPWTALECVRIPPVFDGHPLVTLGYPLTTSSDAHYPEHIVRRPFQLDITAEELQPGGPGTMADMEAFKRALGKRPK

SEQ ID NO: 94475 - protein, 280 aa, Unknown
  Obtained from environmental sample
  DOMAIN (5)...(272): NADP oxidoreductase coenzyme F420-dependent
  misc_feature (1)..(280): Xaa is any amino acid
MSEIKIACIGSGNMGFALMKGIAAMSKRTNKPVSIVFTDAYAEKAKTAAAALGAGVFGSNTEAAEKADFVFLAVKPQTFPEALAEIAPVIQKRMAAGAYQKYGAPLLVSMAAGWTIEKIQAAVAYGSTIPLKDIPVARIMPNTPALISKGMIALAVSPEVSEEKTAALEAMLRGAGTVDRISENYFNAVTGLSGSGPAFVCLFIEALADGGVLAGLPRDKALCYAAQTVLGSAAMVLETGKHPGELKDTVASPGGTTIAGVAALESGGFRSAAIQAVVAA

SEQ ID NO: 94476 - protein, 251 aa, Unknown
  Obtained from environmental sample
  DOMAIN (2)...(235): alpha/beta hydrolase fold
  misc_feature (1)..(251): Xaa is any amino acid
LILYVHGGGFTGGEWKLSTNQRNGLLSAATGKGYAIASAGYLLYGNNPQNPSFPYMVEDILAAIRHLRANAETYHLDPNKFVISGYSAGGYLSNIVCALSGNTTHNYDITSLGNAGVSSDVQAAASSAGLTDFSKLVEQSGSTMHNSMAGGPLGGSLTDNTQSMKDNLKKQNPLTWVSANTPAIYLRHGTSDNIVPYQQSDIFVDKIKSVSPNAESQGKLKYNKRSGGGHDDFDNSDAAAILDFLDKALGR

SEQ ID NO: 94477 - protein, 163 aa, Unknown
  Obtained from environmental sample
  DOMAIN (1)...(162): Domain unknown function (DUF388)
  misc_feature (1)..(163): Xaa is any amino acid
MKKYTLFFVCCLISLIAAATVSAQGFTGPGANQPLPSSGPGHYPPPPPPPPPGPGHYPPPPPPPVEVYTDRYGLTGLAWNVTIEQAKNYPHDSWVIITGNIVSVLPGGRHFMFRDSSGEIPVEIGPKEWRGLSVGEYDKVEISGEMKRERGQVFIKVHAIRKI

SEQ ID NO: 94478 - protein, 400 aa, Unknown
  Obtained from environmental sample
  DOMAIN (124)...(357): Glycosyl hydrolase family 3 N terminal domain
  misc_feature (1)..(400): Xaa is any amino acid
TPPNTLFMANMRLILISIICLLLLPSCSKREVVNQENNTVNEPKKQITADEIFEKWQRATDIAASLDDRLLAAQVLISGIEGKGSLTSNTVSLLSEFPTGGIMLFKYNLDTDNDSIRALINQTAALVNGESGISPFIAVDHEGGTVNRFRRGTADLPDASSYWELSLKQDKQTSLNKIKNDSFKAGKDLKDLGINVNFAPVAEYLNDENRVFLSRRSYGPDPLFTANAAQAFIMGMEQAGVLCVIKHFPGIAGNDPHYWASVINGDKAELDKLVFPFKALIDNGYGSAIMVSHTAVPALDSKIASLSKIVMGDWLRGELGFSKLLIADDFNMAAAGVKSPEEAAVMSIAAGADMVLVWPKDLKRTHGAIMYALYDGRLSRERLRNIAYRIIITKINMGLI

SEQ ID NO: 94479 - protein, 528 aa, Unknown
  Obtained from environmental sample
  DOMAIN (265)...(502): FGGY family of carbohydrate kinases, C-terminal domain
  misc_feature (1)..(528): Xaa is any amino acid
MDVKQAITENKTALGIELGSTRIKAVLIDQSFAPVASGSHDWENKLEDGIWTYNLNDVWTGLQNCFKDLALDVKNRYGLTLSSVGSIGISAMMHGYMVFDKNGNQLVPFRTWRNTMTEKASAILTEKFKFNIPQRWSIAHLYQAILNGESHVKDINFITTLAGYVHWKLTGKKVLGIGDASGMFPADGGNYNSKMLRQFNELIASNNYGWKIADILPAVLNAGENAGILTAQGAKLLDPSGDLQAGIPLCPPEGDAGTGMVATNSVAERTGNVSAGTSVFAMIVIEKELSKVYPEIDIVTTPDGKPVAMVHCNNCTSDIDAWVKLFGEVFDISGTKPDKTAIYNMLYNKALEADNDCGGLLSFNYFSGETITGFEEGRPLFARLPNSNFNLANFMRTLLFSSMATLKYGIDILTKEEKARIDSLLGHGGLFKIKGIGQRFMAAVFNAPVGVMESAGEGGAWGIALLAAFMREGKETLEKFLANKVFAGKTGARIEPDPKDTESFGKYMERYTAGLKIERAAVENLKRG

SEQ ID NO: 94480 - protein, 333 aa, Unknown
  Obtained from environmental sample
  misc_feature (1)..(333): Xaa is any amino acid
VCTGDSSVWELKAILRRFEGIAGICSDFTGYRERPGEVMWIERRGSSGSGAADAWPVFTQSPVDLAESLKESLFLPNKTVVCVSATLAISNNFNYWATRCGAACVADRPLFTGCFLSPFPYSSAVLLAAPDDAPLPDDSDYQAFVDRAVAQLASVAGGSALVLFTSYQSLQSAWLAAQPELTALGIRCLRQGDDDRSRLLQTFLNDTQSVLFATDSFWEGVDAPGDTLRLVILCRLPFRTPSDPVFEARREAVEKNGGNPFMDLSLPEAVMKFKQGFGRLMRRSSDRGVVAVLDGRILKKRYGTFFRESLPETLTSFGSFDGILRDTENFLYP

SEQ ID NO: 94481 - protein, 374 aa, Unknown
  Obtained from environmental sample
  misc_feature (1)..(374): Xaa is any amino acid
ARLLEARQLIAVRRYSAALASLAIFQPVAVETADAAMLRLAALKGLVNGGAVSYSAEFRRRMSEAMNRYPRDTRAPRLFFDYANYAYANGRKPNPDDTRIMEFALERLPFLLPQDPELAWMAAPFINDIEKARQTLADYRSGSSKPNPASLVPALNLGLLDDIDAVEELFAPANAPVVDKDIVVNVWKLLRSEEGRDHMARKIKVFSGDIIEDEDHDGCHESRAVYRQGVLEEYHFDADQDRIDDVVIIFNSGDPQWARMPVLKAVIFWENYPSVQRAVLGNGLYLPAPGGFRFAPLGFIEICSSDSTSRILYPQRELLQQGITRYILASFASSVQQPSVEFPGGIEHVYLEYGIPVNAEVILGNKIDSFTEFE

SEQ ID NO: 94482 - protein, 374 aa, Unknown
  Obtained from environmental sample
  DOMAIN (284)...(374): GGDEF domain
  misc_feature (1)..(374): Xaa is any amino acid
MYYGLEEKHKSRANKLVLFSGVFFSLLRVLAEVRNGDYYSAIVCGIVATVGIGLFMFFSKKNIEIFPLIFSFCLYISYIGTSYAIDSFKYFYAYYMLVLLICAVYFNARYFLILLVVTQVMNVFLTIFELPRHINGNVWVHFSLIFCSGIVILLMVQFAIRKSNEVSSAYASFGALLRSTPNVLVLLDDGNNIKYISQSVSKVFGIKEPEKLVGESFLNLFNEKSVRELFRDLVKRRAFYEDYQKMTINGQVKTFNVFANKMTDNSMFFMLSDVSEITKLKELAEQDSLIDGLIQIPNRRAFDKQIVNEWNRALREKVNLSFLMIDIDFFKNYNDTYGHLQGDELLKAAGAIFRKNLKRSADFVARFGGEEFGV

SEQ ID NO: 94483 - protein, 94 aa, Unknown
  Obtained from environmental sample
  DOMAIN (33)...(86): Helix-turn-helix
  misc_feature (1)..(94): Xaa is any amino acid
MSFRKHLAEEMKNPEFKKLFEEEKRLLNLSYAIVEAREKKGLTQKELAKKSHITQQQLSKIENGINCNMLTFIRVSNALGLGLTISALSKAKSA

SEQ ID NO: 94484 - protein, 316 aa, Unknown
  Obtained from environmental sample
  misc_feature (1)..(316): Xaa is any amino acid
MVSLCWLAEDLYMKIKLKLILYYRTQITILLLSVSVLFFSCATRPLPKPARTAPESFASAEAVIPHWQPVAQGVGFFHGRAATPEFEFWALKIELAAPSLQIVVKGGADDAAGGTLSAKVSSFVSANGLTAGINTAPFDISSSKEGQPIKNVGIVISGGKLISQPSPRYDALVFYKDGKAAIVNQAAIKSIENIENAVGGFYQILVNGAPAERTLTRENREPRSAAGISEDGKFLYLVVIDGRRADSAGGTEKETALLLLALGSWNGLNLDGGGSTALALRGEDGKVRVVNTPVHGGILGMERAVAGCLGILAGKL

SEQ ID NO: 94485 - protein, 67 aa, Unknown
  Obtained from environmental sample
  DOMAIN (1)...(66): Ribosomal protein L31
  misc_feature (1)..(67): Xaa is any amino acid
MKAGIHPKYEMTKITCVCGNVIETRSTVKDIKVEICSACHPFFTGKQKLVDTAGRIERFRKKYNIKE

SEQ ID NO: 94486 - protein, 458 aa, Unknown
  Obtained from environmental sample
  DOMAIN (2)...(77): Histidine kinase-, DNA gyrase B-, and HSP90-like ATPase
  misc_feature (1)..(458): Xaa is any amino acid
IWLRIAVSDTGKGIKPEDQEKLFDEFVKVDVKKNQGIEGTGLGLAITKNLCAAMGGYISMESEYGKGSVFTAVIPQGIGKEAPFAVVEEPEKKKVLVYEGRINYAKSVCWTLENMKVPYTMVTNQDDFASALYREEWFYVFSSYGLYEKIEPLMGQSDTAFRKGKKPPLALMVEWGTEAYIPGARFVSIPVQSLSIANVLNGREDNKGYIKSSGMVRFTFPRARILVVDDISTNLKVVEGLLAPYQAAVDTCLSGSQAMEMIKQKASENLDYDIIFMDHMMPEMDGIETAAAIRLWERGQQKNDIMCNRVPIIALTANAVMGMREMFIKNGFNDFISKPIDVSKLDEMLNRWIPKEKRASANRVGDSNEQLSDKNTNSSLLSIPGVDTAKGITMTGGTVAAYTQVLSLFCKDAQDRLPLLQKAPRSGNHEDLCYPGSRPEKRVGFDRRANNIVSCGGT

SEQ ID NO: 94487 - protein, 256 aa, Unknown
  Obtained from environmental sample
  DOMAIN (59)...(229): Glycosyl transferases group 1
  misc_feature (1)..(256): Xaa is any amino acid
MPELVSRTGLAARMWFYRRAYKKSLIICTVSNFSKSRIEHHLGIKKPVIVTYCAVQPFFLSYRDNNCDVQKTETIVFIGNIKKHKGLDCLLEAFLSAKKEGLPHKLLIIGAKENFRSSDDSILKKIESINNDEIAFSGFISDEELLKRLSEAALLVQPSLYEGFGIPPLEALVLGTQVLISDIPVFKEIYEGFPVVFFRAGDSEDLKNKMMEILYTKKQTSTKRASKKKTSKDQFSPVLPDELKNKYTFEKTARRI

SEQ ID NO: 94488 - protein, 298 aa, Unknown
  Obtained from environmental sample
  DOMAIN (38)...(297): Sulfatase
  misc_feature (1)..(298): Xaa is any amino acid
MNKVKLAVMIIFDIFFIHSCTTSVIPPRETVINSNFTPARHLVFIGFDGWGASYLKKANMPTVKRMIGDGTLSTETRSVMPSISWPNWTSLFMGTPPDKQENNTPSIFSVVKESFSTVQEDQKTQPVLFYEWNDLYNICPDETAVKFEISSDYASTYKIASYISTKKPVFTAIVFGEPDNAGHAKGWGSKAYYDKLSLLDNFVAIIEQAVKDSGIYDSTIFVFSSDHGGSFKGHGLNTAKHRKIPLVFYGAGIKKGYVISFPTDIYDITPSMAAILGLQAPQEWTGRPIFEIFDNLKQ

SEQ ID NO: 94489 - protein, 297 aa, Unknown
  Obtained from environmental sample
  DOMAIN (38)...(297): Sulfatase
  misc_feature (1)..(297): Xaa is any amino acid
MKKVKLAFMIIFDLFIILSCTTSVVPPRETVIISNFTPARHLIFIGFDGWGASYLKKANMPTVKRMIGDGTLSTETRSVMPSISWPNWTSLFMGTPPDKQENNTPSIFSVVKESFSTVQEDQKTQPVLFYEWNDLYNICPDETDVKFEISSDYESAKKIASYILTKRPVFTAIVFNEPDPTGHANGWGSKAYYDKLSLLDNFVAIIEQAVKDSGIYDSTVFVFSSDHGGSFKGHGMNTSKHRKIPLIFYGAGIKKGYVIPFPTDIYDTTPSMTTILGLQAPQEWTGRPIFEIFDNLK

SEQ ID NO: 94490 - protein, 367 aa, Unknown
  Obtained from environmental sample
  DOMAIN (184)...(348): Glycosyl transferases group 1
  misc_feature (1)..(367): Xaa is any amino acid
MKVAIIHYWLVNMRGGEKVLKSLFEIFPDADIFTHVYNPKAVSSLIKNRRVITSRINRLPFAKKIYQLYMPLMPNALNDFNLQSYYLVISSESGPAKGVIPNPNAYHLCYCHSPMRYLWDMYHDYFRGANPLVRVFMKRLIPKLRVWDAVSANQVDFFIANSSYVAQRIRRCYNREAEVVYPPVDIEKFLSVERQSGEHYLFFGQLTGYKRADLAIEACVASGRHLVVAGAGKINKKWREYEKTGLITFMGRVSDEDTLKLYSSAKALLFPGIEDFGIIPVEAQASGCPVIAYRRGGALDTVIEGVTGVFFDEQTPASLIEAINRFESMKTEGVFNNRKAFSGHVRQFTPEVFKEKVQRIIEERKRL

SEQ ID NO: 94491 - protein, 378 aa, Unknown
  Obtained from environmental sample
  DOMAIN (6)...(305): Nucleotidyl transferase
  misc_feature (1)..(378): Xaa is any amino acid
MINDCLIMAGGSGTRLWPASSSRKPKQFLPAAKDGTGSFFSLSLERALRVVAENDGRVIVITGKKHLPFVIAACSALSAAEKKRLVLIPEPEARNTAPAIACAIAYAGKTGGWNRTMLVLTSDHIIKPPEVFLKDSSIAAQFAERNKLVVFGISPSGPETGFGYIETAENLAGNVYNVAAFREKPDRETAERFFASKKYFWNSGMFAFRCDFLADEYRRLASEVICPFETLKTPDKKSYTKKNDFLVLNKWTELDNAYNQAKPISFDYAIAEKCTQTVMLRASFDWIDIGSWDDYARLLSDNSSANNTGTDVFSAGAGSCFVDSDIPVALAGVENLIVVIRSGKDGSPPSALITQKGKTQLVRDIVEKIKQSDRRDIL

SEQ ID NO: 94492 - protein, 60 aa, Unknown
  Obtained from environmental sample
  misc_feature (1)..(60): Xaa is any amino acid
MKVAVIHYWLVNMRGGEKVLESMFEIFPDADIFTHVYNPKAISALIKDRRVITSHINRMP

SEQ ID NO: 94493 - protein, 200 aa, Unknown
  Obtained from environmental sample
  misc_feature (1)..(200): Xaa is any amino acid
TAFREKPNSETAVQFIASKNYFWNSGMFAFRCDFLVDEYHRLSSEVISPFENLKPPDKKSYSKMKGLCILDAWAGLDKAYNQTKQISFDYAIAEKCNKTVMIRASFDWIDIGSWDDYALLLSDNSSANNTDTEVFSAGSNACFVDSDIPVALAGVEDLIVVIRSGKDGSPPSALITQKGKTQLVRDIVEKIKQSDKKDIL

SEQ ID NO: 94494 - protein, 662 aa, Unknown
  Obtained from environmental sample
  DOMAIN (568)...(646): BRCA1 C Terminus (BRCT) domain
  misc_feature (1)..(662): Xaa is any amino acid
MASKKDRISELETLIQRYQASYYNGEAEISDGEFDLLWDELKNLAPQSEVLKKVGSGPDTDGFPKARHLIPMGSQDKASNPQEFIEWAEKMGLETEKDASLTENKNRLTKTFIVQYKLDGASLELQYEKGKLIRAVTRGDGITGDDITGNARRMKCVVQKMDVSFTGGVRGEVIMTHDVWNSKYSSKANCRNAANGLMRRKDGDGCEDLQVIVYDAAASDDDRFFKDELQKLKWLKERGFKTTETKTFTAAGEIIAYREKIAAEREKLPYDIDGLVVKDIETDMSDLRKARPEKQIAFKFELETAFSVLREVIWSESGATYTPIGVVDPVRLAGTTVKRANLNNPDMIRSMGLKIGSTVSVVKRGEIIPKIEGLAPVSSKEKTQEIVFPKICGVCNTELVNAGTRLYCPNPACPKRLLHRLEKWVSVLDIRELGEKLLRQLFEKNRVTLISELYTLTAQELAEYDRMGELSAAKVIRHIQTRRELSLAAFTAGFDMEGVAETTMEKIAAAGFDTLEKLRAASIADLASVYGLGEITASVITDGLKECAAEMDAVLKTGIITIAPPPSEESQPMRGLSFCFTGELKSMKRGEAEEKIKALGAQAKSSVVKGLSYLVTNDPASGSSKNKKAKELGVRIINEDEFLALLSGGKPEKNAPTQGELF

SEQ ID NO: 94495 - protein, 80 aa, Unknown
  Obtained from environmental sample
  misc_feature (1)..(80): Xaa is any amino acid
VDIKFIPEAEKDYKSLDGSIKKLVNEKIDNLKDKPYLGEELGNKNNIDLTGFYKIYAAKKKYRIIYRIVKYEIEVIKFGV

SEQ ID NO: 94496 - protein, 319 aa, Unknown
  Obtained from environmental sample
  DOMAIN (1)...(313): Protein of unknown function (DUF1703)
  misc_feature (1)..(319): Xaa is any amino acid
VFSALNQLSDLTLDPRYADLCGLTQEELETNFGPEIDSVLESTGCSREEYMDKMRRFYNGYRFSENPLTVYNPFGILNHFENNGRFRPYWYRSGTPTLLTDLINSQNIDITNLNNMQVGYDDFDAFDIEEMEPAPLLYQTGYLTITDYNEKEECFTLDYPNIEVRSAFAKSLATRCLKTPSNWSYSSCKTLMAALNGGDVDAALEAVKLFLTKIPYELFQKRENFFQSVIYVVFAMLGLDCRTEERIAAGRIDMVVETRGFVYCFEFKLDGTAEAALAQIDTKEYAIPWTGRGKKVFKVGVNFDFEKKNIGEWVSAAAE

SEQ ID NO: 94497 - protein, 429 aa, Unknown
  Obtained from environmental sample
  misc_feature (1)..(429): Xaa is any amino acid
GQIGIMFNGNRYMFNGSGQEFENNRIVLSKGNSSVSYRSKGKQRAFDPSNFTIPQAQNYYFALSNWQDLSYTRWYQNASSLRNEDDVTGYLSEALRQNNYNAALSSIPRDFAGSTQHTYKSAAYTGGMTSAYRTFVSEENKMLNAINTLMKENPLDILKEEHIIDYLLTRGDTVLAYDIIRLIQETNSEKLTIDYCPGLLEAYFDIKRWNTSIDNPVEPLIEQILILVSENLSKDTVSNLVYASGSKERDLYYNVRLGNTLINWAEDAKNADWADIGRSLVLSALTNAGPGAGNLYANLKLSEYYPRALWLGEPGFWAWTISPSVKPSWQDGNLNISFAFPVSSTHHVIIRGVKPFLSLRIHDTNWRTDSQYERYDSSGWVYYQQEQILVLKLRHREPVENIRIVYKYAPPPPPVVEEVKEDNDADDID

SEQ ID NO: 94498 - protein, 236 aa, Unknown
  Obtained from environmental sample
  DOMAIN (46)...(175): FAD binding domain
  misc_feature (1)..(236): Xaa is any amino acid
MRDKIEKIINQCLELFPCETDIRYDAPLSEHTTFKVGGPADCRICPEGKNFPAFSADLISRARKEGIPLFILGGGANIVVSDKGIRGIVLDTRAWKGAEVKDNTVSFNSGTSMDEAAEFAAARSLGGLEFLAGMPGTVGGAVWMNARCYGSEIADVLEWTNILDFSGSGAPEEKRVPADKTAFGYKRSPFQGKNNLILSAAFNLKLADVNEINSKMEKNRQDRREKGHYRFPCAGS

SEQ ID NO: 94499 - protein, 329 aa, Unknown
  Obtained from environmental sample
  DOMAIN (37)...(272): Torsin
  misc_feature (1)..(329): Xaa is any amino acid
MLTAWEENSLGDRLRVDESHVRRVVAEITGIPLTHLEEKESRRLLNIEEELHRGVVGQDDAVRRVASAIRRSRVGVSSPKRPLGSFIFLGPTGVGKTLLAKRLSEYLFETPDSLVRIDMSDYMEKHNASRLVGAPPGYIGYDEGGFLTERIRRNPYRVILFDEMEKAHVDVFNLLLQVLEEGELKDSLGHTVSFRNTVIIMTSNAGVREISRDSRLGFGSGSGMMSFEEIESSAMSELRRLFNPEFLNRVDDVVVFHPLDIKQVEAILDLQIEELSARLYEQGYSIQIMQAAKKILIEKGLGSQIRRQAFAARPSKRAGRSPVAKNLEG

SEQ ID NO: 94500 - protein, 178 aa, Unknown
  Obtained from environmental sample
  DOMAIN (49)...(81): Ankyrin repeat
  misc_feature (1)..(178): Xaa is any amino acid
ETSNARQSLLDRGIPPTEEALAECVAEGKIDAVSLFLGIGFSPDTKDKHGVPLLCLSARNGHFDILELLLRSGAQVNMVSEDRGSTAILDSAIGRHKDLVEALIKAGADVDIPSKEGQTALIVVVGAGDDAIVEMLVNAGADPDIEDSLGVSARKYAALFRKNSMIALFNAYESKKAS

SEQ ID NO: 94501 - protein, 91 aa, Unknown
  Obtained from environmental sample
  misc_feature (1)..(91): Xaa is any amino acid
IINKIDPTAEGFGPFDVNLFSWTEEERKKIKALPTSLGQACDALDRDRDFLLRGGVFDKAQLEDWTKALRQQYASVKTRPHPYEMSLYYDA

SEQ ID NO: 94502 - protein, 99 aa, Unknown
  Obtained from environmental sample
  misc_feature (1)..(99): Xaa is any amino acid
MGLINRYWRALSLAVAATALYAFNAAAQTPSGPGPLLTDERDGKTYKTAGIGGKAWMSENLNYKADMSWCYDDNESNCKKYGRLYTWEAAMEGCPSGWR

SEQ ID NO: 94503 - protein, 76 aa, Unknown
  Obtained from environmental sample
  misc_feature (1)..(76): Xaa is any amino acid
MVTDLVIGKDVTHIGEWAFYRFFRLKSLTIPGNVESIGFCAFAECDSLTAVTFEDGVKSIRSSAFLGCYHLTSVTI

SEQ ID NO: 94504 - protein, 136 aa, Unknown
  Obtained from environmental sample
  misc_feature (1)..(136): Xaa is any amino acid
MSKTVTETFSTQGIYIVEKAVSLIDGDSFETLARSRDINEPFYEETRLKLLELKNFSGCKYLYTMAPVNGSIWQFVIDGSTEPDDIENFSNIGDEEDTSSYDDAFRRAWTSGKTEHGNLVNQEGWGWLISFYIPII

SEQ ID NO: 94505 - protein, 263 aa, Unknown
  Obtained from environmental sample
  misc_feature (1)..(263): Xaa is any amino acid
MKNFGKLLGIISLVAIIVFAMAACDIISEPASNPNPDPNTNQTPAAGDYNIGNTTQKSGSITAVTITPKSGKSNGAITIYYEGTGGTTYAKSKTLPAAAGKYAVTFDVAAATGWNAATNLYAGTLTITAATDSNPSIKIVKQTGDKDIVYHPVSGDGTIIVEVKDANGSPVTGAASSFTFSVSNYSIDETGVITATETTTSGTYNINVPWFGTEGATLTISFTKDGKTASDTVTLLITKGIKFKLDHETGNIAASEIMGTYSY

SEQ ID NO: 94506 - protein, 95 aa, Unknown
  Obtained from environmental sample
  DOMAIN (8)...(93): Nucleotidyltransferase domain
  misc_feature (1)..(95): Xaa is any amino acid
LQSFDEIKTKVSDTARQYGVKKVYLFGSYARGKPNPGSDIDICIEKGNIRTLFELSGFCQDLEETLGSKVDVVTTVALSGEFKGQIEKDMVLIYE

SEQ ID NO: 94507 - protein, 70 aa, Unknown
  Obtained from environmental sample
  misc_feature (1)..(70): Xaa is any amino acid
MISEYYAVNIDNNQIAQELDKYEKELLFKPCWIEIEKAYKANKKIIEDKCNSTPWIKRETRVLEILNDKI

SEQ ID NO: 94508 - protein, 874 aa, Unknown
  Obtained from environmental sample
  misc_feature (1)..(874): Xaa is any amino acid
ARFGTGATQIVDYSPAAAAANDPVPDRVFPPTPNADYTDWTTWTKNHYSLFILRVFDGPETDYFGDFTIIRVRVSNDDQTKPFAQVYDINPRTEGVDRQSLAVNPTVEQARFVSPMFIGEGTGSNRTKGGLWNDDTKVAANIVKPGHIEPRRITAYNTQQHSLTSAQMGGAATLDEATITKPFADPQGFIGATDLVSGQVVLRGYAEDDQRVQRVTLMIGGQTIHLLDYDNGAGTSGNSETYTSPKTGLLKIATVTNAAPANRVFFSDSIDLYRHRVEWAYIWDTEAIPSTTNVAADNINVRVIAYPRDGATGTTPKTTGSAEITLANGKPHVSTPNLSDSFEKTRPNTSPYNKEFPVGLIKYNSITVNLRPYITGFLRNRTQFSHDTRSRQGRYMFARNETAVVKGFNLGAGTISINGTDLPATGNVGTNGTSIGDFGIATANNNHYRQFTVGTSTITGNGLVVYRFNSRDAVNTGSERAKTTTNAGANPYVPPTARPNYIQPWNIEYSPGIDGSTLWDDFTQVHIWQSNDTAAGSADAGRFASKNNSIIFNPAMSLDPKTGTLYESHNESGGATNDNQQNWYNSGRTRKSSINDASIDPPVGNAATAALANLVTQFCDPIFFSDVYRSPGNGTDATSAGTWAVSSIIGRSSSYQYWRALGGVYINGPGGTGIAFCGGGIGSSDNNPSVQDSTYSSSLYHGESAWYNSSDGNQNTAPGGRLTNSTDQFMNPRIVTSYSGGREHIHVSYYDEKDGSIKYRYNLRGTTGTIDGGNGTNAQAVTANNNIPKMWTNLDGGFDHEDTDETTYTTGGNIAATARVVNYATRNAIPAANRTNAGKHNSIAVTSDGYPVVAYYASDSTGQRLKLAVSNKVD

SEQ ID NO: 94509 - protein, 55 aa, Unknown
  Obtained from environmental sample
  misc_feature (1)..(55): Xaa is any amino acid
MAHDFNLRAPVGANKRKRIVGRGQGSGRGTTSGKGNKGQQARSGGKTYVGLRADR

SEQ ID NO: 94510 - protein, 72 aa, Unknown
  Obtained from environmental sample
  DOMAIN (12)...(72): Ribosomal L18p/L5e family
  misc_feature (1)..(72): Xaa is any amino acid
MTGPYSGFRFPLEKELRGIKATVAGAAQLGELFGKRLLEKNIKTVVFDRNGYLYHGIIKALADGTRKAGIQF

SEQ ID NO: 94511 - protein, 249 aa, Unknown
  Obtained from environmental sample
  misc_feature (1)..(249): Xaa is any amino acid
MDRPKNKPKPKTGGGQRRSAEIWEGEVERLSWGGFGISRLEDGRILLLEAPKAVFPGEAVRASIRHKAKHAEGEIVSWLRPSERRAAPTCRVAGDCGGCDLQEAGESHAELKLLMVEDLFRRQLPGLAFEWMPAPKGALRHRIQLHWDGKSMGFHRRRSHSVVPVQTCPAALPLLSAAIPRLMDAIAARLLPTRPQRWEIATGTPPKEVFAIDDSRRTWLLEPDGWKKTDLPITHAIPGMELAQAPGGF

SEQ ID NO: 94512 - protein, 118 aa, Unknown
  Obtained from environmental sample
  DOMAIN (14)...(115): DHH family
  misc_feature (1)..(118): Xaa is any amino acid
MKNMDKAIDFVLDVREHKKKVWIYGDYDLDGISSSAILAGALEDWGLSANWMLPNRFDGGYGLSAGTLQKLRDAGAEVLILVDTGITAKEEIKAAKEFGMQVLVIDHHRPSGEGCQRQ

SEQ ID NO: 94513 - protein, 257 aa, Unknown
  Obtained from environmental sample
  DOMAIN (61)...(94): Tetratricopeptide repeat
  misc_feature (1)..(257): Xaa is any amino acid
ISLYEQGKYDEMLAAVKEVLAIQSNHPGAYYYGGLGRLKKGEIDKAKINFYKAISHPVYGGAAYYNLGVILGQEGNKVEAVKYLKAALNTRSTDFDRNEAARLIELYSGQKVPASMIEIPDLVKSETPKPDTANIPQISPEKYAPIEIRIDSMLSMMTVDTLTDAGQKLLKAIRAFTAGRYDDALREFKNVLAENPSGPVSAQCLYNAGICYYRLRLYKDAENQFQLFLDRFPSHKFASRALFFKACSYQERSDYAV

SEQ ID NO: 94514 - protein, 450 aa, Unknown
  Obtained from environmental sample
  DOMAIN (26)...(439): EPSP synthase (3-phosphoshikimate 1-carboxyvinyltransferase)
  misc_feature (1)..(450): Xaa is any amino acid
MYHERDKSRRIGKRDPAWSGGANLNIRIVKPVQGGTIGAIASKSAAHRLLICASLADSETFVICQERSQDIDATALCLKSLGSVIRYENGGFFVTPINKTKDLTKERSLNCGESGSTLRFLLPVCGALGMKVKFNMEGRLPARPLTGLYEEMTSHGCTLSEQGRSPLVLGGKLKNGNYSLPGNISSQFISGLLFALPLLEGDSAICVTGNLESRPYVDMTLDALRLFGIIVREEEKPAFAFRVTGTQTYRSPKSVQTEGDWSNAAFWLCAGAIGTGGITCTGLNINSRQGDRAIVELLKKFGARVSVNGGEVTVSPNGLKGIEIDAENTPDLVPVLAAVASTAQGETVIKGAARLRLKESDRLRTVAASLSALGADVKETDDGLVIQGKKKLQGGAVQSFGDHRIAMAAAVLSVACSNPVTIQNAEAVNKSYPAFFDDFHITLGGICEKE

SEQ ID NO: 94515 - protein, 320 aa, Unknown
  Obtained from environmental sample
  DOMAIN (49)...(318): Periplasmic binding proteins and sugar binding domain of the LacI family
  misc_feature (1)..(320): Xaa is any amino acid
MVSYVINGNDRSVAPVTRQKILDAISELEYRPNKFAQALSMGGKSVFADQNIGIVLCDAGIFLRPYYAEILAGIHQAAHEKKFHIRFIRFFDELKDPVLFTQLINSEEICGLLLLALDQCMKTRNDNQLVERIQAQIDQIVCVDCQIMDLSSVSFDRQAAALQAVRYLFSQGFYDIAYLGESDQRVTGFKQAYLEKGENISGLYIDSAADMASGLKAVQKLHKIRGALPRAICAGSDEVAVGILSYLHEQKIAVPGETAIISIDNIEIAEYANPQLTCINVQKRAMGYRAVEMIVNRAAGRGENALTLLLPTNLVIRKSS

SEQ ID NO: 94516 - protein, 162 aa, Unknown
  Obtained from environmental sample
  DOMAIN (1)...(136): Mur ligase middle domain
  misc_feature (1)..(162): Xaa is any amino acid
MVVETGMGGRLDSTNVLDPLLSVITLIELEHTGFLGDTIAKIAAEKAGIVKQSKPLVLAKQSEEAFEIFKKTVKEKNSPLIYFPEALEISNLKISPEGTNFTLCLKSPLFPAPLSLFIPVPGKVQAENAALAVAAVKTAFPAIGEDAIRTGLKYFKIPARFE

SEQ ID NO: 94517 - protein, 398 aa, Unknown
  Obtained from environmental sample
  DOMAIN (77)...(269): ATP-grasp domain
  misc_feature (1)..(398): Xaa is any amino acid
ISKIYAAPGNGGISVDAECVPIKAVDIPKMTEFAVQNKIDYVVVAPDDPLVLGMTDALTAKGIRCFGPDKAAARIEGSKVFSKNLMKKYGIPTAAYETFSAPDKAADYLKQDGLSFPVVIKADGLALGKGVIIAENLEQALGAVDSIMREKKFGDSGSSIVIEEFLTGPEVSVLAFTDGKTVVPMVSSMDHKRAYDGNTGPNTGGMGVIAPNPHYTDEIAAICEKTIFIPSINAMQEEGCPFKGCLYFGLMLTKRGPVVIEYNCRFGDPEAQAVLPLLETSLLEVMEAVTDERLSETKISWKNAHCACVILASGGYPLSYKTGFAITGLCEAEKSGAEVCHAGTEYRQAEGLFVTSGGRVLGVTAVDKTIKTALEKAYKAVDFINFEGIHYRKDIGKY

SEQ ID NO: 94518 - protein, 74 aa, Unknown
  Obtained from environmental sample
  misc_feature (1)..(74): Xaa is any amino acid
MEKRGKDINKLTEVMGMIINEQPLPPERCNHPLHGEWKDTLECHIQGDWVLIYEIDPVASTVIFHRTGSHSDLF

SEQ ID NO: 94519 - protein, 444 aa, Unknown
  Obtained from environmental sample
  DOMAIN (88)...(261): Phosphoribosylglycinamide synthetase, ATP-grasp (A) domain
  misc_feature (1)..(444): Xaa is any amino acid
IRIAKDCGLYTVVVDGSSTAPCVSMADQFEQIDLKDKEGIEALARSLQNNGGLAGIMTAGTDFSATVAWVAEKLGLPGIPYDAALNASDKARMRACFKKAGLPSPEFISITESELQGKPSLPFPLVVKPVDNMGGRGCRRVDNMEEYREAAAEAIHFSRSGRAIVEAFMDGPEFSVDAIVYHDEIIICGLADRHIFFPPYFIEMGHTMPTAIAPEQRDALLEIFCAGVRSLGLAGDKSIGAAKGDIKLTQAGPMIGEIAARLSGGYMSGWTYPYSSGVEPIRAAILAAIGRKPDNLIPLKAWTSAERAFISIPGTVKSISGIDAARNRPFVKDLFFRIAEGDRVDFPRNNVSKCGNILSAAPDRASAVEAAESAARCILIRLDPANPETGEFLAKTGNREQGTGNGERGTGFPPGAYQLGPELKAALAALPDTRIEGERESLQI

SEQ ID NO: 94520 - protein, 452 aa, Unknown
  Obtained from environmental sample
  DOMAIN (18)...(452): RecF/RecN/SMC N terminal domain
  misc_feature (1)..(452): Xaa is any amino acid
DLASVASSGSNIDAAEIGRIAGTLAAGLAEAAADAEKAGTLFQNYREYSPAFIDEFLAPQGIITRKRALDTNIRNVKDSIEERRQRIKNLQSENINLMAKIDEYRATLENMKVNRAQMNIRAQSAEEQARLIRRELSGQEALLKNIRDELTLYRKRLEEIDGRINAIHEEISSIEEKTAAFTAELGKLEKDIRNRNDNVAGKKVVINKRMAELSKVQEALEKIHLELVQSETEIKNILDNFRETHSRDLMEFEERTFTITATTGELRENLARGRQALKDLGAVNLAAPEEFAETKERFDFLSGQLADLSAARADLEKLTTELRTESSALFMAAYDKIKKNFHNIFRRLFGGGRAELRLLDLNHVLESGIEIFAQPPGKKLENINLLSGGERSMTAVALLFATYLVKPSPFCLLDEIDAALDEENVGRFVMLLREFGRKSQFVVITHNKRTML

SEQ ID NO: 94521 - protein, 96 aa, Unknown
  Obtained from environmental sample
  DOMAIN (8)...(96): Nucleotidyltransferase domain
  misc_feature (1)..(96): Xaa is any amino acid
MRITEQEKNAIIDAVTSADPNAKVWLFGSRADDNKKGGDIDIAIFSETIDKDVMQKIRVRRFICDRIGEQKIDIFTTNSGKEAIFRLAIEEGIQLN

SEQ ID NO: 94522 - protein, 253 aa, Unknown
  Obtained from environmental sample
  misc_feature (1)..(253): Xaa is any amino acid
MAVLQILNPILHSIRVKLYPNYFKNGEGAYVARTDNDKTLSVEDVCIALKTRGGFTGSFENLLDYIRQYNDEVAYQLCDGFAVSNGYYTIHPNIGGTFNSTAEIHDHEKHPISFRFSARSKLRSLIKNIEVVVEGMADTGGYIDEYIDQEGDYVNSQFLPDNMFSVHGHKIKIVGDDPSCGLYFVPVLDPSKAVKVTRVGDNNPTKVTGIAPNTGHTKNRIEIRTQYSGSGAILLKTPRTITSSFTLEQLEAV

SEQ ID NO: 94523 - protein, 217 aa, Unknown
  Obtained from environmental sample
  misc_feature (1)..(217): Xaa is any amino acid
MQRKKVFISSVQSEFKIERQIIFDYLTSDALLGKFFEPFIFEHTPARDQSAQKVYLDQVRLCDIYIGLFGEKYGIEDAAGVSPTEKEYNLSAELHKTRLIYIKNTVKRDKKENILIKKIEKDVVRKAFSDSDELKAEVYASLIRYLEEKEIIRLFPFDATFNRAATIKDIDEKKVTNFVERARIKRNFPFDENAHYKTILSHLDLIADERVTNAGIL

SEQ ID NO: 94524 - protein, 56 aa, Unknown
  Obtained from environmental sample
  misc_feature (1)..(56): Xaa is any amino acid
KPKVLPVRDVIRNSLAKVLEIPLDCVFVKGKTAEGLGSAGKGEAVEVLAQCLVEKK

SEQ ID NO: 94525 - protein, 424 aa, Unknown
  Obtained from environmental sample
  DOMAIN (89)...(424): Bacterial extracellular solute-binding proteins, family 5 Middle
  misc_feature (1)..(424): Xaa is any amino acid
MKKSLKKIAFSFVVLLLAACQSAQIQNSKPENGDFAEMRPDNRNMEELTVAFSSQEIELDFRKSYYAGEAQVFTALYEGLFSYHPSSLQPVPAVAERWSLSEDKTQWTFTLRRNARFSNGDFVRAEDFYAAWFSLIDPDKESPYSSFFDVIEGARDYRNGIIKDKEKVGIKAPDQRTLIVKLSSPAAFFLAMLCHHSFSPIHPSMLNKSDWSPYKAGKNWTPPVSNGPYRIVSMDREKIVMQKSDPYWDSNRVALKKINIKFTETAEQATNLWNSGEARWISGDVDLKTLTDRSGIQFNVMFATHYYYIRSSEKPWNDHRIRRAMVLVLPWEEIRKNYLSPAKTLIYPISGYPKLEGISENNYEEAQKLMNEAGYKNGVGTPPIVIRITPSQDAERVAFLMANAWKEKLGLNVRIEVIPVRQYF

SEQ ID NO: 94526 - protein, 229 aa, Unknown
  Obtained from environmental sample
  DOMAIN (1)...(182): Formyl transferase
  misc_feature (1)..(229): Xaa is any amino acid
VRVLFAASPAIAIPALQSLCRTEGIELAGILTNPDSPKGRHGTPVPTEIGEAAAKICLSVPVLKPNKLDASAREQVSSLKSDMLVSFAYGRIFGPKFLALFPLGGINIHPSLLPKYRGPSPVQTAILNRDSETGITVQTLAKEMDSGDILARENLRLTGGETAGSLSEIMAQKAAVILPQVLRDIAAGTTSAQPQDHSKASYCSLITRDDALIDWNKSAVEIEAWSPCF

SEQ ID NO: 94527 - protein, 105 aa, Unknown
  Obtained from environmental sample
  misc_feature (1)..(105): Xaa is any amino acid
NRTGPDYTVFMSEGAVLAEGKGNTEWNYSAPHGSGRKKARTDARSLSLDEYRKEMRGVWSSVICKDTLEESPMAYKKPKDVLDYIAGAVEVKQRLMPLYNFKAVD

SEQ ID NO: 94528 - protein, 448 aa, Unknown
  Obtained from environmental sample
  DOMAIN (333)...(444): Pyridine nucleotide-disulphide oxidoreductase, dimerisation domain
  misc_feature (1)..(448): Xaa is any amino acid
AAERLGHHKKKVLLIEETHLGGTCLNVGCIPTKTLLNSAKLFVHAKEADKFGVKAEGLSYDWSAIQNWKAEVITKLRSGIESQMKRFGVEVINGRGEILNTPSGERSAKVRAISPNGNAEHEGKTILVSTGSVPVLPPIPGAKDNPLLVDSTGLLAIESMPRRLTVIGGGVIGVEFAGLFSALGAEVTVIEMMDEIVPFMDKEQAPMLRRAMKGVDFKLGCKVEKIDGVAVHYTDKKGKAEVKEADLVLMAVGRKPVTDTWGAAAAGIDHSPRGVAVDDRMRTNIPGIWAAGDVTGKSLLAHSAYRMAEVAVADILAGGHADSKTNRMRYNAVPWAVYGLTEAGGVGITEQEAEAKGIAILKSVLPMRVSGRFVAENTLMGHGAVKVIADANDRRILGVHAVGAYASEFIWGGAALIEQEFRTDEVKQLIFPHPTVSELIRDAVWALE

SEQ ID NO: 94529 - protein, 357 aa, Unknown
  Obtained from environmental sample
  DOMAIN (4)...(319): FAD dependent oxidoreductase
  misc_feature (1)..(357): Xaa is any amino acid
MQYDTIIIGGGPAGYLAAERLAHHKKKVLLIEEQHLGGTCLNVGCIPTKTLLNSAKLYVHAKEAEKFGVKAEGLSYDWNAIQSWKAEVITKLRGGIESQMKRFGVEVINGRGEILSAPSGEKLAKVRSVTPNGNAEHEGKTILISTGSVLVLPPIPGAKDNPLLVDSTGLLAVESVPRRLTVIGGGVIGVEFAGLFSALGAEVTVIEMMDEIVPFMDKEQAPLLRRAMKGVDFKLGCKVEKMEGAAVHYTDKKGKAEIKEADLVLMAVGRKPVTDTWGAAAAGIDFSPKGVAVDDRMRTNIPGIWAAGDVTGKSLLAHSAYRMAEVAVAYILAGDHAGGQANRMRYNAVPGRVRLRS

SEQ ID NO: 94530 - protein, 451 aa, Unknown
  Obtained from environmental sample
  DOMAIN (123)...(159): e3 binding domain
  misc_feature (1)..(451): Xaa is any amino acid
MAHTLIMPRQGNTVESCIITNWKVKEGDPVAPETVVCEVETDKAAFEVPAGAAGTVLKLLFTAGDDVPVLKPIAVIGAAGEDWQAAVGNGDQGIGNTPLPTPHSPIIDNPQSPVPTPHSPGFVSPRARNLAGKEALPLDTVPGTGPGGRIIERDVTAALKDKPPLTAAAKAAGSAAIPSIGSGMGGRVTLADLAVSPLPTPQSPLPSEGTITETPIKGIRKVISDRMLKSLSESAQFTINASAPAAKLQEFRIGVKSQGSLAEELGLSKITINDLILFAVARTLPRFPYMNAHKIGETIKTFERVHLAFAVDSPRGLMVPVIRNANLLSLARISSEAKRLATACQNGTVNPDELSGSTFSVSNLGSFGVTSFTPVLNMPEVAVLGVCGIELKPVAVSAGDSNAGNCAVRFEPHIGFSLTINHQVVDGAPAARFLKGLCEAVAHIDLLLAAG

SEQ ID NO: 94531 - protein, 153 aa, Unknown
  Obtained from environmental sample
  misc_feature (1)..(153): Xaa is any amino acid
KETPLPSIDAVSGEGSSIKEKFHKVLDRMKITKQERDELLARIERGLVLNEAQLESTSVRYEKLEARGLDYTGKTTIAKQAIETGSLLDITWPGRDGEPNSTIGIPQSIEKKEGENILVLRTSGNSESAARVLKIPIGKISLLRRIKQSIFGE

SEQ ID NO: 94532 - protein, 335 aa, Unknown
  Obtained from environmental sample
  DOMAIN (3)...(85): MGS-like domain
  misc_feature (1)..(335): Xaa is any amino acid
LPKNSEKLGFSFYATKGTARFLESKGFKVESVHKIYECADNNTSTLLDSGKINYIVSTSEKGRDPASDDVKIRRKACAKGIPCLTSIDTANALADSLLSGYNEINTELVDINNLRSERMKLEFTKMQGCGNDYIYINCFDLNINSPESLSVLLSDRHYGIGGDGVVLIMRSDVADAKMRMFNLDGSEGKMCGNAIRCVAKYLYDNNIIRKLQMSIETLSGIKKLYLITQNGFVSSVKVDMGHAVLEPEKIPVKFSGENAVAKQVTIGGEAYTITCVSMGNPHAVVFCEDVENLRVSEIGPLFEKDPLFPDRVNTEFVEVMDRNHLKMRVWERGSG

SEQ ID NO: 94533 - protein, 141 aa, Unknown
  Obtained from environmental sample
  misc_feature (1)..(141): Xaa is any amino acid
METLPFLEDIYPPNLLYAVTIRSPVAKGKLINVDVPLLPDDYTFITAKDIPGKNRLENTNIPILAEENLNYIGEPIGILLGPDKTKLEEFSSRCIVLDDEENAIFSYGNENTLVIKREINTGNTFELLNETGRIVTSSYKT

SEQ ID NO: 94534 - protein, 93 aa, Unknown
  Obtained from environmental sample
  DOMAIN (6)...(93): tRNA pseudouridine synthase
  misc_feature (1)..(93): Xaa is any amino acid
MTRIKLTVAYVGAKYCGWQMQAAAHNGSRGELPSVQGAVMRAVERVLGVRVHVHGAGRTDSGVHADAQVAHLDVPDDKAGVDGNVPSIRCCPM

SEQ ID NO: 94535 - protein, 120 aa, Unknown
  Obtained from environmental sample
  misc_feature (1)..(120): Xaa is any amino acid
AKYIKLRDAIKTTGDVFYCECVTCGEILPIEDMDAGHGIPGRMNSILFNEDLVHAQCRQCNRGGGGELQMFKKVLIDMYGQEKWDYWQSTKNDPVKYTDFDYEQITKMYRQKYKQLGSNL

SEQ ID NO: 94536 - protein, 172 aa, Unknown
  Obtained from environmental sample
  DOMAIN (11)...(169): AIR carboxylase
  misc_feature (1)..(172): Xaa is any amino acid
MPTTQAQAVAPLVGIIMGSASDWDTMRAAAEVLAEFSVPYEAEVVSAHRTPDKLFRYAESAHTRGIEVIIAGAGGAAHLPGMTASKTSLPVIGVPVQSKALNGMDSLLSIVQMPAGVPVAAMSIGRAGAVNAGLMAAAILGNKYPKIKEALDGYRKSQTEKVLDNPDPRSVG

SEQ ID NO: 94537 - protein, 102 aa, Unknown
  Obtained from environmental sample
  misc_feature (1)..(102): Xaa is any amino acid
MAVSYKDLGLVNTKDMFAKAFKGGYAIPAYNFNNMEQIQAIVTACGKSKSPVIMHVSSGARKYADATLLRYMGQGAVAMAREQGFNIPIALHLDHRDTFELC

SEQ ID NO: 94538 - protein, 183 aa, Unknown
  Obtained from environmental sample
  misc_feature (1)..(183): Xaa is any amino acid
MKKNLNIKTADSWCYGEGGQVIVGYDNDQPIFGGHEPILRTLSSSEIQANCNKYGRLYTWEAAKKACPSGWRLPTRDDWGALAEATGGTGGYDAPGTAGKALKSKSGWNNNGNGTDDFGFSALPGGRRYPDSTFYHAGDEGDWWTATEYSKESAYYWGMGYDNDYVGEGGGSKSRGFSVRCVQ

SEQ ID NO: 94539 - protein, 313 aa, Unknown
  Obtained from environmental sample
  DOMAIN (2)...(313): Glycosyl hydrolase family 1
  misc_feature (1)..(313): Xaa is any amino acid
MPFPKDFIWGAATAAYQVEGAAFEDGKGLGIWDVFCRRPNAIWQGHTGETACDHYHRYLEDVGIMKDLGVNAYRMEIAWPRVIPEGTGAVNPKGLDFYDRLIDALLAASIDPWVTLYHWNLPQTLQQRGGWMNPESPKWFGDYAAVVVDKFSDRVTRWMTINEPQVIINHGMFTGVHAPGYKLTMAEALAAGHNLLLAHGHAVSVIRDKAEKPASVGFAPVGWLRRPASDDPRDIDAARTASFEVDPANLWNSAWWLDPVYLGRYPQQGLEAYGKDAPKFTDEDMSTISQELDFFGVNIYTGAAVKPARTGGL

SEQ ID NO: 94540 - protein, 341 aa, Unknown
  Obtained from environmental sample
  DOMAIN (4)...(196): Electron transfer flavoprotein domain
  misc_feature (1)..(341): Xaa is any amino acid
MKGGVWTLAEQHEGKLKAVSFELLSRGRSLADKLGVNLCSVLIGPALEEETLKELIYHGGDKVIAVEDDALRYFDSVSHSAVFETLIRAYAPEIILAAATSTGRTLMPYTAVKVHAGLTADCTGLDIEEGTGCLLQTRPAIGGNIMATIKTPEHRPQMATVRPRSSRPLERDAKRNGKIIRFSLGDTLPDGGRFPVLKEGRTRVTGYRRDETGFANLEEAELIIAGGRGLKKGENFAIVRELARSLGGEVGASRDAVDRGWISYPHQVGLSGKTVSPKVYIGVGISGAIQHLAGIKTSETIVSINIDPDANLHKLADLAIVGDAFEVLGELQKRVKKAGND

SEQ ID NO: 94541 - protein, 307 aa, Unknown
  Obtained from environmental sample
  DOMAIN (13)...(221): Glycosyl transferase family 4
  misc_feature (1)..(307): Xaa is any amino acid
VVSCITAIFNGYVVAALVILVLYSAVGATDDITKIRMKKLVDSGKKTKKDYEEKADGMGTTIRLVLYFLFSFAIAISCYKLVPDLTSELYVPFVKFQIWHPHLPNWMFILFITFVVAASANGTNFTDGIDSLVSVPLITGMFFVGVVAYVSGNAIFSDYLHIPYLKGCDELFPIAMASVGALLAYLWYNSPPAEIYMGDAGSIGFGALLGIMFILVQAALFLPIVGVIILAEAASVVMQIGHFKLNKKIRGWDYADKHRLFLRAPLHHHFQLKWKGRFGDSKPLVNAKIAWRMHLISFFALIFGFIV

SEQ ID NO: 94542 - protein, 276 aa, Unknown
  Obtained from environmental sample
  DOMAIN (43)...(77): Putative Fe-S cluster
  misc_feature (1)..(276): Xaa is any amino acid
MIIVLITAVFALAIAFVLGTSLGFFRDFFAVPQDPLTASIREALPGANCGACGFPGCENYAIAIASGNAGISSCSVGGPALVEKLAQITGKAGEAVKSTVAVLACQGSYLHTPQKGIYTGIKNCRGAKIATGGTKFCSFGCLGFGDCVKVCKFGAIGMDIKKGLPVIDIAKCTGCGMCITECPQSIIKSVARDQKGAMVLCSNRSLNRQQVAKSCKISCIKCGQCVKQCPQQCIELGTNIPVVDLAKCTSCGICVEKCPTKVMKIIEKQLAMSNEQ

SEQ ID NO: 94543 - protein, 405 aa, Unknown
  Obtained from environmental sample
  DOMAIN (177)...(401): Putative RNA methylase family UPF0020
  misc_feature (1)..(405): Xaa is any amino acid
NMLYCKCGKQENTQSIYNAIALCAVGTEKAVSNELKKLGLGLVESAYGKVRFKADITGLYRSLMGLRAADRVLLEAGCFHAVDFDALFEKTQAVPWEKLVPAQSGLKIVKVRSGGSRLKAETSIQSITHKAAAKRLCTHSGLSRLPDSERAAEVRVYVEKDTVSLLLDLSGEPLFKRGYRKDGGIAPLRETTAAAMLLLSGWKRKYPLYDPFCGSGTILAEALMYAWDMAPGLARANSSPGFAIDRLLIADGKIEETIRAEFRARINFERLIRLAGSDGDPECSALALSNLKKVHALAGNNCPQLPLVTTTPMNMARSPFEAEDEDEPRGFIITNPPYGKRLGDIEASLAIYREMAVLAENFPGWKLAVISDHPGFESFFGRKADSCREITGGAVPAYFYQYEKL

SEQ ID NO: 94544 - protein, 78 aa, Unknown
  Obtained from environmental sample
  misc_feature (1)..(78): Xaa is any amino acid
MDINAFVEPEKFKKTTGDILRDLRASAKAPGHSRIFTAGEKEYHAWLDRQDTGVPLNDSLIKTLNSLIDEYKLDNYKF

SEQ ID NO: 94545 - protein, 288 aa, Unknown
  Obtained from environmental sample
  misc_feature (1)..(288): Xaa is any amino acid
VALLGCPCWWQCSGLDADIPIGETIQVLHSESQEPQENWLSIAKTQKAQNSIRQWLRKTITTQSEALGEKIWRRELQGLKISKENHPKESDICHAFKVQNISSFYESLGKSEIPLKNVFNFLKRYSDDSYAWQKLKMFNVFSSAEAPISIGYNERFLLNYASCCNPLPGDNVRGIMKSGKGIEIHKENCKILNKFPQEQQISLQWEHHNHAKPAFKCVFRVEAAGKMQMGDIFSAVSKHHALVKKTIFENKEGQLRGKIDLLAFNSAQVKNIEQSLKAIAGIQRIQLL

SEQ ID NO: 94546 - protein, 333 aa, Unknown
  Obtained from environmental sample
  misc_feature (1)..(333): Xaa is any amino acid
RSAYNIETGLPVVEDDNPEGLGLPLFAWAEFNLYHKSGNKKRVKDVIPILHKYNEWIDSVFKQSNGLYRVPLSATGMPNAPREKAAYPLDFNSIMAINVLYLSAMTDILNEKESSFQYKKQYFALKTRINALMWDNEDGFYHDIDRSEKRLPVKTLAGYWPLLAEIPNDDKAERIISRLSDPKYFGAPHPFPCVAINEKTFDENGNGYRGSVFPHLTFMVIKGLERYQRWDLSRDSAIRHLYFVLDSMSTDGNHHKDRLWEAYLPMKEGPAQWPGRTDFPRPQYLTYAALSTICLTIENIIGLLISLPRKTVDWIIPNLEIMGIENLSLKKNM

SEQ ID NO: 94547 - protein, 353 aa, Unknown
  Obtained from environmental sample
  DOMAIN (195)...(315): HD domain
  misc_feature (1)..(353): Xaa is any amino acid
MILKIGGGSTEIMLLRRGQMVAAHSLRLGTLLIDHAAKIGTPQGQERYISEHIRNTSGFLSSELDLAHVRTFVIAGFDASIAADHVGKELNENCWIIERDAFAEFVKKVQNYTDEECMEQLQLPFWEAKTFIPGITINKLLLDRTGSAQVIVPKISIREGLLIDLAQGVDPALQEDFFSQIFASAVNLGRKYHIDESHCRHVASLCMSLFDALIREHGMNRRERMLLEIAAMVHDIGMYIKAAAHHLHGQYIIANSEIFGLRREELDIIGNVIRYHRGVPPSSTDIEYIALQREERILVLKMVSILRVADALDRGHSQQVKLKAIEKEGEILALNIDPVLDLSMELMGLEEKS

SEQ ID NO: 94548 - protein, 223 aa, Unknown
  Obtained from environmental sample
  misc_feature (1)..(223): Xaa is any amino acid
MCFIACKDKDNTDNQDTDTMGQDDFIAYFVETPPVIDGDGSDAAWEKAEWRDIKYAWMYQSPRSLPTGAKIDSKGAITKTDDFSGRFKVVWTADRLYILAEIIDDIKYCPITDSKQSPEKNDCLELFIDENASGGTRTSDGGNNFFTYHMNFDGTNVVDYTGQNVLRNSHLKYKINETAAPLYIWEIEMKVFNSSYPLNSTPAVDPANTLVKLTAGKKMGFAV

SEQ ID NO: 94549 - protein, 433 aa, Unknown
  Obtained from environmental sample
  DOMAIN (178)...(432): Domain of unknown function (DUF323)
  misc_feature (1)..(433): Xaa is any amino acid
AYSFFFYAGHGVQSAGMNYLIPIGANIPTENSLRERAFPVQWLMDELNETESLLNIVVLDACRDNQFSWKRGGTRGMAVVGEPPVESIIVYATAANSTASDGDTGRNGLFTTHLLNNLKAPGLEVTEVFRRTMGDVIRASGGQQRPAVYNQFSGLAYLGSQSTPNTPVQPVSPPVQPTPNNMVRIEGGTFQMGRDNLGLISGDSDEKPVHTVTLSGFYMGKYEVTQAEWQEAMGTNPSHFKGDSLPVESVSWFEAVEYCNRLSLREGLAPAYVVNGTEVEWNRRANGYRLPTEAEWEYACRAGTATPFNTGNNIATGQANYDGNYPYNSVRGLLFFFPRKWLCRERTTPVGSFAPNAWGLYDMHGNVWEWCWDWSGSYASGAQTDPAGPPSGLNRIRRGGGWGSVAEIVRSAYRTAYAPSGRDSALGFRLARS

SEQ ID NO: 94550 - protein, 495 aa, Unknown
  Obtained from environmental sample
  misc_feature (1)..(495): Xaa is any amino acid
ETDELAVKEQEPVDLATAATEKSVDVSTDVSAEKPADEPTDMSAEKSTEEPLNEKIAQVDSDKDLIADAASSSNKTETAVAQESATKMPSSQPQTQPSQTQSQTQQQSQSSQSQTQPSQAQAQQQQQQQQAQTQPPDQRQQTTTPQSNQPAQSSQAQTQPTTDEKTDSSETASSDDDSQDKKEPPPSITSGNSAPATRIESLTQMGTMPYDKEIIFSRIVRATVGQIVEIPFRGNGWVYLGELTSQRGIVYSSRRNDSDGQSFVFTLEEAGTYTLKFYRQDFIRDYIINDHVQVVVGEAPSAGVGWFKPPAERDRVVAQPRWPSLVEETQIRSGTRPASEPVVTTAVEEPAKDTASQQKAASDQETRAPQRTVPTRETNPADRTPSQNTQSSSIASGQTPTATQTVQSGQTVQQGQTASTAPTTQPTQSAAVTTAEQLDNDSTQKREKLAPEVLLRKAKESSDGGNIAAAIALLEQFMTDYPGGSDEVFWQLGQY

SEQ ID NO: 94551 - protein, 634 aa, Unknown
  Obtained from environmental sample
  misc_feature (1)..(634): Xaa is any amino acid
MNLYAQEAAAPEEGPPAVEIRVLTPEQNRIDMDIKTSTLSELAAWCRSLGLSEGGTSSDLAWRLRDYFKISGATPQGGEVVEDKRKIITIESARSTDYFKVEAINEDYARLSGEVKISLKDGEAIHRIRAWNILFNRTRNILTASGGVEYIKTEGDKIETFRGDSITVDIDNWSSVFLGGVSERSLQSDNTTYLFAGTVISRDEEEVTVLNRATISSANNPESLWSLNASRVWLLPGSDFAILNAVLKVGEIPVMYIPFFYFPADEVIFHPVIGSRTREGHFIQTTTYILGRPKASSASQSSLTKILGNSSDMEKKREGLFLRSTGKKMKDPDKVSLKAMFDHYVNLGTYIGADLTLPAYKLLGVTDISVGIGLTRTLVMHDNSYTPYFPDFNGETDWNRSNFLSMDVPFRFRFKGSGAISGQYGSLTWLLPYYSDPFVDSDFLKRAEEMDWINMIQQGASSLQAQDTSENQQSHDPWQLTGTLNPKFPDMAPYINNISIGSISSTIAFREVNARGIYSTNEIKYYAPSSYFFAPDTATLYQVSASVSGVPLSFGGTASRSSPSTGAAEIEDPLKGIGIPRSPFESRIEEEARKKDTTDKLVPPALTQRFDLPRLGTNNFSIDYQISPQSTSTL

SEQ ID NO: 94552 - protein, 203 aa, Unknown
  Obtained from environmental sample
  misc_feature (1)..(203): Xaa is any amino acid
MAANTRWYTDHTADTTFTVSTADELAGLADIVNGDARGVERHDFKGKTVKLAADIDLSDYAGDSGWSPIGNKYVDIGDGIDDRVFAGTFDGGGHTIRNLTVNRPDHDGHYKGLFGHIRGGVVKNLGLVGANVKGANFVGCVAGYVSDGGSVVKSYSAGEVVGQKAVGGIAGFVDGGKVDNCYSAASVGGENEIGGVVGSVRSG

SEQ ID NO: 94553 - protein, 224 aa, Unknown
  Obtained from environmental sample
  misc_feature (1)..(224): Xaa is any amino acid
MDDTAVSGAANDIGIDRRGFMKLLGAGAALAAVGGCGGGARSTVGREVPTGKMTYRRNPQNGDLLSILAYGMMRLPRVPRARKESLPDVNDLDQDAVNELVDYAVAHGVNYFDTSPVYCKGFSERATGIALSRHPRDKYFIATKMSNQRARSREESLAIYRKSFEELRVDYIDYYLLHSVGSRDNFKERYLDNGMLDFLVKEREAGRIRSLGWSFHGEGDLFEY

SEQ ID NO: 94554 - protein, 214 aa, Unknown
  Obtained from environmental sample
  DOMAIN (39)...(107): Sigma-70 region 2
  misc_feature (1)..(214): Xaa is any amino acid
LFNIEEEPLENDANPVRIDVPRGEGKVMSWNSTVEFQRLYDSAFNILLRVAFRITNNWEAAEDICQESFFRLYEKNMVFPSQEEAKYWLIRVVKNAALNYAKRKERERKAYQRAFREDHRQEETGEGLLVKKETSEEVKSALEKLPDNLRMVLILKEYAEMNYKEIGKTLGISEGNVKVRVFRARERLESLLAASLLADTLQTNNDLQGGKNVS

SEQ ID NO: 94555 - protein, 505 aa, Unknown
  Obtained from environmental sample
  DOMAIN (205)...(388): Trypsin
  misc_feature (1)..(505): Xaa is any amino acid
ICSLSCISLKTQEEKLSPPRSTDAIRLDDIKKYVPLEPVRAIDLIGIYRETYRVTDEEEIAAELMEMEKAATQGVKDLLDKAIEEKRWDDAASYSRSLACIEPQYQDTESGYILAFAKKKLEENDNLSAFLAAVHAHELNPLSFDDAALFLERAVQAKQRRAAAYFLAAAQKTGSVAKIPAPSAEYARGSDSVAAMINGVATVVVDRGIKIERGMGYADRILGSAFFIDSTGLLITNYHVIASEVDPKYEGYSRMYIRMGDSSSPRMPARVIGYDKALDLALIKTEYKSEFVFSIVDRVIPQVGDTVLAIGSPGGLEKTVTSGIVSSLSRRFLQIGDVYQIDAAVNPGNSGGPVVDSSGRLVGIVFAGAEQFQGLNFAVPAQRLAAALPAMIKGGKAQRPWLGITLSESSGSAEIIYTAPNTPASRHRVTESGKIVTLNGQKITAPQSMLIPAMQDAIFQSRPGELVALETQDSNGAVKKHLVMSVPRPELPLVTRQNWIAVSGL

SEQ ID NO: 94556 - protein, 307 aa, Unknown
  Obtained from environmental sample
  DOMAIN (97)...(186): Cyclic nucleotide-binding domain
  misc_feature (1)..(307): Xaa is any amino acid
NTQVALTIILRFSKRLMSLNETLARLTLKNTADTGPSHLYDVAEYYLSQKQYKLATYAYGQYIKHCPDGEKAAAANEKYSKLSSRIRLEKFTANDVNRNYRKDTMLFAEGEPGDELFIIQKGSIKITKIVDNKEVLLAMLKPGDILGEMALLEGKPRAASAVAFDDCDVMAVNKTNFELMIKNQPQLIAKITTLLADRLWLIYKQLANTMIENPMGRMYDTLLIQLEKNRIPLDGKSSYTFTFGLPELINMVGLPGKKGNAVFSEMMENKELQIIGNKIRTTSTEEILKQAESFRKMDKIEKARTNS

SEQ ID NO: 94557 - protein, 284 aa, Unknown
  Obtained from environmental sample
  DOMAIN (65)...(255): ABC transporter
  misc_feature (1)..(284): Xaa is any amino acid
YACRPFKTLVAAERIREILASEPETDPPDALMPDLKGEICFNNVTFNYEDKEPILKNISFTLKPGESMAILGATGSGKSTLVHLLSRLYDLNENSSHNAGIITINGIDIRRVARPWLRRHIGLCLQEAFLFSKTIKENIAITKPEMDIEEIKKAAAIAMIDETIEGFAEGYNTVIGERGVTLSGGQKQRLIISRMLAGNTPVIIFDDSLSAVDIETDAKIRAALRNRVKDAAVIIISHRISSLMQADKILVLKNQMVEDIGSHEELLQRGGSYRRIFDLQAANE

SEQ ID NO: 94558 - protein, 184 aa, Unknown
  Obtained from environmental sample
  DOMAIN (15)...(184): Homocysteine S-methyltransferase
  misc_feature (1)..(184): Xaa is any amino acid
MSVREKLNAIAAERILVLDGAMGSMIQNLKLSEDDFRGERFIDHKTPLAGCNDLLCLTRPQAISDIHKAYLEAGADIIETCSFNSTAVSLEDYGIGDLAYEISAAAARIARKAADAFSTADKPRFVAGSMGPTGKSAGLSPDVNDPARRNIYWDELEAAYYDNARGLLDGGADIFMLETIFDSL

SEQ ID NO: 94559 - protein, 91 aa, Unknown
  Obtained from environmental sample
  misc_feature (1)..(91): Xaa is any amino acid
MRVAHPEHGQGVAIEEERNGYVLVAFGALERSVPVASLSRKLSRAEQVLGSVGGGRERIARAWLCHEAYSLPLLDSAAALTSAKIDLLPHQ

SEQ ID NO: 94560 - protein, 164 aa, Unknown
  Obtained from environmental sample
  misc_feature (1)..(164): Xaa is any amino acid
MEGYNETQTCLCSPEEISRYWRKFGGALLDRIEIRAPVIPPSVDEIGKPSGNEERSADIAMRVRAAVELQQLRYKGMGIRRNALIPAGKIENFCNMDQQARDAFHKALARLGLSGRAYHGILRVARTIADLDGKETIGMEHILEAVQHRRYGEDPYEIITIGNK

SEQ ID NO: 94561 - protein, 748 aa, Unknown
  Obtained from environmental sample
  DOMAIN (393)...(537): Homoserine dehydrogenase, NAD binding domain
  misc_feature (1)..(748): Xaa is any amino acid
LKAAELKNAVKVIEENITLLAQTLDGITLLGELSLRSKDLVMSFGERLSANLIASIFTANGIKALFLDARELVKTNANFGRAEVLKKETEDNIKAYFRKAKKTLQIVTGFIGSTADGYTTTVGRDGSDLSAAVFAAALGAKKLEIWTDVDGMLTADPEQVKNAFLIDEISYNEAMEISHFGARVIFPPSVKPALEKNIPIFVRNTFNPKCGGTKITANAAPGKFPIRGISSINQTALVRIQGTGMVGVAGFSARVFGALARKGISVMLITQSSSEYSICFAVLPEDAQKAESSLKEEFAHEIRNRSLENPIIEKDLSIIAVVGSAMKSTSGISGKFFHALGRNGINIIAIAQGSSETNISAVISASDEGKALNAIHDAFFFANQRSVNLFLIGTGLIGGTLLDQIAENREKLADNMIKINLIGAANYDKMLFSLDGLDPKETKKMLTTAGKVQGTQSIEPNQKGANAFIEKMASFNLPNSCFCDCTASEDIAALYEKILHYSIPIVTPNKKANSGSYDYYKRLTTYSRERGIPYLYECTVAAGLPVISTLRDLFLAGDKVIKIEAVLSGTLSFIFNSFDGSKPFSSLVREAKEKGYTEPDPRDDLNAMDAARKVLILARECGLNLEFKNVKIDPILPKACFSARNIDAFFKELKKADADFEKRRAQAAAESKQLRYVAVIEEGKAKLSFRAEEEGSPFRSLVDSDNIVVITTNRYSKLPMVIKGPGAGAQVTATGVFADILRTARTLV

SEQ ID NO: 94562 - protein, 396 aa, Unknown
  Obtained from environmental sample
  DOMAIN (2)...(175): Homocysteine S-methyltransferase
  misc_feature (1)..(396): Xaa is any amino acid
GQPLGELEPLDLVEAFRAQIRGLVQGGVDCIFIETQFDLAEARAAVVAARMECDLPVLVSMTFERGVSLTGSDPEIFAQTMLNLGVDALGTNCGAGPEQLRPVAEELLACARIPVLAEPNAGLPELVNGATVFRLPPEAFAEQTAAFAAAGIQLLGGCCGTTPEHIAALRRKLDGVQRRRPEAAITHGVTLTTRARLVPVGGEAPLVIIGERINPTGKKVLSEQLQAGEFAQALLYADEQAQAGAHVLDVNVGAPLVKEEDILPALVQRLTARHDIPLSLDSSHAQAIARALPYCPGSPLVNSVSGEAGRMEELGPLCRDWGAPFILLPLRGKKLPVMAAERIAILEGLLLQAEELGIPRRLLLVDVLALAVSAKAEAGRQCLETVRWCAGKVADA

SEQ ID NO: 94563 - protein, 471 aa, Unknown
  Obtained from environmental sample
  DOMAIN (1)...(383): Glycosyl hydrolase family 9
  misc_feature (1)..(471): Xaa is any amino acid
IYSEQRCDRGAYAQSVGASRATLLKNVKLIAVQNESNIPAYLSEVKWNLDWVASMQLDDGKVSHKMSTRNFCDFIMPEEETAVRYFVPWGTAATASFVAMLAQASRVYAPYDAQLAAKWLAQAKISYDVLDASSFVSADQSAFSTGTYSNRDDADQRLWAAAEMWETTGEDKYLKDFEKRAIANVAAHLGWGDVNVLAALTYLSSDKSGRRQSRVDSLRANLITQANSIANNTTSHGYGRAFGNASSSYYWGAHGALTANTYLLNVAYKITGDKKYREAGHEIVGHIFGRNYFGRSFVTGVGYYPPVDPHDRRSIASKTPWPGYLIGGPHSGNLKETNGAPIAPPGATCASAAVCYFDYYEDYARNEIAINWNGSMIYALSGYVSTLGNPSGTLPERGVKTTATAPKFKTTRLIQVRNGKTVSIIPPGAKIYGLNGKLVTQRKAGDASVPVIGRNGVFIMKVDASKTDASR

SEQ ID NO: 94564 - protein, 95 aa, Unknown
  Obtained from environmental sample
  misc_feature (1)..(95): Xaa is any amino acid
MFVGRRGWFLSYKIVYTKQAAKDAEKIKASNLYEKAKSYIKMIKNNPYQTPPFYILSAKYGLLEENDVIEDYNETLNTKSAPEIKEWSVKVLTSL

SEQ ID NO: 94565 - protein, 82 aa, Unknown
  Obtained from environmental sample
  DOMAIN (1)...(73): Phd_YefM
  misc_feature (1)..(82): Xaa is any amino acid
MTTINALAYKGNFLEVFENAAMYGDPVNVWTEKGNAVIISEEEYSDIMETLHITSIPKLKEKIIEGLKTPLSECLSEEEVGF

SEQ ID NO: 94566 - protein, 282 aa, Unknown
  Obtained from environmental sample
  misc_feature (1)..(282): Xaa is any amino acid
AGQKAASKGIITCRKNGLGCFLVRQDAGGDQKDPADILQKFGEDHLKLSMNSVIIDLDYLIAKAKALFDVTTPKGKAQALALLYPYLDALESKTERDACVQALADELRADRGAVDNDYERWRRSGGGASANSALKSGAKDADSKEVSNTGRPIQMNDELFLLIVVSVNMELYPEFRASIEMKEIEDPCAKEMFVALEECFINEESGTNAFLARINSSHLRNFIIERGMSPEFRANEKRDPKKLMEDGIKRVKEKKLRRRLSEINMELRIIERNTGDAGNDLS

SEQ ID NO: 94567 - protein, 832 aa, Unknown
  Obtained from environmental sample
  DOMAIN (386)...(478): Helicase associated domain (HA2)
  misc_feature (1)..(832): Xaa is any amino acid
SDRFRKETQLPVILYEAGYTKNGIIGVTQPRRIAAVSVSEFIARQTGTTMPGLIGYKMRFADQTNHETKIKIMTDGMLLQEMKIDPWLSKYGVLIVDEAHERSLNIDFILGLLKRVLESRRDFKVIISSATINAEIFSEYFNNCPIVKIEAQRFPVTLIYDPVLTGEPEEREERNRDKTGYNRQINNKDEAILLKIETITTRFISEKREGDILIFLSGEKMIKDCISRLAFSSVGKYLHLVPLYGRLGKEEQEKVFEDPPKGKTKVVISTNIAETSVTIDGITAVIDSGLAKLNWYNPKTFTSSLIESPISIASANQRKGRAGRTREGTCYRLYTRKDFEQRPLYTTEEIFRTDLSEVILRMADLGITDFENFDFIAAPEKEGLLGGVETLNLLDALEKDRTLSNIGKLMTEFPLAPRQSRIIVEAILKYPDMIKETLIAAAFLSTQSPYILPPGEETDARQAHHRFRDDHGDFVSYLKLYKSYNDSTNKLNFCEKSYLDERAMAEIVNVTAQLEEIISKMKIPVHQRAQPLSASEIDDYLCCIGRGMIQFVCIRERGHGESRTHEARGKIGSYRSLTADKIIIHPGSVMFRMDPQFIVAGEIVRTSKMYAMSVSPLSKDVLNRIRPGLFSGDADGKFADRPEKQKKTRDFTNNIKISGEVFEIANVKGKKTVILPWEKLELIKNNLSGERIHKSIKGKITVKNQYYLLAGEKLSLILSLAPVLDVDGAFSRKLPHKENFNSHEKLSALINHLDDLAKPIIWKKNSKELGFLGLFTDGDGNYWFRASRGFYTCLNESLSSLESLIDELGEEVALEQKHVVNQCYRRLSDYLG

SEQ ID NO: 94568 - protein, 261 aa, Unknown
  Obtained from environmental sample
  misc_feature (1)..(261): Xaa is any amino acid
VEADRWVGEKVVYVERDSILPAKPEYEFLRKRCFSEKWNGHVIKGMKMAGLVSYGLVLTASHDWAMMPDGYDMTDVLGIRKKEDDVPDLPERLPRSRMEKAIDWIRWKLGLKKRKKVGVADGWLSFAHKTDETRIENLSYLFGDEFRGTPVYATVKMDGQSATFAAYKGYFYMASRNVILYREKIGKAAKELNPKKEKPNMDAFRKVASRYDIPAWLSKIKDSDTCGVVVQGELCGPGIQKNPMGLPRCRSVRLQRMLPEK

SEQ ID NO: 94569 - protein, 131 aa, Unknown
  Obtained from environmental sample
  misc_feature (1)..(131): Xaa is any amino acid
LTERHIISEVPTSNKQILNEYLILKEQYDLLVYKRFARSAEQLLADEKQQLLFAEEAEQPETNEEKPLGLQTVKSFTRNKGGRKPISANLERRPRVIDIPEDEKTCACGAVLTKMAKKPAKSWLYCPRRFM

SEQ ID NO: 94570 - protein, 74 aa, Unknown
  Obtained from environmental sample
  misc_feature (1)..(74): Xaa is any amino acid
LRGGFNQNGEETSEKLVILPPQIYVDQIVRPKYAYRQCEGTEEEDKPAVRIAPVEPAIIPKSIASPSLLATVFG

SEQ ID NO: 94571 - protein, 454 aa, Unknown
  Obtained from environmental sample
  misc_feature (1)..(454): Xaa is any amino acid
IVSDFGLNDGIESGLVKTPRMAVRDDNTPDAKTFRSKLNHIYADETVRDNINQPAESTVPLPDLVIQAYNLLGSDWLETYKAWKENGTDVPPVMITVTNRTETSSRIEYAFKSQKIFIKELCDPEYLRRIDSKIMEQAEAENISVDDISTGDDDDTEGKRKLTKKQEAALLRDTINTVGQKGELGEQIRNLISVGMLTEGWDAKTVTHIMGLRAFSSQLLCEQVVGRGLRRTSYEIEEGGLYKPEYVNIFGIPFSFLPHEGGGDGGDPPPPKYIIKVNEKAAQYEITWPNIIRIDHEPAPRLHVDLSKIEPLTLDASQTRLSAEVAPFLDGNPDLTKCEPIKLISLEKQLRMQEIIFRTSAQVYERIPTNWKDKGTPYALLGQVFRWVERYLESGKIILEPALFMQDDPLKRKLLYMLNMNKIVEHLWKSIECQMTNRILPSLIPTAKSALQAI

SEQ ID NO: 94572 - protein, 433 aa, Unknown
  Obtained from environmental sample
  DOMAIN (55)...(430): Beta-eliminating lyase
  misc_feature (1)..(433): Xaa is any amino acid
MDRIKFFSGENIPLEMHKVRMVQKVNLLPVEDRLRCVKEAGFNTFLLKNRDVFLDMLTDSGVNAMSENQYAAMMQADDSYAGSETFFRLEKVLSDMFGMKYFLPAHQGRACEHIISKAFVKPKSTALMNYHFTTTKSHITLMGGIVEELIGEQGLKIKSSEPFKGDIDINKLNDAIKRLGKENICFARIEAGTNLVGGQPVSMRNLREVSKICRKEGIMLVYDASLMADNLYFIKTREPEFKDTSLNDITREIASLSDIIYFSARKLGAARGGGILTSDENLYLKMRELVPLFEGFLTYGGMSVREMEAMAVGLRETLDIDVISQTPIFVEALCGELEAKGVPVVTPPGGLGCHIDAKQFCSHVPQTQYPSGALAAALFIAGGVRGMERGTLSEQRNADGSERLAEMELVRLAVPKRVFTLSQVKYTADRAAC

SEQ ID NO: 94573 - protein, 268 aa, Unknown
  Obtained from environmental sample
  DOMAIN (60)...(213): ExsB
  misc_feature (1)..(268): Xaa is any amino acid
AYSYDLCCSAGEAVLNTVNGLKVDIHVPQDVIHIEIREKAYIYSGGKKGLGGLPVGSAGRGLLLLSGGIDSPVAGFLMAARGMNIDAVHFHAYPYTSNEAKQKAVSLAEIVSSYCLGLRIFILNFTQIQVRIKESADSQWLTVLLRMAMMEAAEKAALKIKSKCLITGESLSQVASQTIENLTCTQSRIKLPVLRPLIGMNKESIISEARRIGTYEISILPFVDCCTLFSPNHPVLYGDPEQANALYEKLTLAPLIDEALANCEIIRL

SEQ ID NO: 94574 - protein, 439 aa, Unknown
  Obtained from environmental sample
  DOMAIN (249)...(426): Type III restriction enzyme, res subunit
  misc_feature (1)..(439): Xaa is any amino acid
MFLRSLNIPINSIKEIKPKEAANLTRLGIKTVSDILVHYPRKWEDRSENIPLKSFSCAKVCTVATVIAHDWIGYGKKRTLKVYIEDETAQAALLFFNRPWLGKQFVIGKQYMIYGSFKVQYGELQSSAFEFEPVSSKDIFGKIMPVYPLCSGLTQSAVRKITSQIINKYADNIEDELPSEIIERDNLMPKNTAIKEIHYPSSMEKIERAKKTLIYEELFYLEVMIGKRAFERRKISSKFTEAKENPAKQVSFSALQKRLVERLPFSLTTGQCEAVMEINQDMGKDIPMARLLQGDVGSGKTLVSFLAALKAVEERGQAAIMAPTELLALQHAENAARLLEPLRLHVAFLTGNIKAKGRKELIKNLNSDVIDIVVGTHALFSKDVIYKNLKLVVIDEQHRFGVTQRSLIMTKGDSPGLLMMSATPIPRTLALTVFGDMDV

SEQ ID NO: 94575 - protein, 329 aa, Unknown
  Obtained from environmental sample
  misc_feature (1)..(329): Xaa is any amino acid
MKTEKKPARQSLPKTALPRIYKIDAEIASGKYPNSDDLARLCGTSISTISRDIEFLRERLSAPIDYDAFNKGYYYSEKTFRLPAGFTSADDLLALGMARSIFSLYRETPIYEASRQLLESITTPIASDGNMDWLDNRIMVPKIASSKINPDVWKLVVSGLKENRVIVFDYKGTWDEEYQNRRVRPYQLLFDNGVWYLYGFSEERGAERIFSLMRIKNAVLTKDGFTLPNNYSYADFSGDSYFGVFIGQEKKSYAIDCYEEAIVFVSERQWAANQKITKIKDGIKIEFTSTQYDKVLKWVLSCGCCAIPKKPTKLVNDWKWHIREMGKLV

SEQ ID NO: 94576 - protein, 351 aa, Unknown
  Obtained from environmental sample
  DOMAIN (1)...(263): Bacterial extracellular solute-binding proteins, family 5 Middle
  misc_feature (1)..(351): Xaa is any amino acid
MLCHHSFSPIHRSMINDENWSKKPPLSNGPFYITEMDENKIVLAKANAYWDAPGVSLKKITLKYTENGDEASSLWNSGEARWISGEANLEMLTDRSGIQVNAMFATHYYFIRSGEKPWNDYRIRRALVLALPWEEIRAGHFLPAKTLIYPLPGYPRVDGLSDTDIEEAAALLTQAGFPHGDGLPDLVIRITPSPEAARIGGLMASTWKEKLGIPVRVEVVPYNRYFQMLKTDGYTVGFTTWIGDFADPYTFLQMWRRDSNLNDAQYSDDDFEELMEKSMLEEGETRWATLGEAEKLLLERGSVIPVSFSPAINIVDINELGGWFPNALDIHPFKYLNFRAFRPLPGVVMAR

SEQ ID NO: 94577 - protein, 325 aa, Unknown
  Obtained from environmental sample
  DOMAIN (63)...(268): Transposase DDE domain
  misc_feature (1)..(325): Xaa is any amino acid
MNEQRNGWYHLGITNTEREVKRSTLSYANAHRSADLFKALFASLVIQAQTVFGSHGFKFKNPLYSIDSTTIDLCLKLFPWADFRDGKGGIKLTVKLDHQGKIPCFVADANAREHDVKKVREVPYEAGDVLVFDRGYADYGYFASICGKKAYFVTRLKKKAVYKLVKRNPVKKGGNIISDHEIIIPSLSKEIRLRKITARDPETKKRVVLLTNNLKWSAATVAGVYKERWQIELFFKTIKQNLKIKRFYGNTKNAVMTQIWIALIAYLLFYLLKVKSKNLHLSFTNFISVIKTMLFQRVSLFDFLCGTSPPPKINKLFERQLEFVW

SEQ ID NO: 94578 - protein, 449 aa, Unknown
  Obtained from environmental sample
  misc_feature (1)..(449): Xaa is any amino acid
LNYRLTIRSMLSPFLSANDNIVPRAARLPPFIRKLGDNTKFVDGERIRCDNGFNWQFNYGNRASKATPWGIIRYAYDAENRLIRKGDVAYINDKDGNTLSEKGLRYEARYEYNGQNRMASSIVTSHADKAYSANSYAYDALGRRTLAENVTGQTLRTLYDGRGFEAIREGETFRDGSFTTRYAPAEAAANALSNQATGERYRWVGDNESARTRNSGDEYAVQNNRYSGRGVTLYGNGEAVAVSYSSGGTSHSMYMGKDIMGSVRTATVDTGVLEDRYEYDAFGQPYKGDLTGGMNLGYASKPYDNATGLYNYGYRDYKPQAARFTTVDPIRDGNNWFAYVNNDPVNWVDLWGLGAVDTQNNFPSSTYFTQNQWTNIFGKEFADHACAATAILNVISGQYFIETGQAMSQAQGTTAIQAAVNSGNIKANDAYVNRWEDAAIAMGIQLANR

SEQ ID NO: 94579 - protein, 305 aa, Unknown
  Obtained from environmental sample
  misc_feature (1)..(305): Xaa is any amino acid
MQGLWYWEYGYEAGGRISTATRGKTGTSKKYTENYGYQWQGWNEKRTVTISGAGTTAYLLDPWGQVTAVTNAVGDSSNRTLNGAGNTLREQASSGGFYEYRYDALGRPYQAGKEGETGVQVRYNLDGSIAEKTDRLGKSTQYAYDGRGLLTKETTALGEWRYFYDNAGRLVRQEIASRNSVTYRSDWNYNDSQRTVTVTTGGIYSETLYINAWGEVIRKADGEGNEIKYEYDKAGKLVKSIDAYGRATSYSWNELGKVAKVTFSDNTAEAYEYDHMGNLQEIRDALGVSWAGEYDQAGRLYQETG

SEQ ID NO: 94580 - protein, 200 aa, Unknown
  Obtained from environmental sample
  misc_feature (1)..(200): Xaa is any amino acid
MRKLLLTTAAVAAAIAGAFADGPSFGTFTDTRDGKTYKTAVIGGKRWMAENLNYPPQSGRYWCYELNSSNCDKYGMLYDFHTARTVCPKGFHLPSRLEWDNLTAAAGGKNTAGEKLKSTDGWKEYGDITAADNYGFSALPGGARYIAGFFDNAGYSGIWWTATEHSSGIAYYRYMLHYNFNVGEDSYGAGNGFSVRCVAD

SEQ ID NO: 94581 - protein, 219 aa, Unknown
  Obtained from environmental sample
  misc_feature (1)..(219): Xaa is any amino acid
GGIQNKRAEEEKKKEVEEKKKFEKTGYFTDSRDGQKYRAVKIGNQVWMAQNLNYKTSSGSMCYNDSASYCKKYGRLYNWYTAKSVCPAGWRLPDSADWNILATEVGGVRDGKWKWQDAAKMLKSKSGWYENGNGTDDFEFSALPGGAVPYYPSDPPGTWRNTIRFIVEKGAYWWTNSTMVYTNGRGAPLATSMYFSDDIVSIYGSEETHGHSVRCIKND

SEQ ID NO: 94582 - protein, 279 aa, Unknown
  Obtained from environmental sample
  misc_feature (1)..(279): Xaa is any amino acid
VKLLLDSLLNSYSELKNSIPIEPNCQFGKNDVVELIDKLRSLLFPGYFDDEYTEVLLEKVKRLLLRLLAGKKEQENKEESVKLVMDFLTKLPKIRASLATDVEAAYDSDPAAIGKEEIIISYPGIYAISIYRLAHELYLFNIPMLPRIMTEYAHSVTGIDIHPGAQIGEYFFIDHGTGIVIGETTVIGEHVKIYQGVTLGALSTKGGQSLRGKKRHPTVEDNVTIYSGASIFGGDTVIGKNSVLGSNVFVTESIPADSKLSIYDRPIKRKSQKYWYYEI

SEQ ID NO: 94583 - protein, 306 aa, Unknown
  Obtained from environmental sample
  DOMAIN (5)...(306): Acyl transferase domain
  misc_feature (1)..(306): Xaa is any amino acid
MSKTILLFPGQGAQYVGMGKVLSETFEPAKQLLKKADEVLGFELSKIMQEGPEDTLKSTDNTQPALYVCSCMAMELLKSKNVSFDYAAGHSLGEYSAIYAAGGFSFEDGLRLVRVRGELMAKAGELKPGAMAAVLKLSEADLNAALAEAQDAGVVVAANFNSPGQIVISGSKEGVAKASEIAKAKGAKRVVPLPVSGAFHSPLMEYALTGLKEAIEKTTFSDSKVPVIANVTSQPVSKGAEFKDLLAKQLISPVRWQQSMETAVSLGIERGIEVGAGKVLAGLMGVINSNVKVYSVETEEQFNSIG

SEQ ID NO: 94584 - protein, 127 aa, Unknown
  Obtained from environmental sample
  misc_feature (1)..(127): Xaa is any amino acid
MLLIDTNIALRYILNDDKEQAQRVRDIIDNNYIEMPIEVLSEVVYVLKGVYGIDRKIIHSKLLYFFENTECRIPHKAAVLCGLQYYASTNFDFVDCILAGYYEAETREIATLDMDLQKLIAKIGNSK

SEQ ID NO: 94585 - protein, 704 aa, Unknown
  Obtained from environmental sample
  DOMAIN (1)...(424): Aconitase family (aconitate hydratase)
  misc_feature (1)..(704): Xaa is any amino acid
AHNSGDDRNLRLKFDSLASHDITYVGIIQTARASGMDKFPMPYVLTNCHNSLCAVGGTINQDDHVFALSAAKKYGGIYVPPHLAVIHSFNREMMAGCGKMILGSDSHTRYGALGTMAVGEGGGELAKQLVNRTYDMAYPQVVGIYLEGEIAKGVGPQDVALAIIGAVFNNGYVKNKVMEFIGDGVDKLPIDFRNGIDVMTTETACWSSIWKTDDNVKTYLKERGRGGDYKELTPAAVAYYDGFIKIDLSKIEPCIALPFHPSNVYTIKELQKNAKDIFAKIEKENKETGLNLNLGVKYHDGGIWADQAIIAGCSGGIFSNIMAAADILKGHSTGNGNFSLSVYPESQPTYLELVKNGTVETFMKTGVLVREAFCGPCFGAGDTPANNELSIRHVTRNFPNREGSKPNDGQIASVALMDARSIAATAVNGGKITAATEINVKYGKYKFFFDNSIYEKRVYNGVGSSNPQAELTFGPNIKDWPQMPALPENLLIKVVSFITDAVTTTDELIPSGETSSYRSNPLKLAEFTLSRKDPSYVKRAKEVQSLEEQRGKGSADGELQKILQKIQGIDGCSGIGLANMGIASAIFARKPGDGSAREQAASCQRVLGGGANFALEYATKRYRSNLINWGILPFLISDETAFSNGDYIFFPGIKSAVQDKKETIKGFVLGETVKEIKTALGGLTDSERQILIDGCLINYYAKKI

SEQ ID NO: 94586 - protein, 735 aa, Unknown
  Obtained from environmental sample
  DOMAIN (465)...(735): TonB dependent receptor
  misc_feature (1)..(735): Xaa is any amino acid
MEQIGAIEGQSWEDSRLAATTDSAGAFRFYSLPSGKVKVSVQSPEYETYTTYERIGKLEEVKVLYYIARLDYSGYELVVYGKAEEKEVSRHRISIAEVKRIPGLGGDAVRVVQAMPGVARPSFGGTEVVVRGAPSWASRYYIDGMTVPMLYHMSGSTAIYPSDALDGVDFYPGGFSSRYGGAVAGVIEMNTRSPKADRLQGYADFSMLAGALFFEGPVNEKVSFMASARRYFAGDLLGLYFDISDPKHTSISMAPFYWDYLLRTDVALDKNHRLSVSILGSRDSIGVFVPAMDRGSSEIDGQLDEMTMMITFHTLTAGLSSRLSDKWKNTLRLSGTYVAQNTSAFGFANIRERPLLGHLRDQATFTANDNVIVNIGADIEIINENMELEFTGGQNLIMRTKLEDQRYGLVGGYANVEWKPTDKLLLIPGVRYDYYPELDYEGSALPAFWDYGFMDNRRGWSGEPSFRVSGRYQLTDKYTLKAATGTYSQTPEPMGLAVHEDFGNPDLPSTKAAHYIAGFEWRISDLISLDAQTYFNRIWDVARSYNGLIDYDPNLEVQRRYFSDGKQRMYGLELMLRHSRSEKFFGWISYTLARSEMWSKRDGKYILSSRDEPHNLQLLGSWRLKDWEVGTRVRFVSGKPTSPIVATVESENGKYISAVYGERNSTRQDPFFQVDMRVEKKVIYDKFILTYYYDLQNLLWPLYKSPELTYYNYNYTEKQKISMIPLAAFGIRAEF

SEQ ID NO: 94587 - protein, 836 aa, Unknown
  Obtained from environmental sample
  DOMAIN (612)...(804): ATPase family associated with various cellular activities (AAA)
  misc_feature (1)..(836): Xaa is any amino acid
MQCVKCNTNNRDSARFCKQCGAAITGAETAAGLGSSIDQIVGLDEIKKDLSELQTILEGMKQNNKGARFPYDTMIIGSSGTAKTLISNLIADLFFKFGMISKSKPEKIDGASLNGMSSKDIDSLFSKAKGGMLFVDNAQKLLDSEGKPTHAFSHFIAAMDLNENDPVVLMAGLSAGLREMVKSSESANKQIVNRFEKIFIIPDYTPDQYVKITENELKKQGFTFNSEFSGKLLQRFRYLFKELKKPDNNIKSVNGYLAIKEAQAITSCYYLRKASDKIILPDDIKGQVEEKKSIQEIMAELDAIIGMTALKKEIKSLYTQLNQIAEMEKKGVKTEKPAQHFVITGNPGTGKTTVARLLGKIFEGLGLLDSGHVVEVDRSKLVAGYVGQTAPLTNNACDQAAGGILFIDEVYTLKQNDSDSFGQECIDTLLKRMEDDRGKFMVVVAGYKSPMEKFLTANEGLKSRFTKYFNLEDYSPEELAAIFESLAKKQRFIVPPQTRVKIVAFFKDRCARKTRDFANGREARNLLDEARKNQAERLSSADIASLSKEDTLTFLPEDIPGTTSDKMVSIDDALKDLNTLVGLKSVKDAVIRITNSLQAQKLTGETETLAKHFVFTGNPGTGKTTVARIMSDVFKAVGLLPTNNLIEADRGKLVASYVGQTAKLVAQQCDNAMGGILFIDEAYALKQGPQDSFGQEAVDTLLKRMEDDRGKFVVIAAGYTKEMNEFLASNSGFKSRFSDYINFDDYNTSEMREIFIGMCKKKNIKFAPGFDEALQKRLKELYEGRNAQFANARTVRQLFDKTRENVSGRVLAMKKPEEELKREILIMRPEDLDMTV

SEQ ID NO: 94588 - protein, 438 aa, Unknown
  Obtained from environmental sample
  DOMAIN (132)...(438): Aldehyde ferredoxin oxidoreductase, domains 2 & 3
  misc_feature (1)..(438): Xaa is any amino acid
LEVQGKADVETLIFVDGQKGTITIEECPLEPLDSHVLAELLTEMYSTSHEDRVNISVISAGSAADNSLIGMLNFSWFDRRRGCIRLKQAGRGGTGTVFRNKKIKAIVIRGPVVRGDLNRPADFDTIARTGIKLHRELRENDPSQCVMRRNGTAHIVEIMDAYDLLPVMNFQYGSHPESHKIASYVWDMRCTQRTNDGCWYGCSMACAKGADGMTLRTGPYKGQTVTVDGPEYENAAGLGSNAGIFDAEAVLELNFYCDTYGVCTITWGTISAFIMECYQRGILNKERTGGLELNWGNWEADLEVLHQLSRGEGFGKIAGQGVLKMKHIFAERGWGDFGLLDDIGMENKGLEYSQYLSKESLAQQGGYAMTNKGPQHDEAWVIFMDMVNKQLPTFEDKAEALYYFPLWRTWFGLNGWCKLPWNDVAPRDNHLRHEAHKI

SEQ ID NO: 94589 - protein, 532 aa, Unknown
  Obtained from environmental sample
  DOMAIN (28)...(64): SWIM zinc finger
  misc_feature (1)..(532): Xaa is any amino acid
MYGTGIVDLRKIAENQWKAKYQGNYGVYTIKITTDGKKTVKYSCSCPSDYSPCKHIHMIEEAIAKKIAADDKKENSSGIRLEDFIGSVSAEKLRNFIITQAKYNDELKNAVLLEFSTNVGNAKGDKYSKLIRTTLASVPHDEDDYYCEECLNIDVLDQWIGKARNCVRLKQYDEAILICKAVIEEYSQWLYNVGEDVSMIFSGEYQSVPFDIIKDTTEHIDKKELFNYCLAEMKKKKYENTNFYDGFQRLLENLAVTVDPDAFITLQDKLLADVEDKSSYEAETILKRKISFYLRLGQKKKAWELIKENMQIESFRLKAVKRKIEKQNYKTAKKLINEFINDYINSHVKDPEKYLNGTWHGLLLDIAQKENDIPVVRKLSYRFIEDYFKIEHYQIYKASFSSAEWADEREKLFFHYSSKKRFSHSATDFLVAENEIERLLNYVEKYLSIGDLERYYKVFASEYPEKTLEMFREGLILYADNNTGRSYYEHILSLLKKMSKIKGGKKAASDLVADFRSHYKNRRAMMEVLRGF

SEQ ID NO: 94590 - protein, 204 aa, Unknown
  Obtained from environmental sample
  misc_feature (1)..(204): Xaa is any amino acid
MMAGLGALLSDLSGALAVFIEGFMVIGSFFSWIFADWTGSVFFGSLLSAALAAFVGWALARFIRVSGANPFIAGLALNLAASGITTSLSAVWFGTKGVLQNPAIKIPQPVRIPLIDSIPLIGKIISGHSPFTYTAWICALILAIGLKKTVAGFRLKAVGLSYEAAEERGIHSGLYREGAWTLAAFLAALAGAALTFRAGSYAPG

SEQ ID NO: 94591 - protein, 129 aa, Unknown
  Obtained from environmental sample
  DOMAIN (24)...(125): Cytidine and deoxycytidylate deaminase zinc-binding region
  misc_feature (1)..(129): Xaa is any amino acid
VSTDKDYGAAVGTGGAGGSPVVAVPDHAYFMSAAYREALSAFNEGEVPVGAVVELGGRIIGRGYNRVEALGDATAHAEIIAITAASNHVGGWRLVGCTLYVTLEPCIMCLGAILQSRVSAVVYGARDSR

SEQ ID NO: 94592 - protein, 231 aa, Unknown
  Obtained from environmental sample
  DOMAIN (59)...(224): GGDEF domain
  misc_feature (1)..(231): Xaa is any amino acid
MIVFTVLVVIFKSPVTNKIDIPNAFFAGTISLVIGWQVIMNRLSLAAFAHNMEDERNNYYDQSNIDELTQLKNRRHFTNTIKRTVTNYRQSDNYLCVAILDIDFFKNYNDYYGHPEGDECLRKVGEALKDLNNNMNIYAARIGGEEFALIWFEEDITETQNIASCVCEKIRSLNIRHEKSEAAPYITVSVGVNVVRCGALYDIETLYNLADKALYTAKQNGRNCVVINTPS

SEQ ID NO: 94593 - protein, 511 aa, Unknown
  Obtained from environmental sample
  DOMAIN (245)...(358): PAS fold
  misc_feature (1)..(511): Xaa is any amino acid
MTGIEFECVNGNDAQYPELVAMLEDGKAQIISELYRTTEYKDRFLWSDVPVLQDNYAFITRADFHNIDISEVSYLHIGIRRNSHYFELFKKMFPDHQNFTAYENQEETWDALKAGKIDVLFSSRRRLVIYTNYHEEVGFKLNLIFDNEFDTSFGFNRDARILKSIIDKSLGLIKINNISNQWMNRSYDYRAKLKAAWLPWLIGMSALFFLVLLLVSALLRRSRGVGKGLEALVKERTRELAFETSKLQAVIDSIPDIMFCKDKDYKYTQCNKAYEQFMGINQEAILGKANSDGAWFTPEDVEKIQITDEVVINEDRIISHEVRIRSPSTGIERVYETVKAPLRQDGAVVGLVSIIRDVTKHKEMERDLSLQTSLFKTMLTSLPDAVFCKNLNFKYTLCNNYMASIFGKKVEEILGKDDVNALGLPPETAAIAAESDLKVMNEQQRIVYEEWVPCADGVKRLFETVKSPLILEGDVVGIMAIGRDVTKRKEMEEEALAANRAKSSFLANMSH

SEQ ID NO: 94594 - protein, 52 aa, Unknown
  Obtained from environmental sample
  misc_feature (1)..(52): Xaa is any amino acid
MYMNNPLCGKRPVITNSNKLRTYSSARFYTDDEICEIITGITEPKSPEMEGK

SEQ ID NO: 94595 - protein, 349 aa, Unknown
  Obtained from environmental sample
  DOMAIN (233)...(348): Pyridoxal-dependent decarboxylase, C-terminal sheet domain
  misc_feature (1)..(349): Xaa is any amino acid
MRHSFPYARIYYAVKANPDAAIISMLDKLGANFDLASRYELDQVMSLGVSPDRMSYGNTIKKAKDVGYFYQKGVRMFATDSEDDLKNIASHAPGSRVYARIIMDDSSTADWPLSRKFGCHPDMAYSLLVMARSLGLIPYGISFHVGSQQRDVSQWDEAIAKTKALFSSLEKDENIRLAMINMGGGFPASYVQPANDLTEYASEIYKYLKDDFGSEIPLIVLEPGRSLVGDSGILIAEVILISRKTHTALNRWVYLDTGKFNGLIETLNESIKYPIITENEDDEAEEEEVIIAGPTCDSQDILYEEHKYLLPINLKIGDKLYFLSAGAYTASYASVSFNGFPPIKTYIME

SEQ ID NO: 94596 - protein, 86 aa, Unknown
  Obtained from environmental sample
  misc_feature (1)..(86): Xaa is any amino acid
MVQQAIVQVLQPIFEKTFSDSSYGFRPKRNAHQAIERAKKYYEEGYCYVVDLDLEKYFDTVNHDLLIKMVREVVKDEAVIGLIRKF

SEQ ID NO: 94597 - protein, 367 aa, Unknown
  Obtained from environmental sample
  misc_feature (1)..(367): Xaa is any amino acid
LKSSGKGASNFIRNRRVKYPAEKNTILFAQDAMNTIPTTFNQDFPSYTVIGGRENYFSTGLSVVLLNRGGRYARRGLFHDLEKTGFDAVISVEPEPAHYDLDELSARFPFVRFVIPHTRISLGEQINLAVSELDSPLFFVLWNDLKMIAGGAAHRMAERLTRPAETNGKGKGKRKFMRLCTVPVIQNSRHDTLPTIIAPVIRHRNIQTRFLNPSGEGLPSLYPFDGVGIYDRERFIQLGGFDGTLKNSFWQLMDFGFRAYLWGEEISLSQTLKFSYEAAIPAEDNSAGEDYSRFYIKNLAPVFRNDCAYLPMRRFPGFLFKSNNGILGAWDDFSESRRWVNTNSFRWRCNPKTIASYWNLETSNKEI

SEQ ID NO: 94598 - protein, 265 aa, Unknown
  Obtained from environmental sample
  DOMAIN (3)...(212): Cytidylyltransferase
  misc_feature (1)..(265): Xaa is any amino acid
VLAIVLQARVDSSRLPGKALLPLGGRPMILRVMEALNRIPAEMRVLACPEDSKSAFAELAAEAGFILFAGPKEDVLGRFCLCLRNFDIRHLIRATGDNPFVFADAAYAIITEGLTLGADYAGYGGLPLGAGVESVNAKALLLAGTEAASQYDREHVCPYLYTHPEKFLLHRPLAPQHWQYPELRLTVDTKQDYEQAQLLYAALDSLEKAGKLAEGERYKGEVIIRAYKGFRVQGSGFGDQEQGFRVQGSGFGDCCSQSDRVGNQQ

SEQ ID NO: 94599 - protein, 625 aa, Unknown
  Obtained from environmental sample
  DOMAIN (434)...(528): Methyltransferase domain
  misc_feature (1)..(625): Xaa is any amino acid
MTADNNLTQYPILVVPACEHGRGGGHLVRSMTLVRELRALGREAWLYLSSSNTDAVLETAQFDRAWLLAENGLPEKSWQCIILDRFQTPAEELTHWQKIAPVIGLDEGGKHRGCFDFLIDILPNCEKITPNIARPSLLPLPKNKPCAPARVETEPLKVLISFGLEDSAGLGPALAKTLVNHQNIEITLLKGKLSKKESYSSFLIPHSSLKESLPNLNEHLTDYDLIITHFGLTSFEALYAGVPVLLASPTAYHEKLAKKAGFWTLGIGKRNVEKKLSALLKKENFYSSFLSDLKKHCAKLAIKFGLDREPQQSLAELVNTISPDVSRNCPVCGAALNGSVLARFPERSYLRCKCCGAISMNRINPTPIEYGKEYFFEQYQKQYGKTYIEDFPNLIAMAKQRLAEIKKLGMRNEELGIKNKPQSPVPSPQSPSLLDIGCAYGAFLAAAQEEGFSPQGIDPAEDAVRYVTQTLGIPATQGYFPCPHSSFLIPHSSFQIVTLWYVIEHFRDCVPALEEIRKQLKPGGVLAFATPSFTGVSGRGSLKRFLENSPQDHWTVWSPAVCRNALGKAGFKVKKIVSSGHHPERFPFFGKFAYNRNSLLYRLLMAVSKIFALGDTIEVYAVKDS

SEQ ID NO: 94600 - protein, 465 aa, Unknown
  Obtained from environmental sample
  DOMAIN (128)...(205): Bacterial Ig-like domain (group 2)
  misc_feature (1)..(465): Xaa is any amino acid
MKKRMLLTGMFALMLVFAMFLTGCELIDDLTPGDGGDDRAVSPREVRLDRSRLTLVVGDTETLKAAVLPAEATNKAVIWASDDPDVASVDKKGTVRAISVGETVITVIVDGGKTAACEIVVTEPVSKPPTDIILFPPSLAIDIDETYTLTATVLPAEATNKAVNWSSEKPAVVVVDKDGNITAKSEGEAKVYASTVVGGILAFSQITVTGILPPPPDPPGPSADQTFLLYGYDVINSPYINRDDVKLGAPIINLNKANSAGLIIQTNVNKSIFELETANSISELYNKLSGGTSVKGSYGLFSAKASTEFSVENGGKKTNSFSKGRSIQQTKDEWLHNPDPAFLKTFFNDAFINDITSRSAEQIIIKYGTHLIKRVYWGGTAEFNYSYFGTELTTETEIKAAVEASYSGVKGEGNVANKNKATELNKNSKFYAKTVGGKNTSIMGVEDFAAKYPDWVDSITSQPDI

SEQ ID NO: 94601 - protein, 262 aa, Unknown
  Obtained from environmental sample
  DOMAIN (93)...(252): Glycosyltransferase family 28 C-terminal domain
  misc_feature (1)..(262): Xaa is any amino acid
VPPCAAAASLGIPVFTHESDFSPGLATRLNLRFVRKTKGRVFIAYEDTARFLAKSRLAKEQVIVSGNPVRAAFRSADPAKGRAFLRLEQNERVLLVLGGSQGARELNTLVRGAMPDLRRHYTVVHQYGPAQDWDLPRTQGYIPLPYIKEEMPHVLAAAELVLGRSGAGTVWESAALGKPMVLIPLCGSGTRGDQVENARFFEREGAALVLPGQAGADALARMVSALADDPHKREAMAEAARRIGSLDGVAIISDFICAFTGV

SEQ ID NO: 94602 - protein, 220 aa, Unknown
  Obtained from environmental sample
  DOMAIN (62)...(160): HD domain
  misc_feature (1)..(220): Xaa is any amino acid
MNSILSVLNEGFSCPVRDVLWGHVYFTPELAALAESPPFMRLHRILQLGPVHQIYPGATHTRASHSIGVYHLGRRLLQNLVERGAADWVSREGVMAFLCACLLHDLGHFPFTHSLKELPLRSHESLTGDIILSEPMKSLVAACGADPALTAAIVDKDILAADKELFFYRKLLSGCLDPDKLDYLNRDARYCGVPYGVQDVDFILSRLIPALTGEPISIPG

SEQ ID NO: 94603 - protein, 203 aa, Unknown
  Obtained from environmental sample
  misc_feature (1)..(203): Xaa is any amino acid
MDIHNVSEDNVITVVREIFDAVKKQGNPDKLCLCEQCKLDTICYTLNRIEPRYIVSSRGLTRVDRDGSERHQAHADLTSLAYKGLKQVNHNLRPTASHDDTLSENIARKLSFDIPTIVGRLFDGETFAPVSGVTVRLFCNNEVVPMRNTNWQNPYTLVANTPGAFTFWPAPVPAAMVDMHHIFEYSIVIESDRYDPLHHFFKI

SEQ ID NO: 94604 - protein, 359 aa, Unknown
  Obtained from environmental sample
  misc_feature (1)..(359): Xaa is any amino acid
MEEIGSALSKQQKEMNAEISKEQETINSSLIQLQKDWKTNISEFRKMAEKQQKELEASISGFRNELTQSIADLKTKSTVSIKQQQDELKSAITGIKQETDSAVRQQHEDLKSAISGIKQETNAAVKQQHDELASALSDIKQKSEAAIKGQNVELTSYLNDIKEKLNAAISSQYNEINTTLENQMETWKSLCKDTEQNIITATEKRLDEYQKIHTESISRLNNLADDAVELENELRRAMQDAVTRVNNDICAFKTETDAAIETSNSEIGAMAKALKQEIKDMNDGLDGIRQQAFNNVSEKLNSFENEFTLEIGKRTGDITRQIKDWQDNLEDRLKKSAEKINEEWEKAREETVTEQRTDI

SEQ ID NO: 94605 - protein, 126 aa, Unknown
  Obtained from environmental sample
  misc_feature (1)..(126): Xaa is any amino acid
VKNTEWKKFTEARSRFCHITEEIENTLPELKGIQQKFINSRCDSKNAAYTVETPVVYNTALDGITVNDEIKMILVADNPGRREQAAENRRYLVGPSGKIAQKFFRENPSLGIDFLKNVIILTRRLS

SEQ ID NO: 94606 - protein, 273 aa, Unknown
  Obtained from environmental sample
  misc_feature (1)..(273): Xaa is any amino acid
LRKKFSYIVFAAALMMPAIVSCSFFGKQKLYIYNWTYYTPDSIIEKFESEFNIRIIYDEFASNEDMFAKLKSSRSRRGSYDIVFPSKDFVPIMIRQNMLERIDKTKIPNLKNIDPDLLKRANYDPNMEYSVPYFYGAAGIVVNTAKVPVYENSWSIFARQDLRGRMTMLDDMREVFGGALAYLGYSVNTVDPARVNAAINIINNSWKPNLVKFDSEAFAKGYANGDFWVVHAFPEAVFEEIENNEQLLRDTVFFIPREGGPSYIDSMCILKEA

SEQ ID NO: 94607 - protein, 381 aa, Unknown
  Obtained from environmental sample
  DOMAIN (3)...(381): EPSP synthase (3-phosphoshikimate 1-carboxyvinyltransferase)
  misc_feature (1)..(381): Xaa is any amino acid
LNIRIVKPVQGGVIGAIASKSAAHRLLICASLADNETFVRCQERSLDIDATARCLESLSAVIRYEDGGFFVIPINKTKDLEKERSVNCGESGSTLRFLLPVCGALGMKVKFNMEGRLPARPLTGLYEEMTSNGCKLSEQGHSSLVLGGKLKSGNYYLPGNISSQFISGLLFALPLLEGYSTISVTDKLESRPYVDMTLDALRLFRINVHEEEKPRLTFCVTGNHTYRSPKTVQTEGDWSNAAFWLCAGAIGTNGITCTGLYKDSRQGDRAIVEYLKKFGARVSVDGGEVTVYPNDLKGIEINAENTPDLVPVLAAVASAAKGETVIRGAGRLRLKESDRLRTIAASLSALGADVKETDDGLVIQGKNKLQGGVTKSFGDHR

SEQ ID NO: 94608 - protein, 229 aa, Unknown
  Obtained from environmental sample
  misc_feature (1)..(229): Xaa is any amino acid
MAEPFATVFGDYIKRALKQAKSPTVITEDNVYQEGDPNVLVVLDEMVGSLLLPESGLDGMNHLEELLEKAESGKACLLLVEHYSNMDLSIVSLLIRKEGGKGKDISDAIIAIAGMKLNEDNPIVAAFAGAYDKIVIFPSRSLQELDPEKDKAEIARGNAINRAAMKSLIRHKYKGRIVLVFPSGTRYRPWDPDSKKCVREIDSYIRSFNYMCFVTINGEVLHIQKTDMI

SEQ ID NO: 94609 - protein, 52 aa, Unknown
  Obtained from environmental sample
  misc_feature (1)..(52): Xaa is any amino acid
ARLAELGIPAPNIFTGGRNFHSRLEWVSVSEMSEACKVIIELIKGTSKKFNF

SEQ ID NO: 94610 - protein, 106 aa, Unknown
  Obtained from environmental sample
  misc_feature (1)..(106): Xaa is any amino acid
AAAQVLVAVIPIVGIVMGSVVVFFYLLWNHRRRTLLINAGQYSRPVFDLLTFSLLAGLLLGSVGLTLTVFLAVVAGPTYGLLGGIIPLAMGIGLLAFYGIKRGEKA

SEQ ID NO: 94611 - protein, 994 aa, Unknown
  Obtained from environmental sample
  misc_feature (1)..(994): Xaa is any amino acid
LETNGPNAQHIDYAAPAYFREFADYLQAENASAYAWNIKQFRRAEASSDWLIGKLAGKNSNQRNIPIAGWVEMKDTVPSFRTFSDGEDFRAAWRTVLNYMWHGNPTYTWDPVVHDFRPNRPNAFEQEAGTRLAKFLWDRRPTWGNSCEKIIGEGLWWGPSMLKYHYSPQGEQLSEFTLNWLHGTGSPSAVTAQDTNLMAEMYRQAELEWDVDTPGDRYLTSVPFYFHGIFRVLGLNVLTGNHHAPMNMKKSANMKVYLDVDKTYAFEDDTITYTIDYRNYGADEAKGVRIVNKLHPDFVFISGTGSPSYDAASNTVTWNIGSVPGFKSSMPTGVTTKGTVTLKVKIPYAKLKRYENKATISCTNGPGWTSNEYPNKISSVMKRNGVDIANRALRVEHSVYRDTVNPGMTAVYTIDFENSAEAGWLNGGRPGVNFSYAHEGTAASAGSHTFMIRAFNDAHEAYIDYGNYRVSYFLFDNNYKGLGASGWNVRTDILYVPEAERSKFKLLHENITPGEDKNGKWNQRLILQIADVLDPRRSDTNWGTMAAPTQFLINYSGLDNRVHRGISTPFKGVWAVYAGNYANRSWGDDWSYNSKAKGTIANDAMANWGYPITPDFTDDPSPDNPGKPVSRLHRKLCGSEASVTIDNVLIEEWDGYTWRRVFGNGPLPGREVMNVVIRDTIPQGVTFINFIEPYPFGKAPKINGRVITWETDKLLVGQKGSIKYTVRADTPPDNKNVIVTSRAWASADKESPMRGTATLVITRDSLPPPPPEPTTLYKRANKEAYSRGDTVVYTIAYKQTHGYPAVSTSSNQWEGTKPSGFDGRTISFGTSSFDMRFTPASGTNVTLTGTMAPQSYGPPLYIFARRTAQGSVELKFERKYIQSGDYPGIEITVTSNGRVVNNVTNESGVKMNDNETSKNYKLVFKNDSLLVWFKDTASLFPDLVYKGIAVQKGDAGVRYVSTGGGSSSQITNWASKSDLAYDVTVRDTVPYGVR

SEQ ID NO: 94612 - protein, 250 aa, Unknown
  Obtained from environmental sample
  DOMAIN (1)...(74): Glycosyltransferase 36 associated family
  misc_feature (1)..(250): Xaa is any amino acid
LAGAPVTSYCGDRAAFLGGYHDYGNPLSVEKGRLDGTLNYNLNPCGALHTALTLKPGESVSLVFLLGQKREAEAKELIARYEDKALPDREINDLKTYWHGKLTNLKVETPDENFNHMMNTWNAYQCFITFNWSRAASLIYCGQRNGYGYRDTVQDIQGIIHLDPEMALEKIKLMISGQLNNGGALPLVKYDHNPGHEDVFSIAGRPFYRADDALWLFPTVWKYITETGNTALLDEEIHMLTPARIPSTVT

SEQ ID NO: 94613 - protein, 196 aa, Unknown
  Obtained from environmental sample
  misc_feature (1)..(196): Xaa is any amino acid
LGIHGLPAGLHADWNDCLRLGANGVSVFVAFQLYYAFEIMIRCAQHKGDAVTETRMNELKKKFGAIIEERCWNTDRFVRGITEHDQVVGKPDDPEACLWLNPQSWSIISGFAPQERGKAIMDLVHQQLNTKYGARIMAPAYRRHAFDGALALLFNPSTKENGGIFLQTQGWLILAEALLGRGGRAFEYYLESCPAA

SEQ ID NO: 94614 - protein, 217 aa, Unknown
  Obtained from environmental sample
  misc_feature (1)..(217): Xaa is any amino acid
MDSGFSGGYGIAITTSCKDPDRAFEFLDWMASEEACILREWGLEGVNYTYVNGKRVQNEQDRLDRISDPNYGRRTGIGLWYHPFPRRGTGWIDSTGNYITTTTPELIKQNFLDVERETLAAYGAELWTDLFPSSESLGISRHGQAWQYTLPPDLQAKTTEADDYMKTALSNIVIGPQASFDATWDKIMSDLRAMGIDEANKALTALVKDKVKLWETP

SEQ ID NO: 94615 - protein, 412 aa, Unknown
  Obtained from environmental sample
  DOMAIN (148)...(368): Methyl-accepting chemotaxis protein (MCP) signaling domain
  misc_feature (1)..(412): Xaa is any amino acid
MSSILIPLVVFFISISALALTLKKNTGALYTSVVAQLENLSSEQKDLTKRISICSVDELGSIAGMVNDFCDHLNEGIRNIKNEANILHGIGNDLASNMNTTAAAVNEITANVQSIKVRIQNQSNSVSETHATMEQLVININRLNDHVENQSGDISQVSTSIEEMVANINSVTGTLVNNAANVKTLQEASEVGRGGLQEVVADIQEIARESEGLMEINSVMENIASQTNLLSMNAAIEAAHAGEAGKGFAVVADEIRKLAESSSEQSKTIGTVLKKIKESIDKITKSTENVLTRFEAIDSGVRTVADQEANIRNAMEEQGEGSKQVLQSVSGLNELTQQVKSGSEEMLNGSQEVMNESQNLEKMTQEITGGMNEMASGADQVNVAVHNVNDISTKNRQSIDALIHEVSRFKIE

SEQ ID NO: 94616 - protein, 235 aa, Unknown
  Obtained from environmental sample
  misc_feature (1)..(235): Xaa is any amino acid
MDSRYIGRPGSTATGQYAMTWGRDTGQTIVTPNLNVAETIAHLNGPNARKDRVEDPQPFTILGKPSYAFRLGVPVINDRNNEVVGSVTCLLAIDGAQPLVEKIIKENDAIASMSIYTNTGFIIANLSPERIGKKLIDAETLYGDHLQEANDAVSKGEEKQFPNLYSKVLKTNVSVDLMPFQVGNSDVTWTIMIASDDDYVLKDINRIKIFVIILSAVALIISALIVYFTLHVITK

SEQ ID NO: 94617 - protein, 97 aa, Unknown
  Obtained from environmental sample
  DOMAIN (6)...(85): Transposase
  misc_feature (1)..(97): Xaa is any amino acid
MARLPRGRYTREFKIHAVSMAKDEGLGVAETARRLSISPKTIANWVSLAQEGRDFAKQSAVSDADAQLSSLRKENARLRMECEILKKAAAYFAKESL

SEQ ID NO: 94618 - protein, 77 aa, Unknown
  Obtained from environmental sample
  DOMAIN (47)...(74): NHL repeat
  misc_feature (1)..(77): Xaa is any amino acid
VDSGGNIYVSDTGNNRIRKITPLGAVSNLAGNGTAGYTEGSGTAAKFSAPQGIAVNTDGVIYIADTGNNRIRKIVKK

SEQ ID NO: 94619 - protein, 380 aa, Unknown
  Obtained from environmental sample
  DOMAIN (79)...(306): Peptidase family U32
  misc_feature (1)..(380): Xaa is any amino acid
MIQYAMPVELLAPAGSPEALDAAVGEGADAVYLGLKNFNARMRSTNFTYPRFEAALRSLRRMGKKTYVTVNTVFEQREADRMYQLLKYLSALGPDALIVQDFGVLAMARSEFPKLKLHASTQMNIASSRGANTLSRYGVSRVVLARELCLEELKSIKADTNVEMEVFVHGALCVSASGLCLFSSYLGGKSANRGMCAQACRRLYSHGQTGGYYFSTADLQLLEQLPDLAAIGINAIKIEGRMKSADYVGAVTSAYRLVLDAIAARGGAAEGGGEEGIARSIARAQEILRGDFARSKTKFYFFSTTQSPVPSTQSLIPDPQSPIDWLNPEQDGGTGIALGVIRKVRGGALNDGGRQGLAVSDNIQAIVKLSIGDSIPLHRS

SEQ ID NO: 94620 - protein, 75 aa, Unknown
  Obtained from environmental sample
  misc_feature (1)..(75): Xaa is any amino acid
MVKSGSKEMLQGSKEVMNESRNLEKMTQEITSGVNEMAAGADQVNIAVHNVNDISNRNHESIEALIKEVSRFKVE

SEQ ID NO: 94621 - protein, 237 aa, Unknown
  Obtained from environmental sample
  misc_feature (1)..(237): Xaa is any amino acid
MPFTANNLWLFVLAILFMTINGPTQMSYANGMGFKMKPTGLAFLIASIAGIFTGTATPIAGQAAMLTVAGKNRNVRERTTALVISSIGMIILGAFGLISSAVALAGAPVMLGMMAGVGLMLTEVGALTMLKSNTRTAGISIVTALLSWGLTKNLVYTIASCVLLATLDYLFIQKRRVQVPNLESQTETPRFWTRDYWRTEDWNLVKPILNPAAVISGLSLLTLSIGLTSSFGTINSN

SEQ ID NO: 94622 - protein, 330 aa, Unknown
  Obtained from environmental sample
  misc_feature (1)..(330): Xaa is any amino acid
MIAEHIAQRAKIASLELRSLSTQTRNDVLQKTSQLIREQQAKIIEENERDVKAAKEGGMAPAMIDRLTLTPKRIEDMAKGVEEIAALADPLGKILEHRTLKNGIDISRVSVPLGAIFFIYESRPNVTIDGAALCFKAGSAVILRGGKESVHSSSFLAKLFCDSLAELGISKDAVQYIDNPDRSLLGELLQQNKYLDLVIPRGGEGLIRAVSEQSKIPVIKHFNGICHVYIDKSADVEKAAKILFNAKVQRPSVCNAAETVLFHKDLPKEAVEQILKPLQEAGVVLHYDKFGIEYLDLQISVGFVEGVKEACEHIEKHGSHHTDAIVAEDA

SEQ ID NO: 94623 - protein, 385 aa, Unknown
  Obtained from environmental sample
  DOMAIN (27)...(143): HD domain
  misc_feature (1)..(385): Xaa is any amino acid
MKIAMDMLCRVFSHALDIIEEEQIGATDFHSMRVAALCAAMGRKLGFDDDTLSALCICALFHDNALTEYHLYKNEGVQYEKNMILHCKKGQNNVSWLPFKKDIGGFVLYHHECENGNGPFKKHEGEFPLEAALIAAADSIDVTYQLQHIPAAGLEVLRGKISANAGAYSTKAATGILLDVLDAGMLEKLRDENISLTMDKSMPRWEVDLSDPSIIKIAGFISRIIDYKSRFTRKHTSQIANRAWLMARYYGYSKEDKAMLFLASSLHDIGKIAVPVEVLEKNGPLNDDEFQIIKNHVRFTNDWLRNIPDFEVISSWASNHHEKLNGSGYTFGKPGEELDFNSRLIACIDIYQAVSEERPYHCARSHEETMPVLYSMAAKELIDTQ

SEQ ID NO: 94624 - protein, 550 aa, Unknown
  Obtained from environmental sample
  DOMAIN (443)...(544): Nitrogen regulatory protein P-II
  misc_feature (1)..(550): Xaa is any amino acid
MEFSSFDTMWVLIAAALVFFMQAGFAMVETGFTRAKNAGNIVMKNLMDFCIGTPTYWLVGFGIMFGTGKFIGGIDLMVRGDYSSTFPTPALLIFQTVFCATAATIVSGAMAERTKFSAYCLYSFLISAVIYPISGHWIWGEGWLADLGFHDFAGSTAVHMVGGIASLVGAAIVGPRIGKYAVTKDGKKGESRAIPGHSLTLGALGVFILWFCWFGFNGGSTVSMTGENIVSAASIFVTTNLAAATAAVFTMFITWIRYKKPDVSMTLNGALAGLVAITAGCDAVSPFGAFCIGIIAALVIVFGVEFVDKVLKIDDPVGAIGVHGLAGAAGTILTGIFALDGGLLYGGGWAMVGVQALGVVSVAAWVAITMCIIFTVIKKTIGLRVSHAEEIAGLDITEHNIESSYADFMVSTSLEADKDAVVPANVSVPVVNNSKPGSKMTKISVITNQNKLTLLHAALDKIGITGLTVTNVLGHGMQKGHVEYYRGAPVNIRLLPKVQVDMIVSKIPTQTVIDTIKKVLYTGKVGDGKIFVYDVENVIKVRTGEQGYDA

SEQ ID NO: 94625 - protein, 404 aa, Unknown
  Obtained from environmental sample
  misc_feature (1)..(404): Xaa is any amino acid
MKSIANKHGLACLLHEKPFAGVNGSGKHNNWSISTDTGVNLLEPGDTPNDNAQFLLFLVAVIKAVDEYQDLLRVSVASAANDHRLGANEAPPAIVSIFLGEELTEIIEAIESGKGYKNKEKHSMEIGVSVLPHFPKDTTDRNRTSPFAFTGNKFEFRMVGSAFSIGGPNIVLNTIIAESLRQFADVLEKSKNFKADIAPLVKKTISEHKRIIFNGNNYAEEWVVEAEKRGLSNLKTTVEALPEFVSKKSVELFTKHHVFTETEIHSRYEILMEGYCKTLHIEALTMVDMVKGEIIPACIDYQNDLTKLLQRKKALGYFDSSLEEQLGGNVATLAACLLKRLSALESALLETKGDRDILAQARFYREKIFSAMQELRLTVDELETLVARKYWPFPTYGQILFSVI

SEQ ID NO: 94626 - protein, 483 aa, Unknown
  Obtained from environmental sample
  DOMAIN (20)...(304): Glutamine synthetase, catalytic domain
  misc_feature (1)..(483): Xaa is any amino acid
AGEALDKKTPLLRSMEAIDKQAIRILRLFGDTTAKRVLTTVGPEQEYFIIDKEVFRKRPDLIYTGRTLFGARPPKGQELEDHYFGAIKPRVSAFMRELDEELWKLGVCAKTKHNEVAPAQHELAPIFSTTNIATDHNQLTMELMKSIANKHGLACLLHEKPFAGVNGSGKHNNWSISTNTGVNLLEPGDTPNDNAQFLLFLVAVIKAVDEYQDLLRVSVASAANDHRLGANEAPPAIVSMFLGEELTEIIEAIESGKAYKNKEKLDMQIGVSVLPHFPKDTTDRNRTSPFAFTGNKFEFRMLGSSFSIAGPNIVLNTIVAETLSQLADSLEKSKNFKSDLAALIKKTISEHKRIVFNGNNYAEEWVVEAQKRGLSNLKTTVDALPEFISKKSVELFTKHHVFTEVELHSRYEILMEAYCKTIHIEALTMVDMVKGDFFPASVNYQNDLLELLQRKKAMGYYDSSLEENLISNISKLSASLLNK

SEQ ID NO: 94627 - protein, 228 aa, Unknown
  Obtained from environmental sample
  misc_feature (1)..(228): Xaa is any amino acid
AFPYCLKLRSEPAQIRDYLGGIYNTVVLKDIVERKKIADVSSLDRVIRFMFDNIGNLCSTKKIADTLVSSGRSISVNTLESYLSALTDSFILYRLGRYDVHGKEFLKTGHKYYLADLGLRFYLLGSKITDTGRILENIVFLELFRRGWELSIGKMNTYEIDFVAQQGAKREYYQVALSVRDEATLEREIRPLQAIKDNYPKFLLTMDDDPPADLNGIYRQNVLDWLTT

SEQ ID NO: 94628 - protein, 493 aa, Unknown
  Obtained from environmental sample
  misc_feature (1)..(493): Xaa is any amino acid
MWDYKRDVAQKGTNKNTVAASGNIPADIAGAKLIIWPGDSEVPGWKPIISPVSSVKGKMINLANEITGNSSPHTKNDPDTPYPGNPFYITGALALLDAPGEYYFDRKTNTLYFYPPWDGAPAQRALSMRGNDIAVYAANTSYVTIKDITIFGGGINMRDSKNNTLENCRVLNAQHFYVSDYSQIEEYKWSSCMVVTGSNNRITKCEFGNTSGSGIVLGGDDNVFTNNYVHDTNYAGNFLDGVYVLSSKRLEISHNTMTDQGRAHVYFAYGHAFEKCIVRNNYFENHSILVPDGAGGFYTINTNGGGSEVYNNFVVVGGGKGDNGTMKRLLSGLYVDDLSFNYIVHHNIVIGGTDAGIRHGLTHVNIPPQQGVRFLNNTIIGAQNGFGFHYIYGQNTDARSVTITDNLLVNIKSFDITGVGFENGKWVNYDGNFENGAIPVTKNTQRRMTSSGNARGTIDGLYRPTGNTPGIGAIPKDGALFVFGADWGPGRSE

SEQ ID NO: 94629 - protein, 725 aa, Unknown
  Obtained from environmental sample
  misc_feature (1)..(725): Xaa is any amino acid
MNKKLFSINKIICLFFIALCFMFVTCSEPGGQDNNNNNNNNNNDDDDDYNNPNAGVVRELTFSNDSGLYTSQFNLTITAEGSEIYYTMDGSVPVPEKTGTIKYSAPITVKDRTGEANNLASYARQFYMADDDERGSLPTIYEPNNNQVPKATIIRAIAVNSSGKQSGVATKTYFIGNNLKDYGNIRVVSLVSDPDNLVSENKGIMVRGNVNNRWDSNPPYNYRMKGADWERPAYLEIFEGSGSSRNTALSEGVGIRVRGGWSRGLGQKSFTVYFKEQYGISNLRNYNLIPKDDTLGTTGAVKADGKTPVERYKGFMLRNGANDCEYTKFYDVFLQDLLSDRSYATQASVPCVVYLNGEYWGPYNLQERYSDNHTEYKYGVDKDNVISYDNGELDDGNPATDANLYPNMVVGFANKDMSNSTNYADFCNLVDIDNYIDFCAAEIYIYNEDWPHNNYRAWRTRNVEPGNPYGDTKWRWQMFDTEFALGIYSDGGLIGNSNPREDAFAKIFSNANKPNTSEVITPDVIKDNYDNNRLFKALLKNPDFCKKFVNTMLDLYNVNFHPDNFGPKLTSYETVYKPLMHGYYTRWGTPWGTESVFDDKVRNARKYLNAIGTEMVNNYLPKYFNGGYSFIANIGISAGNLREVTLSVTGASGATIKVNTVTPKLVSGSWTGKYYSGVPITVTASPTASGKTFKGWTVTGGTAATPSATTTTVTLTGNATITATY

SEQ ID NO: 94630 - protein, 662 aa, Unknown
  Obtained from environmental sample
  misc_feature (1)..(662): Xaa is any amino acid
LSTSALSGAVHTTPGSFAWTNGATVPPFGTNNSYNVTFTPTDTANYNTVTNTVSITVINSPITAANITINAPTNGATPATTATVSASENFTSGTVTWIPPDTAFKGSTAYTATVTLTAKTGYTFTNLTNVKVNGVSATITGTPGSTLALSYTFPATGAKTVSGIAIKTQPAKLTYTHGDTLDLTGLVVTLKYDDTTTEDVAVAGFSAKGITTAPGNGAALGRSSNHSKPVSITYGDLTPITTGNLIVERKSVSGFTVGAIAAETYTGIAITPSVSVKDDNNPMTLNTHYTVAYSDNINAGTAKVTITGIGDYIETTTVTFNINPRSITGSDVTITGGTTTITYTGNPITQNISIKYASASLTSVTDYTVAYQDNLNAGTATIIITGKGNFSGSKTINFTIDKANSTVTTWPSASKITYNQALSASTFSGGSTTPAGKFEWTTGTTVPPNAGPHSYEVTFKPTDSTNYNTVTGPVSVTVDKANSSIGTPPTASKITYNQALSASTFSGGSATPSGGTFSWTNPDTKPNAGTASQSITYTPSAGDQANYNSVTGTVNVTVDKATPSITNFPTATGITYGAALSTSALNGGAGSPAGTFAWANGATVPNAGTHSLDVTFTPTDTANYNSVTVMVSITVNQANPAVTWPSAAAITYGQALSASTLS

SEQ ID NO: 94631 - protein, 61 aa, Unknown
  Obtained from environmental sample
  misc_feature (1)..(61): Xaa is any amino acid
VDGQELLQIIARGESSKVQFKERLPHPDSFANELIAFSNSQGGIIIIGVNDKTGELNGLSL

SEQ ID NO: 94632 - protein, 429 aa, Unknown
  Obtained from environmental sample
  DOMAIN (195)...(352): Peptidase family S49
  misc_feature (1)..(429): Xaa is any amino acid
MGIGARELRYLKFKSAAETFTRDSMSEPDRTQYGEILDDMTQLARDTLYAARSWDTGEFDRIINNEFMFSAKYALARGLVDSTGRKEAVLEAVKEISNGKEAGLFLLYGDVESSLTKSKFIYRPGSAGGLFSRPPVIAVINANGVTDMERGIAAWTLANTIRELSEKRRVKAIVVRINSTGGSAEAADYVAEAIKAAKERVPVVVSMGAVAASGGYWASMSASRIVATPVTLTGSIGVIGSWFYDNGLNSKMGFSVDTIQRGIHADMVTGMILPRRDLRPEEEARYKAYILDLYADFISRVAANRNMDIERVESLAQGRVYSGLGALNAGLIDNIGGIDDAIQIARELAKLPDDRRIKIMEYPKPKFFDKILEQLLSARTAGLTKKSVINTAADLFFPALLGAPSLLEDLSYRIEHNGQVMPILPLDYN

SEQ ID NO: 94633 - protein, 368 aa, Unknown
  Obtained from environmental sample
  DOMAIN (186)...(361): Predicted permease
  misc_feature (1)..(368): Xaa is any amino acid
MVALGEGSQRAIEARITAMGTNLLQIMPRRQMSRSGQNMLMRMNAFTKNDIQKLREESSFAAAISGLVQTSANVTGSAGNAQVGVQGVEPDYIVARNWNVNSGSFFDAEDMAARSKVAVLGRTTAKNLFGDENSALSAQIRIGTDYFTVIGLLESKGASMFGGNRDDIILLPMDTVMTRLANSRNIDTILMSVISKEYMDAAQKETELILRESRNIRDGADSDFSIMNQADMIEMASATSKTLTTLLAAIAGVSLLVGGIGIMNIMLVSVTERTREIGIRMAVGGRKRDILFQFLSESVILSLIGGFLGIGVAFLACRIMSAMGIPTSINPLIVLSSALFAALIGIVFGYYPALKAAKLYPIDALRYE

SEQ ID NO: 94634 - protein, 287 aa, Unknown
  Obtained from environmental sample
  DOMAIN (67)...(285): Binding-protein-dependent transport system inner membrane component
  misc_feature (1)..(287): Xaa is any amino acid
VNYLKKRKITDGFWYALMTAASVAVGAALVGIIAYILIQALGMSTAADHSGAARAEFFRIRSLVPMIVSTAWTVVVSLVIALPVGVMTAVYLREYAAKSSVSRFLGLAIDTLAGIPSIIYGLFGLLFFCRFMNLGQSIIAGGLTLSIMILPVIIRTTEEALKTVPVSFREGSLSLGATKFQTILHVVLPPALPGILTAAILAVGRVVGESAPVLLTVGLARNLPKTIFEPGRTLTIHLYYLTKEAIEADDFAQAFTAAAVLIVVVLCINTIVKLIGRSFGKSRAVEE

SEQ ID NO: 94635 - protein, 138 aa, Unknown
  Obtained from environmental sample
  misc_feature (1)..(138): Xaa is any amino acid
MDPIDTYIKSLSARPKDSDATEHTHRPALQNLLEALLPDLTVINEPKRQACGMPDFKLLRNRELFRGVPIAYIETKDIGDGDLDGTGKNKGQFDRYKAALDNLVFTDYLDFVFYKKGVRLGSVAVGELNGKEIKPARA

SEQ ID NO: 94636 - protein, 305 aa, Unknown
  Obtained from environmental sample
  misc_feature (1)..(305): Xaa is any amino acid
MALRFKRQNALFAPSEDQRLQIYLTNSLENIKVSGHNTGFLKWLSDEAAGASALKKRVPIMVVMGNPPYNAESKNKGKWIMDLMEDYKLEPGTDQRLDERNSKWLNDDYVKFIRLGQYLIDRYREGIVAYITGHGFLDNPTFRGMRYSLLKSFDKIYIIDLHGNATKEETAPDGGRDENVFEIKQGVSINIFVRLPDQKKNGQPAEVHHYDLYGTKEQKFEYLLGHALLDTRANQKFPGVHFKDLHPAAPDYFLVPRDYKGKKTYDKGFSVTDLFPVNSMGIATAWDGFTIHDSPGAVQAVIKDF

SEQ ID NO: 94637 - protein, 316 aa, Unknown
  Obtained from environmental sample
  DOMAIN (1)...(250): DNA gyrase/topoisomerase IV, subunit A
  misc_feature (1)..(316): Xaa is any amino acid
GNGKVLVRARLDTSDPKRILITELPFGSTTESIINSIDSAARAGRIKILGINDFTTDKVEIEIKLARGVYAQETIDALFAFTECEQSISVNLLVIKDGLPTVMTVNEVIKYHAKQLVKILTKELELEKKELLDKLHLRTLERIFIEERIYKGIEKMKTAKGVQDAVVDGFKPFMKEVGPRGISDDDVEHLLRIPIRRISLYDINKAKDEMEQIQARIKEINSHLKNIVAYSVSWLKGIIAKIKANEEIGGGQRKTIVGAFDKVIAKEVVKRDVELKYDSKTGYLGTMCRVQKSPKFRHLTGFLLSAKRNVYDYGLS

SEQ ID NO: 94638 - protein, 291 aa, Unknown
  Obtained from environmental sample
  misc_feature (1)..(291): Xaa is any amino acid
VLFIAPLVFYESYTSDKKTLWDMRKPILGAAAGLVFLTVIAVGFFTNFLIPAIPLAAAFALIGALGPTDDVAVGAVARRVAVPRKIMGILSGESIINDASGIICFQFAIIAMTSGSFSLKQASLQFVLLGIGGLLAGVFLTLIKYLIVKKLRTLGIRNVTLHILIEVLTPFIIYMTSEALSVSGILAVFAAGITHSFMRDKFNPETVKLNIARDSVWEFLTFTLDGLVFVMLGTQLPGILKTISNLSISGFAIVGTVLLITVIFTILRFLWWLITIRKKTYQEADSPISAV

SEQ ID NO: 94639 - protein, 344 aa, Unknown
  Obtained from environmental sample
  DOMAIN (269)...(344): Smr domain
  misc_feature (1)..(344): Xaa is any amino acid
VEFDSRTLSPTYRIITGIPGESRALEIAGRNGLPPDIIEKAKSYLDDGRSDISQMISGLKEKRRELDTLEQKMRLEEDRLRDERRKSDLKELRLRQKELELKAGFGGKLRLLLDESRKTLENLVRELKENAPSREGAASPEDTLSREQILKVKGFLNELAQTVEAENAALDEEERAIAKERRGADNADETAANFEPGMEVFAGESKRQGVLVRLDKKTSAGNTWIVEIGSLKISFPEQELVPVAASRKPPKPLAAQLDLAGAPTARAEINLCGMRLEEALEALRRQTEAAMLAGLKTFAVIHGKGDGILQRGVHEWLKKDPFVADYFFSHPELGGFGRTEVVLK

SEQ ID NO: 94640 - protein, 800 aa, Unknown
  Obtained from environmental sample
  misc_feature (1)..(800): Xaa is any amino acid
DQPRIVRTEPRNNPDGAPYSVANDIVLYFNSAFNIDTAKYASAENADGIWITAKNSTGTLTNKDNNWFLKPEYAAADGFFTVTISPKADNPPPSDSLITVSVKGVANEISGKKDDKGYLFSWNTKKEGESKRITLWSATNWSINSNKSQINISAETNIKDEEWDSSDNSKYYFKLYYRQDNGSKNLMFTGNKYSIKKIGWALDQWGYQYIGQINNVPVTDERSVREGRQISGIREYTIIIELYEGKIEVDERGNFIKIINEGIIENKVSFKIWNIQGMRVTSTNPAVEVKTAGELAAMKDNLGGQYVLANDIFVSGAWTPVGSYDESKPEAAFHGKFYGNGHTITLNKSIKAYDHSAGLFGCVANLNPERSDFDRSNWSIIRDLNLTIDGDVNNSTALNFGGIAGTVYGNVYENSPYESGVEIRNIITGGAIKVGYNNVTKNKYLGGIAGYMEGNINVKNCNAGADIEILSDEGKGDIYIGGVAGGSYGSKSFFVRVDDIKCSGLIDSMSRETWNTGPMKANSIIIGGIIGEMFKTAISNTEKIGNLLITKTEAKYIKAGGIVGNIKKGQDSGIINSYFCRENYFNDLGITIVDIFNGTGSYEQHVNIFAGGVVGNIDIDEGHSVDIYRCYSSIRILITGNYFEYNYNNYIEDPIQVSDSVYVGGLAGRLAAETKATLNIENCYALSSELAAYGTGNIYAGGLVGYMDMNNSAVVNTYTLISTIKAHNTKNTGKVYAGGIVGYRNSGILKNNAAVGGITTETNIFAIGGSSSEREAVRVYGGIPATTADIEKNFKNYANK

SEQ ID NO: 94641 - protein, 213 aa, Unknown
  Obtained from environmental sample
  DOMAIN (2)...(213): Homoserine O-succinyltransferase
  misc_feature (1)..(213): Xaa is any amino acid
MPIKIPKALPAYEALSKESVFVITDDYAEHQDIRPLRVGIVNLMPTTMETEIQLLRLLGNNPLQVDITFLNMGSHLSKNAPPGHLEKFYISAEEIINMKVKFDGLIITGAPVENLPFEEVDYWDEFARIIDYSEKNVFSVMHICWGAQAGLYRRYNIPKEPLEKKLFGIFPHSVNEHHHVLFRGFDDEFLAPQSRHTGCSSSAVAADSRLQIN

SEQ ID NO: 94642 - protein, 235 aa, Unknown
  Obtained from environmental sample
  misc_feature (1)..(235): Xaa is any amino acid
AGIIFKTSARVYEIIQTSWKDKGTPYAILGQVFRWVERYLESNKIIIEPVSIGNDPLKRKIMYMLNMNKIVEHLWKFIECEMTTRLIPVFNPGCKIRSTGDMPTWWTTKHREPLKKSHISHIVYDSTWEATEAYKLEKNPHVSAFAKNDHLGFGILYTFGGVPHYYYPDFLIKLNNGKTLVLETKGQDSPQVQAKKAALAEWIETVNSLKEYGEWCSDISFNVADVDVIIGKYMK

SEQ ID NO: 94643 - protein, 78 aa, Unknown
  Obtained from environmental sample
  misc_feature (1)..(78): Xaa is any amino acid
MDACMVDVSEVPGVKVGDIAECINGELSGQISVEAFAKEHNTISYEITTRMARRLYRIYCYKGKVNGWNEVKKELGVE

SEQ ID NO: 94644 - protein, 866 aa, Unknown
  Obtained from environmental sample
  DOMAIN (135)...(248): MMPL family
  misc_feature (1)..(866): Xaa is any amino acid
AVTLITVFLGLRLPRAELDNNNIRFLPDKNQAKIISEYIDETFGGQVMILVGLERPYRTVFEKSFLERIREFSRAVENIEYIKSVNSLMTTQYITGDNESIVVSDLVPEDFSGTDEEITELKRRIASWDLFRGSLVSDDLSATQILITLDALTADFTRPEVTRSIEKIRKIAKEIFTDEAEMYFTGQPIVNEVINKSMITDNILLIPLVVIVLLAMLFFSFRRLTFVLLPFLTVIIAVIWAIGTAALFGIKLSVITTILPVILVAVGSAYGIHIVTHYMEDTRQKKLTVTEHRELVIELVKKLIKPVFLAALTTMAGFVSFCFTPIVPMREFGFCAGFGVITAFTVAVLFIPSMFLLRGPRALKSDHWSDERRKEQTSGHFSNTIAVFFTRIAEKRILVLVLAALAVVISLYGLSKVIVDNAVVEFFQKETDISRSDRFIREYFGGSKDLNLAVVADTTEEILHPDVLQAVDNFSAYLTANVPAVGKVVGFTDIIKRINQVFNVGESPEGLRNTVSHNASDGFGFNDNASGDFGFGNFDSDDAHYIETPRQENGFQESGFNITQYNTADILRFLDSAAGKSPRLSGSELVRELKRLTNYDGMAYYEIPSNPRRYGKETPEELQQLIANYLVLLSGDDDSGYSNDPLEPTAIRTMVQMRTTGSRDSQEVIDIIKEYIAVNFPKNVEVIIGGGVTYEMAVTDLIFNSQIISIFISVFIVFLIIAISNKSLIAGVIGAVPLTLAILCNFAVMGFLGIKLTLGTALISSLAVGIGIDYTIHFIEIFKHEYQSGRQNFLHLTFIGCGKAIMINALAVGAGFGVLAFSQFKIIAELGLLIALSMLITAFVSLTVIPALLMVIQPKFIYGVSK

SEQ ID NO: 94645 - protein, 492 aa, Unknown
  Obtained from environmental sample
  misc_feature (1)..(492): Xaa is any amino acid
MIADNILLIPLVVIVVLGMLFFSFRRFTFVILPFLTVIIAVVWAIGMAALFGIKLSVITTILPVILVAVGSAYGIHIVTHYMEDTRQKTLTVAEHRELVLGLVKKLVKPVFLAALTTMAGFISFCFTPIVPMREFGYCASFGVFTAFAVAVLFIPSMFLLRGPRVLKERKEEQTDGGFNNTIAVFFTRIAEKRKLVLILAALVVVISLYGLSKVIVDNAVVEFFQKETDISRSDRFIREYFGGSKDINLVVKADTTEELLHPDVLKAIDDLSVYLTENVPDVGKVVGFADIIKRINQVFNAGESPEGLRKIVSSDTSGSFGFSDTGDFGFGSFGFSDNTPVKETPKQDIEYHDISKYNMADLLAFLDTASGKSQHLSGNDLIRELKRLTNYEGMAYYEIPSDPKRYGKETPEELQRLIANYLVLLAGDDDSGYSNDPLEPTAIRTMIQLRTTGNMDSQTVIDIIKEYTEINFPKNVQVIIGGGVTYEIAITE

SEQ ID NO: 94646 - protein, 96 aa, Unknown
  Obtained from environmental sample
  misc_feature (1)..(96): Xaa is any amino acid
VIIGAGPAGLCAGLHLTSISSSLSVLLIDKAVPWKRPIPCAEGVGRLGFEEAIEVDPAWIRLVVSRADFYAPDGARVSYTDANKGFIIDRAKMQGD

SEQ ID NO: 94647 - protein, 291 aa, Unknown
  Obtained from environmental sample
  misc_feature (1)..(291): Xaa is any amino acid
MRGHVSQGDMQQWDFSHQSLRRAIKEKMPEELERLNNGIVAHFRNIIAHDDFAAREIMHHLCTANRPDIAAEVIAAYYDNHRTTLARGLADVYTEHGEGQAFLLKVPDSVKNVEETKRWSITETIDDCLPLLPEKTRPFRIEFMLAALAMIEKQEDAQTRRIKTFSEDTVADLYTETGQTKEAGEYYRKALDVRVQVYEQAGTISALRDLALSYSRMGDHLKELGRTEEAGEYYRKFLDARVQSYEQTGTATALSNLSMSYQRMGDHLKELGQTEEAGEYYRKCLNALVQV

SEQ ID NO: 94648 - protein, 314 aa, Unknown
  Obtained from environmental sample
  DOMAIN (111)...(273): NACHT domain
  misc_feature (1)..(314): Xaa is any amino acid
DQDEAEGQAKLAKLKEEIRARFTQDIKNYAAEARENGLAVSKDWAGMVAVDIIAKLREEWGEVSEMPPGWKEQERDMQDSFRESRTLHFAGRAAAITDMAAFCVGGDITPQLLMLQGEAGSGKSGLLCKVMDELEDQCLLLPFSCGISSRSSLVENMLRYFISLLCEKLALEDDSDDITKFQDIKDRFSELLFAACTKRRVVAVVDALDQLAGSDEARRMLWISGKLPENFRLLCSIIEGPETEAVKQLGGEVRPVPFISTEDKAAIIYGIAARHHKQISGAVVGHILRKQTPDGSHAAQKPLYLALITPDLVM

SEQ ID NO: 94649 - protein, 503 aa, Unknown
  Obtained from environmental sample
  misc_feature (1)..(503): Xaa is any amino acid
EKRYLRLAQTLDAAVSGDSALNKYRDKLNERLAASVDYDKRFARAIAKSGRVTLGLSMADESDYRDKASPVAHRMDMDWHNSLHPSSAIDMPDSLLSTIRNKKTIIDGIYPENARAAKHIGHVNAGEASVIRTIPLLYRFAKFPPVYLPMSVRAAADLFATPNEEIVFKPDEYIDIGKPFKIFKDGEGKVSFSYPDFTEAQFRIISADAAGILSHKKGQKRYVSSYVAVFRSAGGGVGWEMRGGKASPKMAAALSAVLLKKGGVDSVGNVDTNGVNKDRIDLKKMAVDEEIEIGDGFAIRRDADFSALPGGDRLEWEAFSEDESVWLSALDIETLSKLTRSDLDLDSSSGVDRRLVTFDFWVKREKGVLVSSLPVLRTPTLNELLADSADAILESVPKNSRRDFGVPARIPLRGGNRHVVTYFGPKSKPFPYSSFYDVMENNEANLYAMEGNVFIVGSTAPAVFDIKSAPHERLFPGVEVHASLLNSIFTGNYVRRLAEGRIC

SEQ ID NO: 94650 - protein, 124 aa, Unknown
  Obtained from environmental sample
  misc_feature (1)..(124): Xaa is any amino acid
MPHNFFEFFEFISPFYFPILLAVTVYFFILSLANHYEMWRFTSASQIFDGPMVSVLVPARNEEQNIERCLNSLRNQVYTRYEILALNDNSTDNTLEIMDRIAASDKKVRVINGKPLPDDWYGKP

SEQ ID NO: 94651 - protein, 96 aa, Unknown
  Obtained from environmental sample
  misc_feature (1)..(96): Xaa is any amino acid
MEMPQYNELFNPLLEALRELGGSGSIEEIYNKVVELQNYPSEIVDVIHGEGPRTEIEYRLAWSRTYLKKYGILENSSRGIWAISNDKHNIKEVIQK

SEQ ID NO: 94652 - protein, 403 aa, Unknown
  Obtained from environmental sample
  DOMAIN (4)...(401): Protein of unknown function DUF111
  misc_feature (1)..(403): Xaa is any amino acid
MKTLYFECNMGAAGDMLTAALLELHDNPQEFLKKLNGIGIPNVLVEAEQSVKCGITGTHIKVTINGKEEDDHAHEHHHHKHIHGEHHHSHNSYHDIEHLIGRLNVSDTVKKNTLEVYKLIAEAESHVHGVPVDKIHFHEVGEMDALADIIGVCMLIEELAPDIILASPVNTGSGHVRCAHGILPVPAPATAYILQNIPMYSDQTQSELCTPTGAALLKHFVKEFRAMPVIYVNKIGYGMGKKDFEKANCVRAYIGSMADNAEEVIELVCNLDDMTPEAIAFTQQLLFDEGALDVYTTPIGMKKGRMGLSFTCMCNNELKDKMISLIFKHTSTLGIRENTSRRYTLQREQKEIQTKYGTVRIKTAYGYGVQKSKPEYEDIAKIAKERGIAIQEILKEIGLPVFS

SEQ ID NO: 94653 - protein, 384 aa, Unknown
  Obtained from environmental sample
  misc_feature (1)..(384): Xaa is any amino acid
MSKRLFNVAGPCVPGDHYMLDPLRGIGGELMDLIDDKQYFVIHAARQSGKTTLLKQLTRDINAAGKYHALYCNVEAAQGWTDPEKGIPVIVEKLRLALRDSGMQNGFAAGSDGIGAASVLKDSLSAYCKTLSKPLVIFFDEADCLSDGTLITFLRQLRDGYVNRGDVPFVHSVALVGMRNIRDYKAKIRPDSATLGSASPFNIVTEALTLRNFTAAEVAELYAQHTAETGQVFERQAVDYAFEQTQGQPWLVNAVARECVDKITQRDCTVPITQSLTEQAVQDIILARGTHFDSMMERLKEPRVRNIIGPLIIGEDVIDRGDDDYLYTRDLGLIREYEGRTEPANPIYAELIVRALNWNVQESIRSSHEEYDVPRYLKDGKIDI

SEQ ID NO: 94654 - protein, 212 aa, Unknown
  Obtained from environmental sample
  misc_feature (1)..(212): Xaa is any amino acid
LFYHDLQSEKLENDNTLDLFILKIKNNSFSYDELVSELGNKLHYYALSRQSVDQLIKEDKLNDLINTAKSKLRDYAVNEGELGEFLLYCLLESHLNAPKILTKLELKTANNDYVKGADGVHLLRLNEKNYQLVFGESKMIADLTKGIYSAFASIKKLLTEKTKLQFEIGLVSSELFKEAFNQSDYDFLKKIIVPNANADETNMDYSFGVFLG

SEQ ID NO: 94655 - protein, 204 aa, Unknown
  Obtained from environmental sample
  DOMAIN (25)...(93): ATP synthase alpha/beta family, beta-barrel domain
  misc_feature (1)..(204): Xaa is any amino acid
MVNIKPAEVSEVLKKQIEGFKTEVELEEVGTVLQVGDGIARIYGLLNVQANEMIEFEGGMKGIVMNLEEDNVGTVLLGPSNQIKEGFSVKRLRRIASVMVGEGLLGRVVNTIGEPLDGKGAITGQLYEMPLERKAPGVIFRQPVKEPLQTGIKAIDAMIPIGRGQRELIIGDRQTGKTSIAIDTILNQKEFYDRGDLFTVSMLQ

SEQ ID NO: 94656 - protein, 315 aa, Unknown
  Obtained from environmental sample
  DOMAIN (160)...(239): Cache domain
  misc_feature (1)..(315): Xaa is any amino acid
MYIKIPGILKKRPLYVQILFTVFAFLLMVVLSYIYTAKIVRINIARYAESELDSMERKINSELLESRTILDDYAQSIQYLINNGSNAGKLIAYNEDISNHLLSKNNGALSPNGPFCYIEKLPDGPVLINGIGWKAPDSWNPVERPWYKAALAADGAIAESDPYKDSVTGDIIVSYSRCIKDLNGNRLGVVAIDVKVSQIGERVANTSLAKGGFGVLINQDLTIIGHLNPDFVGLKMYDPSVPLSFLTDELVRTGVISGAEWVNWRGEPVVGFFKTLSNGWRLGLLTPKTLYYRPVYEMAFVLCLLGTLLAAVLII

SEQ ID NO: 94657 - protein, 281 aa, Unknown
  Obtained from environmental sample
  DOMAIN (1)...(268): Domain of unknown function DUF20
  misc_feature (1)..(281): Xaa is any amino acid
MGSIFLRQIMDLGRYARDTLNQRPEYLHDLFEKVSVLISEVSAGLINITSDDITNQLKALISNELLGNKQMVFLSGNIVRIIGTVAINTLVMVFSLFFFYADGPYLSRLFLRAIPIRTEYISALTRKFLDITRNLFFGYIIVALLQAVVAFIIFTIFKINGSLVLAVVTFLFVFIPVLGATVVYIPLAILKIASGNIAGGVVFFIVSAVFISGIDNVLRPIFLRDRIQLHPLIIFFAILGGLVVFGFNGFILGPVLVILFLTVLDLFLIEHKIEAKDQAKV

SEQ ID NO: 94658 - protein, 488 aa, Unknown
  Obtained from environmental sample
  DOMAIN (316)...(482): NfeD-like
  misc_feature (1)..(488): Xaa is any amino acid
MKHILKVLIFPLILTGLVYGGDTTGAVVAKAYVIPVVGTVDHGMAAFVGRALREVSKDAGVVVLDIDTYGGQVDAAFNIVDSVAACKVPTVAFVRSKALSAGALIALSANKMAMRRGATIGDVAPLINTNEGPKMLGEKHQSPIRAKFRAMAVKNGYPAILTEAMVTEEIAVFEVTLTDTVFYADSARMAALDQGVKGKIVSSKLVVKAGELLTMTDAEALRYSFSVMTVGSVEEMLQRMGYKNAAVVSAGRNWSEGFVSVIAMLAPVLMMIGFSAIYIEMRSPGFGLPGIIGICCLALVFFGQYAVGLANYTELILLALGAALLALEILVIPGFGVAGFAGIALLIIGMVLSFQNFVVPSPEFPWQAAILKRNIVRVSVSIIGSIVLILVFFKYFFERIGRVVKGPYLAATLEGAQSDLGMVFVPKLGDRGVASTPLRPSGKVRIGSELCDVVTEGQFVDSGAEVVVSQIQGNRIVVAPEPRKYQKK

SEQ ID NO: 94659 - protein, 499 aa, Unknown
  Obtained from environmental sample
  misc_feature (1)..(499): Xaa is any amino acid
LPIKFFFATAFLIILGFSSQLYLPIRSSTEPILNENNPEELKDFLDVLGRKQYGNMNMFERAFYRRGAISNQFLFSENIGYLGYHLNQWLPAPLSAQNPGIWVGGSLGKFQFFHRIIFEFLLIAVFAGVWLCRRNSGVLLVVFMFLLSSVGLVLYLNLADGTRIDSYNAKQWNANIKELRKFVPDSIPNLPSVNELHAQFSFYKALPASMQEMWVNGAPKAKGLKTFFAWEDILEEQGKKMADLPRIVHREVRNRDYFFTPAFLFFAIMAAVACGAGIQRMDSEKGKKIVAYGLAFAWLVPFVSNFSSHNRSQDFIARDFAINVLNSIPQNGILITYGDNDTFPLWYMQMAEKHRTDVVVINESLSYSDWYREQVLKNYPDLNVVESGELRVESEGNFIRKIIEDNWPERSVNFVIGVNPSEYEEFSEDMPLIGLVRNLGMDSQKADSLLIANLAENYQYSELNERGQEANEQTITIYRYLAKKALLAKKQAKNKSSVD

SEQ ID NO: 94660 - protein, 300 aa, Unknown
  Obtained from environmental sample
  DOMAIN (225)...(271): RNA-metabolising metallo-beta-lactamase
  misc_feature (1)..(300): Xaa is any amino acid
MAYLTVKGGDGKEVNILASGDLGRPGKPIIRDPAKPPAPDYIILESTYGDRLHENTENAMDKLARITKQIVKNKGKLLIPSFAIERTQELVYYFHILTDEGIIPEIPIFVDSPMATNATTIFQVHPECYGEDIKEAFIKHHKNPFGFNSLHFTTSVLESKALNDRPGPLIIISADGMCEAGRIQHHLIHNIASPNTTVLIVGFMAENTLGRRILEKADEVKIHNNWLKRRAAVEKINAFSAHADYGEAIKWLKSLDTSRLKKIFMVHGEPKSQAVFKKHLDVAGFPNVDIVKYGQVYDLS

SEQ ID NO: 94661 - protein, 285 aa, Unknown
  Obtained from environmental sample
  DOMAIN (26)...(164): CheW-like domain
  misc_feature (1)..(285): Xaa is any amino acid
AVLKDLEQVNADLQEQKERVDNVDFKMVTFSLAGKDYGVDIMSVKEIAKADKFTFVPNAASFVRGVYNLRGDIIPIIDLRQFFHLPVEKKGDNLENMLILHINDQVYGTIVDKIDKVVGITKDTIQPPHPIFGDINIKFISGVVEKQGDLYIILDVVRIFSIEDEKSKTRAAVSDGGEFFVPPPAAADSAAAQRAAADSAIGFLQESLLALRHFSVSSINERWLHKRFAEWSSRRSGDALQLRTLSDANEFLEDFPSPCTNQFWNESYANAVKKILPNVNFTNIG

SEQ ID NO: 94662 - protein, 385 aa, Unknown
  Obtained from environmental sample
  misc_feature (1)..(385): Xaa is any amino acid
MPEDAGRLYSASAKKESVFVYNGKEAAALEVFRRPGADPLRLSKEIQKTVKEAASLFSRDAQIEIVSDASPSLLSRINGFLISAALGVLAVFCVLLFFIRRLKYSLLAALSIPVSAAAGICLLSITGRSLNSMSLSGLAMGIGLVSDISVIILDLLNRSFEKKDTVPTYTPPESEEIGNKVFSIAGSSAASTLTTALVFLPVIILPGPLGSLFGDTAVAITASVAAGWIYAQFCLPSLYRLFFNLNTKNTVIRDGSLDKKYSKFLLHLLKFPVKVFIGAALVVIIGSLLIFTRPVVFISPDEAEEVWVSVNYPSGTLLEAASITGKEISRIVSGLPSVKTVYGRAGAEEEDAAGRADIDYRKEDFTLRCVLKKGAKPEKALAEIR

SEQ ID NO: 94663 - protein, 288 aa, Unknown
  Obtained from environmental sample
  DOMAIN (31)...(220): ABC transporter
  misc_feature (1)..(288): Xaa is any amino acid
MSIIKLENVGFMYPRAQKHALEGINLSVSQGEFLAVMGENGAGKTTFCKLLNGIIPHISGGHLSGTVTVDGADTVKSSVPQLALKVGMTLDDPDAQIFTSSVRYEAAFGLQNILLQPEEIEKRVSFALQAVGLAGFEDRTPSTLSGGEKQRLSIAAVLAMKGKILVLDEPLSRLDTRGAQEVMSVLNDLRKNEKITIIMVMHESAKAVEFADRVCILKNGKIAALDTVKNIFSDISLLEKNGIQPVIGNLKNFLPQKVSYDNPVIDIKNLSFLYSNGSGNKKYQPVNR

SEQ ID NO: 94664 - protein, 412 aa, Unknown
  Obtained from environmental sample
  DOMAIN (99)...(203): Shikimate / quinate 5-dehydrogenase
  misc_feature (1)..(412): Xaa is any amino acid
MKKTFGLLGEKLGHSFSPLIHGYLGEYDYSLYEVSAADLDSFMTDRHFDGINVTIPYKQQVAPYCVTLSREARTIGSVNTIIKDESGALHGHNTDYHGFNVMLEHGGIDPKGKKVLVLGDGGSARTVRAALDGLGAKEIVTISRRGTDHYGNIERHYDADVIVNTTPVGMYPDNGSSPLSLAGFKQLAGVADLIYNPTRTKLLLEAERLGIPRVSGLAMLVAQAEAASRLFLDGPSRPELVNKIHDVILKETQNIALIGMPGCGKSTVGRLLAQAMGRPFTDIDRQIEAAAGKSIPKIFTGDGEEAFRQLETRILGEETKKSGIVIATGGGVVTQQENLDLLQQNSIIVYLKRKLNELVTDGRPLSRGIGIQTLAEQRLPLYETWSDCAVQVEAKPELTAVRIQEVIRDIWP

SEQ ID NO: 94665 - protein, 384 aa, Unknown
  Obtained from environmental sample
  misc_feature (1)..(384): Xaa is any amino acid
VKKLAGTIVDNWIFQVSQHYRLYPITEEDKDYTNPEGKTLHFKGLKNFQVDKTYRELYLKEAEGVISGKGGLLADDERPVSRHAYGATLIAAAVTEDYWFGIQIGDGKLTAFYPDGSYDQVVPWDDKCFLNVTNSICDDDAAERARVYVKKRGGFAAAVDAIGAIKRLEDNRPMPSAVFLNSDGVDDSFPIEDNMDHMAKKFYYSVLRMFIENDDDPAKGWGTSVRELAAYLPDLSKRGSGDDISVAGIIDMDAVKTEPFREALRKAKAEADERRAREKEEREKAVKEAEEARAKAAEEKKAAEEAAAKAEPSARQQLADDPSVQETAEYKRDLEKMDNSNFIFSETVQPSPQKQASEGDSDIPSSDAAYKAQPQTGANVDTLA

SEQ ID NO: 94666 - protein, 264 aa, Unknown
  Obtained from environmental sample
  misc_feature (1)..(264): Xaa is any amino acid
MKSVILVILLMFFWTNCVYGQNSNDFEFTENEGKLTITRYKGNATAVIIPERINGKPVVAIGDLVFIKNYEALIAGEEDNPIGVGITSITIPESVTDIGMGAFAYNRLTHVTIPNRVTSIGRSAFANNQLVNINIPNSVTSIESYAFYDNKLTSVNFGNSVEEIGAYAFAFNQLTSVNIPNSITYIGQGAFNNNKLTSVTIPKKNIYIEGISINDINVLVQKEVNFFQDWINNQKKAGNNNYTSMIQGVVEQQLKIVTQLLFMT

SEQ ID NO: 94667 - protein, 403 aa, Unknown
  Obtained from environmental sample
  DOMAIN (88)...(396): Pyridoxal-phosphate dependent enzyme
  misc_feature (1)..(403): Xaa is any amino acid
MSDININYISTRGNSEPLSFAGAVTEGMVSSGGLFVPEKIPQVDFSKLAGRSYKEIAVAVLTPFMGGFDDGEIAACVNEAYTSESFDIPEAVKTVPIDGRRYILELWHGPTAAFKDVALQIMPQFMRFSKVKRADDSRTLILVATSGDTGKAALEGFKNREGISIAVFYPHGGVSEIQRLQMAATDGNNTHVFAARGNFDDCQSGVKALFGDSELRNKAAEHGVKFSSANSINWGRLCPQIVYYVKSYLDLVSTKAISYGGKIDFCVPTGNFGNILAGYYAKEMGLPIRRLICASNKNNVLTDFFKSGEYTVKDREFHKTMSPSMDILISSNLERFLFEMSGRDAGKVIGWYESLAKTGKFSVDYGIMKKMKGLIEARWVDEDEALKTIGDIYRESKYIMDTH

SEQ ID NO: 94668 - protein, 498 aa, Unknown
  Obtained from environmental sample
  DOMAIN (1)...(343): Carbon starvation protein CstA
  misc_feature (1)..(498): Xaa is any amino acid
EDGQEYVPTSPAVLFGHEFASIAGAGPINGPIIAAMFGWVPAFLWLLFGSVFFGAVHDFAALYTSVHNKGKSIGYVIERYVGKAGKRLFLIFVWLFSILIAAAFADIVAGTFAGFGDMGILNNVNASVASSSCLFVLAAIGLGFFIRKRRASGLASGIVAVDLLIICIVGGMFFPVFFDKAIWLYMVFGYIFIASIVPVWALGQPRNYLNSFLLLAMLLAAFIGVVFTAPVIRIPAFTGFIINGNYLFPALFVTIACGAISGFHSLVVTGATSKQLSSEKHMLPISYGSMLVETMVAILALIAVGSMWKGKMPEGTPPVIFATAVSGFLSRFRLPHQASFTIVSLAVSSFVFTTLDTVARLGRLSFQELFSDGDQKQKKNPLVLILNNRAVASVFTLGPAYLLAIMGYRNIWALFGAANQLLAALTLIACTLFFKKTGKRIFIIIVPTVIMLAVTYTSLCLSIKGKITLLLNGTFNAAVDGIQMCIAILLLILGILVA

SEQ ID NO: 94669 - protein, 260 aa, Unknown
  Obtained from environmental sample
  misc_feature (1)..(260): Xaa is any amino acid
MERLDEGFCEVANPYNQKQIKRVSLLPAAGEDDTADNVEAFVFWTREPKNILAKTEELEKRGFRFYVMVTITGYPAELEPNMPVLSKVLVNMKKLSQKIGLDRVIWRYDPVILTSVTDEDFHCKNFDFLARELSGAVRRVIISIYDEYPAAKKRLELKEKLGFLRMLEINDSLPRLLGSFAKSVQNAGMEIQSCAEKEDFSSFGIKGGACIDAALINKLWGIETGGKDKNQRPDCLCCKSVDIGAYGTCAAHCVYCYSIR

SEQ ID NO: 94670 - protein, 295 aa, Unknown
  Obtained from environmental sample
  misc_feature (1)..(295): Xaa is any amino acid
AAYRSAENERQYQKRIYERTLELFEKSSIAKTELETAEYRYINAQNSLINAKSNLEQAELDLNNCTIKSPIDGIVLSRAVEAGQTVAASLSAPTLFTLARDLTLMEVKADVDEADIGMVKMGQKVEFSVDAFPNDKFTGEVQEVRLSPNISSNVVTYTVIIKANNPEQKLLPGMTANCNIIVEEALQVLTIPLRALQFKPDENTPGYVPQPGGEAPFGGGREGRDGGGKRMGNQNRNRIWVVGTDGSLSMKRVNLGLSDGAKTQVLEGVDAATSIVVGVPIASEKTVKQQRVLLC

SEQ ID NO: 94671 - protein, 661 aa, Unknown
  Obtained from environmental sample
  DOMAIN (9)...(162): Type III restriction enzyme, res subunit
  misc_feature (1)..(661): Xaa is any amino acid
MRQFEVVSPFQPAGDQGEAISALAEGIQTGDRYQTLQGVTGSGKTFTMAKIIEAVQMPTLIVSHNKTLAAQLFREFKGFFPNNAVEYFVSYYDYYQPEAYVASRDLYIEKDASINDEIERMRLSAARSMMEREDVIIVATVSCIYGMVTPDVYKKMTATFSKGETVDVDSLMRRFVELQYERNDAVLERGRFRRRGDTLEIFPAYMEEAYRVDLDWDKVERIRRFHPVSGEMLEDIDRALIYPAKQFVMPGEMVQNAMGAIKQELKDRLEYFKNNGKILEAERLKTRVEYDIEMLNEMGYCSGIENYSAHLAGRKSGETPDTLVDYFPKRHLTFIDESHVTLPQLGAMYAGDRSRKQSLVDYGFRLPCALDNRPLRYDEFVERLDKTVFVSATPGKNEIEQSARVVQQVIRPTGLLDPEIEVRPSEGQMEDIYGEVQKRIKAKERSLILTLTKKMAEDLTDYLTSLGLKVRYIHSEVETIERVEILTQLRQGDFDILVGINLLREGIDLPEVSFIAILDADKIGFLRSLTSLVQIIGRAARNAAGKVIMYADRMSEAMEKAIAETNRRREIQIAYNKKHGITPATVKKAIAEILTRHVEEADNAAASTVEVLKKSFNVLIPAQRKQLIKALESEMLEHAKNLEFEQAAIIRDEIAKIKEVG

SEQ ID NO: 94672 - protein, 103 aa, Unknown
  Obtained from environmental sample
  misc_feature (1)..(103): Xaa is any amino acid
MDFLKRLESERLIFDGAMGSLLEDTLAPGEFPELLNIKNPEKILSIHKAYRNAGCQILKTNSFGANRLKLSDSGFSVNKIVSEAVALAKKAGGEGAFVALDIG

SEQ ID NO: 94673 - protein, 811 aa, Unknown
  Obtained from environmental sample
  DOMAIN (449)...(539): MutS family domain IV
  misc_feature (1)..(811): Xaa is any amino acid
MLDQYRRIKREHKDDVLFFRLGDFYEMFADDAIEISALLNLTLTSRNGLPMCGVPYHAARSYIARLLKHGKKIAICEQLGPCRASPNRALEPGRSQKIIDRQVVEVITPGTTVDEDYLEQGCSNYLAALAVTGHGDCSFAYIDLSSGGFYVTSFPAVNSSDRLRQELERIQAREMIVQESLLEEEPAIARALYERPNLVLNRWADWLFDIDRSKKRLMRQFNVSSLRGFGLEDNSPQLLCAGALLDYLDDTARALLPHVRSITVYTDNEFVGIDESSQRNLELVKNLRDGDIRFSLLEALDETRCAMGKRLLRRRVLHPLRNLGRIQARLDMVETLYRDQGTLNSLRELLGRTPDLERLSSRLAMDKAHGKDMLAIKNALFSCKQIRELREGLGIVCEADASVKTDEGGSSDNSKGFAKLMELADLLHRGICDDPSIALNEGNLIRDCYSEELDSLRTLKDSGRQLLEAYLEEEKLQTGITGLKMRYNRLIGYFFEVTNAHKGKVPAHFIRRQGIVGGERFSTERLANLETDINSASDKIIDLERRLFLEIREKAKTVLDELAQEARRVAEIDAAQSLAKAASIRGWTRPTVDDSNALEIYEARHPVVEAQLGSGEFIPNDIILNSAAAGGAEAPRPYFAMITGPNMAGKSTYLRSAALITLMAQIGSYIPASQGRIGICDRIYCRVGASDNLARGESTFLVEMNETAYILNTASEKSLVIMDEVGRGTGTNDGLSIAWAVSEELLDRVKCRTFFATHYHELSLLNHPRIVNRSMEVLEKDGGIIFLRRLREGPTAESYGIHVARLAGLSP

SEQ ID NO: 94674 - protein, 153 aa, Unknown
  Obtained from environmental sample
  misc_feature (1)..(153): Xaa is any amino acid
MCIGCGHCIAVCTHKARSYIDDTQRFLSDLNTGRKMIAVVAPAVASVFPDKFLNLNGWLKSLGVEAFFDVSYGAELTVVSYLDYIKSKNPRTVIAQPCPAIVTFIEIYHPELIKYLAPADSPMLHTIRMIIEYYPQFRDHKIAVISPVYCQAA

SEQ ID NO: 94675 - protein, 238 aa, Unknown
  Obtained from environmental sample
  DOMAIN (1)...(184): CobQ/CobB/MinD/ParA nucleotide binding domain
  misc_feature (1)..(238): Xaa is any amino acid
LVDFDAQANLSSGVGANPPKPGIYELLSGKASIGQALKKTAVPRLDVIPSSIDLSGAAVELIGQEDRNLYLKKTLAPVKDSYDFILIDCPPSLGILTLNGMAAADSVLIPMQCEYFAMEGLSLLLKTVQRIQRGLNRSLGIEGIFFTMYDPRTKLAHDVVKQVSAYFKNAVFKTIIPRNVRLSEAPSHGQPILLYDPTCTGAKAYQSLSREIIKRSDATEKNKNVPAKSAEISSRNGG

SEQ ID NO: 94676 - protein, 550 aa, Unknown
  Obtained from environmental sample
  DOMAIN (275)...(389): PAS fold
  misc_feature (1)..(550): Xaa is any amino acid
SHILYIGIQETLNEYAIQSGQRFEDFVPHDRLNPSIADNDWYYDCKNSRNEYTLNIDIDKVTRTRLLWINHKVMENGNLLGIFCAGLPFDEVIHALFERYDTENVKGYVIDRDGIVQMDSTLSILSEDEHKRIPEADSDPALAAAIELHLKNIEGYFGSDEDLQVIKLTKGPYQYVSIKPIAGSDWSIVTFFSNRSLFSIWRLLPLMISLLSAFVLYSLLGNIFINHIVIKPLNLLTGSISAEHGSIFGNDRGDEIGELARTIQDMRLKIHEADERVRLMLDATPLCCNLWDKNYNIIECNEAAVTLFGLKNKQEFLDLFSELAPKCQPDGKLSSVKIAENMKKAFEEGRDIFEWMAQMPDGTPIPGEITLVRTSYGGNYVVAGYLRDLREHKMMMKELELRDKLLDVVNRAAAILLQSGIDDFENSLLRSMGMIGEAVGIERVYIWKNHIADGVHCCTQLYEWLQDAEPQQDSEYTVNIPYSTMGDWEKVLSSGNCINSKVCDMSADEQAKLVPQGIQSILVVPVFLQERFWGFVGFDDCRRERIFTET

SEQ ID NO: 94677 - protein, 201 aa, Unknown
  Obtained from environmental sample
  misc_feature (1)..(201): Xaa is any amino acid
MRVKEDGMKIKIKLSIVVIAIMAVVVTGIATLLLWQASKNSLQLSLRAQEHLANSRVEFWKGREDGYIRALTTLASVMGDFEDVIPEERRDKYDDMLESALDEESQMVVLYTVWKPNALDGMDDSYIDRVGSSPTGQYAMAWSKESGRLEKRVSNDIDNVMKHITSPNAFKDLISEPVLRRINGVDMYTIRIVVPITNHNK

SEQ ID NO: 94678 - protein, 429 aa, Unknown
  Obtained from environmental sample
  DOMAIN (342)...(428): Transporter associated domain
  misc_feature (1)..(429): Xaa is any amino acid
MDETSIYYISITAALVILFALSMFFAFCETSFSSLSRIKLKNMAEKNRETRKATRARLVLKLLDSYDKLLSSILIGNTIVNVVTSALATMLFMGLFGAKGVSIASVVVTVLVLVFGEISPKTLAKESPELTALRSAPLLRFFILVFKPLNYLASAWANIIVKIFPPNANRHITEDELLTFVEEVRQEGGINRREEHMIRQAIEFDDITAAEIMTPRMDMTAVSETDTAQHIESLFEDTGFSRLPVYRDNIDNITGIILFKDFHHEVIKKGKSPLEIIKPAVLVTKTMKIQRLLQTLKEKQSHMAVLVDEFGGTLGIVTVEDILEELVGEIWDEHDRVVEPVKHNADGSFSALGSLQFQDMVDYIGGKISNDDLHEGDEIPGTTVGNWVMETKGSLPRMGEQFDWHKLRIRVSRVQRHRVMEVIVTEVKQ

SEQ ID NO: 94679 - protein, 287 aa, Unknown
  Obtained from environmental sample
  DOMAIN (3)...(286): Beta-lactamase
  misc_feature (1)..(287): Xaa is any amino acid
MNINSYVRTIEKQKLNCEAIIVLQHGEKIAEHRWMPEAPRNSFSVSKSFVSIAVGMAIDRGKLSLNSRAADFFPEYCRKAGKRLSSLTMEHLLTMTRGHRAFSRPASVAEAIAQPLTYQPGTHFIYDNGSTFLASAMFTRAMGLTVREFLLDALFRPLDIPDPQWQESRDGHTVGATDLALATSSLARFGQFLLQRGQWQGRQLVSSAWIDNAGRPQINTRSRRPDCGIGYGFGFWPCRYGAYRADGKKGQFVVVLPRQDAVVAINSNEEKPYPILYAVWDEILPLL

SEQ ID NO: 94680 - protein, 232 aa, Unknown
  Obtained from environmental sample
  DOMAIN (12)...(211): Alpha amylase, catalytic domain
  misc_feature (1)..(232): Xaa is any amino acid
MPKWLSNAVFYEIYPQSFYDSNGDGIGDIQGIIHKLDYVKELGCNALWLNPCFDSPFKDAGYDVRDYKKVAPRYGSNEDLFQLFDEAHKRDMRVLLDLVPGHTSEEHPWFLESKKASPCAELKNRYIWTNSWFFWGLEGLKFIAGEAERDGCYIINFFKSQPALNYGFLERREKWQLPPEHPDCVATREALKDVMRFWLRGDKGRGCDGFRVDMADSLVKFDSPEKSSTSTL

SEQ ID NO: 94681 - protein, 268 aa, Unknown
  Obtained from environmental sample
  misc_feature (1)..(268): Xaa is any amino acid
MAKEIKVGTTLSLKDLFSQGMSKAAGAASGFAGKTLGAIEKVDKAVSGTAAKLAAFGLTLSVGAAAKGVIEMDHRMTRLGLSVNASAEKISKMKKTIFDVAQAADVKIDPDKIISGIEVVISKTSDLKYAEDNIRNIALAIQATGESPESMGDLFSEFRKFEYSTEQISSLMDDMVAQANQGAFSLADFAKAAPQIFSSLEANKIGAVPENIKSVNAALQIINAGAKNSTKTFAAFNSVFGEITDPAKQRDLRKLLKINVKDSSGNLK

SEQ ID NO: 94682 - protein, 121 aa, Unknown
  Obtained from environmental sample
  misc_feature (1)..(121): Xaa is any amino acid
MGNEKLGMMGTTILFKPTHIQKKALALLKSGAKHILLFGGSRSGKTTVLVMAIIYRALKFAGSRHLICRYRAKDARSSVMRETLLPWLDKTVGKDGYTYLAHESMVTLFNASEIWIGGLGD

SEQ ID NO: 94683 - protein, 199 aa, Unknown
  Obtained from environmental sample
  misc_feature (1)..(199): Xaa is any amino acid
MSRYWNSRVKNISPYVPGEQPRDRKFIKLNTNENPYPPSPKVIKAIHEAANDRLRLYPDPQCTALREAVAQRYAVKSEQVFAGNGSDEILAFAFAAFFESNNGNNAGSILFPDIAYSFYPVYADLWDIPYRTIPVREDFSINTVDYKIPSNGVVFPNPNAPTGIPVLLGDILSLAEYLEKLDKVLIVDEAYVAYGAESA

SEQ ID NO: 94684 - protein, 191 aa, Unknown
  Obtained from environmental sample
  DOMAIN (18)...(171): Imidazoleglycerol-phosphate dehydratase
  misc_feature (1)..(191): Xaa is any amino acid
MVKLNLDGSGAGTFDYPIGFIGHMLNTFARHGLFDLEVRASGDLDVDQHHLVEDTGIVLGQCFEKALGEKRGIRRSGSCLFPMDETLASAAVDLSGRPFLFIDAKLSGTPLIAASSGEGGEVFNFQTDTVEDFWQGFTNAALCNLHLEIIRGRSDHHKIEAMFKAAARALRTACEIDERRGDTVPSTKGRL

SEQ ID NO: 94685 - protein, 124 aa, Unknown
  Obtained from environmental sample
  DOMAIN (48)...(122): HisG, C-terminal domain
  misc_feature (1)..(124): Xaa is any amino acid
ACGTTRLKIIGTVLESSTRFVASHATLENVTKRDRIEELVMLFRAVLDGRERVMLEMNIPKDCFDAAVNGLPAMRSPTVAPLFGDEGYAVKIAVKRNEVSEIIPRLKKLGALDILEYDLRKVVP

SEQ ID NO: 94686 - protein, 299 aa, Unknown
  Obtained from environmental sample
  DOMAIN (4)...(146): DEAD/DEAH box helicase
  misc_feature (1)..(299): Xaa is any amino acid
SLLFPGFGCILADDMGLGKTVQSIAALLRLKEEGLLGDGCLVVAPAALLNNWEKELSRFAPSLGVSRYHGSRRRLDREQDVFLTTYQTAVRDAEKLKDEAFSLLLVDEAHLMKNAETRISRTVKLLRSQYRLALSGTPVENRLEDLRSLFDFILPGYLGTAASFKEQYRIPIEVMRNKEQAQALQKITSPFLLRRLKTDKKIIKDLPEKIVTNEYAVLEKDQAALYESVVSESIKKTEKIDPKERSTVILSLLTSLKQICDHPRVFDKESPAVSELSGKSQLLLVLLEEILANREKTLV

SEQ ID NO: 94687 - protein, 407 aa, Unknown
  Obtained from environmental sample
  DOMAIN (5)...(69): Heavy-metal-associated domain
  misc_feature (1)..(407): Xaa is any amino acid
MNTETLSVGGMTCAACSARVEKALRKLEGIESATVNLATEKATVVYNARALRLSAIKEAITKAGYEAREVSADRVDEDKLRKEKEIKILWTKFIVAASLGLPLLYIAMAPMITWVTLPFPRALAPMRFPLTYALVQLALVIPILIAGNRFYTLGFKNLLRRSPNMDSLIAIGTTAAVVYSVYNMWRITQGDHMAVDALYFETAGVIIALILLGKSLEAVSKGRTSEAIKKLMGLAPKTAIVIVNGEEKEIPINEVIPGDIIVVKPGAKIPVDGVVIDGHSAVDESMLTGESMPVDKKAGDPVYRACINSNGVIRCKAEKVGNETALAQIIKLVEDAQGSKAPIAQLADIVSGYFVPVVCAIALVAGIAWFAAASFGVVNLPAGKSVTEFALTIFISVLVIACPCPLC

SEQ ID NO: 94688 - protein, 178 aa, Unknown
  Obtained from environmental sample
  misc_feature (1)..(178): Xaa is any amino acid
MASRVKAVRKIIAERECTHALVTDAADVFYVSGFRSSGATLLIAPRQLDLFADFRYKAAAQEFCFGGKWRFTMIEGGGFGYLKKRIRPLSVVGIQSDAVTVDQYEDLKRALPGVKLMPLSGDVADVAVRKLPSEIESMKAAARIGDKALKALLPHIKKSVTEASLARTLDGLCAESAP

SEQ ID NO: 94689 - protein, 500 aa, Unknown
  Obtained from environmental sample
  misc_feature (1)..(500): Xaa is any amino acid
SFSQVKTATMDEADVGATDKGQERPNCIYATAIRQIGNESAGISINGKQFANGSASRCGGGEWGDDTPCATKFSSVAKVDGGYYIYIPDWAGQKFQTTGGTPVCSNTPITPVSSSSTTSQSSSSTAGSTGGACVEPMSGLPPNGTKSCIKVNGKCYTCNPDRGNDCSQGWIWQGGNVNDQYWYKEVSCTENSGGDPTYNLTCTGLAQTGVAGTAIAQPTVKCNGDNANATFASAPASWSNPTAGTYNVSATANCGGNKTVSCGTLAVSAAPSTDQLTCTGLAQTGIAGTAITQPTVKCGSTTVTNGTWTGAPTWNNPTANTYTVSVAATCGGSSKTASCGTLKVSPKLTCGNPSPQTVTAGANVTPPTVTCGTTTVATANVSWSGAPTYWSGPESGTYNNIKATVNSGDCSGQTATCGTLTVGNKLTCGNIAQTITVGQTPTKASNLVTCGSTNVTSGITWNPTSVGGAINTAQTINNITATASCGGSNQTATCTGSIVV

SEQ ID NO: 94690 - protein, 81 aa, Unknown
  Obtained from environmental sample
  misc_feature (1)..(81): Xaa is any amino acid
LLKEIPHGYTIIMDNAKFHRKKELRKIARGKVRLLFLPPYSPDYNPIEKTWANMKRFLRNNLNDFHSVVSGIYNYFGFIDA

SEQ ID NO: 94691 - protein, 571 aa, Unknown
  Obtained from environmental sample
  DOMAIN (1)...(405): Carbon starvation protein CstA
  misc_feature (1)..(571): Xaa is any amino acid
MNGLLLLLISVITLLFAYLLYGRFLAKKWGIDPSRKTPACEMEDGQEYVPTSGAVLFGHQFSSIAGAGPINGPIIAAMFGWVPALLWLLFGSVFFGAVHDFAALYTSVKNKGKSIGYVIELYVGKTGKRLFLIFVWLFSILIASAFADIVAGTFDGFNEVRTRNGISASVASSSSFFIIAAIILGLFIRKRKASGLASGIIAIDLLIICIVIGLFFPVFLNKDIWLYLVFAYIFIGSIVPVWALGQPRNYLNSFLLLAMMLAASIGVVFTAPSISIPAFTGFNINGNFLFPGLFVTIACGAISGFHSLVATGATSKQISSEKHMLPISYGSMLVETMVAILALIAVGSLARNGKLPEGTPPVIFATAVSGFLSQLGLPHHASFTIVSLAVSSFVFTTLDTVARLGRLSLQELFSTNGAGGTDGAGGEQKQKKSLWALILKNRVAASVFTLGPAYLLAIMGYQNIWALFGAANQLLAALTLIACTLFFKKTGRRIYMIIVPTVIMLAVTYTSLCLSIKAKIMLLLNDTFNTAVDGIQMCIAILLLVLGILVAAACAVKLLGKDQNKEIPAEL

SEQ ID NO: 94692 - protein, 306 aa, Unknown
  Obtained from environmental sample
  DOMAIN (1)...(305): Na+-transporting methylmalonyl-CoA/oxaloacetate decarboxylase, beta subunit
  misc_feature (1)..(306): Xaa is any amino acid
LHAGVGNEFFPLIIFIGIGALTDFGPLIANPKTAILGAAAQFGVFGTMFFVSLANFLPHVAFNLREACAVSIIGGADGPTTIYIAAKLAPHLLATVAVAAYSYMALVPIIQPPIMKALTTKEERLIRMKQLRPVSQKEKVIFPLVVFVLSVLLIPAAAPLIGCLMFGNFLRECGVVERLSKTAQNELLNIVSLFLSLGVGSQMTPEKFLNPSSLIIVVMGLVAFCIATAAGVLVAKFMNLFLKEKINPLIGSAGVSAVPMAARVSNKVGLEYDPSNFLLMHAMGPNVAGVIGTAIAAGVMIAVYAN

SEQ ID NO: 94693 - protein, 92 aa, Unknown
  Obtained from environmental sample
  misc_feature (1)..(92): Xaa is any amino acid
MTQAPQENSRLLIKITRETLPQVKDKYPFLYLERGRLEVDDSSVKWIDAEGNVIRLPIATINCLLLGPGASVTHEAVKVLGGANCGLCWVGE

SEQ ID NO: 94694 - protein, 302 aa, Unknown
  Obtained from environmental sample
  DOMAIN (87)...(166): Cache domain
  misc_feature (1)..(302): Xaa is any amino acid
ASIQNLIRNGYDAEKLIAYNKDITSYLLSKNNEALSSNGPFGYIEKLPNGPAFINGIGWEMPDDFFPTERPWYKAAIKAAGGIAEIAPYTDTVTGETVLTYSRAIFTENGVRLGVLAIDVRAGYIGKDIANTAFSKDNSYGVLISQDLIIFGHSNTEYLGKKMNDPTIPLAAITDDLVRLGTLSEIKWVNWKGESVIGFFRTLPNGWRLGFFTQKNLYYKPVFNMLIILFILGAALASVLIIVLIHVDAAKNKSDSENRHKSAFLANMSHEIRTPMNAIIGMTTIGKKASDSDRKGLLVLQK

SEQ ID NO: 94695 - protein, 289 aa, Unknown
  Obtained from environmental sample
  DOMAIN (210)...(286): Response regulator receiver domain
  misc_feature (1)..(289): Xaa is any amino acid
LLGVINDVLDMSKIEANKFEIIPVEFELEKMLRRVINVVNFSINKKRQKLSVHIDHSIPRTLTGDDQRIAQVITNLLGNAVKFAPEEGAIALEVSLAEKTNNLCTLRVSVSDNGIGISAEQQAKLFKSFEQAESSTTRKYGGTGLGLAISKSIVEMMGGSIWVESEAGKGSVFSFTIQVQCGTEEKRIDVDKQQAEEMKPAEITGVFTGRRILLVEDVEINREIVQALLEPTKLEIDCAENGAEAVRMFAESPVQYDIIFMDIQMPVMDGYDATQRIRTLEAEKVAASG

SEQ ID NO: 94696 - protein, 413 aa, Unknown
  Obtained from environmental sample
  DOMAIN (16)...(132): Histidine kinase-, DNA gyrase B-, and HSP90-like ATPase
  misc_feature (1)..(413): Xaa is any amino acid
NSPWHTDRSIPHTLIGDDQRLAQVITNLLGNAIKFTPEKGSVSLAVRLIQQSNNICTLQFSVSDTGIGMTPEQQTKIFHSFEQAESSTTRKYGGTGLGLAISKNIVEMMGGSIWVESEQGKGSTFIFTIQAMRGTEEKRGFLSSDINLKNIRILAVDDDQDILTYFLDIMQSFGISCDTALNGEKALELISQRNGYHIYFIDWKMPGMDGIQLARKIKEHGSEKSIVIMISAVEWSAIADEAKAAGVDKFLSKPLFPSTIAEVINECLGVDKRQAEKSHSAEIAGIFAGRRILLAEDVEINREIVQTLLEPTKVEIDFAENGAEAVRKFTENPKKYEMIFMDIQMPEMDGYEATRSIRALDIIMAKTIPIVAMTANVFKEDIEKCLEAGMNSHIGKPIDFDEVLKTLHSFLGA

SEQ ID NO: 94697 - protein, 181 aa, Unknown
  Obtained from environmental sample
  misc_feature (1)..(181): Xaa is any amino acid
KNHKVKAIVFDERLKKVVEQYNSRDKLTFTSAVVADIVNGLSDELIKIIDDLKDDKNSFEKLGITYEEKIFYDILVKVRDDHGFEYSEDKCIVLAGEIKKLVDDKSKYIDWAAREDIKNELNMDLTKLLYKNGYPPEWDDEVFEQVLEQSENYKKYSVVVEYEYPSAQNSFGYKMAAENPQ

SEQ ID NO: 94698 - protein, 129 aa, Unknown
  Obtained from environmental sample
  DOMAIN (1)...(123): GGDEF domain
  misc_feature (1)..(129): Xaa is any amino acid
IHFVNENYGTKTGDLVIITSAEIIRSSLRHGDIPARLSGDEFAFLLPDTESSSAANVAELIRKNIENKQFEIPIGPGSGETVLIGIHTSIGIAVAPSHASTAEELFEKSDTALRKVKELGRNRVGIFAD

SEQ ID NO: 94699 - protein, 256 aa, Unknown
  Obtained from environmental sample
  DOMAIN (1)...(256): DctM-like transporters
  misc_feature (1)..(256): Xaa is any amino acid
MPVFAAIGGIALIMLQALGQEPDAVIGQVYSALTDSDLIAIPLFTLTGFFLSESKAGERLVRTFKIFFGGMPGGIIIAAVIICAFFTSFTGASGVTILALGGILLVILNENKYSERFSVGLLTSAGGIGLLFPPSLPIILVASSTNTILHFMNIPNKYSIIHYFIGAFIPGLILIIAMIVAGFILSSKVKFQTEKFNGKDALNSLKDSLFEILLPIILVVGYFSGFLSLIEVSAVSVVYVVIIEIFVKKDILLKDV

SEQ ID NO: 94700 - protein, 289 aa, Unknown
  Obtained from environmental sample
  DOMAIN (46)...(289): Sodium:alanine symporter family
  misc_feature (1)..(289): Xaa is any amino acid
MEKFGHIIDMIDGWIWGPPLLILLIGTHIYLTFRTGFIQRKLGLGLKLTLARDRGSAGDIAQFGALATALSSTIGTGNIIGVGTAIASGGPGALLWMWLTGVFGIATKYSESLIAVKYRVKNSNGMIIGGAMFALERGLKMKWLGVIFAFLTAVTAFGIGCAVQSGSVAEQVKMAFGITPWVSGLIIAALTALVIIGGLKWIARAAESIVPFMSIIYIVGCIAILIINHKFIIPAIQLVCANAFNLRSVGGGFLGFAAVKMMTAARYGIARGLFSNESGMGSAPIVAAA

SEQ ID NO: 94701 - protein, 170 aa, Unknown
  Obtained from environmental sample
  DOMAIN (95)...(168): Sporulation related domain
  misc_feature (1)..(170): Xaa is any amino acid
MKTKALLAVITAAFLLSAFTIDSAYAQESSSANLKMVPSQERIPRADWRINPEYIIPPTGTSSPVERREPSPAPVEAPVVRNSPSIKVTVISELERGKWYVQIGAYTRTEHMEEAIKRVGTASPMAVQNVGTDTAPMFRLLLGPFTQDEGKTVMRRFKDKGYDAFLRSGS

SEQ ID NO: 94702 - protein, 216 aa, Unknown
  Obtained from environmental sample
  misc_feature (1)..(216): Xaa is any amino acid
MEKTKELPAYPRGITFEQVWAALMEDRERQKETDRQMKEVFQEISELQKETDQFLKENAREMKENAREMKENVREINREIKEAERVVKAVSMQMGGLHNSFGEMAEFMVAPGVADLFTEIGFHITEYPICNRKIKDENKRTLTEIDLLMGNGDYVIAVEVKTSLGEKDIEEHRKRLEILHKHISKTGDRRKILGGMAVAVPDEDGRKAILDAGFYL

SEQ ID NO: 94703 - protein, 501 aa, Unknown
  Obtained from environmental sample
  misc_feature (1)..(501): Xaa is any amino acid
MITADAYLWAVYRDDTAMTNRLAEITQKQYGSLRGSYGTIGSGSTIKSCSIIKDTAIGSCAYIKGANKLKNLTIHSSEEEPTQIGEGVEMVNGIVGYACNVFYGAKAVRFVIGRNSSLKYGARLIHSVLGDNSTVSCCEMLNNLIFPVHEQHHNNSFLIASLIQGMSNLAAAATIGSNHNSRANDGEIRAKRGFWPGLAVSLKHSCVFASFVIIAKGEYPSELNIPFPFALVNNNVHRNRLEVMPAYFWLHNLYALERNSWKSKTRDKRKIKNQRIETDYLAPDTAEEIIHALTILNGWLGEAGYSAQDMTGVDGVHVRMILCRHLEHSKRGQVIIKPLEAIAGYRQMLRYYAVKTLAEFFDAHPELDYQGFLELLGPPSVQERVSDWTNIGGQIVPSFRIDELRKSIRQNEIKSWDEIHRVYGHWDEAYPFDKCSHAWSTLALLRNSEEAVSAPTFRTEIALIQGIRHWIDKQIYDSRAKDFHSSFKRATYRNVAEMEQF

SEQ ID NO: 94704 - protein, 466 aa, Unknown
  Obtained from environmental sample
  misc_feature (1)..(466): Xaa is any amino acid
MTGTERGIILGHQRIIDALKKTGKNVTLTTIFFDDDIVIECDGKRVLIDEIKKIKYKPDGTTALFDAWGASITHVNERKKDKNNPYPNADVLYLTVTDGEENSSTVFDMPKIRNLMMRERERSNEGHGVREFATVREFGIDYEQFVKDAKLGQNKTQIFYRSDAGIEVLFKIIELAADNMIQNRQITGQWIEQSDKLKIGSYTLAQLKKMTKGPEKALARLEKTYMELLRIADNGLTREFWAAYAKYGKDLEKLNLHTGDAEIDSILKLYIGKQDTNQKEVLQYAKDKTVEKAAVHSELNLGKIRKIADNKLSTDWELYNAINVYNESVNKFKLIPAFNVHLNDIKINNYISDIIASQKKRYEEIISIAFKSRIDLLKNAFGEEDIKTFRLLTWFTREPLFSLIKDFPDYIEFCKWTETLNKEISASASKENIFSFLEIFSPDQLVPILKNEAPVIAAAILSRLPS

SEQ ID NO: 94705 - protein, 448 aa, Unknown
  Obtained from environmental sample
  DOMAIN (201)...(276): Apocytochrome F, C-terminal
  misc_feature (1)..(448): Xaa is any amino acid
MGGASSRITVENSKKATVDGKVLLESSDEIDYKGSKIEIGRMAELVLLDTNGINKGRWQIPYGATLKVENGKDVKKGEMLYEWDPYNNPIISTVAGKIQLLDFAEKTTYVSELDETTGIETWTIIADRRGKKRASINVMENGERVGHFFLPNGAILTVRDGDTIISGQTIAKLPRSVGKTKDITGGLPRVAELFEAREPKNSAILAPTNGVVAFGAEKNSGQIVLIKNSDTEEEIVVPHGKHLSVHDGDRVRKGQAIAEGSVNLMDILRILGEEELQRHLVDEIQAVYRLQAVTISDKHIECIVRQMMRKVVITEPGDSKFLTGEDVSRIELRLENVRLQEEGKQIAQFAPLLLGITKAALAMDSFIAAASFQETTKVLTRATISGSKDKLLGLKENVIMGRLIPSGTGSRHLRQLEIKDSDVKDEITEHSRNQTFSEGEFEDDFEIE

SEQ ID NO: 94706 - protein, 699 aa, Unknown
  Obtained from environmental sample
  DOMAIN (10)...(137): GTPase of unknown function
  misc_feature (1)..(699): Xaa is any amino acid
MKKYDAVSIRNVCFVSHGGVGKTTLLEAACFTAKATSKIGKVGAGTSIFDTRADEKAHKMTISTHLGFCEWRDKKINILDTPGFLDYLGEAKAALRVTETAVTLIDAVDGIQVGTELVSRYIDEVKTARLFFVNSMDKENADFDKALAVIKEAYGNSAAPLTIPIGKGPDFRGVIDLVTKDAYEYAKEGDGCGKKIDVPADMQESVGKLRQALMESVAETSEELMNKYFEEGELSDDEIRAGVAKGVLEGSVFPVLAGSGLLNIGVDQLLTKIVNLCPSAASRTEIDVVEGEERKTVSVKAGDPATVSFVFKTVSEEHLGELNLIRVFSGKVSTGHELLNVSKGAAERIGNMYFIRGKERVDTDEIHGGDIGGLLKLKATHTNDSLVDKAVKYRVAPTAYPEPLVSVAVAAKVKGDEDKIAVGIAKLNEEDKCFSYKFHSDIHQSILSAMGDIQLDIILENLKNRFKVEVERKQPKISYRETITKSAKYVEYTHKKQTGGAGQFAKVFIDLEPMPRGGGYEFVDKIVGGVIDQPLRPSVDKGVRAKLEEGIIAGYPIVDVRVSLVDGKTHPVDSKDVAFQIAGREVFKKAFEASSPILLEPVVELKVTVPVEYTGDIMGDLSSRRGKVGGMEQVGKLETITAKVPEAEIQSYSSTLRSLTQGRGFYSKVFSHYEQVPPENAKKVIEAHQAEMAHHEKAE

SEQ ID NO: 94707 - protein, 111 aa, Unknown
  Obtained from environmental sample
  misc_feature (1)..(111): Xaa is any amino acid
MKKVVFTAALIISVMLAVSCKSSPKDIDGQYKDLYDANTGLDLTGADTYTVKWGDTLSGISRNAYDDGFYYPIIMLASRGVVENPDKILPGMELTIPDLKETRPTLPAERA

SEQ ID NO: 94708 - protein, 73 aa, Unknown
  Obtained from environmental sample
  misc_feature (1)..(73): Xaa is any amino acid
ATLPRTIRITREVLRSRSHDAQLAQIVRGLMIESYLEEGSQKANEDTYGKSITDPCLGWEDTEKLLFEIAEEC

SEQ ID NO: 94709 - protein, 76 aa, Unknown
  Obtained from environmental sample
  misc_feature (1)..(76): Xaa is any amino acid
VFYNSITLNDFDFAAFTSPSAVEGFAKTATNVDLHKIKVVCIGEKTAEVARAYGMEVYVSKEATIKSMVEKIMELK

SEQ ID NO: 94710 - protein, 140 aa, Unknown
  Obtained from environmental sample
  misc_feature (1)..(140): Xaa is any amino acid
MKIYLFRGKRKDNGVWVFGGLYQYDKDTMYIMFEGTNYEVEPKTVGQYIGLTDEKFVMIFEGDILTAEEYLFQDEGEPNYHGVVCWFDDSAQFGYELKCVNPKKKGISDGICEAFGDKDYKFTVIGNIHDNPKLLEVKAA

SEQ ID NO: 94711 - protein, 127 aa, Unknown
  Obtained from environmental sample
  DOMAIN (17)...(127): Response regulator receiver domain
  misc_feature (1)..(127): Xaa is any amino acid
LTSKTAIRNLYIVEKIINVLISTENNEDKKLIFAAITTQNDIRIIGVEEDEAGTIIKSGQLKPDILIMNLQQPGTDGTALAPIIHRRSPDTSIIMMCDRDENNYAAAALRAGIAAFLLRKNDSEQIA

SEQ ID NO: 94712 - protein, 75 aa, Unknown
  Obtained from environmental sample
  DOMAIN (44)...(67): 4Fe-4S binding domain
  misc_feature (1)..(75): Xaa is any amino acid
MAKKGKVIIDRELCKGCLLCLRACPVKVLEADSELNSSGCHPSKAAQVEKCIACGNCYEVCPDVCIEVYEIEGAA

SEQ ID NO: 94713 - protein, 475 aa, Unknown
  Obtained from environmental sample
  DOMAIN (409)...(466): Bacterial regulatory proteins, luxR family
  misc_feature (1)..(475): Xaa is any amino acid
LPEKSDSAITKIFQIRDELSFRNIRRELLPYLLIFPISVVMGNLRYYDHSIALAGFRSSELTFFLLGLGWLILTFIPKRLIMPFLRLAAIVSALLLPFMIFMPVGFAWFTLYMAFKFFNGLCAACAFFLFCFVLNNIERLAGMALIQFYYGFYYAAWSIFPAFHTANETWGAVSVTAVFLVVVFLCGKKQQEIIAGSGDSDGKGSGVPFVICLHIVFFMIVCMVNYIEWGENSLSGLAFGAGTFISVGLVIIVQLLIGRSALYLWLMFLVFSLLGLGALLYDTHITLLSGSFAYGLGDGLGYIVICYMCAGAIKRSNSLRMFRLYCLMFFAEYFVISGLFSLYFNYFDTPHKLLAFGVVLVLVSVSLLLMPFMQKKLFDADWTDGLYLRDMEEYSLPFAQTEAINAQNNLDLTPREEEIFTMLLTGKAPKEIAYTLKISYYTVIFHQKNLYRKLGIQSRAELFARYNTIPTEKIT

SEQ ID NO: 94714 - protein, 280 aa, Unknown
  Obtained from environmental sample
  DOMAIN (71)...(234): DHH family
  misc_feature (1)..(280): Xaa is any amino acid
MKWDKKDISPEQVKEISVKYGCDLLTASILARRGFCTGDSIRYFLEDDLTSLRNPFALDGMEDAVERILAAKEEGEKVLVFGDSDVDGITGTVLLAGYLESIGIDVTWRIPTGDESYGLSLDAVENFAAKDGTLIITVDCGISRFTEIKRANELSIDVIVTDHHEPQEELPQALVIINPKLKNSTYPFRDLAGCGVAFKLVCALRFAQRSELYNQQICLLNTRPVNDAWIIEIAKTRNLIVIDTLIETIVPGMISIGETRLPSFLEGQNILCWDAALHKH

SEQ ID NO: 94715 - protein, 309 aa, Unknown
  Obtained from environmental sample
  DOMAIN (1)...(305): FecCD transport family
  misc_feature (1)..(309): Xaa is any amino acid
LTVFHGSAEIAAFDVIKILFGSADASSAQWRIVWDFRLPRALAATLAGASLSLSGLLLQSIFRNPLAGPFVLGISSGASLGVAFFLLAGFGLGSLGLLSAAALGAMAVLAFIALFSKFISSNAGLLVLGLMIGYFADAVVSILMHSTNTAALRGFISWGFGSFGRLRWEELPYFAICILLGIILSVFCIKYLNAIALGEDSAKSLGINVKQKQLLSLLAAAVLAAAATSFCGPIGFIGMATPHLARGFFNSDNQRVLIPASLLSGALLALVAGLLSQGLWGMPSLPLNAVASLMGAPVVIWVLLPKIHR

SEQ ID NO: 94716 - protein, 65 aa, Unknown
  Obtained from environmental sample
  DOMAIN (4)...(62): Ribosomal protein L35
  misc_feature (1)..(65): Xaa is any amino acid
MPKMKTHSGAKKRFRVTGSGAVKYKHSGARHILTKKTTKRKRNLRQNGIMRETEEFHVKRMLVEA

SEQ ID NO: 94717 - protein, 378 aa, Unknown
  Obtained from environmental sample
  misc_feature (1)..(378): Xaa is any amino acid
MGGNMREQIIIKKAAFILIALFLLSTGLYAEPDRSPFGADAVPDLYSAALSADGFTTTRGGAPVSAINPAQGGDADRMVFDASYLAILKLLSGEEPNDSGYLQSISVGALFPTKAGVFGASIRFIGGAEKDMFIYFPIHPTFGGNVFAAKELYPGMSLGLGINFGFGEYKTLDKDSNEEVTKSANTISGDLGFRYNIGNLGFLQNFTFGVVLRGLGLSYFPTWLTPMGGVSFELIHIRKENQNDPFILGIAGDISFPSLFYPIEGYINVIVKAGIKMTIAEIITLNVSWPGGSGLNLWEISRNEDERVAFPIFPAIGLGVKIMLPSTGERIVGGHLPSDGDLLISTAFKPLYEGVTAVGGGVSWFAGVADKKPPVIDI

SEQ ID NO: 94718 - protein, 333 aa, Unknown
  Obtained from environmental sample
  DOMAIN (1)...(108): Glycosyltransferase family 28 N-terminal domain
  misc_feature (1)..(333): Xaa is any amino acid
IGSSAHTDRSLVEEAGIKFFSIPSGKLRRYFSLRTFIDFFKVIGGYFAARKILKKRKTIILFSKGGFVSVPPCAAASSLGIKVFTHESDFSPGLATKINARYAARTKGRIFTAYEETGRFFRESFRNYITVSGNPVRDIFQGADAGKGRAFLGVEEDARVLLVLGGSQGAVEINELIRSVLPELTNIYTVVHQTGPNLAWDISAGIKYKPFPYIKDEMPHVMSCAELVMGRSGAGIWEWAVLGKPMLLIPLRGSGTRGDQVENARYFNEAGAALVLSGDEANPESLLSAIKLLAQDNGKRTAMAEASLKIGKKDGAGFIAKTLADEINKLDGG

SEQ ID NO: 94719 - protein, 453 aa, Unknown
  Obtained from environmental sample
  DOMAIN (260)...(422): Methyltransferase small domain
  misc_feature (1)..(453): Xaa is any amino acid
MKRIILKAHEDRRILSGHPWVYDNEIARVLDSQAKPAVLEPGELAEVESSRKEYLGRAFVNPNSKITARIYSPSKEGVDKGFFKQGIRKAILARSCYTRSYYDLKRESARLVFAEADFLPGLIIDRFVGWPLDSIEAAVKERPLRFEDAAALGPPASWLSVQFLAYGMDARRKLILDALEEVLAAPLLPGMEPLGAPTGVVEKSGAKVRELEGLPMREGLVRGNFPSSGIVIFENDLPFAVHLEEGQKTGHFLDQSDNRRLAASCLSALSQEGKSEGGPRVLDAFSYTGCFGIHAARAGAESVVCVDVSAAALETLKTNAALNGVSDRIKTVEADVFEFLRTAERRKERYDLIILDPPAFAKTRPSLEGAIRGYKEINLRAISMLSKSGVLVTSSCSQAMDEANFRKMVTEAATDAGRRLVETDFRRQSADHPILVGYDESFYLKCGFYRAVD

SEQ ID NO: 94720 - protein, 308 aa, Unknown
  Obtained from environmental sample
  DOMAIN (10)...(296): Polysaccharide biosynthesis protein
  misc_feature (1)..(308): Xaa is any amino acid
MTAHENNKRIAKNALFLYFRSFLTFIVGLYTSREVLAQLGVSDFGIYNVVGGIIVLFSFIQNAMSSATSRYFTFDLGKGDFEQLKKTFNLSVVIHIFTALFIFVLGETIGLWFLNTQLSIPSERMEAANFVYQFSIFAACIGILQIPYMVAINAHERMKVYAYIGIADSVLFLIIAISLGFAPIDKLKFYSILLFCLYIARIGFYIMYCHRNFKETHFKWFWDKKMFLERMGFSGWTTLGAVSAIAALQGVNMLLNVFHGVVANAAYGIMTQVSNGITQFANNFFAAVNPQITKSYARGDIDYLHSLI

SEQ ID NO: 94721 - protein, 366 aa, Unknown
  Obtained from environmental sample
  DOMAIN (14)...(234): Pyruvate flavodoxin/ferredoxin oxidoreductase, thiamine diP-binding domain
  misc_feature (1)..(366): Xaa is any amino acid
SEKVLMSGNEAIAEAAIRAGCGAYFGYPITPQNELIGYMAHHMLERGRIFIQAESEVAAINMVYGASCAGARAMTSSSSPGVSLKQEGISYGAGADVPMVIANIVRGGPGLGNIAPAQSDYIQATRGGGHGDYRCIALAPKNVQECADLTSLAFDLSDKYRMPAIILADGMLGQMMEGVVFQPEKSPREIPSRDWTAGKMTERVPTNGRRTARHITSINLNPTELEAITKARFARYETVKANETRYEDIGCENADLVLVAYGTSARVCLGARMLAEKEGIKLGIFRPITVWPFPFKALSGLAAKKKTFLTVEMSEGQLVEDVKLAVYEAVSNGLTSPGKVHFLGRSGGIIPTEEEVFAEAKRILGK

SEQ ID NO: 94722 - protein, 498 aa, Unknown
  Obtained from environmental sample
  misc_feature (1)..(498): Xaa is any amino acid
MSNYSTTQKEETLKAAVFRDFFSSSRYAYEPNIDNIDFIVTEAKTLKGNIWKRHYLWAECKKGITDIPSMLTQLVLTIKKTYEKGEQLPPPYLACFDTAKIAFVPFHDILPIFSDNDVNWNVTPSNHTSDDFIKTKKKVEKLSEKNVVVFDFETDKQEIMDFINYNLVAGNITSKFQINKNNFVIIYSKWLEKVKKSIAIDWTMVKKSSIIDGDFFLADILSKDNYTLKDKLFVILMNNQYKFDKKFDDAGFSLYKEVGFNDNQKAHKAFWDKYERPPLEEYWDYIINRRDLLVPQDIRERKGSFFTPQQWVELSQNYIADVFGEDWQDEYYIWDCAAGTGNLLAGLTNKYNIWASTLDKADVDVMKDRIKNGANLLEDHVFQFDFLNDEFTKLPKGLHDIIKSDKKRRKLIVYINPPYAEATSTATRVGTKENKTGVSTGNKIHEKYKLFLGKARNELFAQFLTRLFKEIQFCKIANFATLKALCAFNFVDFRTNFT

SEQ ID NO: 94723 - protein, 444 aa, Unknown
  Obtained from environmental sample
  DOMAIN (324)...(444): FabA-like domain
  misc_feature (1)..(444): Xaa is any amino acid
MAFQHTIGKSVSLTGVGLHTGVASQVTFSPAPENYGIRFVRADLDGKPEIPADIDNVVDLSRGTAIGLGDVRMYSVEHVMSCFAGLEIDNCRVEVNAQEIPLMDGSAMPYVNLVQKAGIVEQEAERSYINIDEPLMFVKGDIALGVFPLDYLRVTLEIDYKYPALGAQYTTMFSLKDYVADFAPSRTFCFLSEIQKLREQGLIKGGSLDSALVVQDVELTDEKVEYIRKLFDNYKGPVGPGQNGYLNNTELRFWNEPCRHKALDLIGDLYLLGKPINAHILAARTGHAANIETAKMIREQVKKQEKKRAGEAIKLTYDDITKILPHRFPFLLIDKVTSIIPDKEIVAHKNVSFNEDYFNGHFPGNPVMPGVLQIEAIAQAAGIMGLYKNYNKESGVPVDAKVLFMGIDNARFRGMVRPGDVLRIEVKMLQFKRGIGKFEGKCYV

SEQ ID NO: 94724 - protein, 420 aa, Unknown
  Obtained from environmental sample
  misc_feature (1)..(420): Xaa is any amino acid
MTFYAKWTPKTYSVIWNANGGTPIPAPQTSVDHGTIISAPRLMTKTGYTFDGWYTDAGLTVEASLPMRVTENLSFYADWKIKTYAVKWNVDGGFPIPAQTSVDTGGTITAPAAMTKDGHTFVGWYINSGLTWPAVFPVTNVKADAEFYARWTPVVYTVTWNAGGGTPVPEQTTVNHGDDITAPDSIKKANYAFGGWYANPNFTGKATFPIVNVTENKEFYAKWTPVYRISWENSVFYGQYPPTSVDSGGTITAPPAMTWAGHTFDGWYTDAGFTSSAVFPVTNITSDKVFYAKWTSTPIIVTWVTNGGAPAPSNTTPTQTLDGYYIFAPSLEVKKTGYVLDGWYTTSNFTPESKVSFPITRVAVNTTLYAKWLPVHTITFNPNGGNVSTTSATTDAAGKLFSLPTPTKTGSAFVGWYTSA

SEQ ID NO: 94725 - protein, 289 aa, Unknown
  Obtained from environmental sample
  misc_feature (1)..(289): Xaa is any amino acid
SAAGYISKTSTAVIVTGASFPDLPGNVTISPNTNVTTGTTLTASYSGSEVVSWHWNKDGAAIAGATNNTYTPTEPGAYTATASATGYKSKTAVIVYAQWKPVYTVTFSANGGTGIVASLTAEAGDSITLPEGTGLSRNGYVFGGWNTASNGEGTSYSAGAAYTPTSSVTLYAYWRPIYTVTFSANGGTGTVASLTAEVGDSITLPEGTGLSRNGYVFGGWNTASNGEGTSYSAGAAYTPTSSVTLYAYWRPIYTVTFSANGGTGTVASLTAEAGDSITLPEGTGLSRNG

SEQ ID NO: 94726 - protein, 283 aa, Unknown
  Obtained from environmental sample
  misc_feature (1)..(283): Xaa is any amino acid
NTATATIKGIGRGGGVTLDRATFTMNGGTISNNNSANYGGGVGVSADSNYTFTMNGGTISGNTTNDSYNGGGGVYGNVTMSGGTISNNTANYNGGGVYGNVTMSGGTISGNTANYGGGVRGSVTMSGGTISGNNAIHATEGRGGGVYGDVTMSGGTISGNNATNGSGGGVYGNQNVIMSGGIISGNTANYGGGVYVLTFSMSGGEISGNTSNGSGGGVYGDENVIMNGGVISGNIARTYGGGVYALAYSNRNTITKTGGTITGYADDTATGNVVKNTSNVVQN

SEQ ID NO: 94727 - protein, 184 aa, Unknown
  Obtained from environmental sample
  DOMAIN (2)...(172): Asparaginase
  misc_feature (1)..(184): Xaa is any amino acid
ICFGDYWIRGVAANKSSVHRYCAFDSPNLPYLAEFGLTIQFSPHAGKFGRNVPSGVGKSLESAIAVYTPHPGMPWEPAPLWAKAVLIQAYGAGNLPMDRPDLIHLFEDANARGLPVVVTSQCVSGGTNLTTYELGKRAAALGAIQGGLHTKWAALAKLGLCLGASFGTDAVREAFGTSWAGEPV

SEQ ID NO: 94728 - protein, 450 aa, Unknown
  Obtained from environmental sample
  DOMAIN (1)...(87): SRP54-type protein, helical bundle domain
  misc_feature (1)..(450): Xaa is any amino acid
MFEKLTGKITDALRFVTGKASISEKNIEDAVEAIKMALLEADVNLRVVRRFVNSTVEEAKGEKVLRSVDPGQQFVKIVHDKLVSFLGDEDPASRALKLRGPDVISTILMLGLQGSGKTTSAAKLALRLKKEGRKPLLVACDLIRPAAMEQLAVLGGQVGIPVYKEDNAKDSVKVYQNALSWANKNMIDTVIIDTTGRMQIDEPMMQELSRLKNIVNPDEMLLVADSMTGQTAADIAKTFDEKVGLTGVILSKFDSDTRGGAALSLKTVTGKPLKFTGTGEKPEDFEPFHPERIAGRILGMGDVVSLVEKAQEVIDQKEAFELQKKMEKENFTLDDWLNQIRSLKKMGSLQKMLEMIPGMQGQISEDDIDKAELKQQEAILSSMTIKERNNHLIIGPPRRSRIARGSGTSVAEVARLLKKFEKMRGMMKKMAKGARGGGMPGMPNMPGMFQ

SEQ ID NO: 94729 - protein, 80 aa, Unknown
  Obtained from environmental sample
  misc_feature (1)..(80): Xaa is any amino acid
MHDHWEHKKRRSGGMSNPRIDAWYALARENGAVGGKLVGAGGGGFLLFYAENRGRLRKAMHKAGLEDVRFKFDFEGAVLV

SEQ ID NO: 94730 - protein, 354 aa, Unknown
  Obtained from environmental sample
  misc_feature (1)..(354): Xaa is any amino acid
MQYFKRNVDEILLSWSREKPPDRKPLLLRGARQVGKSSAIRQLGKQFKHYVEINFDENKEVKNFFESSLAPQEICQQLALYYHTPVFPGETLLFFDEIQSCQPALAKLRYFYEKYAELHVAAAGSLLEFALEEIPSFGVGRIRSLFMYPFGFDEFLSAMNEEELSEAVKAASPEKPLAEPIHQQLLNRLKLFLLCGGMPEAVSQYTRKRDLLNVELVLNDLITVLKTDFAKYRKRTPLLLLNEVFESVMRQTEGKFVYERAAPGTASVTVKQALELLIMAGLVYPVTHTAANGIPLGAESNRKYRRMIPCDTGLFLHILGLRSEILPASDFSAVNRGSLAEIFTGLELLKASSC

SEQ ID NO: 94731 - protein, 952 aa, Unknown
  Obtained from environmental sample
  DOMAIN (11)...(189): RNA polymerase Rpb2, domain 2
  misc_feature (1)..(952): Xaa is any amino acid
LVKNDNPEGQKSNGHKSDGHKSDGHKNDGMKTLYRAGEKLHPHNVDELLTYGVKSIEYIDFEAEGSLNSPMLLNCFEREDIKFVKEGSGGEPTKDEALMAVYSVLMPGESMTVDQAEKDLLGMFFTNRRYDLGKVGRYKLNKKFNLQPPLDDYTLTKTDIIETMKFLIKAYVGDEYFDDIDHLGNRRIRSVGELMANHMKTAFSRMERIAKERMSMKETDTIKPQDLVSIKPIVAAIKEFFGSSQLSQFMDQVNPLAELTHKRRLNALGPGGLSRERAGFEVRDVHYTHYGRMCPIETPEGPNIGLIVSLANYTRVNEYGFLETPYRKINKGVATRDIEYLSAMDEDRYFIAQASAKLKENGSFAEGQISCRRQGDYTNRAPEDIQFMDVSPKQIISVSASLIPFLEHDDANRALMGSNMQRQAVPLVFPEAPRVGTGMEAKCAYDSGVLVKACRSGTVLRVTSSEIVIKPDKPGALKSLSQVIIDAQGNDVYKLVKFQRTNQDTCYNQRPIIKAGEKVVAGQVIADGPATENGELALGRNILVGFMPWNGYNYEDSILISERVVKEDMFTSIHIKEHITEVRETKLGPEKITDEIPNTSEKSLDNLDKEGIICVGARVRSGDILVGKVTPKSETETTPEFKLLNSIFGEKAKEVRNSSLVVDHGIEGTVIDIQRLKRTEGDDLSPGVDEVVKVLIATKRKLREGDKMAGRHGNKGVVARILPEEDMPYMEDGTPLDICLTPLGVPSRMNIGQLLETELGWAGSTLDEWYSSPVFQSPSTEQIEEKLKEAGLPVTSKTMLRDGRTGEYFVNPIFCGVIYFLKLHHLVDDKMHARSTGPYSLVTQQPLGGKAQFGGQRLGEMEVWALEAYGAAHTLQELLTIKSDDMTGRSKIYEAIVKGEPSTTAGIPESFNVLVQELRGLALDLAIFDNNSKQIPLTEKDEELIAKSKSNF

SEQ ID NO: 94732 - protein, 1141 aa, Unknown
  Obtained from environmental sample
  DOMAIN (673)...(753): RNA polymerase Rpb1, domain 4
  misc_feature (1)..(1141): Xaa is any amino acid
MRDIQDFDSIMIRLASPEMIRNWSYGEVKKPETINYRTLRPEKDGLFCERIFGTTKEWECYCGKFKSIRYKGVTCDRCGVEVTHFKVRRERMGHIELAAPVSHIWYYRSVPSRMGLLLDMTMTALRSVLYYEKYVVIDPADTELKKGQMLSEDEYFEEQERYGGGFTAGMGAEAIRTLLENVDLDKLAAELREKMIEKGAKSDKRLLKRIEIVENFRNSQNKPEWMILDVIPVIPPELRPMVQLDGGRFATSDLNDLYRRVINRNNRLKRLITLNAPDIIIRNEKRMLQEAVDALFDNSKKKKVVKGSSNRPLKSISDMLKGKQGRFRQNLLGKRVDYSGRSVITVGPDLKMWQCGLPTKMAIELFKPFIMKKLVDKDVVYNIKKAKMLLEAESAEIFAILDEVVKEHPVLLNRAPTLHRLGIQAFEPVLVEGKAIKLHPLVCHAFNADFDGDQMAVHVPLTQAAQMECWTLMLSARNLLNPANGRTIVFPSQDMVLGINFLTRVRPNGKRPECSKPEGKGKFPYYSSPEEALMAVENKFLDWGSVIRVKPVKFPIWDKIDHEMEIPADGIIETTVGRLVFNEEQPKEIPFINYEMKDKELRALIEYVFKNNGSWITVKMLDAIKSTGYRYATVFGATIGIDDIVVPKEKPEMIEKANKEVEAIQAQWRKGIMTQEERYNKVVEVWNKTNDDLTNIMMKTLEADHDGFNSIYMMANSGARGSRNQIRQLAAMRGLMAKPSGAIIELPIRSNFKEGLSVIEFFISTNGARKGLADTALKTSEAGYLTRRLVDIAQDVVVNENDCGTINGISYTAVKEGEDIVEPLSDRIIGRYTIEPVKHPFTGEIIVDVNEEITEEIAKKITAAEVNSVRIRTVLTCEAKHGVCRMCYGRNLATNRTVDIGEAVGTIAAQSIGQPGTQLTMRTFHTGGVATNISEENRIFLKYPVYIKDVVGAHVEKVDENTGESVWLFTRKGYAVVCRVMEKYKLEPKDELLVDNGQRIVRGAPIIKRGKEEILSPNIAYAMIIADEKEPPILYLIGQDQKIEIRNGSEFLAKKGDVVEAEKTIATFDTFSDPIIAEAGGTVRYEDIIPGTTLREEIDEGRGVEKRITDIQQLEKQPRIIIVDDNGNQLASYFLPGGAIL

SEQ ID NO: 94733 - protein, 433 aa, Unknown
  Obtained from environmental sample
  misc_feature (1)..(433): Xaa is any amino acid
KGGIPVPLSWLAGLLLWAYDSLPSVAALLLARLLWKRLQGWRGAVAAACVAALVIVVCDTWLLHVYPWTWAAALASPPLLGRAAAFLGTEGITTVVWAHGAMAGYFLMSGAKRSVAVCSASALGLLLALSGAWHLLPRGQELFLDVAIVQPNYPVNTRIPNQLGDMWVRSDALLQSDGLPKQGRPTLLLWPESSLTDGNYLLPNPFLAEIAKGRGVAWLFGTDGWLEAGSPQNLVRGEVAGLEPFFQAKVIPMPFGERMPGPEWLRARLEKIAGFNSWAVGELGPGSSFSIPAGDVGSIKVHPLICSEALIPSRVRVGLSLAGGDLLTEHTNDAWFETSLAADLHASMVRLRAIESGVPLVRATMSGRSGLVMENGAWRHISDVMTEGAWSFELKWRPISTPARTAWPFRLLLSALVILLGLLALSADKKRAG

SEQ ID NO: 94734 - protein, 292 aa, Unknown
  Obtained from environmental sample
  DOMAIN (1)...(126): HD domain
  misc_feature (1)..(292): Xaa is any amino acid
RASHSIGVYHIGRRLLQNLAERGASEWLTPEGVKSFLAACLLHDLGHFPYTHSLKELALASHEALTGEIILNEPVKTLVGGTGADPQLTAAIIDKEISGSGTELLFYRKLLSGALDPDKLDYLNRDARYCGVPYGSQDVDFILSRLSPNKERGVDIDSRLIPNVEAILFSKYLMYRTVYWHHQVRAATAMVKKALINGLESGKIKGEELYNLDDTGLFTLIGKKTGNPLVESVKEGRIFATAAEIPVNLKDKTGIKEINTRSRLEEQLAAELCKAGIQITKDDLIIDIPEPV

SEQ ID NO: 94735 - protein, 59 aa, Unknown
  Obtained from environmental sample
  DOMAIN (3)...(58): YcfA-like protein
  misc_feature (1)..(59): Xaa is any amino acid
MTAREIMDILKKNGWILERINGSHHVFVKPGCRPVAVPFHGNKDIGNLAKIILKEAGIN

SEQ ID NO: 94736 - protein, 241 aa, Unknown
  Obtained from environmental sample
  DOMAIN (125)...(241): HD domain
  misc_feature (1)..(241): Xaa is any amino acid
MPSAAKMFALLEKITPDLILLDIEMPEISGFEALLCLKANSLYKHIPVIFLTGYTDNDNIEASGFELGVLDFIAKPFSVPVLLNRIKTHLEIDELIRERTAQIRRLQNGIVTVLADVVEERDERTGGHNDRTAMYVKILVKAMEERGVYLSEMREWDVEMVVSSARLHDVGKIHIFDMVLNKPGKLNNEEYEKMKLHTTEGARIIDRMIKQTGEEEFLHNAKLFAEYHHECWDGTGYPHGL

SEQ ID NO: 94737 - protein, 531 aa, Unknown
  Obtained from environmental sample
  DOMAIN (188)...(462): Competence protein
  misc_feature (1)..(531): Xaa is any amino acid
KLLLAATIISMILGCLSKRVWARFALLAVGGAALFSWSELGIRGFYGEMESVCENRRLMTLTLRISSPTASTPTGDKFRAKVVGADDEEVAAALVGKTLQCVSKQPAPPFGEITAQGRYTAPRRAAGPFGFDLREHFAVNNISGSFLIGGTTGGGNASTYIPYAVRSQVRGVINMAKTQEARGIFHAAFLGERDQLPQTLNTLFRKAGIVHLLAISGFHAALLYSAVFALLTLLRVPGRVKTLTALSTLWGYLFLIGLIPSLFRATAMATLLCASVMLQRKNHIVHTLGIAGFFWLCFSPHSLFSPGFQLSFAATAGIAMLLPVLSGITRAVNSSIRNKPASFLAEKLLSPLWVSVATFAATAPPLLYHFGTLSLYGILFNLIAIPLMSVAMWLFFAAVALSPVAAVSGVFILCAEKVLSFMIFLCGFCERISISEITFPNVSPIPLATLVVFMAGLCGVRAKSRGAYVLRAGAAAMSVFAISALYASVNVKTENIVLRSDGATVNVVIHRDKAAWVVAQGRKNKSGICAS

SEQ ID NO: 94738 - protein, 192 aa, Unknown
  Obtained from environmental sample
  misc_feature (1)..(192): Xaa is any amino acid
MEEIIKQWGAERPADLYRALTSKETARLEGQGNTAANWGDVRVAVKGFDADRVCGCSFEGRISIGAFNKDRLQYGNISLKTGLYNSHFNNVCIDDDVAIHNLLFSINQHISDSVLIFGVNEISSAVGATFGMSVDADHQYPINVINENGGRAILPYPGMTCTDAYLWAKFRADGELLAKLTEMTYAACRYLC

SEQ ID NO: 94739 - protein, 352 aa, Unknown
  Obtained from environmental sample
  DOMAIN (116)...(351): Domain of unknown function (DUF323)
  misc_feature (1)..(352): Xaa is any amino acid
VQKEIIATAELELCKRQQIRVLHEEHFITAEAAADIVETLALVLKGEQESETSQSTVCSNCGKELQKEWASCPYCATPVMKIQQKSLQPEVPPLPSPIPAAVNISSKTAPPAQTAVPANMVRVEGGTFQMGTVNGGYDDVRPVHTVTVKNFYMGKYEVTQKEWYEIMGNNPSEFKGEKLPVENVSWSDAIDYCNRRSIREGLTPAYSSSGDTITCNWNANGYRLPTEAEWEYAAKGGNGSPGNYTYSGSDNIGDVAWYDGNSGKKTQPVGTKAANSLGIHDMSGNVWEWCWDWYGSYSSGSQIDPKGAVSGAKRVVRSGSWSIDAGGVRSAFRGYSTPSDRYYVVGFRLVRP

SEQ ID NO: 94740 - protein, 210 aa, Unknown
  Obtained from environmental sample
  misc_feature (1)..(210): Xaa is any amino acid
ATSGSVGNPDLKPEDGWGGDIGLSLYYKNLFDFESTFFTQWLKDSIHWYIGTNGIWRPENVGEAMFFGLDSKLRFEIPVKLGAVKNLIPSVSYQYLLSYLLGFGYGFADNKRIPYSPAHTIGASLEVPWGSGSVIISGHYESLRYDDRANLTQLRPHFLLNANVNQKIGKNLTVFGVLRNILNESYQSFNDYPMPGITMTVGMKANLEIK

SEQ ID NO: 94741 - protein, 220 aa, Unknown
  Obtained from environmental sample
  DOMAIN (1)...(212): Bacterial extracellular solute-binding proteins, family 3
  misc_feature (1)..(220): Xaa is any amino acid
MEYFDADGKTPIGFDVEMGKAVAAKMGLEPKFIDTAWDGIFAGVNTNKYDCIMSSVTINEARKKAHNFSKPYIRNTLAIVLPKNSSLKVSSPQDLAGLRVSYQEETTSDDFMTGLAEQGMKFTPYEYDKVMYCFDELKLGRVDVIMTDLLVAYEYVGRADSPFQIVWQGGEEEFGICMRKGNDALTAAINKALDELFNDGTMLRISQKIFGMDLVSAVRK

SEQ ID NO: 94742 - protein, 100 aa, Unknown
  Obtained from environmental sample
  misc_feature (1)..(100): Xaa is any amino acid
MVFSWMPQLVKGARVTIALTVLAVSAGLVLSLFLALGKMSKNVILNKFSSGYIFFFRGTPLLMQLFFVYYALPMIAPFLTINNRFLARFIAFTMNSAAYC

SEQ ID NO: 94743 - protein, 637 aa, Unknown
  Obtained from environmental sample
  DOMAIN (29)...(267): DEAD/DEAH box helicase
  misc_feature (1)..(637): Xaa is any amino acid
MKKLDSDKIIAALREGGDVANRLSSYEPRQSQLDLLELIIRAFNEDAHVMAEAGTGVGKSFAYLLPAIHFALENKEKVVISTATITLQQQLYEKDIPLVAGAMGDAKIKAVIMKGRGNYLCLRRLDEALLEPPLIIDEDDSGYNEIRRIHEWAQNTKTGARSELSFQPAETVWGSVCSESDLCLGIHCPWRENCFVFALRKEASNAHIIVVNHHLLFADLAARFQGAGYENAVVLPPFNRLVIDEAHTIENAATSFFSAEFGRTGIFRQLGRLYHKKNKNKRGLLVRLCAMLPPGSKHLNSMVKQADKIRDCAQALDLSALELCGEAGVFRLSPDMHEAPLKENLLPCLKALRKDILALTSMIRDITEELDDTQAAEPHVWEIKAIVRRLEEIAEICDSFCKYKKLENEVLWMGKQLFSGANPWTIFTKTPLDLSPKLKDSVFAPNKTVVCVSATLAINGNFSYWASRCGILGMEKKSVLSGCFPSPFPYSSAVLLAAPADAPLPDEEGWQDFIDKATGRLAAIAGGSALVLFTSYQSLRSAWTAAKAELEPLGIRCLKQGDDDRTRLLQDFLSDEKACLFATNSFWEGVDAPGDTLRLVIICRLPFLTPDDPVFEARSEAVKKSGGNPFMELSLPN

SEQ ID NO: 94744 - protein, 536 aa, Unknown
  Obtained from environmental sample
  DOMAIN (2)...(110): ABC transporter
  misc_feature (1)..(536): Xaa is any amino acid
LQEQIENSGYYRREAAISLVLAGLGFSVSDINRETGEFSGGWQMRIALAKVLLEQPDILLLDEPTNYLDIEARTWLEKWLESFPGGYLLVSHDRYFLDVCVNEVYELFQGNLKRYAGNYTSYEKVRKTELASLVKRYDEQQEEIIKTEALIRRFRYKASKAAFAQELIKRLEKMERIEIPESLKKINITFPPPPHSGNIALTLECIDKSYGEHKVLSGVELCLEAGERLVVAGPNGAGKSTLLRIIAGQDKDFKGNVKYGSGISAGYFSQTEAEEPTALSSNLADAQNMQVLDFMEAGAPVSLIPKLRDMLGAFLFRGDDVYKSISVLSGGERSRLALLKMLLKPLNLLILDEPTNHLDLNSKDILLDALSNFGGTIIFVSHDRSFMETLSTKTLELASGNPPRARLFYGNYAYYLDRIASETESAEHTTAVKTARAEKPPSAEPQLTSADRRAADKQRQAAVRRLERQEAELLKTLEELEKTKASLEAELSLPEVYSNGQRAKEVKNKLDDCTAAIEVKTAEWEKAASALANVPA

SEQ ID NO: 94745 - protein, 298 aa, Unknown
  Obtained from environmental sample
  misc_feature (1)..(298): Xaa is any amino acid
AVVTRSATNATTPLVRAENANVEVIGKNTETSRLVAGSNVAIVATLASATSASATLGGTVTVNGGFVSGVSSGIVAEKVNITRLVSTVTAENGAEFPTVITTNTGLAISAISDVVINNANAVIINASGAASTAAAPSAVVYSVKGGITVNNVDSIWANAQATALLTVQPMQGVSVFSGKVKSRTGFAINSAGPVVVDKKDLASGTLGTKRGSIVVSTGASGVAFSAIYTNVSGSSVTIGCAEISATNASGGASAINAIEATVQTDSVTSKVTSASGTAIKVSGKDVTINAGEITSSAA

SEQ ID NO: 94746 - protein, 357 aa, Unknown
  Obtained from environmental sample
  DOMAIN (5)...(35): Flagella basal body rod protein
  misc_feature (1)..(357): Xaa is any amino acid
MMRSLFSGVSGLQNHQTRMDVIGNNISNINTTGFKRNRVNFQDILYQQLQGAARPTDEIGGVNPKEVGLGMSVASIDTVHIQGAFQTTGIPTDLALKGQGFFVMDNAGKQLFTRAGAFTIDEAGIMVNPANGMRVQGWMARELEGTTVLDVSRPVGDLYIPVGSKDPAKATTIVNFACNLDKRIPEIPENPTGRQVLDGTWSTQIDTYDSFGDKHILQVEFTRVPGTTNSWNAAVTVDPQNQNPTNTTIGLGAEAPAAGGPTTFVVNFSNNGTLLSAEDGAGNVSGTGQVQMNVAYDVQTATPNEDGTPVRQEFVLDLGQVGGFTRSITQYAEQSSSKAVEQDGRTMGYLKTLRSII

SEQ ID NO: 94747 - protein, 386 aa, Unknown
  Obtained from environmental sample
  misc_feature (1)..(386): Xaa is any amino acid
LRGICKKTAVLLMLMGLVCTPGFFLFGQNNADSLVVKIAVIGPGDELYFWWGHIGLYIEDPENKSARFYDWGIFSFENENFFANFALGRLLYSCGATPPEWNFRHYINTNRDITLYTLNLPAEKKEEIRRYAEWSILPENRDYFYHHFRDNCATRLRDILDIGLDGKFKEKYIHEPGRFTFRQHVRRHTWFNPFFDWILNFWMSRVIDTPITVWDEMFLPSEIGLRIQEFSYRDSYGTEQALVSAVETMNRAVNRPVVLDAPRLQWPRELALGCVLALLFLLLRWLQSRENAAAFKILALGQGALGLFFGVAGTILFFMMFFTNHDYTYDNINLLFANPLLLFALPLGIRHYRASFIQDKIKWGDVIKTLWTCCVGLGLLSILINA

SEQ ID NO: 94748 - protein, 535 aa, Unknown
  Obtained from environmental sample
  DOMAIN (198)...(334): ATPase family associated with various cellular activities (AAA)
  misc_feature (1)..(535): Xaa is any amino acid
MPPEERCLIAHSFLKLSDDEHQSILESACLEEMYAKIDLAINTALEVHRIISLNRQQVEIKMQRSQREYMLQEQISQLQKELDEINSNEQDNENFSKKAREQKFPPAIKEKFDEEMARMKLLNPMNPEYTVVRNYIDWLLALPFGIYTEDVLDIKRATESLDSKHFGLEKVKERILEHIAVLQMAEKLKNKDVKSPILCLVGPPGVGKTTLAMSIANAMNRNLARISLGGVHDDAEIRGHRRTYIGSMPGRIVQALRKAKSMNPLILLDEIDKMSRDFRGDPASAMLEVLDPEINTEFNDHFMEVGIDLSRVFFVATANTPDGIPAALYDRMEIVRIPGYLHFEKGHIAKDFLIPKILKQNSLTSKQFKVSDSAINGILREYTREAGVRELERKLETMARKRAMELVSKKKFTPQIVQKQLSTYLGVPDFAGPRLIDEKRAGITTGLAWTPVGGDVLHIECILLPGKGKLQLTGHLGDVMKESAQIALSLVRERAKKYKIPEDKFRKSDVHLHFPEGATPKDGPSAGIAITIAML

SEQ ID NO: 94749 - protein, 212 aa, Unknown
  Obtained from environmental sample
  misc_feature (1)..(212): Xaa is any amino acid
MNIEIKYINTLISRYPSLEIVKNDIGAAFDIIANSYANGGKLLIAGNGGSASDAEHIAGELMKTFAKKRNLPDSFIADIKKVDLEIAEYLIPRMQPGLPTIALSGHASLNTACINDIDGNITFAQQVYGYGNETDVLLAISTSGNSKNILYAAAVAKAKKLKIIALLGGTGGALKKAADVSIIVPETETYKVQELHLPVYHCLCQMLENHFF

SEQ ID NO: 94750 - protein, 179 aa, Unknown
  Obtained from environmental sample
  DOMAIN (74)...(169): OmpA family
  misc_feature (1)..(179): Xaa is any amino acid
MKTTLPILAIGFCLSILACAKKKEPVWVEPPPPPPPVREVRQEPVRQAPQEDPLEAERRRLEELMNRIMSDDIYFEYDQATLTSRAKDILTEVGTILKREPRFTVLTEGHTDERGTENYNLGLGMRRAESVVKFLTNYGVASSRLTKVSYGEEQPKVAGSTEDAYSQNRRAAFRVKITN

SEQ ID NO: 94751 - protein, 468 aa, Unknown
  Obtained from environmental sample
  misc_feature (1)..(468): Xaa is any amino acid
NGVLGAYFRAFMWFGRINFNLGGESGNAKEAAKELAPVALFITDITENSPEIKKLWQSLFDPITEIIGASDDISFYELAPLWNKIKGAGFMQWYNDSTKLETFISKNYKELHPPAISGSSLFKSVHDGNDAPEERFAPTGWRLFGQRYTLDSEIHHFVSPPRLFFRNMVSGLDIMKVFGSKAADSFLRVSDYPKYPELEKVLKSLQQNMKNIKDDYWFSTYYTNILYQIRTQALFENGAGFYFTEKPGWNLKAMNSAHGTWAELRHDTILYVKQSYAESAGGGDWEPTFRTKPLPKPIPYIEPNVPFWITSAIGIQKLYIILEKYDFLDENSASVLGRMHSLFVQAAEISKLEADDKEVSAKDLEWIETVPYSLAGLVVNLSGGTLYLDDTDQLRMALVADVFTNAEIGLVLETAVGIPYRLYIPLNDKQGGKRIAIGYGFSYYEFPQPMSNRLNNEQWKEIVYSASP

SEQ ID NO: 94752 - protein, 369 aa, Unknown
  Obtained from environmental sample
  DOMAIN (61)...(367): CO dehydrogenase/acetyl-CoA synthase delta subunit
  misc_feature (1)..(369): Xaa is any amino acid
VAKEIVTSIIDLLSERFLGQTIARPEAPKPEAKPAISASTRISEIKSFAIPAESSSAATYAVKLGNSKDSGGTRGKTRIVGGANCMPFHFWEGRMPNRPLIAMEVYDSVSVKYPDILREAYKGLLDKPADMAKACVTQHRADLISVRLEGIHPDRENRSAAQSVELVKSILAAVDVPLIITGINHYEKNNEVMKAIAQACEGENLLLNWVEQDNYRTIAGAAMAYGHTLVAQAPIDVNISKQLNILLGNMGLAPDRIIIDPMTSTIGYGVEYTYSVMERIRLTGLGGDNMLLSPMIVSVGQECAKIKEFKAPESGFPDWGDLSRRAAYWESATATTLLYAGADILILYNPEAVKTVKKTIDNLMDGEGK

SEQ ID NO: 94753 - protein, 265 aa, Unknown
  Obtained from environmental sample
  DOMAIN (3)...(67): DnaJ domain
  misc_feature (1)..(265): Xaa is any amino acid
MDRYYKILGLSSNATKEQIKEAYYTKIKALHPDKFYGTSLEDTANFFTTEINNAYETLMSQPNANVHKPNKNQTVCIEEDIFIEGMGQLRYSLSNDFNTILNALRKRSGIYKVDTDDLSWTLNTGLSENVKKVMNKYDVEYSMTIYKNGPYLQSIINRRSGGQWYYISFGLEINGVFYGEGTFRDYAAPKKQVYEKSNGGAGLFVMILVILGIVLAGIGLSQNQNTSYQNQTTQTYQETAMWGTLIKPSNQSSVINLRKGPSDKY

SEQ ID NO: 94754 - protein, 209 aa, Unknown
  Obtained from environmental sample
  misc_feature (1)..(209): Xaa is any amino acid
MDKTRTPLAKRFLAIFLMAEDKRGISALALEGRIVVAYQTAWAMCHKIRHAMGSRDAGYKMGGVLEMDETFFGSPTEGGKHGRGSEKTPVLVSVSRSGGGKPGRARMKVVERVASGAVMEFSEAGAAKGSEVRTDGLHVYRRLGKAGYSLNQGKTGPKDGPGHLRWVHAVISNAKAFIGGTPGTCSGIWTSSATASTGAGSRMASFRGC

SEQ ID NO: 94755 - protein, 310 aa, Unknown
  Obtained from environmental sample
  misc_feature (1)..(310): Xaa is any amino acid
AAKDAGKYMVAFGYNKQRNGDASRERLIQAVVSNKAARVHNEAYNFEFPRSSMWHNESRATGVIDLKGGANTITLRNPVTGRESDAAARYRALAASLQRHCPNVLFAINDWGGASSILWANDVGALPYSARAASDPIDMASIKAAFSNAIANQSPNIITDMGPINTSLARENIKAQLSIWSVLPSPIILDTWSEKLSEHASIFCNEHILGILYDSLRLQGKLVSSALDSTEIVARPLSGNKIALLVYNKAAAPATMPIEMNDIHGYYKNLGLPKVRSYEALDVWSGEAQTVGDALSVPWLQVGDAALYII

SEQ ID NO: 94756 - protein, 279 aa, Unknown
  Obtained from environmental sample
  misc_feature (1)..(279): Xaa is any amino acid
NDNNGGTAIYLDGGGTLTTGIRTTGTLGTGPATGGAGNWSAIDFTSQNYPVVAYFDEEHQTLRLAYADSNNPTDGSNWTRRYVLPETGAGSELRKGSGSYVSMKIDRANGNRVHLAFYNSNNKAVVYATAPSPSGNFTASVIDRVVEGGQWTDISVDNLGNPWIVYADSSRTGNRDGARIAYRSFNGTDATAPANAFGRDLTDPISGNSIRGWEAITMPASYNVKEDRLNIESWPPSGGAAGLAANCPIGSWNAAVGYGSDLFRIGYFFKPGASGVMQN

SEQ ID NO: 94757 - protein, 490 aa, Unknown
  Obtained from environmental sample
  misc_feature (1)..(490): Xaa is any amino acid
MNDEQIMTAYKLRLAPAKCALDLGDGSERGEYVNQDYILNVLDKPHRGINLMYCYYPLDKGWPARASTLAEPGKAGFAWNYAYDDYFPYQGGIGAVGDSTDKEPFASMRDVRRHGQDVILTLTIDCAVSDEHLVQIAKELIPFGRLMLRINHEATGTWFAFNKRYTYQQVADFYVRFHKIVKQHAPHIRTILCIGAAHKTESGKLDYEDEFVGAIAEADMWSSDTYLSLHWGWPFDIAEPGGKSHKRSTNNDILEGLRFDFERFAARAGKRKPFVLSEINADGDVNGPYEQAEQLVDFYRRVPKKAPNITGITFYQFRDRGRLGLEIEDPNNPDVGIAQPVLKDYKKIMTNGYFSPKIERGKKIAFPAKLRWGSSEDSDGITIPIDFKDNPVFCEVMFTNPDDAEKLNAMMEINGKWFYKKPGVKSIDLSPAFFKNRLKGKQRLDFKLFAPPSSGTNDPDQGEDWRINYYHTLNAAPEFRIRYEPVVKIG

SEQ ID NO: 94758 - protein, 453 aa, Unknown
  Obtained from environmental sample
  misc_feature (1)..(453): Xaa is any amino acid
MAPNDSRGSVPQVYQPTDAQVPKATVIRAIEVSSSGVKSDVATKTYFIGDNLSNYGNIRVVSLVSDPYNLVDTNYGIMVRGKSSYRWDTNPSYNFRMKGIDWERPAYLEIFEGNNRTKSALSTGVGIRVRGGWSRGIGQKSFSVYFKEQYGIKNLKNYNLIPKDTTLGTTGAVKADGKTPVTQYKGFMLRNGANDCDYTKFYDVFLQDLLSDRSFSTQASVPCVVYLNGEYWGPYNFQERYSDNHTEYKYGVDKDNVISFDNWELDDGNPGEENLFWSMMDMAKNDMSNPANYNAFCDVFDIDNFIDYWAAEIYIYNEDWPHNNYRLWRTRNVEPGNPYGDTKWRYQMFDTEFAMGIYNSGNLTGQSDKDAFDKILTGSESSNPINKLFKALLANPDFCRKFVNTMMDLYNINFHPDNYVPKLNSYAAVYKPAYDRLFFQMGLSWNMDFGLSK

SEQ ID NO: 94759 - protein, 417 aa, Unknown
  Obtained from environmental sample
  DOMAIN (56)...(208): Thiamine pyrophosphate enzyme, central domain
  misc_feature (1)..(417): Xaa is any amino acid
RDVALLEHTLNEAFSIAGSGRRGPVLVDIPKSVQTDSCEYTGKPPAVEEREKCSFDIERVAAAIKNSKRPFIYAGGGVLASGAEAELRALSEKLSAPVGFSMMGLSALPDDYPLNLGMTGMHGRYAATVAKSECDALIALGVRFSDRATGNVNEYREGKLIIHVDIDIAEIGKNVASHMDICGDVKDVLTQLLPVLPVQRNDEWLARIEKLKQSPQAEYISAGFSPQHIIETVRRFCGDDTVIATDVGQHQMWVVQHYTFQKPRTLLSSGGLGAMGYGLGAAIGASIAHNRQRTILFTGDGSFGMNLNELATAVSQKLPVVVVIFNNGVLGLPRQWQTVFYEGRYSHSTLERKTDFPALAKAFGAEGFAAENLPELERALNSLPSGKPAVIDCRIDMDEKVLPMIPPGGSVKDIILN

SEQ ID NO: 94760 - protein, 85 aa, Unknown
  Obtained from environmental sample
  DOMAIN (4)...(76): ACT domain
  misc_feature (1)..(85): Xaa is any amino acid
VDRFTVELIVSNHYGVLNRITGLYARRGYNIDSLHVNETENPDRSRILITSKGDEYIQTQMVRQLSKLHDVQEVILMTQVNRGGK

SEQ ID NO: 94761 - protein, 323 aa, Unknown
  Obtained from environmental sample
  DOMAIN (31)...(323): Dehydratase family
  misc_feature (1)..(323): Xaa is any amino acid
MNSDAIKTGIENAPKRALLKAAGYTDAQFERPLVGIVNSFNEVVPGHIHLQNIARAAKDGVLMNGGVPLEFNVIGVCDGLAMGHEGMKYSLCSREIIADSIECMVKAHGFDALVFIPNCDKIVPGMLMAAARLDLPSIFISGGPMLSIDGSDLNTVFEAVGSVKAGKMNEAELFNIEENACPGCGSCSGMFTANSMNCLCEALGMALPGNGTIPAVYAQRLRLAKQAGMSVMNLLKADIRPSAIMTERAFTNALTVDMALGCSTNSVLHLFAIARERGISPNLNTVNEISKATPNLCRLAPAGQHHIQDLNRAGGVSAVMREL

SEQ ID NO: 94762 - protein, 283 aa, Unknown
  Obtained from environmental sample
  DOMAIN (171)...(254): Hpt domain
  misc_feature (1)..(283): Xaa is any amino acid
VVEGLLAPYQAAVETCLNALQAIELVKRSEYDIIFMDHMMPEMDGIEATAIIRELEMRNEELGIKGNQIPIIALTANAVVGMREMFIEKGFNDFLSKPIDVSKLDEILDRWIPKEKRVQGVEHPNPEPRTLNPVIPNPEPRTPNPVIPVIPGIDVQKGITMTGGTVTAYTRVLSLFCKDVEERLPLLQKAPEEGSLSALVTQVHALKSASASIGAKEISSIAAGLEAVGKAGDAAFIRESLPGFAKQLEELVKNIRAALEPGKLESQDVPRGSAATPRTPNPE

SEQ ID NO: 94763 - protein, 797 aa, Unknown
  Obtained from environmental sample
  DOMAIN (350)...(415): His Kinase A (phosphoacceptor) domain
  misc_feature (1)..(797): Xaa is any amino acid
MIKNHVKSLKKIVNKTFLVFSGILFLIIALSAIVAYAISAHQINLSFIEQQLSIASETMRLRLASTVNSELALVLKMADTPVIQQYFMNPSDPVLKSQAHTELTLYKEHFENKAAFWINDIDKIFYTTGNAPYVVNPDDPENYWYNLTLYKTEKFNLNINYNPDLDQINLWVNVPVFAETDAGRKPIGMLGTGINLTDFSNFVASSYRKFDENITPYIFNKYNEITSAVDYTLVEKKVRLDDLLGETGEKLIQAAHELSKGESRSFSYDNKIFLVNSIPEMEWYMVLSYPMHGLFSLNRAMNTVFFCMLFLILFLFIIINIFIARLENEIAEQNLQLLEVNKRAESASRAKSDFLAKMSHEIRTPMNAITGMAELLLRGELSYEARSYAQDIKQAGNNLVSIINDILDLSKIEAGKLEIVSAKYMLSSLINDTINIIRTRLKEKPVRFFTNIDGNIPNSLIGDEVRMRQILINLLSNAVKYTERGHIGLTITMDKHDDKQVLLRMDVIDTGQGIKPEHQVNLFDEFVRVDMKRNQGIEGTGLGLPITRRLCAAMYGKLSMESEYGKGSLFTVVIPQGIESETPFAFVDEAEKKNVLVYESRLVYAKSICWTLENMKVPHTMITDYNEFASALYRKKWSYVFSSYGLYEKIKPLYAKKDASPSRIRGWEKPPLALMIEWGTETGIQGARFISIPAHSLSIANVLNDKEDSKGHIKSFDVMRFTFPSARILVVDDIPTNLRIVDGLLAPYKAKVDTCLSGSQAIELVKRAALEKRGYDIVFMDHMMPEMDGIDTVKIIR

SEQ ID NO: 94764 - protein, 299 aa, Unknown
  Obtained from environmental sample
  misc_feature (1)..(299): Xaa is any amino acid
TRYTDFSTEESYPALDAFGNPRKEPDELCFEIKTNNIFIFNNKVYYYSFSSFPNSSDKTLNLYRDSNLSSLEGTLNISFYPYENKMLIFEGTGIGEGIAERAPYFCQPETMEPPGVYSLQNKWYLEGETIPNNEIVTASNAIILEENDMHGSRIQWIAASKHFLAATERATWNDTGDVPTPATFDMNIIEHAGSSGLQPKSTKDTIVYAGRNRKTLRALVWNENTQGSGYIDMDISERAAHLFSAGIKDFAVADYPYPMIWIVTEAGELISCLINIRAGLLAYARHPTDGEVEAVAVAA

SEQ ID NO: 94765 - protein, 287 aa, Unknown
  Obtained from environmental sample
  DOMAIN (3)...(51): Sigma-54 factor, Activator interacting domain (AID)
  misc_feature (1)..(287): Xaa is any amino acid
MQASFVQKQQLGVKMNPQVYQSLKLMELPLVDLREKIEEELEKNPALEVVDDRSTVSLSEDEPQQREIEEYFETSSDSGFIYSGSAGAAASDEHRRFMEGALTRPETLQQHLLWQLQLEPIDDELRSIAAILIQNLDDDGFHKEPPETLFKESELFPVVPPPRLDEAIRLVQTLDPAGCCAANYKESLRAQISLLRDAPDCLECSLDHLDLFEKGKFSAAAKVMDCGEDEARACYKLMKKLSPFPGRRFAATEVRFVIPDIQVARDPNSEKGDFVIILNNEMVPVLG

SEQ ID NO: 94766 - protein, 70 aa, Unknown
  Obtained from environmental sample
  misc_feature (1)..(70): Xaa is any amino acid
MIVDLIVTIKKEKDFEAEATVNFRWGVSIHVKENDFELTPAIDKMIDKLESKIIKEKEKVKDKNHHQTPR

SEQ ID NO: 94767 - protein, 304 aa, Unknown
  Obtained from environmental sample
  DOMAIN (1)...(304): pfkB family carbohydrate kinase
  misc_feature (1)..(304): Xaa is any amino acid
MKKSSFLAVCMNPTLQKTLVFSGLVRDSVNRTAEYRLDASGKGVNVCRVLTQLGKEACHLTQLGGTLRPIFLELCNKDGIKVEWVESSSPIRFCYTIIDKEQKTVTELVEESEKVEEGTGVRLLESFTKLIPGYSVLVISGTKAKGFSDNLIPEMVSTAHTQGCRIILDVRGQDLIKCLPLGPYLVKPNLYEFISTFKPELLSEKNIDTVRKKVGEIWAELYEKYPCALVLTRGSESLWYAEKGEVSEFAFKSVEPLNTTGSGDAFTAGLATALEDGASLVDAIAEGVRCGALNAVLLKPGVIR

SEQ ID NO: 94768 - protein, 193 aa, Unknown
  Obtained from environmental sample
  misc_feature (1)..(193): Xaa is any amino acid
VTHQKIKLLKHATIIPLFGSSISFSGGVYTSDGEFLEDSIVDRAQPGELQTPVENLSGTYIYGGYLVGHFGHFIFESLSRLYTIRQCNNYPILFINENDCVFNFQKEIFQSLGINNEIIRVKVPTSVEHLIYSPPGSAVNPLNIIDEQISALKYFYFQKDMKREEKIWLSRSNLLVGTIINESAIEKILTKIG

SEQ ID NO: 94769 - protein, 93 aa, Unknown
  Obtained from environmental sample
  DOMAIN (10)...(93): Ribosomal protein S9/S16
  misc_feature (1)..(93): Xaa is any amino acid
MSTNFQYGTVRSKTATARTRLYAGAGRIEINGRPFEEYFPRKTLQMIIRQPLALTKTLEKLDVRVTVQGGGVTGQAEAVRHGISRALLEFDPA

SEQ ID NO: 94770 - protein, 312 aa, Unknown
  Obtained from environmental sample
  misc_feature (1)..(312): Xaa is any amino acid
VKNLVDEVIKILQPSKEAPPEYKLVLALSKNDFASANIAVKNIVQAAVTPQQNQTPPQIQIPQQIQVPQQIQAPQQTQTPLQIQVPQQTQTPLQIQVPQQTQIPLQTQAPQQIQVPQQIQIPQAAATAMQTFQTIFNALQELKEFGIPIELKDAPLKELETIVLQKTGIELDKNLPNLRDLQNFFYEKPTYATISLLPAKQAVHFENVASVVEIPLPKDFPVQKIFSNILQTPPPIVLQQSQQQQSVPQQQSILQSQPQQQPVPQPQPQQPQFIPPQPQQQQSIPQPQPQQQPVPQLTTATANTAAAHSTKN

SEQ ID NO: 94771 - protein, 352 aa, Unknown
  Obtained from environmental sample
  misc_feature (1)..(352): Xaa is any amino acid
LFYNNRNSNNLFHSNSLFFNRSHSNNLFLNHNRSNHNLFHRNHNSNSLFHNLNHSNNLFLNSQPQQQTQQQPIPQKIEMAFSLHQITIPQNITPQNNTPSQNTPSPAPKFILQPWPVSTLIPKEERNFWLKTDLPLTPQILNIRETILSFGKLPENPEVVKLFANNLHEMSLQTEQGTNISKEQANLLWRVVQLNCQLSSQLPVANSELSTLNLQLLKYQPTGNYEGELFKNLPEPVRRELQHELPTGKTWQPETLQKAIEKILEKYEKYEEPQLIKANPNEHTSKHNEEIRHILQNLKEQIQWTRIDQDTRLQNDRENVFYFMHEGNLQKGRLKIKDERKGNSNKHQGSSI

SEQ ID NO: 94772 - protein, 242 aa, Unknown
  Obtained from environmental sample
  DOMAIN (5)...(155): SpoU rRNA Methylase family
  misc_feature (1)..(242): Xaa is any amino acid
MDLSDIVIILCRPSEPGNVGAVCRVMKNMGLTRLRLVAPEPFDEATLLARTVHAEDVWRGAVFFDTLAQAAADCSLVVGTTRRRGRRRKSISMEPRALTAWLKDQEHAPLALVFGNERTGLEEDELNFCNVASHIPVSDSFPSLNLSHAVQIYAYELFLAFGHVGENPVKGEWVPLEYPAALQLTESITNTLAELGFYKRPGRVEQTRFLRDLICRAGLTEREGRYLKDIFIKAARLGYNKS

SEQ ID NO: 94773 - protein, 452 aa, Unknown
  Obtained from environmental sample
  DOMAIN (337)...(450): Shikimate / quinate 5-dehydrogenase
  misc_feature (1)..(452): Xaa is any amino acid
LAKICLCLTAKTIQKDLEILDKYRKYTDLAELRVDCLDPDERLHIRRFPELAELPVILTIRRDSDGGYFTGGEGARVKLLARGLAFAEADRRKNFAYVDIEEDIEVQSLEEAARTFGTKIIRSYHNVEGIIDNIPAKVNSMRRIGDEIIKMALKTNTTSDVARVYRAAKECTIQDKIIVCMGHLGFYSRILCEKFDSFMTYSSALSENETPGAVGQLDVKELNELYRFRNINKKTKIYGITGYPLKANISTLIFNTVFGLENTDAVHVHFPADSINDILELAEKLDVQGLSITVPYKEAVLSMLTRRSAAVHSIGACNVIFRSADGWFGDNTDSTGFSAAILAFLGKKNLKWKKITIIGAGGIARAVAAEIFRMGGKALILNRTIHKAKDIALLYNFRWGGLDEHGIKLIDKYSDIIIQATSVGMGGYEVFDPLELYSYTGKENCMDLVYYP

SEQ ID NO: 94774 - protein, 250 aa, Unknown
  Obtained from environmental sample
  DOMAIN (4)...(234): NADP oxidoreductase coenzyme F420-dependent
  misc_feature (1)..(250): Xaa is any amino acid
YERRQGADIYITDADLEKAKSSALSLGAKLLSTNTEAVEKGDIIFLAVKPQVLQQVLAEIAPTANQRLNSNRAPVFVSMAAGWSIAKIQGILGAKMPVARIMPNTPALIGKGMIALSASPEVSAQSVSEIEKILSGAGIIDKVDERFMDAVTGLSGSGPAFVYLFIEALADGGVRAGLPRDKALRYAAQTVLGSAAMVQETGKHPGELKDMVTSPGGTTIAGITALEDGAFRGTVIKAVEAAWKRSLELG

SEQ ID NO: 94775 - protein, 171 aa, Unknown
  Obtained from environmental sample
  misc_feature (1)..(171): Xaa is any amino acid
MEVILPRMIEIFWREYLRKISEMRDFGVRYPFTDVIFAYIGNGLFEYVLNKLEKTAVRHPLYEPSAQLSKKATATDPIMHRTFTSGEGWLIPGEILHYASQGVKSFVLLQPFGCLPNHISGRGVIKKIKELHPDIQILPLDFDPDVSFANIENRLQMLIMNARSQMKVSNN

SEQ ID NO: 94776 - protein, 426 aa, Unknown
  Obtained from environmental sample
  misc_feature (1)..(426): Xaa is any amino acid
GIPPLADKYLQFAEDAIAAGRWAQARAALERAADFADVSSDISYLLALARSQEGEDRRLVLQSLEQAIGTKRWKYYTEAQARLLQADQLIIMRRYASALSTLAVYKTIAGENADLTLLRLAALKGLTLNGQVNSGRPAPGAMPPPVPAEFRRRMLEALERYPRDPRPLRMFLNYAKGRELDRDDKALMETALRRLSFLLEADPELAWMAAPFISDDDQARRMVAAYRAGSLKSRADIGFRPNPASLIPALNLGLVDDFNAADELFAETTLEKEIIVDIGDLLRSGEGRDYFVRKLHSFTGALTADEDGDGYAESRAMYRQGNLQEYYCDTDQNGITDLFVLFNAGTPMRAEITTLPSQGGGRTEALILWERYPAVQRVVLGNENYLPAPAGFQFVPVNLIELGASDNYAGLMFPLRNSRSPDISRH

SEQ ID NO: 94777 - protein, 140 aa, Unknown
  Obtained from environmental sample
  misc_feature (1)..(140): Xaa is any amino acid
MDGILLNKSLSEDVERLHSRYQPQLEADRYIKALNLRHDIDYFILIEPGLGYLIPALEKYRPQSKIIVLHADIFFRETESRFPDVPVWFPDSGKKVQEFLEEKIPEAASVRIIEWRPSLRIFGDQCLELVRESTEFIKRS

SEQ ID NO: 94778 - protein, 231 aa, Unknown
  Obtained from environmental sample
  misc_feature (1)..(231): Xaa is any amino acid
ETSVELDTGVEDISLADDLALDNTETSVELDTGAEDISLADDLALDNTETSVELDTGAEDSGPTGDPSDGLSLADDIALDDTETSVELDTGAEDSGLTDNLAGDLALDDFDAGIALDEKEDNDSIGSLADDDLTGVIPEAFEINAEEALVDDDLEAFDEGEISLPETSAAKTTGANTEDIDIPANFKTELKSVLSYMDRLLESLPEDKIEEFAKSEYFDSYKKIFKELGLV

SEQ ID NO: 94779 - protein, 180 aa, Unknown
  Obtained from environmental sample
  DOMAIN (1)...(142): MatE
  misc_feature (1)..(180): Xaa is any amino acid
MYGDAVIASISITQRVFMFLASATLGFGQAFQPVCGFNFGAKRYDRVKKAFWFCLRLSAVMLIILAAACFIFAPKIIALFRHDDAEVLKIGTFMIRAQSLTLPFLGWILLTSFLLQTIGKAVPASILAFARQGLFFIPLIFTIVPIFGVLGIQLCTPIADTCSFILALFLGIKVLRKDLT

SEQ ID NO: 94780 - protein, 176 aa, Unknown
  Obtained from environmental sample
  DOMAIN (48)...(175): Phage Mu protein F like protein
  misc_feature (1)..(176): Xaa is any amino acid
MADIIPKAATDYIKNKNLKVGFSYKDVWHEEHATGFTVAKAMQFDVLSDMHNAATKAVENGQSFETFKKNLKPTLQQKGWWGRKEMTDPLTGKTVDAQLGSDRRLKTIYNTNMRNAFLYAKYKRIMDDPLMTHIMYISSKSSVHPRPIHQQWDGLILPKDDPWWGLHLPQKEYGCK

SEQ ID NO: 94781 - protein, 428 aa, Unknown
  Obtained from environmental sample
  DOMAIN (191)...(281): Helicase conserved C-terminal domain
  misc_feature (1)..(428): Xaa is any amino acid
VFAPCLNLGLVIIDEEHDGSYKSGNTPRYHARQTAIRRCTVEGAKLVMGSATPSAEAWKLMAEGKIKRLDLSLRLAGGSLPEIKPVSLEKTEGCLTRELKEEIRLTAQMGRQTILFLNRRGFAHFYYCPSCGYEQKCKRCSVALTWHKNKNRALCHYCGYSEPPVDTCPNCGSLEAGYRGFGTEMVEEEVRRTFPNLRVRRIDADAAAKKGILEDTISLFKAGLIDVLLGTQMVAKGLNFPGVRLVGVVFADTGLHMPDFRAAERTFSLIVQVAGRAGRYFPDGKVIVQTLRMGDPVITRSCAVDVEGFFNAELAQRKALQFPPYTRLIRMNIRGRDASRADMAIKRLADIATGGGASGSLMPPDADMLGPAECPIGIINGNHRRQLILRGRSMGTLHAAARLILERYEQGRDSRVYLEVDVDPVSLL

SEQ ID NO: 94782 - protein, 325 aa, Unknown
  Obtained from environmental sample
  DOMAIN (51)...(325): AMP-binding enzyme
  misc_feature (1)..(325): Xaa is any amino acid
MYEKQPWLKHFGETPANLNYPDLSMYASIREKSEQYPDVDSFVFFGRRTRRADLDKRIVFMSRRFAQIGIKKGDIVIVCLPNIPQAVISIYALNRLGAIPAPIHPLSATGEIEEFSKLVSAKAAITLDGFYPRFAEANFKFEKIIVCSLKTEMDLLTKTGFSIGMGRKIKPVPFSATVLDWAKIEAEKEQTELETPDPIGADEMALILFSGGSTALPKAIMLSNKNCNALAMQMQAHGGPLTPGDKMLSILPVFHGFGFAVGIHAMMITGGACILVPKFKASTLAPLVKKHKPEFMAGVPTLYDALASNKNFRKVPLGSLRAFFA

SEQ ID NO: 94783 - protein, 448 aa, Unknown
  Obtained from environmental sample
  DOMAIN (261)...(351): Methyltransferase domain
  misc_feature (1)..(448): Xaa is any amino acid
IAAARSLSEFLAKAPTERPLEVTLVAPIPPHNSRGEAEELPGITVMRRIPHLGERLAEYDLFITHFGLGAFEAVYARLPVILVSPSLYHQKLSRKAGFLSLGIGIGAAGRLGKLVSDFGHRTEGNAGKPDLLKSLELKSREIADRYGLWEDQKETIVSFLCRVSPRSPFACPICKRPRSVPVLARFPEESYRQCPRCGIIYLARLSEPQIEYEKDYFFSDYKKQYGKTYLEDFPSLVETGKRRLEHIKGLLHLHDEKPSIMDIGCAYGPFLAAAAECGFSPVGVEPAADAARYVKEELGFPCYQGFFPAAINGLSGFDAVTLWYVIEHFEGVGAALREIHGLLKEGGVLAFSTPSFSGISGSKSLSSFLKNSPPDHFTVWSPKVCAWILRRYGFRLCKIVVTGHHPERFPFIGRFADPANKGLLYRFLLFISRLFRLGDTFEVYAVKG

SEQ ID NO: 94784 - protein, 332 aa, Unknown
  Obtained from environmental sample
  DOMAIN (1)...(290): Basic membrane protein
  misc_feature (1)..(332): Xaa is any amino acid
NKDNLKVGFIYIGSIHDEGYTQAHDKGRLALEKQGVKCAYVENVPENADCEKAIRDLIDQGCNVIYTNSFGFMDWTLKVANEFPNVYFGHCSGYKRAENMSTYFGKAYQARYLSGIAAGYKTKVNKIGYVAAFPIPEVIRGINAFTLGVQSVNPDATVEVIWTSTWYDPAVEKQGAIELLNKGCDVIAQHQDTTAPQIAAQERGAFAVGYNVSTPDAAPKAYLTAPLFHWEVFYVDDVNQVINGTWKSRAYWEGFSNGTVTLDDLTANNDPRAAATINTARDAIKAGALEPFTGPLSDQSGAEKVPSGIKMTDDEIWNMGWFVKGVIGVIPS

SEQ ID NO: 94785 - protein, 352 aa, Unknown
  Obtained from environmental sample
  misc_feature (1)..(352): Xaa is any amino acid
MIKTKFLSTAIGSMPFEDPGYAVGVSLKSMDAPIWPQLPRLGLLEQMEVQYSENMPCAVVDNEKNRLYFKTDVDYSEKFAEFYEAFMAATEEGTNDFSKMAISEKYSKGIYALLKTLKEKGGKMPWLKVQTTGPITFALSIVDENKRALYYNEEFRDVIVKSIAMKSRWQIQQFKPFAENIICFLDEPILSAFGSSTYVSVKREDVVSILSEAIEAIRAEGGIAGIHCCGNTEWSILIDAGVDIVNFDAFEYGDTIAIYADSVKKHLERGGVLAWGVVPTSEKIREQTVDSLEKQLEKVMDNLASKGIDKKLIIDQAMISPSCGTGSLSVSDAEKVFSLLSELTKRMKEKYA

SEQ ID NO: 94786 - protein, 295 aa, Unknown
  Obtained from environmental sample
  DOMAIN (15)...(295): Homocysteine S-methyltransferase
  misc_feature (1)..(295): Xaa is any amino acid
VARQKITDALKAGKVLISDGAWGTFLHNKGLKSGECPELWCIDRPADVLDIAKSYIDVGADMVETDSFGGSSFKLAHYKLDGRAAEINEAAAKISRQAAGDNHWVIASIGPTGKMLVTEEVTEEELYEAFKTQAAAFEKGGADAACIETMSDIEEACQAVKAVKENTKLEIICTFTFEKTVQGEYRTMMGVDPVSAMNAVIEAGADIVGADCGNGIERMIEIVSQMRAVNKTVPILVHANAGLPKNVNGQTVFPETPEDMAAIAPKLAAAGANIIGGCCGTTPEHIKAIKEAVKK

SEQ ID NO: 94787 - protein, 110 aa, Unknown
  Obtained from environmental sample
  misc_feature (1)..(110): Xaa is any amino acid
AKAFRFHRNGSVFGAYLEFGNGNFIELFEDVSRSAAAALGRLAHFCLETPDIDAAMESLSARGIGFSPKKLGSDSTYQIWLKDPDGNEFEIHQYTAESSQIVGGEVEADW

SEQ ID NO: 94788 - protein, 453 aa, Unknown
  Obtained from environmental sample
  DOMAIN (2)...(290): Lyase
  misc_feature (1)..(453): Xaa is any amino acid
MVPWISEEAALKACVKAEIALVIAHLAVRGKATHEIRTQLEEAGNSVDPAEVYAEEEKTRHNIRALVNVLKKKLPAEYSPLIHLGATSVDILDTSLAWRIRGVTREVVLPELKKLELLLCDLAEKEAETAQVGRTHGQHALPITVGFAMAEYVSRLGKSILEIRRLEKNLKGKLAGAVGSYNATAMIVKDPEELERLYLAELGLEPSEHSTQLVEPEYLLRLLLEFNTAFGIIANLADDLRNLQRSEIGEFHEGFAAEQVGSSTMPQKRNPWNSEHVKSLWKAFMPRVIAFFMDQISEHQRDLSNSASQRFIADYIAGFTLAVSRMAQVVRGLQLDRERLSANLKAAGSALLAEPAYILLAESGVGDAHELIRKITLASEKENLSFARALEREKETLSAIAAKMAELGLIKKDGTASVTDAALAWFEHPEHYQGLAAKKARSIAAKYREEIDV

SEQ ID NO: 94789 - protein, 650 aa, Unknown
  Obtained from environmental sample
  DOMAIN (100)...(243): GAF domain
  misc_feature (1)..(650): Xaa is any amino acid
MPPYQPTGELSLVLLTENMKKAVKEGRYVFEWMAQMSDGTPIPAEITLVRINYGGNYVIAGYLRDLREQKMMMKELEQRDKLLNTVNRAAAILLQPGIDDFENAISRSMGMMGEAVGIDRVYIWKNHFTNGEHCCTQLYEWSRGVKSQQGTEYTVNIPYRLIGDWEKILSSGNCINSLVRDMSAEEQEKLVPQGIVSILVVPVFLQERFWGFVGFDDCRRERVFTENEESILRSGSLLIANALLRNDMMQNIRAGAAELEVALAKAQSANRAKSEFLSNMSHEMRTPMNAIIGMTLIGKSASGLEKKDYAFEKIEGASTHLLGVINDVLDMSKIEAGKFELSLVEFNIEKLLQKVISVINFRVDEKHQCLTVNLDPRIPGNLNGDDQRLAQVIANLLTNAVKFTPEGGSIHLNARFIKEENGLCTIQIDVTDTGIGISAEQQSRLFSSFEQAESSTSRKFGGTGLGLAICKHIVGLMGGEIWLDSKPGVGSIFSFTVLLKRGKTEENAETHPHKADSGQPVSFKGRRLLLAEDVEINREIVQALLEPTGIEIDCAVNGKEAVLMFSRKPKGYDLIFMDMQMPEMDGLEATHQIRSIEGHKNIVPIIAMTANVFKEDIEKCLAVGMNDHIGKPLDFNEVMEKLKFYLQPSP

SEQ ID NO: 94790 - protein, 418 aa, Unknown
  Obtained from environmental sample
  DOMAIN (214)...(400): Protein export membrane protein
  misc_feature (1)..(418): Xaa is any amino acid
MKRIIRFSNLFIPAAIFSILLTVSGVVSYFLIHFNLGVDFQGGLIQEVQFAPTAFSLTWSGAGNATVSFDRGGLYIVNTGVGIDSRNNIEFPFSEYGTVGDLVQALGAVEGIEVKSEISERTSSQWLVRSAQGNPQLGDVPYLVHYLDPQSQEIKIETVREALASMGQGISVQNLGQPRDRHFMIRLQDKGIEKGDSTEGGTAAEAPGERITRILENYFGTGEVVVLRSDYVGSRFSKNLTDQSGILIGFTLLLVLIYASIRFKPQYAIGAVLGIIHDCLVIISFVVWTRMEFNTTTIAAILTILGYSINNTIVIFDRMRENRRLYPDEVFVTVLNRSLTETLSRTIITTLTTMLAVVSLFIFTTGSMKDFALALLVGLVSGVYTTTFIATGFVYLWDKEKVKRAKKKVTVPAKSALA

SEQ ID NO: 94791 - protein, 267 aa, Unknown
  Obtained from environmental sample
  DOMAIN (4)...(103): S-adenosylmethionine synthetase, N-terminal domain
  misc_feature (1)..(267): Xaa is any amino acid
MNSRRYFFTSESVGEGHPDKLCDQVSDAILDACLRDDPQSRVACEAFSSASLVLVGGEITTTTYIDFHHIIREVAREIGYTDASYGLDCESMAVLSMIHNQSPDINQGVSGKGLKKYKGQQGAGDQGMMFGFACNETKGLMPLPITLAHELLIHATKLRKNQTIKWLRPDSKSQVTVEYEGFKPIRIDAVVVSHQHAPEVAYKEIEETVIEKIIKPVLEPTGLLDKKTKYYINPTGRFVVGGPFGDSGLTGRKIIVDTYGGMGRHGG

SEQ ID NO: 94792 - protein, 292 aa, Unknown
  Obtained from environmental sample
  DOMAIN (25)...(222): Glycosyl transferase family 4
  misc_feature (1)..(292): Xaa is any amino acid
MGGIFIIGSVIISILFWGDFGNKMVWLVIAAFTAFGIIGFLDDYLKVSRHNSAGLPAWGKLAGQFVVALGVALFLYFSAGGEGASRSEVTSLYIPFFKNPVVDLGSLWIPFGVLLIMGESNAVNFSDGLDGLLTGLLILVFIALAILTYISGRTDYAAYLGIPYIHGAGELTVVCLAIVGALIGFLWFNAHPAEVFMGDVGSLSLGGVVAVISLIIKKEILILIIGGVFVLEIASVIIQVISFKLRKKRVFKMAPLHHHFELTGWAETQVVTRFWILGGLFAIIALSTLKIQ

SEQ ID NO: 94793 - protein, 382 aa, Unknown
  Obtained from environmental sample
  DOMAIN (7)...(382): Protein of unknown function (DUF1703)
  misc_feature (1)..(382): Xaa is any amino acid
MVGAAKSSTKRLLPVGIQSFRKIRENGYVYVDKTPQIYPLITGVEGAFFLSRPRRFGKSLLCSTLSAVFEGRRELFGEIAGRPALAIDSLDWEWKRYPVIRLDLNPGNYNDGAPILNAVLQNALDNTSRRYGAALRGQTVPIQFANLITDLRERLNEKVAVIVDEYDSPLTNTLNKRDTHIELRNALKSFYGVLKSSDACLRFVLLTGVSKFSQVSIFSELNQITDLTLDPRYADICGLTQEEMEANFEPEIKYIIDKHGRNREEYLDETRRFYNGYRFSKAPLTVYNPFGLLKHFNSGGEFSEHWYETATPSFLVDLIEKHKVNVLELGDFKVRAADFGKYDIDNLTLAPLLCQTGYLTISDYDEKTQRFTLDYPNDEVRA

SEQ ID NO: 94794 - protein, 393 aa, Unknown
  Obtained from environmental sample
  DOMAIN (244)...(372): Alanine racemase, C-terminal domain
  misc_feature (1)..(393): Xaa is any amino acid
MSVQRPLYSPYVEVSLDNLLHNMAQIRRKLPQEVGVIAVVKDSSYGCGSVQIAKALEQSGSVAFFAVARTIEAVVLRKRGITLPILVLGMATEAELRYGADNGIVFALNDLSDVDRWESYGVNVNFHLGIDTGMSRMGLLPSEIDTLINKLNTARNLHIGGAFTHMANADEPNTQTVARQLEKFRDGINKLRNGGHPPAHVHYGNTATFLRFPLSDCTLARPGIALYGCKPDPAQEFNINLKPVASLISHVVKMKKLPAATPVSYCGNYVTPADTWIATIPLGYAHGLPRYLNGKGFVLIGGKRYRIAGNVTMDYIMVDAGETPSISVGDEVAAIGSQGGESITPDDVAVIGNTIGYEVLCNLGRPSTASTRRTGRLSTTNPALFISFLSGFL

SEQ ID NO: 94795 - protein, 167 aa, Unknown
  Obtained from environmental sample
  misc_feature (1)..(167): Xaa is any amino acid
MIYEIRGCQVMLDEDLAEIYQVETRRLNEAVKRNINRFPPEFMFQLTQTEYDNLMSQFATSSWGGRRKLPFAFTEHGVIMLSSVLNSKIATQINIAVVKAFIGMRRYIAKPLREKLDNLEKIMMLHIDDTNYNLSKHAKIINEVVTKLSNLMEEPPKTKRKIGFSPD

SEQ ID NO: 94796 - protein, 462 aa, Unknown
  Obtained from environmental sample
  DOMAIN (42)...(119): Bacterial Ig-like domain (group 2)
  misc_feature (1)..(462): Xaa is any amino acid
MKLIKKLLGIAAITAVIGFITLPLTGCPAEADDGNGVTTTVPVTGVTLNQTSISLTMGGTANLTATVAPDNATNKAVSWSSSNTASVTVSNGVVTAVAAGSATITVTTADGNKKASCIVTVTPIGITTYAITMQNDGNGTATANPNPAEQGAEVTITATPNSGYSFKSWQVVSGGVTLPHSAANPAKFTMPGNAVTIKAIFAEIPPNTPSLSLTPPTFDDVTIGYAAQPAKNVTIKNDGTGTANITSIALDSAGDTAFTLGGTSITTVDAEGTATFTVQPKTGLAAGTYEGAITVTYDSGKKAEAEISFTVNNTTFNVANDIEWNAAVTAISGGGNDETYDINVTGNFSIQGYSSATFGDVTGITVNIRGTGTITLDSGSTGRLLYIGTNQTISLKETHLRGHSANNTSLVYVNSGTFNMSGGTISGNTAGRGGGVYVHGYFRENVGSGTLHMSGGTISSNT

SEQ ID NO: 94797 - protein, 302 aa, Unknown
  Obtained from environmental sample
  DOMAIN (212)...(289): Bacterial Ig-like domain (group 2)
  misc_feature (1)..(302): Xaa is any amino acid
MKLIKKLLGIAAITAVIGFITLPLTGCPAEADDGNGVTTTVPVTGVTLNQTSITLSMGGTANLTATVAPDNATNKNVTWSSSDTSKATVTNGEVTAVAAGSATITATTADGGKTATCNVTVSATVIDVTGVSLNKSNTTILVGETETLTATVAPNNATNKNVTWSSSDTSKATVTNGEVTAVAAGSAIITVTTSDGGKTATCNVTVSATAVGVTGVSLNKSSTSITVGGTEILTATITPSGATNQNVNWSSSNTAVATVSGGTVTAVSAGSATITVTTVDGNRTATCSVTVTTPTYTVIYNA

SEQ ID NO: 94798 - protein, 434 aa, Unknown
  Obtained from environmental sample
  DOMAIN (69)...(264): Sigma-54 factor, core binding domain
  misc_feature (1)..(434): Xaa is any amino acid
SCFIYQLMELPAVELRERITQELERNPALEIVEDKSTVTLDDDEETHQKEVYEYFETTSDPGRRGAQASEEHNRFIEGVLTRPETLQEHLLRQLQLEPVDEELRKIAETLIQNLNDDGFHKEKPETLFAQPQQRLNEAMELVRGLEPAGCCTNDYRESLLTQIELLGDAPCEISVIEKVLDNLDLVDREKYNALAKKIGFDDEEEIRIICEYIKKLYPFPGRAFASAEVRYVVPDIKVIRNNDGLTINLNDEAFPVLGINRNFEKFSDSADKAARDFARDNIKEAKLFISHLSQRNQTLIRVANAILEFQRSFFINGPKYLAPLTLADIAKELDVHETTVSRTANGKYMQTEWGIYEIRYFFTNSISGSGANRSQFSKESVKEIIKEIISKENRLLSDQEISALLGQKGIALARRTVAKYRKELDMGSSYNRRL

SEQ ID NO: 94799 - protein, 325 aa, Unknown
  Obtained from environmental sample
  DOMAIN (46)...(324): Aconitase family (aconitate hydratase)
  misc_feature (1)..(325): Xaa is any amino acid
MRNIEVYDSGAYLIGGMRIIRDNADAAVQLKQNGVSVSKEEARKGTIAYGILAAHNDSHAEQENLRLTFDSLTSHDITYVGIIQTARASGMEKFPVPLVMTNCHNSLCAVGGTINQDDHVFALSAAQKYGGIYVPPHLAVIHSYNREMMAGCGRMILGSDSHTRYGALGTMAVGEGGGELAKQLVGRTYDMPSPPVIGIYLEGEASKGVGPQDVALAIIGAVFKNGYVKNKALEFIGDGVDKMPIDFRNGIDVMTTETACWSSIWKTDDKVKTYLKERGREGDYKELKPAATAYYDGFIQIDLSKIEPCIALPFHPSNVYTIKGL

SEQ ID NO: 94800 - protein, 286 aa, Unknown
  Obtained from environmental sample
  misc_feature (1)..(286): Xaa is any amino acid
MNRNYHDFGASRKRKVVSVYTRATGSNVQIFDNNFRSFGTDDKPDVEQNICPFCTNSDSCREMHIKEMQKAGRNGKAHAYQCELGLLFWTSPIYSEGEFSGALRGSGYLVNGADKSEFAKKCAGMISADEFKRRVAALPVCDTERMHSLSEMLLLCAESLSTGSENYHEMLRLRSEQQASLSVLIDKLKRKYPEGSVLPPYPLDKERQLIASLYRGNKKETERILNELLAVLVFSNPNNFRYIQMRTLEMAVLLARAGINSGSKIATEINVRYLRQIQEAKTIEEL

SEQ ID NO: 94801 - protein, 204 aa, Unknown
  Obtained from environmental sample
  misc_feature (1)..(204): Xaa is any amino acid
KQFQFNLENCLANFLSFFCGCFVKGCEISYLAPRDNYFLNGKLDCILEDRIENESKYIIVDFKLKHLPKRADCTGTEDDELRDFQLPMYITLAEENEKINVNTALFYSILDLKPEVVIGFAEDKYNEITIPKKEDARILRNSAKYNQILNEFNQKAKKFADEIKNAKFSVFESDYNECNDCNYNRICRTVYIIDREKNISLGNN

SEQ ID NO: 94802 - protein, 296 aa, Unknown
  Obtained from environmental sample
  misc_feature (1)..(296): Xaa is any amino acid
MNVKKRTQLNNEQQSAAFCEENAVVAAGAGSGKTMVLANRFAWLLTKKGYNVDEILTLTFTKKAAAQMFSRIHALLTEIAEGEDGTNAARAQKALDNFVHSRIQTLDAYSSSIVKQYAPRYGISPDFMIDEERCRQIASEESLPFLITHRHHPAIERLFSDNRPNEIVSHIFAAVLFKHCRIDKPRDFSADVKTQFDIVCAEWEKHIKKIGDLLDEMEILISENSALLPDLVPLMKNKNIIFPKTKEIQKYFEYLLRLPAESVIEKSESNSLQNQMITLLGFLSRICALNPDRGKR

SEQ ID NO: 94803 - protein, 438 aa, Unknown
  Obtained from environmental sample
  misc_feature (1)..(438): Xaa is any amino acid
AGGDGKLSICILNKDSISNNDDDVLCADENEALFTARKIHQLINEQNYKPDDIAILFRTHNHQYYFEKHLRMLGIPYACEDIDNFFYGGPVNDIMSVLRLAAHPLDSASYAEMLRSPFAGLSLEGTAVCLSIFNDAENPAVFNDGPLNLLDESDREKYLHGQKVYFSICEKAATESVSSLVTELWYKEGYRYETEWNPATSVYRELYDYLFHLAVIADNRNEGLASFTDSMRDLRDSGGRLTDIEIPLERPGAVHLMTIHKSKGLEFPVVFLCCCGKDSRSDSSEDVFFSEKTGVVISPPLPDSCSTIGGIRKNFLWEQSIAEKKLKRTAELRRLLYVGMTRAEKELYLTGSLKIKDIADSGDFSDTVKNYIEEKCEENENSIPGDTILNNDTFFGLFLPSIASRMHQGFISLEEIRGLYGRRHKKTGNKSQTLTKKH

SEQ ID NO: 94804 - protein, 353 aa, Unknown
  Obtained from environmental sample
  DOMAIN (17)...(353): Major Facilitator Superfamily
  misc_feature (1)..(353): Xaa is any amino acid
MLPPLSPYRLRKAREVFNLFNVFNALSWNLLVGSIITLFAIRLGASSTYIGTLSALLYVSFFFLPLGKLLSKKFSIVGIFSFTWTLRAIGMITVVFAPIAAHLGHHDTALGLTMLGVGIFHVVRGVGMIANNPVLSNLSMGPDRSSYMTQIQIINSAVGMFSGFAIAIILGKDPGLYLYSIIMAAGIVCGVTSGMLIRKVPEPPIEESAVKTSLAGLVREALHEPKTKLFLLLLLLVVLVSGVSRTFLVVYAREVFLQEDGMVLLYSVFGGLGQLLANMLIKFLVDRIGAKPIFIFCVLLGFVMMIPIVFFPPSSVNSLTMVILFLSFLFFMLNFGFLGSEGIAQTYFMGLVP

SEQ ID NO: 94805 - protein, 290 aa, Unknown
  Obtained from environmental sample
  misc_feature (1)..(290): Xaa is any amino acid
ITFEATDRIEVSIIGITAQNSDYDGTPKKGYSGVATSGAYTGELIYEYAGTNHPQSTTPPTNVGEYTIRVTVPDDTPYIGEWRGTFNITKAKIAKPTASTNLVYTGSEQSAGIAENVAYTVTSGSATNAGSYTATVALKDIANYEWADNTTENLAISWSIAKASSAAPAGITATVGQTLADIASQLPAGWAWATPTASVGTVGTQNHKANYTPTDAANYNTLTDIDVSIEVKAAETPIFSNRGNPKIGQIGVQTMSNTIILSNLPNNAKIEVYNLQGKRIYSAHSENLKS

SEQ ID NO: 94806 - protein, 646 aa, Unknown
  Obtained from environmental sample
  DOMAIN (555)...(641): Hpt domain
  misc_feature (1)..(646): Xaa is any amino acid
NRFNFIREAETNSQYQQVASVIRQAVKRDTGIGHFSLGGIPRICAYRPVTGSEEGWVLGIIAPLPESPARGIDKGLLLVALISFFLGLIAAIIASNFIKKPFEQAAALKEEAESASKAKSAFLANMSHELRTPLNVVVGLTDLVLEETNLTEHVMGNLLKINNAGNTLLSIVNDILDFSKIESGRLELTPVEYHIPSMLNDVITLLTTRLDEKPITFTLNIREDLPNKLYGDDLRVKQIYTNLLTNAVKYTREGSIELSVFCKREGDNVWMDVAVSDTGMGIPKEAIESLFLDYYQVTATSNRNIEGTGLGLSITKRLIEMMDGEIKVESELGKGSKFSFRVRQGFVDEAVLGSDVSNKLRTFCYSDDKKINTRKLIRINLSYARVLVVDDMETNLDVASGILHRYKMQVDCLSNGPAAIDRIREGTPVYNAVFMDHMMPGMDGIEATEAIRALDTEYAREIPIIALTANAVQGTRDMFLDHGFQAFISKPIDIIEFDSIIRKWVRNKSHEALAPQNELSSNEPPPDAKGKIIIPGVDTEKGLSIYDGDQDVYTELLRSYVANTPVALERIRTVTGETLQEYTINVHGIKGASASIGAETIREEAYNMEMKAKAGNLQEVLANNERFIKNTESIMTKIRTWLEKQK

SEQ ID NO: 94807 - protein, 338 aa, Unknown
  Obtained from environmental sample
  DOMAIN (190)...(338): Predicted permease
  misc_feature (1)..(338): Xaa is any amino acid
LAILGIAVGVLALIVIIAVMNGFQLGFIESILEVSSYHLRVESFDQDKIDEIQAGLLGIPEVKAVVPFKEYQAISRGRRSAQQAVLVRGLGENTLDIDKAMMDRLDFEEGSFDISNKNNALLGSELARRLGLNIGDEINVFSLTGILSQEDGSSFDGFVTGIFRTGYYEYDCSWIFLNIENTSFLQNECDLKLGIKLANRFMDKTVLDQARKKLSSYEGIKLSSWRDYNRSFFGALRTEKLFMFILVGLIFIVVGLNIFQAQRRSVLQRREEIGLLRAVGGTQNEVRFVFVFDGAIIGLAGAFIGLIIGLAVALNISGFFTLVENIINWFINIINILA

SEQ ID NO: 94808 - protein, 156 aa, Unknown
  Obtained from environmental sample
  misc_feature (1)..(156): Xaa is any amino acid
VRYLRGAAAGIAVSLVPIIVTLIVADGMIRGITDRYLELGTGHIQVFDYNNFMGSENTKREINEIDGIRGIWAEQRGMGVLAGKKGKTGVSVRAVESSFWDDSASAVLLKVIDGENKPRTDRDIVLGETLANNIGVKAGDTVRLMTIMSEEGGRIP

SEQ ID NO: 94809 - protein, 297 aa, Unknown
  Obtained from environmental sample
  DOMAIN (3)...(287): N-acylglucosamine 2-epimerase (GlcNAc 2-epimerase)
  misc_feature (1)..(297): Xaa is any amino acid
MVDHTGKALNTRKQFYNIAFGIYALSEHYRAAGDQSSLELAMSLFDATERYGLDSAAGGYIEACNSEWHSIDDFRLSDKELNCPKSMNTNLHVLEAYTNLALASNDGHARKALEMLLRITLDKIVNRDWHFELFFDMDWHSLAKETSYGHDIEGSWLMYEAALAIGDESLISGVKQTALAISEVIYTIAIDNKNGGLISGCDEAGHIHNKKEWWPQAEAVVGFYNAYELSGDQKYLEAADGIWSYIQNNFVDRTNGEWHNELSLDNTPDTSMPKAGFWKCPYHNARACFEVVRRMGE

SEQ ID NO: 94810 - protein, 132 aa, Unknown
  Obtained from environmental sample
  misc_feature (1)..(132): Xaa is any amino acid
MNKIKAIAVSLVFFTLVACDDLTPVGVFRNILSVFDGGFTDERDGKKYKTVKIGTQTWMAENLDYGGENNDIGICHDRKSENCKIYGALYTFEQAINACPNGWHLPSKEEWDALVDFAGGKEIAGKKLKAKK

SEQ ID NO: 94811 - protein, 468 aa, Unknown
  Obtained from environmental sample
  DOMAIN (15)...(397): Bacterial extracellular solute-binding proteins, family 5 Middle
  misc_feature (1)..(468): Xaa is any amino acid
MLFEPLAELHSTENRPSGVLASKWEISEDKMSYFFEIDSRAKWSDGKPITAYDVQFYYDVIMDPKNLTPIFKVGLSRLERPEVVDSLHLTIKAKDPHWGNFWEAAGMVAFPKHIWENADFNSIRFEFPVVSGPYSIKQMKMDQKLELVRRSDWWGRQKRYNAGKYNFEKITYRFMEDRNKALEALKKGDFDAYPIYTSSIWVKQTDFDAIKKGYVLKNRVFNEEPIGFQGFALNLRREKFKDVRVRKALSLLLNRELMSEKFMFNQYFLLNTYYPSLWGGHKNPYAPLYPYAPDSARKLFEEAGYTVNAQGKLVYKDGKPFELTFLNHAEDIRHTTKFQEDLKAVGIESNIETVSLSTFRQRIDDANFDLCWLAWGAGRLSDPEASWHSKTASDKGTNNVPGLQDKIIDSLIEAQKTELNLDARNNILRNLDTRLTEIVPYILLWQSENNKILHWRRFGYPKTLYGKF

SEQ ID NO: 94812 - protein, 201 aa, Unknown
  Obtained from environmental sample
  misc_feature (1)..(201): Xaa is any amino acid
LQTTTYLLGRPKSSGASENSITRIFGGDSDSGEKVREGIFLRTTGEKTVTPSATQLSLLFDAYVNLGAYLGTELALPAQGLFGNITLSAGLGLTRDIFNNGVNYTPFRYRNGESSWNLSRFFFIDVPLRYRLNLSTSFNVKNGSLSLQIPYYSDPYVNRDFMQRSEVLDWLGMLREGVTDSGTATSTSINSYEWKLSGSFN

SEQ ID NO: 94813 - protein, 341 aa, Unknown
  Obtained from environmental sample
  misc_feature (1)..(341): Xaa is any amino acid
MSLGAGFNFGFGEVSEETTLSGDLGIHYNMGKLGFLNNFTWAFMLRSMGLSYFPTWLTPAGGISFDLLTVNGKDGKPDPFIVTAAADLSVPSLFYPKYINLILKTGLNIKIAELITLSASWPGGSGLNYRELFKDKVDLQTFPSIGLSVNIILPSGEERIAGGRLPSDGDLKIAGAYKPLYEGVTAVGGGVSWYVGQRDTTPPVIAPTYPETIYFSPNNDGKADFLEFPNSITDNKYVVSWKMEIKDEDGSVVRVIENKEQRFTSFNFKDVFKRIFSKKKQIDIPVTLRWDGIRSSGELAPDGKYFFTITAADDSRNMSASQVYETVIKNTVPVISVNALT

SEQ ID NO: 94814 - protein, 205 aa, Unknown
  Obtained from environmental sample
  DOMAIN (22)...(186): GAF domain
  misc_feature (1)..(205): Xaa is any amino acid
MKEEVDFNFIINLDSELNQIQDLDLLLERILFEARKVVQADAGTIYITVPDEEKKGEEKLSFKYSQNDTLQEHVPPGQKLIYSIFTLPISEKTISGYCALNRTLINVPDMYNIPPEMPYSFNPSFDKISGYKSVSCMVIPLISSDKRLMGVIQVLNAKDKDGKIVSFSKDDEVLLTHFANNASIVLQRANMTRTMILRMIKMSEL

SEQ ID NO: 94815 - protein, 304 aa, Unknown
  Obtained from environmental sample
  DOMAIN (31)...(293): Methyl-accepting chemotaxis protein (MCP) signaling domain
  misc_feature (1)..(304): Xaa is any amino acid
MIESQAEAADSALATVEQTRSIAKIIKNSTDDIFLSSKEIFINANNQAASIHEIETTIKENTQIAGDISEKTSNVSNIANKMENDVIHGFSVLEHNINQLEDIKKKNDSVITSIINLGNKILKIRDIVKNINTITDQTKVIAFNAGLEAASAGEHGKRFAVVAHEVNRLADDVASLTMQIRDQVEEIQNSSSSLIISSEESADKITEGNNLIKELEDIFREIRSGAEITANQAQTITISTQKQQKSTEQINIAISDISKGLSNFIQSTRVATSSAEELTEMIQKLDSILKGDKPLLDTDNKSKE

SEQ ID NO: 94816 - protein, 323 aa, Unknown
  Obtained from environmental sample
  DOMAIN (118)...(223): TonB-dependent Receptor Plug Domain
  misc_feature (1)..(323): Xaa is any amino acid
MRINLKKIIIIAVFFFSALPLFCRDITVLVVDGDLELPLEGATVRTRGGNEYICGRDGKVKLQVPDDRQTVLYAAYPGYETSAITIPLTGNSFMVSLSLSTFLQGRELVVEASKPGTSETKTGRSVAVTEKEITQTAEIGIIEDVMRSIKLLPGVGYSGLFNANPSIRGGHPGDMTASLDGFYINNPYFWGGGFSIFDPRMVKSAQLSHGVFSTRYGHTISGLLEITSKEPSPTETEFELGLNTSAANFNLSVPLNGKGGILFMGRVTYYDPVLWTARQMSTLIPELAVINYIDRSPYIRSATINGNYRFTWDPLESTCRHAS

SEQ ID NO: 94817 - protein, 154 aa, Unknown
  Obtained from environmental sample
  DOMAIN (8)...(122): Response regulator receiver domain
  misc_feature (1)..(154): Xaa is any amino acid
MAFLKKKKKILAVDDSEIDLEILEFMLKDKYTILPTKSGKEALDYLLHFSNVDLILLDLIMPEMDGWETFSRIKDLGNITYVPIAFVTSVHGKEEQDRAKEMGAADYIFKPFSRDELIKRIEIMLKKRPEKKAFTALKLDDFNTDSNDTTDTTK

SEQ ID NO: 94818 - protein, 624 aa, Unknown
  Obtained from environmental sample
  DOMAIN (21)...(174): AIR synthase related protein, C-terminal domain
  misc_feature (1)..(624): Xaa is any amino acid
MEIGAVIGAAPLKNVVRITPSPTDVVILLGGRTGRDGIGGATGSSKSHTSSSLETCGADVQKGNAPEERKIQRLFRDPKAARLIKRCNDFGAGGVSVSVGEIADGLVIDLNKILKKYEGLDGTELAISESQERMSVVTSKKNAEKFIALARKENLEAEIIAEVTKVPRLVMKWNGKTIVDISREFLNSNGAKKTAKIHIKNTQLTTPENKTVNEQELKALMGSLNICSQKGLVDRFDSCIGAATVIAPFGGKYGITPAQVMAAKIPVLNGETKTCSIMSWGFDPSISETSPYHGAVFAVVHSVAKIIASGGSRRKCWLTFQEYFERLCDDPLRWGKPASALLGALDAQIGLETAAIGGKDSMSGSFTLSDGGHADGGQLDVPPTLVSFAVSTAKLDNIVTPEFKKAGSYVYLLKPPFSIYEKHDFTALREYFDSVEKLIKNGKILSVWAAGSGGTAEAVVKMCMGNKIGFTAENELFTGNGFCGFIVETDAPLQTDAVLLGRTTTDYILKTKTYEITMDKLQNAWEKTLEPVYPYLIKQEGKVENFIWHHSKSSQEILKKNKKRRGGSFAKPNFLIPVFPGTNSEYDSARAVEKAGGRAIIFVIRNLSSACIAQSVDGFEKARA

SEQ ID NO: 94819 - protein, 247 aa, Unknown
  Obtained from environmental sample
  DOMAIN (16)...(246): Squalene/phytoene synthase
  misc_feature (1)..(247): Xaa is any amino acid
LKTENKKAWEYAEKTLGKVSRTFALNIKVLGRVLKRPVLLAYLYMRMADTIEDDPDLSAEEKVSLLKKFSKAVSAGGQSIDEFMEALPKSWESSRKEDCFLCCNARLVIPLLSEYAEPVSNAIKKGVEEMCEGMAEFVLRQSKRTDKWFTIESESDLDRYCYFVAGLVGNMLTELFCFAGKKFDEDRQKKLRERAVSFGLALQLVNIIKDVQDDFQRNVCFVPMEFCRKHGINSVQHFFHQKHRKKI

SEQ ID NO: 94820 - protein, 259 aa, Unknown
  Obtained from environmental sample
  misc_feature (1)..(259): Xaa is any amino acid
LNDVLDKYADDWADIVYFKNNSIHNVSHEKLRKGDWLNKFIDIYLANSRKGEKLLRYLFTVPWCKLIKKDLIDKYSIKFDETLVNNDITFSYLCGFYANLIKANSRKLYCWVYGENSLSSQKEEPAIILDRISVHAKAIIFYKKLHQGVRFKRMWREIFYYLRLLYLNDKSCYKKAKNILVNAGFSKIEIFFGLIISFIRNINVNRKTIYVTADTPISDIINNQSFAGFGQFIFPIKNNPNFDPNTRLRNIDSLLPYHN

SEQ ID NO: 94821 - protein, 239 aa, Unknown
  Obtained from environmental sample
  DOMAIN (3)...(216): RecF/RecN/SMC N terminal domain
  misc_feature (1)..(239): Xaa is any amino acid
MITLKEISKTYGAVTAVKRVDLAVSPGCIYGIIGRSGAGKSSLLRVMSLLETPDTGEVYYNGERVDTLRGSALLERRKKMGMIFQNFNLLGSRNVSGNIAYPLEIAGFSRKQIDTRIGELLEMVDISDKRKARLRELSGGQKQRVAIARALAVNPEVLFCDEATSSLDPQTTRSILALIRDLQQRLQITVVMITHQMEVIREICQEVAVMDGGIIVESGSVASVFESPQATATKEMVHA

SEQ ID NO: 94822 - protein, 218 aa, Unknown
  Obtained from environmental sample
  DOMAIN (18)...(209): RNA polymerase beta subunit
  misc_feature (1)..(218): Xaa is any amino acid
MTERKSYSRIKRGIDLPNLLEIQTRSYEAFLQPDTPPRLRKKEGLHGAFLSLFPVDDVKGYFKLEYDGYKLGIPKYSLKECKERGMTYAAPLKVDMSLLVHELDGESKKFKEKFSNEVYIGEIPLMTERGTFVINGAERVIVSQLHRSPGITFDEVVHPNGKKLLTARIIPQRGSWVEILLDVDDVLTVNIDRRKKMPATVLLRAFGYSSNEEILALF

SEQ ID NO: 94823 - protein, 241 aa, Unknown
  Obtained from environmental sample
  DOMAIN (14)...(192): RNA pseudouridylate synthase
  misc_feature (1)..(241): Xaa is any amino acid
MTNIAPYIIEETNDFAVVFKPPRMHSAPLAKKEGGTLFDWFTAREQALSPCQANLMHRLDFDTHGLVLFAKNLKSFEFFKELQDKGGFVKEYSAVCAVTCNDSSVPGFPPPPAFADYAPSPENPLVIESYFRPFGPGRKLVRPVIEEGKKSREIAKDNGDFYRTEITGINGDIFSLRLKRGFRHQIRCHLCWVGFPIINDPLYPHPLETDNSVPALSLRASALFFTDPSTGKQREYKIDKF

SEQ ID NO: 94824 - protein, 145 aa, Unknown
  Obtained from environmental sample
  misc_feature (1)..(145): Xaa is any amino acid
MKNDIKIAISGRSGCGNTTVSKMTADVLNLRFINFTFRNLAQERGLDLKKVLQLALKDESWDREVDTRQVALAREDGGCVLGSRLAIWMLKEADVKVYLYAEAEIRAQRIVNREGGQLDEVAAFTDKRDKQDRARYLSLYNIDTD

SEQ ID NO: 94825 - protein, 473 aa, Unknown
  Obtained from environmental sample
  DOMAIN (6)...(473): RNA polymerase Rpb1, domain 5
  misc_feature (1)..(473): Xaa is any amino acid
SHPPTAARKGLADTALKTADSGYLTRKLVDVAQDVIINEDDCGTLDWIEVAAIVNTDGTIRARLRDRIMGRVVAEDAIDPYDKKVFAPAGTLITEELAFTIETSGIQSVKIRSLLTCESRRGVCAKCYGLNLSTGRLVDIGEAVGTIAAQSIGEPGTQLTMRTFHVGGAASRATEKNLHEAQIQGVVKLDGIRFVKNRNGETVALSRTGNILVLDASGNERERYKVPPGAIIHVSDGEKVEPKTALAEWDPYNDYLINEKEGIADFKEFELNISYQEEKDQITGRFRKRIIDAIDDKLYPHINIKGDNHKVLQRYNIPTGAYLEVENDQELMPGDVLAKMPRQQAKTLDITGGLPRVSELFEGRRPKEPAIISKVTGVVKYGNRVRGNQKVIVEGLNGEREEYLVPRGKQIQVHDGDEISAGEQLTEGAVSPHDILEIHGEQALQAFLLNEVQEVYRAQGVTINDKHIETIIR

SEQ ID NO: 94826 - protein, 468 aa, Unknown
  Obtained from environmental sample
  misc_feature (1)..(468): Xaa is any amino acid
LTPLIVTLRRPTLVQTAAIIEGKCEIAHPSLSIALELSAQDDAAVGSQPLREQAYMRAAEQLGALGSASFSSVNRYIVAAVVTLLIVNASITALSPNKLASYWKLPFALLSAEQMRVEPGSVTVPLNSAVTLTLSGAARHFPTARLEAWPLEGGNRGRYFLRADSAGNFSRSFDNLKESFVYRFSLSAPMPPETVTVVPPPLLRSLLVSTTPPRHTKLPPRELPSGQGNITAYPGTRAQVTIESNALRGAGIIFGGKDTVALDVKGKTASGAFTVSKSTEYTFYLIDTLGQTSDSLPRFMISVVPDEAPVARILKPGMNKVLSTAQVETLWVEGVDDFGIAKMELKWRRSGDLAGDPPRAQDLSENGSPPLIRKPVVWNIRELSLYPGDSLCYWLWVRDNRLSGGAQTACSDTFWFRMPSFEEIHKAVAMKEQYAQEKLGEVRNRQDNISSSIEKLVKSASGSKELSW

SEQ ID NO: 94827 - protein, 72 aa, Unknown
  Obtained from environmental sample
  misc_feature (1)..(72): Xaa is any amino acid
KNKTEALKQASYKIAEEIYKQQGAGGQQGGDQGAGPGGGFDPNMGGSGNQGGGPMGGDNTKGAEDADYEVVN

SEQ ID NO: 94828 - protein, 415 aa, Unknown
  Obtained from environmental sample
  misc_feature (1)..(415): Xaa is any amino acid
VRGTDAVLLGVGREASGGLASYNAAKFKKPKKLEYRFESPPVIAQPASMEIEYSFNADGEVPPPVAAAALEMEGNSWVLPAYEQTGIIHYAVPILDPGNFNITLNGKSDNNSIKIHSIEFKERWFGFFSLRGGGSAPSGVPQLFTSPFVKIWSGGPGFSGGGGRFLLEINPPENFSVPAGFYPVISADLLPGKDAAFDAGKLHLDLFPALGRLSVPAGLISPGALPLALKGERVDSFRQTYANMPPFPEPITADPGLVLAWPVENWRDKRYEVFRWEKFPSLLIFDFADYAMQDRMLKRLAFFVEKKGFRGRLAPDSEIAELHAWNAHDYRAEDLARFFQKARDLQFPLLAEERELERMLLNADIIRSTEGADGAGGKITAGEGGIISISRESNDYLRSPLMAHEGFHGLFFIDG

SEQ ID NO: 94829 - protein, 867 aa, Unknown
  Obtained from environmental sample
  DOMAIN (10)...(712): UvrD/REP helicase
  misc_feature (1)..(867): Xaa is any amino acid
MDIRKKRLQLNNEQQAAAFCAENAVVAAGAGSGKTMVLANRFAWLLTEKGCNVDEILTLTFTKKAAAQMFRRIHSLLTEIAEEESGTKAERARKALDNFVHARIQTLDSYSAAIVKQYAPRYGISPDFTIDQERCRQIAFEESLPFLISHRRNPAIERLYSNKRPNDIARHIFADVLLNYCRIDKPRDFMADVKTQFKIVCIEWKKQSENMVNLLNETENLILENNALLPDLVPLMGKYKNITIPKTEEIQKYFEYLLSLPVEHCIEKSESHPLQKSMITLLRFLSEICALNLSRGKRSENMVKENIKEIRVIFGQFSSLAVSCMQAGLIISIMSLLAQLQERYLERKRFEGVLTFSDVANLSGTILLEQHDIRQSEKESFKAIMIDEFQDNNDLQKDLLFLLAEKQEVLNNGIPGAQDLTRGKLFFVGDEKQSIYLFRGADVSVFRRLKDELKSADLPLKINYRSAPALIGAFNAIFGGSDFDPTGKAPLAAMPSVFAPAGDENPLPLYEAQYTPLTAGVEGDGKLSVCILNKSADDDAGDEEMRLHADENEACFVAQKIQHLINEKNYKPADIAVLFRTRSPQYYFEKHLRLLGIPYACEDINDFFYGGHVNDIMSVLRLAAHPLDSASYAEMLRSPFAGLSLAGTAVCLSVFNNAENPAVFDDEPLQLLDEKDREKYLNGQKIYFSIREKAAVESIGSLVTELWYKEGYRYETEWNQATNVYRELYDYLFHLAVKADAANEGLASFTDSMRDLRDSGGQLTDIDIPLERPGAVHLMTIHKSKGLEFPVVFLCCCGKHSQTDRSEDVFFSENAGIVFSPPLPETCNSINGIRKNFLWENSIAEIRQKRTAELRRLLYVGMTRAEK

SEQ ID NO: 94830 - protein, 715 aa, Unknown
  Obtained from environmental sample
  DOMAIN (447)...(680): Methyl-accepting chemotaxis protein (MCP) signaling domain
  misc_feature (1)..(715): Xaa is any amino acid
MTIKVKLSLMMIAIMVVVAGGLTVIQLQKASSISMNLSVKGLKYLAQQQASYWKGREEIYLNKLDGIADIMGEFEALPAAERRDMYDSMLLATLHSNTNFIRIYSIWKPNAMDGMDASYIGRPGSTETGQYAMTYTRENGQVEVARNLVVDEVTAWINGPDGHKDKVDHPTPFTVNGKDTFIIRMGVSISKTATGEVVGHLAVLFDIAPIQTEVESTLKQFDEIAQMSLYSGNGFILGNLNADRVGKMLTEAERLYGVHQEAANQAVLDGKPFSCSSFSNTLHSNVKIEMMPFRIGSSDNNWSVMIATTESYIMQEVNEMVRFTIVLAAVALIAAVVIIYLALSSTTKPIVRVADTLKDISEGEGDLTRTVNINSKDEVGALATYFNKTLEKIKNMVLMIKKEAGTLSDIGSDLSSNMTETAAAINEITANIQSIKGKVINQSASVTETNATMEQVIANINKLNGHIGKMAENVHSVTNTLLSNAANVKTLLEASETGKTGLHEVVTDIQEISRESEGLMEINSLMQNIASQTNLLSMNAAIEAAHAGEAGKGFAVVAGEIRKLAESSSEQSKTIGNVLKKIKESIDKITKSAETVTTRFEAIDSSVRTVADQEENILNAMEEQGERSDTSNASLTQITHLVKTGSEEMLEGSQEVMKESQNLEKVTQEITGGMNEMASGADQINLAVNNVNDMTVKNRDAIDSLIKEVSRFKVE

SEQ ID NO: 94831 - protein, 308 aa, Unknown
  Obtained from environmental sample
  misc_feature (1)..(308): Xaa is any amino acid
MDFSSSNTALWNFILQMGMIAAILIASNIIRRKVPVIKKMLMPTAVIAGFIALILRTFNLVKLDVKIMEMVTYHTIAIGFIALSLIIPKKETSYSKVFIGAKTGALIVSSYLLQGIIGLLISIGLAYTIRPELFKAAGILLPMGFGQGPGQANNVGSTYEALGFSGGQAFGLSIAAMGFLVACIVGVIYLNILKRKNLLRKVDETAALQTSNIDDYESKNEIPVSESIDKFSIQVALVFVVYLATWFLSFGITKILRASNADFAKSLIPIIWGFNFIFGSLLAVLLRGIIRLFRNTGFMTHQYQNNYL

SEQ ID NO: 94832 - protein, 157 aa, Unknown
  Obtained from environmental sample
  DOMAIN (1)...(90): ABC transporter
  misc_feature (1)..(157): Xaa is any amino acid
MMGLLDKRDVFPPALGRADRIKTVFASVLAMGPKIIMLDEPLAGQDQRGCCLIMDILANLRRQGYTILMVTHNMSAIAEYAQRLIVMKEGSVFMDGNPREIFARTAELAQAGILPPQITRLSQSLRTKIPLENDALSPAELADLLIGRRGVIPRGLP

SEQ ID NO: 94833 - protein, 240 aa, Unknown
  Obtained from environmental sample
  DOMAIN (33)...(222): ABC transporter
  misc_feature (1)..(240): Xaa is any amino acid
VSGSIITLENVSWAYSRARHWALKNISLTIEEGECIAVMGANGAGKTTFCCLLNGLIPHALDGKLTGTVTIDGTATTSCTVADLAKKTGMAFEDPQTQLFTAKVSDEIAFALENMLMPPDEIREKVRRALETAGLSACADYAPSMLSGGQKQRLAIAAAVAMAEKILVLDEPTSQLDPAGVREVLSLVSELRSQYRLTVVMTTNSGEEAAEFADRICVLKDGSLAALDTPRRIFADQRLL

SEQ ID NO: 94834 - protein, 209 aa, Unknown
  Obtained from environmental sample
  DOMAIN (40)...(209): ABC transporter
  misc_feature (1)..(209): Xaa is any amino acid
MEKKKSVSVSLEGVTKIFKNTKGKSDVIAVHESNFTVEAGELVTLLGPSGCGKTTTLRMIGGLELPTTGKIRIGSEDVTMLPPNARDTATVFQSYGLFPHLTVGENVAYGLKLKKLPKEDIDKKVKEFLDMVGLGDLHDRPPGQLSGGQQQRVALARSLIVEPSVLLLDEPLSNLDALLREQMRVEIRRIQKSLGTTAVYVTHDRVEAM

SEQ ID NO: 94835 - protein, 278 aa, Unknown
  Obtained from environmental sample
  misc_feature (1)..(278): Xaa is any amino acid
GTFLNDAVLRAFELSIGREVVRPDIAGLMGAFGMARLAQEAWRGDEGRLSTLIDRRRLSSFSVSARNTRCRKCENNCLLTVNRFSDGRSFISGNRCERGAALKSSAADKLDALAHKAHLGDISPRLARLPAIGALMKSPPAQFSELPNLFQWNRYRLFEVYRPLAPGEARATVGLPRALGLYDNYPFWFAFFHHLGLRVELSPPSSKDLFNSALDTIPSQTVCYPAKLVHGHMKALAELRPDFIFFPCLPLDLPADYATDARYNCPLVGTYGELIRLN

SEQ ID NO: 94836 - protein, 97 aa, Unknown
  Obtained from environmental sample
  misc_feature (1)..(97): Xaa is any amino acid
MRDDLHHAITAALKQGIPVKDICFSGNGEPSLSAFFPEALNLAAKLRKELVPSAKPVLITNGTGLLQPQIFSLLAESTKGEIALDIWLKLDAGTPQW

SEQ ID NO: 94837 - protein, 315 aa, Unknown
  Obtained from environmental sample
  DOMAIN (49)...(219): tRNA synthetase class II core domain (G, H, P, S and T)
  misc_feature (1)..(315): Xaa is any amino acid
MNYSETFIPTLREVPADAVIVSHRLMFRSGMIRKLANGLFAYLPLGLRAFRKVEQIVREEMDAIGALEMKPPVVQPGEVWKESGRWEAMGEGMLRAKNRLDNDFVVSPTAEEAFTAIVRDELSSYRQLPLVLYQINTKYRDEIRPRYGVMRGREFVMKDAYSWHCDDESLDKTYQAMGRAYRKIFKRCGLSVIPVKADSGAMGGSGSEEFMVESEIGDNTLILCKKCDYAANVEKAGCKPDFTAASSIEEAKVAAANTPPYEKIDTPNVKTIEELGAFLKNNDGSPMSPKQFITTLIYRAVNVELDLSSAPGCKN

SEQ ID NO: 94838 - protein, 292 aa, Unknown
  Obtained from environmental sample
  misc_feature (1)..(292): Xaa is any amino acid
MAENVDYQPKEGNSWCYNNDKANCALYGRLYDFNTAKSICPTGWHLPDKWEWDTLALKVGGERDSDEDGGDYWEGVGKRLKARRGWSVWRSTSGNGSDRVGFSALPGGHRAAKKDDVFNNAGYYGYWWTATGHTNSYTAASRTMDYDKNGMSEVSSDIRYGFSVRCIQDESPEKVQKRIEAEQKRIAEEQRKIEEARKIMEEEQKRIEKLSTYFTDSRDGRKYRAVEIGGKMWMAENLDYKSENNGKLDKTSKPFCNDRDVSNCNRYGRMYDWNAALTACPSGWHLPSRQEW

SEQ ID NO: 94839 - protein, 445 aa, Unknown
  Obtained from environmental sample
  misc_feature (1)..(445): Xaa is any amino acid
MKKIVFIALVLLICCGTFLFIGCRKEDSGKIKLTVLNYTDLTVANAAKDQKWQWDTFLEANKDIALEKEDLFNEPFHEKTAAYAASGNIPDVLFVWPAGRSTPLHEKRLLKDLMPFLRKDNLVDKYLPVALDPNMQASRYVAMIPQALTATHAMFVNLDVLRDCGLQPATTYAELKSQVPVLRAKGYDTLIMPCKDTWVMQSCMFSMIAGRFCGQGWDQKILSGKAKFTDPDFVAALDFIRQLYADGVLPQSCLGIDYGEGPGLFSTRKCAYYVDGDWRVGDFLEDEDTGQALFSAAQQRNIRITVFPDIAGAKINKTNSTVLGTGWAMSADIPDGSPREDAAWRLVKWLSGAEIESRMLATGGISAPSRTDIDYSRIDLAPLQVTMGNLGKEYSTATCVIDDVFHADVYEPINDGLVELGLGTKTAIQVAYEVQRAYDAWLAHR

SEQ ID NO: 94840 - protein, 506 aa, Unknown
  Obtained from environmental sample
  DOMAIN (336)...(504): Methyl-accepting chemotaxis protein (MCP) signaling domain
  misc_feature (1)..(506): Xaa is any amino acid
YISRTGSSDTGQYAIVFTKENGTITSRATSDIAASMAYFNGPNSLKERIENPVPRNVNGKDTYIVRMMVPIINSRNKEVVGGVGGLLVIDGLQTLVTNTIKNYDEIALMVIYSGDGTIMAHFIPERIGKNTTEADVEIGDGRPALVKAIGDRTVFSGETDDPALKAHVYFKMVPIQIGTSDMNWGILVGTFQSFIFREINNITRFTIILAALSLVVAAVIMYFILHTTTKPIVRVTESLKEISEGEGDLTRRLDFNSKDEIGDLSKYFNNTLGAIGTLIKRIKYKVDALTNTGHELSENMGKTSHSVDEISTNFAGMKIKMSKQEENATEAEKAVEAIKSSIENLNEMIESQSESINTSSSAVEQMTANIHSVSRTLMENSKNVDELTEASENGKTGLQTVAEKIQEIAKDSEGLLEINSVMDNIAAQTNLLSMNAAIEAAHAGESGKGFAVVAGEIRKLAESSSNQSKTTATMLKKIKTSIDSITASSNEVLSRFGVIDEKVKTV

SEQ ID NO: 94841 - protein, 65 aa, Unknown
  Obtained from environmental sample
  misc_feature (1)..(65): Xaa is any amino acid
IFPRAIKIIASFIIPVAMIGFFPASALLGRFDPAALIAVIPCVLFMFFGIWFYLYMVKLYEGVGG

SEQ ID NO: 94842 - protein, 568 aa, Unknown
  Obtained from environmental sample
  DOMAIN (351)...(462): Toprim domain
  misc_feature (1)..(568): Xaa is any amino acid
IHPTEKVSALELVMTRLHAGGKFDKKSYKVSGGLHGVGVSVVNALSEWCEAFVHLDGKVYTQRYKIGVPEKPVKEIDPNGLPYRYSPDRQGTVIRWKADPIIFETTTYNFDALSNRLRELAFLNRGLKITIRDERLTTPKEHDFMFEGGVKSFVEYLNENKTVLYKEPVYLEGSRDDGAGGNIEIECAVQYNDGFNEIMFSFVNDINTREGGTHLVGFKSALTRTLNEFLKKSKHAKKLEESLSGDDVREGLTAVLSVKVPNPQFEGQTKGKLGNSEVKGIVESYINEQLEIFFDKHPEVINNILEKSVLAAKARIAARQARDATRRKNAMDSAGLPGKLADCSEKDPAKCELFIVEGDSAGGSAKGGRDRRTQAILPLWGKMINVEKQRIEEVITNDKLQPVIASIGAGCGNDFDISKIRYHKVIIMADADVDGSHIRTLLLTFFYRYMTPLIEQGHVYLAMPPLYKISYDKKNFYAYDDAEKDRILSESGKDPEKVSVQRYKGLGEMNPDQLCDTTMDPGKRNIIQVHLDDTVEAERIFTTLMGEVVQPRREFIEENALLVSNLDV

SEQ ID NO: 94843 - protein, 320 aa, Unknown
  Obtained from environmental sample
  misc_feature (1)..(320): Xaa is any amino acid
NTDPVPDAYADYVSTGLVGNTLRFRYKVKKGDYSERLHTCFNPIDLNGATLKSEPKNDVTNDAKIDFDKATFETDLTIGSLQNQFKDSSGILSIQLDGVQPHITGASFTQLTGSIGGNSYFNNGKTVTLKLQVSEPVQVSGTPAAYIGYGSARASASFSSVKGQTIEFTWLVNANNVPMTQLSWVDNGIKTSGGMDMTLDTTDKITDAAGNLLDLKSFTLGETNLTGSYTNERAYIITTTPPVPTFTIHSSPDTDTGPLAGDPVLANMQRYIRVNGISGHTLYHSFTGGTVPINYTSGNTVDKRLEDKNAANKDNSSYSP

SEQ ID NO: 94844 - protein, 156 aa, Unknown
  Obtained from environmental sample
  DOMAIN (97)...(153): Protein of unknown function (DUF433)
  misc_feature (1)..(156): Xaa is any amino acid
MPLSKMVSGFQKIRKAAVTASNLLKTSHPFAIKKMFTDGKSIFAEIAQKEKDTSLLDLIKKQYQFQKIIEPLLYKRIDFDKNDYAEKWWPLGKKENIVLDPSRNMGQPILNTYNVRTELIYELYKSKHSINEISEWYELDKDSINAAINFEKDLVA

SEQ ID NO: 94845 - protein, 297 aa, Unknown
  Obtained from environmental sample
  DOMAIN (2)...(294): ATP synthase
  misc_feature (1)..(297): Xaa is any amino acid
MASLRDVRLRMRAIEQTLKVTKAMNLISTAKLRKARRMLADTIPYFKRIQKSMFDILSSENNIKSKFFKKPDDSISGRTAIIVITSDKGLAGGYNANVFRRVNELCEKVENPVLILIGGAIAYRYFAHTNYVILENFSFHSQLPTLEHAGEVTEYVTSQFLWGMFDSIHIVYTHMFSMVKLLPTEHQIIPLVKEKIQDDIFEIGGEKRVDLKFEFLPSTEAVFDTLVPQYIKGVIYGAMVESHASEQSARMNAMDEASKSAEDMLASLQISYNRARQAGITQEMAEITGGSTALADH

SEQ ID NO: 94846 - protein, 668 aa, Unknown
  Obtained from environmental sample
  DOMAIN (552)...(635): Hpt domain
  misc_feature (1)..(668): Xaa is any amino acid
GHEIRTPINAITGMAELLMRGELSSESRTYAQDIKQAGNNLVSLINDILDLSKIEAGKFEIVPVKYMLSSLVNDTVNIIRTRLKEKPIRFFTNIDGSIPNSLIGDEVRMRQILLNLLSNAAKYTEKGYIGLTITMDKQDEKQILLRMSVADTGKGIKREHQANLFDEFVRVDMKKNQGIEGTGLGLAITSRLCAAMDGKINMESEYGKGSVFTVIIPQGIESKEPFAVVEEPEKKKVLVYESRINYAKSVCWSLENMKVPYTMITNQYDFGTLLYKEEWSYVFSGYGLYKKIKPLIEQADSIFRGGKKPYLVLMVEWGTEAYVPNARFVSIPVQSQSIANILNGKADRQNYFESSAGSGVIRHTFPDARLLVVDDIATNLKVAEGLLSPYNAKIDTCLSGAEAIELVKQNEYDLIFMDHMMPEMDGIEATAAIRKLETKEETENSGKQIPIVALTANAVVGMREMFIENGFNDYLAKPIDVSKLDEMLDRWIPREKRKKEDSLRELHKAGHNALLELVKMSKKQKQILPDIPGVDIQKGVSMTGGTIASYKQVLSMFCKDAENRLLQLERIQEGDDLSVFVTQVHGLKSAAASIGGEKFSADAAELEAAGNAGNMKIIKEKLPAFLKNLSELINNINTALEEKKAQQDSKKRTNITACIPAFRELSEA

SEQ ID NO: 94847 - protein, 299 aa, Unknown
  Obtained from environmental sample
  misc_feature (1)..(299): Xaa is any amino acid
TLPWTARQSSSAYERPQPHACFIQSVNDDLVNDGGIMDLWRREARIFKYGSGTGTNFSSIRGAEEPLSGGGYSSGLMSFLAVGDRAAGAIKSGGTTRRAAKMVCLDLDHPDVEAFVDWKMLEERKVAMMAAGSVLLGKHWNSICEAVEKSATKDAKPKTNEKLRRALSAAKREGVPGPFLAQCLQRLAMGDFRRDLKTFDTAWDGEGYATVSGMNSNNSVRVPNAFMNALKNDGTWDLKRRANRQICKTVRASDLWKRINYAAWACADPGVQFDTTINEWHTCPGDGRINASHPCSEYM

SEQ ID NO: 94848 - protein, 303 aa, Unknown
  Obtained from environmental sample
  misc_feature (1)..(303): Xaa is any amino acid
MAAAQPFLSGAISKTVNLPPEYTVEQVASIYETSWKLMLKAVAIYREGSKMSQAIATNLSLLEGADILLDDGASSSEKSDAVALAAAHHVVRVYRRKMPDRRAGYTQSATIGGTKLYLRTGEYEDGTLGEIFLDLHKEGAGFRAVLNCFAIAISMGLQYGVPLEEYCEAFLFTKFEPQGMVLGSDTVKFTTSLIDFVFRELAISYLGRYELANIPEEEFINLIGRKPESQAQVFQAQYTKMTPLFPDGNSEQPPLQMPNSAPAHPASNAYRAAREKGFTGDPCPECGHLTLVRKRGLLKVPNL

SEQ ID NO: 94849 - protein, 498 aa, Unknown
  Obtained from environmental sample
  DOMAIN (1)...(325): tRNA synthetases class I (E and Q), catalytic domain
  misc_feature (1)..(498): Xaa is any amino acid
MIRDRYAPSPTGLQHIGGIRTALFNYLFARSKGGTFVLRLEDTDRTRSDEIYVQNLYDTFSWLGLHWDEGPDIGGVFAPYIQSSRSDLYKKYADELISKGRAYYCFCTAERIEKVRKEREAAHSAGSGEVASGYDRHCRVIPPEEAAARTAAGEAHTIRLKIPLGETTRFNDYLLGEIEWKNDDVNPDPVLLKSDGFPTYHLANVVDDHLMEITHVMRAQEWLASTPLHVIMYKSFGWNPPEYCHLPMVMGQDGKKLSKRHGATSIDEFRKQGYLPEALINYVALLGASYEEGRDLFSLQELESLFSIDKLNKAPAIFDYKKLEWFNGQYIRMKSDEELAALCLPSAIEAGLFGVSGTQPTTEQKSIFTAAMPLIRERLTFTHEAAEKIAYLFAPPPLPATEEFIPKKADLAETIRLLQLARDMVNQLSNAVNDAAAEAYIKEQAEKASVKLGDLMMPLRVAITGSRVSPPLFGSLRILGGEESMRRVETALQMLENK

SEQ ID NO: 94850 - protein, 95 aa, Unknown
  Obtained from environmental sample
  misc_feature (1)..(95): Xaa is any amino acid
MNKTNNLLDNEEHNMIKSLETEEWKPVKNLESWKTILSKAATSTLTKDQRMNIRITKNDLEGIKIKAVEEGIPYQTLVASIIHKYVTGRLMEKRN

SEQ ID NO: 94851 - protein, 279 aa, Unknown
  Obtained from environmental sample
  misc_feature (1)..(279): Xaa is any amino acid
VANKSGLESVEKFTVLKDTTPPQAQVIMPIAEAPVNGTIRMAFAVEEMSAVQTIFYQRNVTTPAVAATPGRPATPASTTSSVKEVFNANNWEKDYAPRFFEVLMDSLEMPLDANMRFTFTDKAGNSSEVNSWLFVIDQEMDVPIVQIVLPLENEVITNDFIVSGVMFDDDGVKNYQWRIDNNPWQTEDAEYGFSIPVALSTLTDNEHTIAVAAEDIYGVKSQPVTRVFRVSLNEPTATMTYPLYDTVLKEGIEIKGTASDKNGIREVGASVDNGNSFNI

SEQ ID NO: 94852 - protein, 287 aa, Unknown
  Obtained from environmental sample
  DOMAIN (198)...(279): Fibronectin type III domain
  misc_feature (1)..(287): Xaa is any amino acid
DSYLFIKNNSSYSFELLHGNIKFKPDNISSTLVNDGEMARYTINPGHSSNYLLLVSGNSKEFPGSPVNFEAGHIYNFNYYNGSISLVKDIELKLENINGVTIPKPPAAPVVIISNGSIALRWVAVESATAYEVWLSTINDSTSAEKRGTDVVASLSTNISGLNNGTIYYIWLKAKNNMGTSGFSPAAAGMPSAATVKPPDPQTAPSIIAENGQLNISWQAVTDASFYEVWAGTTNNAQTATKQGEDISGLSTIITGLNNGTIYYVWIKAKNNIGVSGFSPSANGKPL

SEQ ID NO: 94853 - protein, 264 aa, Unknown
  Obtained from environmental sample
  DOMAIN (1)...(174): Magnesium chelatase, subunit ChlI
  misc_feature (1)..(264): Xaa is any amino acid
MAPLTSDEAVEVTRLYSLAGPLINNGDRYSQRFIDRLITNAPFRAPHHSASAEGILGGGRNPRPGEISLAHFGVLFLDEAPEFRINVLQALREPLEDRVISISRAEGPVRLPAEFQMIMAANSCPCGRLGIRETDNACFCSPEEVNRYWRKFSGALLDRVEIRVAVLPPGIEEMNAGTGKSVKTEERSAVIAQRVKAAVEIQRLRFKGTEIRRNALLPAGKTASLCPLSEKAENALNTAISKMGLSGRAFHGVLRVARTIADLE

SEQ ID NO: 94854 - protein, 382 aa, Unknown
  Obtained from environmental sample
  DOMAIN (10)...(381): Aldehyde dehydrogenase family
  misc_feature (1)..(382): Xaa is any amino acid
MKMIIDGKAVDASGGATIPVTNPATGKVIDTVPAASEADVKTAVEKAKQGQKVWAKVPLHEKGDILLKFVALVEENKEKLARTLSDETGKPITEARGEIANIPIAFKGFIEKAKHLYGEVIPNGQEKNQEHHVLLTVREPVGVVACVIPFNFPCDLFDQKVAPALLAGNAAIVKPSTDNPLTLCMLTDLLVKAGVTDGAIQILTGRGSRVGNWLCKHPDIHAITLTGSTEVGIETYKNAANHLAHIALELGGNDAFIVWKDGDVDLAVEETIWGRMYNTGQVCCASKRFLIHNSLKEDFAKKLVDRIKKIKLGDPADDATQLGCLISEKAAIEVERQVNLTVSQGGKIILGGKRNGAFYEPTVIVDVPKSADVAKDMEIFGP

SEQ ID NO: 94855 - protein, 392 aa, Unknown
  Obtained from environmental sample
  DOMAIN (62)...(294): Domain of unknown function (DUF1745)
  misc_feature (1)..(392): Xaa is any amino acid
MKGNTGSSVAANPKAAGKEAAEKAKDGLSDIKVAFVYSSVAYDQGELLKGVAEGLPGVPVLGNTSFTGVITPEGFISGDRGFVGLLALGEKDLIVGVTGKPKSGGAVNGDARATGRDAAKEAMKNAGKGGAPAYFYMAASPGEEEFYLKGISDVIGRVPYFGGSAADNNIAGEWKLFANQHVFADGVALAFFYTDKPMTNLFTGAYRETGDVGIITKVKNNRTLVEIDGVPALKKYAQWAGVDPDSLKGANLLVYTITSPLGIKDRLGDLTAIRHPMNGNDDYSMNIGANLAEKTAVIRMKGSVDELISSASKTVDELKAKMKATPAALHLVHCGGRRAGIGDRIEEVVQGVKKAAGGVPFIMEFTFGEYGYEDDGNNTTGGLMLSYTGFAQ

SEQ ID NO: 94856 - protein, 329 aa, Unknown
  Obtained from environmental sample
  misc_feature (1)..(329): Xaa is any amino acid
MYFNDLIENYNKEHRERDMFHDLMRYRVNEILLVASLYNSLVITQDGALAEQIYGEFFSLNLNTVPRVTCAYTLESASEMFCRNKYDMVILMAGLDFDTPLELAGKMKAHDPNVPVLLLVMNNSSLAGLDPSRPECKAVIDKIFVWNGYSKLFVAMIKYIEDLHNVDNDTQIGMVQVILLIEDSIRYYSRYLPELYSVVLNQTKLLLEEERSVETNKIIRMRWRPKILLAASYEEALDLFKRYEPYLLTVISDIRYPVNGVDDPEAGFKFLTEVKARRPETPILLQSSEDENRNKAYANGAAFVDKNSNTLGHDMIVFFQTIWVLARLF

SEQ ID NO: 94857 - protein, 306 aa, Unknown
  Obtained from environmental sample
  DOMAIN (58)...(304): Glutamate/Leucine/Phenylalanine/Valine dehydrogenase
  misc_feature (1)..(306): Xaa is any amino acid
GVSAEFCDELFRHIGPDTDVPAGDIGVGGREVGFMFGQYKRLVNEFTGVYTGKGMAFGGSILRPEATGFGAVYFTQEMFALKGESLKGKTISVSGFGNVAWGACIKASQLGAKVVTISGPDGYVYDPDGVSTKEKHDYLTEMLLIDRERVETYVKKFPNAKFFAGKRPWEQKVDIAMPCAIQNELTGDDAKQLVDNNVQAVVEVSNMGCMPEAWKLFIEKKIPFGPGKAANAGGVATSGLEMSQNSMRLSWSAEEVDKRLHEIMCNIHKTCVETAKSFGFEGNYVVGANIAGFKKVADAMIAQGLV

SEQ ID NO: 94858 - protein, 81 aa, Unknown
  Obtained from environmental sample
  misc_feature (1)..(81): Xaa is any amino acid
MLHKAFTILLCTVSLAAHAQRLAVKTNLLYDATATANLGFEVALGQKFTIDISGNYNGWNVVDDKQWQHQMVQPELRYWLC

SEQ ID NO: 94859 - protein, 161 aa, Unknown
  Obtained from environmental sample
  misc_feature (1)..(161): Xaa is any amino acid
MENFSYLNPVKIIFGKQTIAQLANEIPANAKVLMTYGGGSIKKNGVYDQVKAALAGVSCLEFGGIEPNPHYETCMKAVELIRKEKINFLLAVGGGSVADATKLIAAAVNFNGDAWDILAKHAPVTSALPIGVVLTLPATGSEMNGNSVITKAATQEKFSFA

SEQ ID NO: 94860 - protein, 245 aa, Unknown
  Obtained from environmental sample
  DOMAIN (21)...(194): Sir2 family
  misc_feature (1)..(245): Xaa is any amino acid
MSVTELYKSICEAKHLVAFTGAGVSTLSGIRDFRGKNGIQNGETVFNIDIFEKDPSVYYNNARPFIYNLNEREPSIVHIVLGELEKRGILKAVITQNIDLLHQRGGSSNVIEVHGSPKIHYCLRCPGIRMSFEEAAAIVISGEMPKCPKCGRVLKPAITFYGESLPIEALKEATVQAHKADLMLVLGTTLVVYPAASMPEYTLRSGGRIVIVNNMPTHLDGQALMHFDELGPVFEELQKAMSNEK

SEQ ID NO: 94861 - protein, 245 aa, Unknown
  Obtained from environmental sample
  DOMAIN (21)...(194): Sir2 family
  misc_feature (1)..(245): Xaa is any amino acid
MSVAELYKWILEAKHFVAFTGAGVSTLSGIKDFRGKDGIANGETIFNIDVFEQDPSVYYNNARSFIYNLDEREPSIVHIVLGELEKRGLLKALITQNIDLLHQKGGSTNVIEVHGSPKVHYCLRCPGIRMGFEEAAAIVRSGGMPQCPKCGKVLKPAITFYGESLPIEALKEATVQAHKADLMLVLGTTLVVYPAAAMPEYTLRSGGRIVIVNNMSTHLDRQASMHFDELGPVFEELHKLMGNEQ

SEQ ID NO: 94862 - protein, 166 aa, Unknown
  Obtained from environmental sample
  misc_feature (1)..(166): Xaa is any amino acid
LFKSKSAVAEGGYDWHTETVNVPLAHDYLRYKGLGIPGSGVRMAFFDGGFRLDHAVYKRLRENSQVIAAYDFVDGDTLVADPDSVANNPRHPYYMNDKHGTQTLAFAAAYAPGVYMGSAYGATFVLARTEDDSVESRAEEDNWMAAMVWAESAGADINLSSLGYRD

SEQ ID NO: 94863 - protein, 514 aa, Unknown
  Obtained from environmental sample
  DOMAIN (150)...(468): Subtilase family
  misc_feature (1)..(514): Xaa is any amino acid
AVPSAFAGAPRQTMSTASATDTLRNVWVFFKDKDYRRSASPVSERAALRRRKAGFRASESERPVSDSYVREVVRRGGSLRTLFPWGNAASFSINPARLPEISSLPFVKSVSPVGVYINNPVDDRAAGGLPKTKVTASKLASASVANWYSWHTEMVNVPLAHDYIRYKKLGTPGSGVLMAFFDGGFRLDHVAYKRLRDSSQVVAAYDFVDGDTLVADPDSIAGNPRSSYYKNDRHGTQTLSLAAAYAPGVYLGTAFGASFALARTEDDGVEARVEEDYWAAAMVWADSLGADIISSSLGYRDGHTDVSEDYKYYDMDGATTIVSIAAAEAVKRGMIVVNSMGNEGNGNDGTITAPADVDGAVSVGSITQNRTLSHFSSTGPTYDGRMKPEVVAPGSVVPVPEPYLPYKGAPHYTSVDGTSFATPIVSAIMALILQAHPNIPAQAARERLYASCSFAVGQNAANNRFGYGIPNAALAIMDTGEIFLRVADTAKRALAGASVEFGGRIYNTDSCGHI

SEQ ID NO: 94864 - protein, 826 aa, Unknown
  Obtained from environmental sample
  DOMAIN (162)...(377): 7TM diverse intracellular signalling
  misc_feature (1)..(826): Xaa is any amino acid
LLKIPDEGPDSEWKRFQTTSLHVTDSSLELPKRKYLSPRGSPPQEFTINVLLEMDGEAMAFLDGNVSVVPGLFIAGIGENWEIYFNGKLVRAEMYPDGTGRIKNPRTWYNVYFPLDSSLVHAGTNILSMRILGDPTYLGTGVFFQTAPVYMDDYRVIAGRQFNFINMVLCAVFAFTGVYYLMLYLSVKKKTEIFNLYFGLLSVLLFIYIICRQEWIYSLIPNSDITIRMEYGSLMLAIPMLGVFFETLGMKKITKVSLGYLAFCLLLCLTQILFCNQYGEEIILIWDLTALIYFTYILVYYIIYFRFLGRNRKKNQEEDGEESSDLHIGGILIGMVLSYLCGNFDILDALFFRMSIRLFTYSIFAVHIGMVFILSQRFSGMYKRLEQSNQRLENKVHERTLELEKQAIIALQASMSKSDFLAKMSHEIRTPMNAIIGMAELALREDRHEAAQEHIITIKQAGNNLVSIINDILDFSKIEAGKLEIIPVSYMLSSLINDTVNIIRMRLMEKPMRFFTNIDGNIPNNLIGDEARLRQILLNLLSNAVKYSEKGHIGLTITADKRDDKQVLLRMDVADTGKGIKPEHKANLFDDFVRVDMKKNQGIEGTGLGLAITSRLCAAMDGKITMESEYGCGSVFTVIIPQGIESKEPFAVVEEPDKKKVLVYESRINYAKSLCWSLENMKVPYTMVTNQNEFAAALYREEWFYVFSGYGLYGRIKPLIEQNSSVFCGGKKPDLALMVEWGTEAYIPNVRFVSIPIQSLSIANTLNGKADRQNYFEVSADSGVIRHTFPHARLLVVDDIPTNLKVAEGLMAPYNAQIDTCLSGAE

SEQ ID NO: 94865 - protein, 54 aa, Unknown
  Obtained from environmental sample
  misc_feature (1)..(54): Xaa is any amino acid
MKRSVPISYKFCPMPLFLCGTYKEDNMPNFGLFGWFNFYWDVEIGVMACIENNK

SEQ ID NO: 94866 - protein, 804 aa, Unknown
  Obtained from environmental sample
  misc_feature (1)..(804): Xaa is any amino acid
DLQLKSGGQRIIGGALPSDGELAVDIAAKPLYNGIWAMGGGATWTVGVADKNPPVIIIDYPATAWISPNNDGKADDLEFPISITDERYIMEWVFEISDEYSTPVKVYRNKEIRPETQGVQNFLGRLQSVNTGVEVPQSMRWDGTLDSGGIAPDGRYFFTVTAKDDNGNTSTKGPYEVNVDNTPPEIVLNPFAGEMNIFAPGSGGGRNTLTITQTGSLEDLWEGGIYNSLGHKVKTFNYIDSQPTPIVWDGTDDSLSIVSDGVYSYRITATDKAQNSAEASLENIIVNTVRPIVGLAITDAYFSPNGDGIKDTETLILTIPVREGIASWDLQVRDFSGSVRRSYSGTTTVPERIEFDGRDNTGRMLGEAAYSASLSVHYRNGYLSTANSPVFNLDVTSPAAAIQVEDRDQGPGRPAVFSPIGVKNRLVIIQEGTNEFSWTGEIRREGDRYGTPVRTFRFSGTPTRRIEWDGINNAGALAPDGLYTYELYSTDLAGNSGRSNIVTFEIDTRDTPVFIATDLRSFSPNGDGIKDTINLIPTIQETSGILTWKIEIFNLGTAGAAGAVGVRSFEGRDQAPTSTVWNGRTNAGTIAPDGSYVARLDLEYRSGNRPSSLSMAFNLRTVPPQGDMSVPYYIFAPNGNGNRDTLPIRVTTEGNDEWNLVISSGDNTAVRSWNWTGRAPAVSIIWDGKDEAGNVVNDGTYNITLSATDDAGNSTRKNINNIIVDANVPKIFLTASAQAIAPKPGQTEAMRFNIMATPSEGVTSWKLELRDDNNGLIKSFPSQAGGTGPLPTVLPWNGANKETK

SEQ ID NO: 94867 - protein, 164 aa, Unknown
  Obtained from environmental sample
  misc_feature (1)..(164): Xaa is any amino acid
MNNIEVYDSGVYLIGGTQIVKDDGASQPELKGVSKDEGRKGTIAYGILAAHDSEQCEQENLRLKFDSLTSHDITYVGIIQTARASGMEKFPVPLVMTNCHNSLCAVGGTINQDDHVFALSAAKKYGGIYVPPHLAVIHTYNREMMAGCGKMILGSDSHTRYGAL

SEQ ID NO: 94868 - protein, 213 aa, Unknown
  Obtained from environmental sample
  DOMAIN (1)...(189): Beta-eliminating lyase
  misc_feature (1)..(213): Xaa is any amino acid
RRSTRCVPDPGGVLDPREIKKRLRRQDLHAPATSLVCMENAHSSGRVVSLEDMDAVKAAAKEYALPVHLDGARIFNAAAALGCNASDIAARVDSVMFCLSKGLCAPIGSLLAGTKEFISAARFKRKIMGGGMRQAGILAAAGIIALKEHSLLLEQDHMRAKKLAQGLAKIKGVNVIDSVDINMVFFKYQRETPAMPHEAEFAGKIVGHFAAGA

SEQ ID NO: 94869 - protein, 312 aa, Unknown
  Obtained from environmental sample
  misc_feature (1)..(312): Xaa is any amino acid
VSYYQARLEKIWDWMAQEGLALVMFEDTEGRRDANIRWLTGQPGDALLFLSLAPQPGPSGVEPEVHGSPLDRKSLLVPWDIILAKAYARADAIVPYNEFDRMPKKAIKGAIERLNIPIGSKIEIPPVTPYPVFLDFVAELQDFDIICRNRSTMDHAMDLRAAKDAEEIAIYRKAAVFTNKIIDLLEKRARTGRIKTEADAVMLIELEARKLGCDGAAFEILAAGQDRSFGIHAFPAWTDAPFGGQGLSILDFGVRYCGYNTDVTLTFVREPSSQQLKMVNLVERAYKAAVDSVAAGDDTRSTAILVDELLAK

SEQ ID NO: 94870 - protein, 613 aa, Unknown
  Obtained from environmental sample
  DOMAIN (24)...(90): His Kinase A (phosphoacceptor) domain
  misc_feature (1)..(613): Xaa is any amino acid
MIQHMVDVTELIAAKEQAIQANKDKSSFLAKMSHEIRTPMNAILGITEIQLENETLQPDTQKAFGEIYNSGYLLMGIINDILDLSKIEAGKFELSPATYDVPSLINDTVHLNVMRYDSKPIEFKLFVDENIPSTLYGDELRIKQILNNLFSNAFKYTDEGEVSFLVAAEYEPQENAPQVTLVFRVSDTGQGMSAEQLDKLFDEYTRFNTEANRATVGSGLGMSITKHLVRMMDGEISVESEPGKGSTFTVCLPQGIVGDNVLGGEVAENLKQFRVGREGQMKKAPQIVREYMPYGRVLIVDDVESNLYVARGLMAPYGLSIETAVSGLEAVEKIRNGASFDVIFMDHMMPEMDGIKATKIIRGMGYTNPIVALTANALAGQAEVFMQNGFDGFISKPIDIRQLNASLTKLVRDRYPLEVVEAARRQAMDLNMKKSAAAEVQPVSDPELAAVFVRDAEKVLARLELMQEYAYRRTDDLRMFVINIHAMKSALANIGETGLSAAAFKLERAGRDEDLSAMKAETPEFMEALRKVIEKNRPKDGGELPDEDSEYDRAYLGEKLLAIQKACDEYDEKTANTALNELKQIKLPRSVRELLDAIDGHLLHSDFEEAAML

SEQ ID NO: 94871 - protein, 153 aa, Unknown
  Obtained from environmental sample
  misc_feature (1)..(153): Xaa is any amino acid
CNIIKSAGKYVSLNFSGNALTNIPSDAFRDCASLTNITIPNSVTNISSVHFLGCNNLAIINVDPTHTVYSSQDGVLYNKDKTILTICPGGKTDTFTIPDNVTSIGRGAFYGCTSLTNIIIPNSVTSIGFAAFFKCTSLTRVTIPNIKDIAENT

SEQ ID NO: 94872 - protein, 166 aa, Unknown
  Obtained from environmental sample
  misc_feature (1)..(166): Xaa is any amino acid
MGTSVVFKPTKVQSEALALLKSGAKHILLYGGSRSGKTTVLVMAIIYRALLYAGSRHLICRYRAKDARSSVLRETLIPWLDSTVGKNNYFYLSHESMITLYNKSEIWIGGLGDKEQADKILGHEYATIYFNEISQLTYIAVTTAYSRLAMKVKDCKNLFFYDVTPE

SEQ ID NO: 94873 - protein, 244 aa, Unknown
  Obtained from environmental sample
  DOMAIN (28)...(242): ScpA/B protein
  misc_feature (1)..(244): Xaa is any amino acid
MEPTVAVEKGRSFKLDDFEGPLDLLLFLIRKNEINIYDIPIAKITGQFLDYLREAQSMDLEETSEFHALAAELLLTKSRTLLPVEMDDSGDFLDPRQELVDRLIEYQKFKKLSEEMEEKEKDAEWVIERRKLQHNLPFSDEEDLWENADIWSLMKTFSAIIRKIPGERILDMYEEVTVNEKVTLLAELLEEKGECYFTDLIIRSKSIMDVVCTILAILESVKTRMIVISQHVMFGDIKIKLREN

SEQ ID NO: 94874 - protein, 411 aa, Unknown
  Obtained from environmental sample
  DOMAIN (25)...(254): Rad51
  misc_feature (1)..(411): Xaa is any amino acid
MAKSEEKTRGDPNATPEEKLKALEAARLQIEKQFGTGSLIKLGSHDNAAGVEVIPSGAILLDEALGVGGYPRGRIIEIFGPESSGKTTLALHAIAEAQKLGGMAAFIDAEHALDPVYAKGLGVNIDDLWVSQPDNGEQAMEITDSLVRSGAVDVIVVDSVAALTPQAEIQGDMGDAQMGAQARLMSQALRKLTATIGKSRTILIFINQIRMKIGVFMGNPETTTGGNALKFYSSVRLEVRKTETIEVSKDTDAIGNRVRVKVVKNKVAPPFRRTEIDLIFGKGISYYGSLLDCAVKYNMIEKKGAWYSCGEEKVGQGRDNARDYLEQHLDFAADLETKLRKQIFPGREFPQPRVAAAGEKAAAKAAAAKPEAKPQSPAPAATPAAQQGPGRPRKLASPGGTGGSLSDEALF

SEQ ID NO: 94875 - protein, 87 aa, Unknown
  Obtained from environmental sample
  misc_feature (1)..(87): Xaa is any amino acid
MKKRKIASAIGYEEGDPAPVLLASGRDREAQRIIEIAKEAGVAVVEDSALAALLDTSAKPGDFIPSWCWEAAAKALAFVIKADNHPY

SEQ ID NO: 94876 - protein, 344 aa, Unknown
  Obtained from environmental sample
  DOMAIN (27)...(183): Diacylglycerol kinase catalytic domain (presumed)
  misc_feature (1)..(344): Xaa is any amino acid
MNNIEFFAEALAEICRRSLVAPDKPLRWALIANPAAGGFTMRSRLKNYRIALEQCLTEARKNPLREDCAPAGVMAELADSPSLASYGLAQTDGHGCAAKYAKALIGEAKTHNAPFYLIISAGGDGTSREILTAMYHAPETVRSNMAILRLPMGTGNDGADSNSLVEALMLLIKPSRIEFNPALRLVTAPAGPAANGPAASTPFHLAFNILSVGLDAFVTHMTNKMKGKLPGDSYKLWVDIASLLYDRLYTVDFLDLKVDGGDITLREKLLLLAVGASGHRTYGSQKKILPDDRNVCALKQMPLLRKLALKDLFTTGKHIDKPEAILFNARSVEFSGKFPILPQM

SEQ ID NO: 94877 - protein, 478 aa, Unknown
  Obtained from environmental sample
  DOMAIN (275)...(343): HAMP domain
  misc_feature (1)..(478): Xaa is any amino acid
SIAVKLNDGLANLREKWLHSNSNLNQLAAEMNYDPKTPAPVVDAVSKLNDVHATIFRKQADGTMVRVSTSIIRDGKRFVNTKVSPKNDDGSPNAVLQSVLSGKRYVGRANVGGEWVNAIYEPIIEKNEVTGMLFVGSLAEDTKKLIESIRKLKYGEGGSVFAVGGKGTQKGVMIMSIDGKRDAQNVWDLANSKGDYFWRKIIETGSELPENSAEYAEFDYMDSNGKEYKLSVVEMYYAPWGWVLGVSIPKEEIGRASEEMQNSLSGAMALLKKQVYATGIVMFVLILVVSFVFSKSLTKTLVHAIVMFDKIAKGDMKHRLEVTKDDIGEMAHHFNKLMDNLHEFMKKVVSSVATLNEASDKLFTVSNKVASSAEESALQSESVVSATEQVSTNINAIASFAEESSASADEVVNAVDQVSTNISSMASGAEEASANVTEVVNAVEQVAENINAMASAAEKASTNSHEVAGAAERMSANM

SEQ ID NO: 94878 - protein, 302 aa, Unknown
  Obtained from environmental sample
  DOMAIN (71)...(251): DHH family
  misc_feature (1)..(302): Xaa is any amino acid
MNWEKKAIPPEQVKDISAKYGCNFLTASILARRGICAGEAIKFFLEDDMRYLHNPFEMPGMEDAVERILAAKEEGEKVLVFGDSDVDGITGTVLLTEYLAGMGMDVSWRIPGGEDPYGLSIKAVEDFAAAYGTLIITVDCGISCVNEIRRAGELSVDVIVTDHHEPQEQLPQALTIINPKLKNNADISTPPYPFKDLSGCGVAFKLVSALRFAQKSELYGQPVCLLNTRPVNDAWIVEIAKTRNLAVIGTLSETIIPGMIPISDTRLPAFLEGQQILVWDASQQKRTLAKLFGNGVEIGMLD

SEQ ID NO: 94879 - protein, 450 aa, Unknown
  Obtained from environmental sample
  DOMAIN (2)...(128): E1-E2 ATPase
  misc_feature (1)..(450): Xaa is any amino acid
LSGSVNQSGMLTIEVTRTFGESTVSKIIDLVENASSKKAKTENFVTTFAKYYTPVVVILAVLIAVLPPLIFGAPTGDVWRNWISRALVFLVISCPCALVLSIPMGFFAGIGRAAKKGVLVKGGNFLEAFNNLETVVFDKTGTLTKGVFKVTAVEPAGGFSRDALLELAANAESYSNHPIALSVMKEYGKAIERDRLSDYTEIAGHGVSVNLNGKVILAGNQKLMAKAGIGFQESQSVGTKVYVASQCDAPSLDNAPSNRLFAGCVVISDEIKPDSRNAISALKAKGVRKTVMLTGDAPNIAGAVAAELKLDEVYGGLLPHEKVEKVEILNAKKSAKGKLAFVGDGINDAPVLAMADIGVAMGGLGSDAAIEAADVVLMTDEPSKLCDAIDIARFTKKIVWQNIVFALGVKCVFLALGAFGVATMWEAVFADVGVSLLAVLNAMRIMRADC

SEQ ID NO: 94880 - protein, 434 aa, Unknown
  Obtained from environmental sample
  DOMAIN (4)...(395): Glucose inhibited division protein A
  misc_feature (1)..(434): Xaa is any amino acid
VNFDVVVIGGGHAGIEAANAAWKIGVKTALLVFDKKSIGRMSCNPAIGGVGKGQMVRDIDAMGGLMGVLADKAGIMFRTLNSSKGPAVWGNRAQCDMNLYSEIARKTLEGLEGLEIIEGEAVLLEKNEKGWKVGLRSDVQIQCKSVIIASGTFFKSKMFTGLDKVSTGGRVNEPSSDLFPESLGKLGIKTRRLKTGTPSRIDAASVDFSECEVQTGDANPWAFSSKTDVKNLCNSAKCYLTRTTKETHRILETAFEKSPLFTGKIQGLGPRYCPSIEDKIKRFADKESHQLFLEPETKEANRIYINGFSSSLPEEAQIQAMHTIPGLKNARVLQIGYAVEYDAIHATELHPTLESKQHSGLYFAGQVCGTSGYEEAAAQGIIAGINAALKIKGKEPFILSRAESYIGVLIDDITGMEWNEPYRMFTSRAEYRLF

SEQ ID NO: 94881 - protein, 56 aa, Unknown
  Obtained from environmental sample
  misc_feature (1)..(56): Xaa is any amino acid
MVIAIGPERGWSDRERDLFESSGFLRLSIGTRALRTETACTAAAALAMEKIEESGL

SEQ ID NO: 94882 - protein, 195 aa, Unknown
  Obtained from environmental sample
  misc_feature (1)..(195): Xaa is any amino acid
VYTNSPAVLAARAGVMEFLSVNHPLDCPFCDKAGECKLQDHAYLHGSSDGRAIEEKRHYSYEDLGSKIVLDKNRCIHCTRCVRFTREVTGQGELTVSNRGSRLEITTFEGLTLDSNPFACNIVELCPAGAMTAKDFRFKKRAWYLKPIPTISRHGADAKPIWADIDQNKLWRFRPRFDGELSLQRLISDEERLAW

SEQ ID NO: 94883 - protein, 719 aa, Unknown
  Obtained from environmental sample
  DOMAIN (1)...(719): AcrB/AcrD/AcrF family
  misc_feature (1)..(719): Xaa is any amino acid
MEQAANDVRDKVSRAQRFLPDDADIPVVSKADANSTPIVVLSLGSNTMSLLDLSDYGERVQEKIQTVPGVAEVRVWGIKRYAMRIYIDPVRMAGANLTIDVIRSALERENAEIPAGQLEGTAAAVSLRSSSKLKTEEDFRNVILLANKEKFVRLSDVAEVVLGAENERNTVRMNTRPMVSLAVIPQPGSDQIKIADEVLSRLENIRKDLPESIVIQLSFDNTKFVRAALSEVRETIVIAFLLVVAIIFMFLRDVKTTLIPVFTVPISLIGVFFLIWVLNFSINILTLLGVVLAISLVVDDAIVVLENIFAKVEEGLSPKEAAVKGVNEIFSAVIATTLVLCAVFLPLFFMQGFTGRLFREFSIVIGGSVIISSFVALTLGSMLSSRFLKKNEKHNRFYTATEPFFNKLSSTYSRFLGKTLKRPMRAIPVILACAVIAVFAFLNLPSELAPLEDRSRVNVQVTAHEGAPFLFMSDKMKIIESLIIENVPEIDRILVQTAPGFAGMANNGNVSIMLVDPKNRKRTQQQIANDLRRILSKVEGVRISIQQEQTIRVGSRSGLPVQVVVQASEIDSLKKYLPGLMDKIQQSPLLTMADVNLKFTKPQLDVEMNRDRLRASGVTPREVATALQLAYSGLRYGYFLKEGKQYQIMGEINSQNRSEPASLQTLYVRNNVGKLVSLDQLVELKERAVPPQIFNYNRYVSATISASPAPDVALGDAIS

SEQ ID NO: 94884 - protein, 267 aa, Unknown
  Obtained from environmental sample
  DOMAIN (1)...(266): Dihydrouridine synthase (Dus)
  misc_feature (1)..(267): Xaa is any amino acid
SGPYEKWYIDAGPKPEKVVFQVVGSDIGQISQAAALLDRLECAGIDINMGCSAPLIRKTGSGAAWMTSIDRAGELISCVRPFVKRRLSVKLRIGYKDDFEYLVRFCQRLEAEGTELITLHPRLVTEKFKRLARWEYVGALRKELKIPVAGNGDIADAQELVRRAGGPCDAVMVGRAAVRQPWIFAQAALSPASSSVPNIEETGLRFLELLAQYQPPDFHFSRAIRFFGFFCDNLKWGNYLKTQINREKTLSGIERVWREHFKDGSVT

SEQ ID NO: 94885 - protein, 332 aa, Unknown
  Obtained from environmental sample
  misc_feature (1)..(332): Xaa is any amino acid
MKKQKSLVYKCTSCGHEEPKWLGRCPECGEWNTLTETAVSNPNIKRSDTRSGLPQTFPLSTVDPQEGSRIKSGIGELDRVLGGGIMKCSAVLVGGEPGIGKSTLILQPAAAVLTKGRVLYVSGEESAGQLRLRADRLGLSADKSVMERIEILCSGNLEEIETVLNKVKPVLVLVDSTQTLYSEQADSAPGGVNQMKFCTFELISWAKEHDAALILTAHVTKEGVISGPKTLEHMVDTVLYFEENDKTAGLNGNADCRFLRASKNRFGSTDEIGIFTMGERGLTPVEDTGRMFLVRREGELPPGVATAAVLEGTRTILVEIQALTIPAKGTIS

SEQ ID NO: 94886 - protein, 331 aa, Unknown
  Obtained from environmental sample
  DOMAIN (173)...(284): PilZ domain
  misc_feature (1)..(331): Xaa is any amino acid
MKDIEQLKQLAANCEIKDPLNIFKSKKEFETIIRSMVKALHLSGEYNVPATQLFLSRLFEYYHKIEMQSSENEVKIKTSRQISEGQSLRILVAGTGVYKSEVVKNSGNYLAIARPANASMPNSMEWYGLKISVYFWREDDAGYVFDSEVIDEVFSKGISSLKIDHNDSLFRTQKRKSMRVKFQKPAYLYLVSESDNPHRLEKSAGLRVMMEDISDSGCAFKVLGQVTVGLRFKAQFLLDKIPVCIPGTVRSVDYYRDTNTTIVHMEADNLPIGTRNYLLCEVFNLLPEDDEDELPFRVLEDEANVITEQAAQKAAEQAAQQTTEQQEAVNA

SEQ ID NO: 94887 - protein, 498 aa, Unknown
  Obtained from environmental sample
  DOMAIN (42)...(498): Protein of unknown function (DUF877)
  misc_feature (1)..(498): Xaa is any amino acid
AAIAAVAEMTDTAVDASTDTDGAKSPSVLEYIYQTMNIAPPSGTVAISKYRNPQALAESGADERIGAALALFVDSVIAESVSIDKIDKAVLDCRIADIDRRISLQLDEILHAEPFQRLESVWRSLDFLVQRTDFRKNVKINILDVSKEELAEDFEDVPETIQSGLYKHVYTDEYDTPGGEPYAAIISGFEFNSSAADVSLLQELSKVAAACHCPFIGAATSKFFAKERAVDLTKIEDLHNYMERSEFLRWNSFRSTEDSRYVGLTLPRFSLRLPYGPDTLPVKEFVYKENVAGQNSDKYLWGNASFAFASNMVRSFIDNGWCVQIRGPEAGGKVDNLPVHVFDAGRGTEVKIPTEILIPETREFEFAQEGFIPLSFYKNRDYACFFSANSAQRPQEFDNPIVTANMRINSRLPYIFLISRIAHYLKVIQRENIGSTKSRKVLHEELTRWIKKLVTEMKDPGPELIATHPLKDADVDVSEIEDNPGFFRVSLSVIPHFR

SEQ ID NO: 94888 - protein, 65 aa, Unknown
  Obtained from environmental sample
  misc_feature (1)..(65): Xaa is any amino acid
VSTAYSYDVNFGDMEASEWRNILSIVDKSNLGIKLLPVKQYINSNIESALKSAEYERRRKYLENW

SEQ ID NO: 94889 - protein, 380 aa, Unknown
  Obtained from environmental sample
  DOMAIN (194)...(328): HD domain
  misc_feature (1)..(380): Xaa is any amino acid
MELIPFMWLLTLVFILNNYANQYNNFSFNVANLATYVYTAVKLPVLILDDTGDIMLCNTASESFFKQNIEQLNRLKLFDLFDFGNIPLSLQRQKKDASVFNCDAVCRVEGHKCQISLNYVYDKFDEMICTVVIVTDITEKEELIRQLNESNAKIERFNKELQSEVDRQTESIRNLQKAIVYSMSDLIEKKDGYTGVHTRRVSEYVAILLRELARRGYQFTESEIQRIAESSLLHDMGKIAIPDNILLKNGRLTDGEFDVMKSHSTTGADSLQKSMQFAKDDDFLKNAFVMAKHHHEKWNGSGYPDGKKEKEIPLLARVIAIADVYDALRSERAYKSPFSREKAKSIILEENGIQFDPELVDVFLAVEQELDEFCESVKKG

SEQ ID NO: 94890 - protein, 90 aa, Unknown
  Obtained from environmental sample
  DOMAIN (6)...(79): Phd_YefM
  misc_feature (1)..(90): Xaa is any amino acid
MFNLVEDIKSISYVKSHTADVMRQIEEKNNPMIITQNGEAKAVLMDVKQYQNIINTINLLKILSIGENDIKNKRVYTHEQIQKKVKAILD

SEQ ID NO: 94891 - protein, 583 aa, Unknown
  Obtained from environmental sample
  DOMAIN (398)...(532): HD domain
  misc_feature (1)..(583): Xaa is any amino acid
LFFTTIYIAISFIVLFLGTSQIVGKSRRSALNWYFFAICTVIAASTINNAIQFNDAFKEGVPLGESSYGFTKLNMILSIIKVMIVPFLFSFIHILSKIKSKGMRILQHVLLSVNTLVVSAIFIIIAASIDAISILSNYLFNSSVLLMVLFSLGCLVFLQYKWIKSASLKRDRSQAKTILIGSLIALVSLSGDLAASRSHYLFNWMELIPFLWLLTLVFILNNYANQYNNFSFNVANLAAYVYTAVKLPVLILDDEGNIMLCNTASESFFKKNIERLNRLKLFDLFHFGNMPLSLQRQKKDASVFNCDAVCDVEGQKCQISLNYVYDKFDEMICTVVIVTDITEKEKLIRQLNESNAKIERFNKELQSEVDRQTESIRNLQKAIVYSMSDLIEKKDGYTGVHTRRVSEYVAILLRELARRGYQFTESDIQRIAESSLLHDMGKIAIPDSILLKNGKLDDEELGVMKSHSAKGADSLEKSMQFAKDNDFLKNAFVMAKHHHEKWNGGGYPDGKKGDEIPLLARVIAIADVYDALRSQRSYKTPFSREKAKAIILEENGRQFDPELVDVFLAVEPEFEEFCKSTQE

SEQ ID NO: 94892 - protein, 307 aa, Unknown
  Obtained from environmental sample
  misc_feature (1)..(307): Xaa is any amino acid
MARGEIFCARVERIAAGGAGVAGYEGKRVFIELTAPQDLVRCQIKKDHKTWAEAELLEVLEKSPRRVEPVCPLYGRCGGCTIQHLDYEAQIEAKTAILRETFSRIGGISQNEIRLRKAAPFEYRNRMQFHNTTGSHPGLKERKSDRLVVIEDCPIADDGIRKALREGKLLPPPGKERFSVFSGKKTFLCEGGTDKGLVSVLGRELATDVRVFFQSNIAMLELLIVDLIAAASNSDMALPLADIYCGVGTFASFLGAELQGNPGFSEIDLVEENKNALTLARENMPPDKKINYYAVSDTDWSKIQKKG

SEQ ID NO: 94893 - protein, 406 aa, Unknown
  Obtained from environmental sample
  misc_feature (1)..(406): Xaa is any amino acid
MKRNQLAALFFISTAGIAFELYVMRIFSVGSWANFGSLVISTALLGIGLAGIILTFVEKQIRQRPEMYMSILAILLPLFMSGAVILAQRIPFNPIFLASDSRQLWFIGAYYIIYGLPFFIIAAFVGIAFITLSDKIQRVYFWNMIGSGVGGLFIVLFMFFLPPQYLLLPVLALTIIAALLSSCRREGKLTFPIPYVIGLCITTFGSIILAFFCGNIRISDYKDISYVRRYADSTLVHHSNGPAGEYHVYASRYFHFAPGLSDNAVLSIENLPTQLYWGLFIDGSGPIGIMGHLKEDEKVYMDYLPMAAPYVMITEPDVLLVNMSGGINANVALYNGARSIDITEPSPEIIHLLRKDVSVSRFTGNLLDNEKINVIRGEGRSHCVNNEGSYDLIELSLVDSVGLTDS

SEQ ID NO: 94894 - protein, 342 aa, Unknown
  Obtained from environmental sample
  DOMAIN (1)...(313): Penicillin binding protein transpeptidase domain
  misc_feature (1)..(342): Xaa is any amino acid
MVSYPWFDPNIFNQSDLEMAYLALLDDPNKPFINRAIQSSYPPASTFKVVMTTGILAENSFPIEQLVECRGEIDYGDRQWRCHIRRGHGRLNLRRAMAQSCDIYYWMVGRDYLGIENIINYARDYGYGDVTGIDLPGEIAGFLPTPQWKERRLHERWQGGDTMNTSIGQGFTLVTPLQMANMAAMAVNNGVIYRPHVLKEVRDSKTGAVETSVVPRIIHKSEVDPRVFALVRRDMRGVISEGTAQYPLNIGTVQIAGKTGTAEVGLPENWHSWFTSFAPYETNNPEERIVVAVIVEAVNTWEWWAPYCSAIIYQGIFADQTYEEAARTLGIYNAQPVQGRRE

SEQ ID NO: 94895 - protein, 150 aa, Unknown
  Obtained from environmental sample
  DOMAIN (1)...(64): Phosphoribosylglycinamide synthetase, N domain
  misc_feature (1)..(150): Xaa is any amino acid
MAILGKCLPVDAANPKAIAEIAKNEKADFTVIGPEIPLVAGVVDEFKKQGMQIFGPTAAAAQLEGSKAFSKEFMKRNKIPTAAYETFTDLQKAKNYLKEHPAPIVVKASGLAAGKGAIVCTSDEEALNAVEEMLGEKAVFGESGKTVVIE

SEQ ID NO: 94896 - protein, 242 aa, Unknown
  Obtained from environmental sample
  DOMAIN (184)...(241): Bacterial SH3 domain
  misc_feature (1)..(242): Xaa is any amino acid
TYANGNVYEGDWEGENANGKGKMTLKNGNVYEGEFLNGNPHGKGKATYPDGRVEKGKWKNGEFKGLFGFSSSSGSYGEPYGVILSIIISAVIAVISGTYLGGFLYKLIPLNIDILTLGLIVAIFIVCMITCRNHKGLKIVKLAVILVGLIAIGILGNKVLANKSPKPQTTETTQGANTNPSAEITKNVNFRKGPSTNDEVIRQLKQGDIVILTGEVSGGWTQITHNGDTGWVSTEYLKVYGK

SEQ ID NO: 94897 - protein, 68 aa, Unknown
  Obtained from environmental sample
  DOMAIN (13)...(45): Ankyrin repeat
  misc_feature (1)..(68): Xaa is any amino acid
DYGFDPNAKTERTGYTPLHNAVAANNIEAARLLLKYGANKNIKAMDGLTPIDKARREEKRALVMLLYR

SEQ ID NO: 94898 - protein, 556 aa, Unknown
  Obtained from environmental sample
  DOMAIN (2)...(322): Glycosyl hydrolase family 3 C terminal domain
  misc_feature (1)..(556): Xaa is any amino acid
LDWYAGHPSYMITPLDGLRELYGKDKVAYTDCRDIVSFSTEDGRPLVLAEKTFSVGKQGDVPARFYMEDWGWGARTFTDTQSGLMLEIPYYDPKPGDVVDKPQLINATAKSSLIWFNKILFNAIPRGNSLFILRTYDNRRAAYPCEPGPVELRVDTFEGSGELFRMSLERDGLSDAVKAAAQAGQIIFVGGNDPMINGREGVDRPSLSLPPRQEEMIRRICAVNPKIVLVLLSGYPFTCKDIALKVPAILWMAHGIQETGAGLADIIGGIYSPAGRLPLTWYEDEKQLPPMMEYDIISSASTYQYFQGQVLFPFGHGLSYSSFEYSHLTIDKAEAGADETVKISFKIKNTGSVEAEEVPQMYAASIGSVFRRPLKSLKGFTRLSIKPGEEQLVRFNLPVEELAVWDSFHNHFCVETGQCTVMIGASSEDIRLSGGFKVCGKNVFPRKIPDHIYAQRFDDYSNCYLHEKRGSAIPAVFNNSDGGWIRFAALDFTGSRRLISAIVQGAPGSRIEIRLDAPDDALAGTLVIPNTGDISFYHLAERNSPRRRPVWAYAET

SEQ ID NO: 94899 - protein, 271 aa, Unknown
  Obtained from environmental sample
  DOMAIN (189)...(266): Sporulation related domain
  misc_feature (1)..(271): Xaa is any amino acid
MEKKKLLLVAISVGVFLALTIGAALLVFAPKDTSAASMAASRPVEAVDTGITVPSPVSPSVSGSSASQDSTSQPSSLDPVELVNATPGLQQAPGGAARQGEDFYINGNNGGTGKTTETVINVPKPSRAAVPDTPPTGTAAAATNVEKAVSAPAQTALKPASTTITAAVTAPAAKATQTQAKPVSTQTKVYNDYWVQTGAFSTMARAEVVKNTLSSKGITSIIENREVEGKSVFRVRVGPYTSENEANYWLSLIKSINGFEDSQVRQSQSRR

SEQ ID NO: 94900 - protein, 268 aa, Unknown
  Obtained from environmental sample
  DOMAIN (1)...(244): Polyphosphate kinase
  misc_feature (1)..(268): Xaa is any amino acid
VCAGNKPHKTLRTLFPSGNYNDKTAKLYEDISLFTAREDIAFDAGLLFNMITGYSAVQAMSRLVIAPVALKRKLLELITREMSRSSTEAPGRIMAKMNALADPDIIKALYAASQAGVKVFLSVRGICTLVPGVEGLSENIRVISVIDHYLEHSRIYYFSNGGAEELYLASADLMTRNLERRVELMFPVLSDDLRKTIIKGLSSYFKDNTQAWLLDSSGAWTRLEPGHGEEPFRVQAYFHSMASKANETELPGSANGEFIVRRSPPSKS

SEQ ID NO: 94901 - protein, 473 aa, Unknown
  Obtained from environmental sample
  DOMAIN (350)...(473): Stage II sporulation protein E (SpoIIE)
  misc_feature (1)..(473): Xaa is any amino acid
INETLVIGYLNGFKEAVGGGFWFEPYADREDKYHSNFYAFFDKSAGKIRFDDTFDSDEYDYHSKSWYRELHDGIKQSYQVMWTKPYVDDSGSFSLMTTAGAGIYNQKNELIGVSTIDWEIDKVINELTAIKPTKNSFVLLCVPEQDYIISGTRAGIVSGASIKSLPWDINADSFTLDGVQYLRFGRYMDNGWLLSVQIPKTEIFTEVEEQNNRFSLLIALSVAVMIGLAYYLISKFINVPIKRLTQDVSRLALGNMDMPIEANTNDELGMLARAFNKMTSDLKNSIEENARERAEKERIGAELGVAAAIQASMLPNIFPPFPERTEFDLYASMLPAKEVGGDFYDFYLIDKDNLAVVVADVSGKGVPAALFMMITKTMLKDSSPGNSLKNVFESVNKKLCEGNEAEMFVTAFMGIYNIPSGRFVFVNAGHNPPLLKKRGSGYEFLETDPGFVLAWMKNAKYKEKEISLEPGDV

SEQ ID NO: 94902 - protein, 258 aa, Unknown
  Obtained from environmental sample
  DOMAIN (35)...(230): ABC transporter
  misc_feature (1)..(258): Xaa is any amino acid
MSMIKTVGLYKTFHGTGGRGPLDVLKNVSLTVEQSEVVCIIGPSGAGKSTYLRTLNRLETIDEGQIFIEDTILFDCHNGVNSVKMHNDERNKILLEIGMVFQRFNLFPHKTALENVMLAPHNVRKLPLATARAKSEQILERVGLSDKINAYPSQLSGGQQQRVAIARALAMEPRIMLFDEPTSALDPELVGEVLAVMKQLASGGMTMLVVSHEMGFAREVANRVVFMFEGSILEIGTPEQLFTNPSNDRTRQFLQSVL

SEQ ID NO: 94903 - protein, 104 aa, Unknown
  Obtained from environmental sample
  misc_feature (1)..(104): Xaa is any amino acid
MRIVMFTDAYWPRVNGVTVSVDTFSRSLIKAGHEVLIVCSFYPSSYDTIFTVQNEKKEDEPLIIRVPSLPTFVTKEDRLAKFDKWYWVFQQVEKFKPDILHINT

SEQ ID NO: 94904 - protein, 287 aa, Unknown
  Obtained from environmental sample
  misc_feature (1)..(287): Xaa is any amino acid
GLRWFCTRRHFKPVKGNRHNPSIGNTYSVDYAKQKPNFVVRVGGDDKQESNSDYRFPLYYSEDTARTWKKFGTHPNPGQNYGGKLAISSDGRVVLWAPREKSTLYRTNNWGATWTQSTGSGISNTPFPKADPVDAAVFYAFGNGVHRSNDSGKTFTKVGGNFSWTNEMTVTPGVKGHIWVTGHAWDGINGGYLARSTDGGVTFQNVDPADDPKYTQRVQHSEAVGFGKAAPGQTYPAIYIYGTIDGKKGIWQSIDEAKNWTRIDDPQYAFGDLANGKFLRGDMNTFG

SEQ ID NO: 94905 - protein, 397 aa, Unknown
  Obtained from environmental sample
  misc_feature (1)..(397): Xaa is any amino acid
MATAREYSGVVVSKKNGNPVEGVLVSVGHSEFYARTDQNGRFSITNPTPEGEPPPEPPTAISKVKLQNARWNFQGRTLDLRAVPGVNSVSIYATNGKKVFSGQVPSSRIVALPSMAMGIYVLELHGEHGVIDRSSTKLAKEASDSERLIFRHYDYLPKDVDMASSNTDMRVELSLDERNYVFDQSKIREYRFKIDPADLAYMNLYGYKEEFMSATMKFEGDDYGQVGFRYKGSSTARMPYCYFPNSDTTQPPSATIKARNCPKMSYKVKFTQYDDKKRFYLMKKINLHSLVADPTKMHDMLSYGLYMDMGIPAPRTAYANVYVNDTLKGLFLAVEEIDGRFTKARWPNYGDGNLYKERWPKTDDAEYYLGGLKTNEKPEDNPNVERMLSYYNAIQSS

SEQ ID NO: 94906 - protein, 532 aa, Unknown
  Obtained from environmental sample
  DOMAIN (82)...(105): 4Fe-4S binding domain
  misc_feature (1)..(532): Xaa is any amino acid
MARACTTPVTENMDIITHDPEIIATRRAVLELILSNHPSDCLQCPRNGNCELQTLAAEFGIREIPFKHISNGLPIDDSNPAIVLNPEKCIRCGRCVRVCQDVQNVWAIEFLGRGIKGRIASAADASLGESPCIKCGQCAAHCPVGAIYERDDTVEVWAALQNPDCHPVVQIAPAVRVALAEEFGLDPGTVFTKKIYAALRRLGFNTVFDTNFSADLTIMEEGTELVKRLTEKGSAIPLITSCCPAWVDYMEKYYTDMIPNFSTAKSPQQMMGAMIKAYWANKAGVNPQKVYSVSVMPCTAKKWETHRNDDMKSAGKSLGADTGYDVDIAITTRELARMIKQAGIDILNLADEEADNPMGPYTGAGTIFGVTGGVMEAAVRSAYYLVTKKELPNVDFKPARGLDGVKEGEVDFGNGTKIRIAVAHQMGNIAAVLDKLREAKKAGKEPPYHFIEVMACRGGCIAGGGQPYGCTDDIRKQRTGGLYVDDQKSQYRCSHQNPYIGQVYKEFLGEPGGHKAHKLLHTKYVERPLYVK

SEQ ID NO: 94907 - protein, 190 aa, Unknown
  Obtained from environmental sample
  misc_feature (1)..(190): Xaa is any amino acid
VREKQKTERAGWPAEDREEPKEPQGAQSAEVRETENGDSANGRKLERSLLDAILDVDNMFKAQERVIANRGSAGVDGMTVGELNDYLIKHYRELSESIRGGWYKPKPVKQVEIPKPDGGKRLLGIPTVIDRMVQQAVVQVLQPIFEQTFSDSSFGFRPGRNAHQAIQRAKQYYEEGHTFVKRGDRHYFGI

SEQ ID NO: 94908 - protein, 442 aa, Unknown
  Obtained from environmental sample
  DOMAIN (19)...(201): Glycosyl transferase family 2
  misc_feature (1)..(442): Xaa is any amino acid
MSTTNNMITDKKDKDILISIVIVNYKVPYCLIEALNSLRLAALYDRCEVIVIDNASGDGSREIVASKFEEAQWIQLKTNIGFGKACNIGVEAARGEYLLFLNPDTVISANTLSDAVEFMETHPKAGLMGPKILNPDGTLQLSCRRSIPTPAVAFYYFAGLSYLFPKSKRFGRYHLTYMDEDKTALVDVISGSFMFMRRALFNEIGGFDKRFFMYGEDIDLCYRITHAGHEVWYYPQIKIVHQKGKSSAKRKVRSRFYFYEAMIIFFSKYRKLQEMVFPWWLIWVGIVFQGTLNIGSIIARSVVALLMDTVAINAAAWVGLSPLAERLAGESVYGGERILPLVGMHALLSFAFLFLFVYNGIYSAKNYSIKNIIFSGLLSCSLFLSGVHFLTPYSVESFGTAAILALIASILWREALPLLVKSLRGRIFAPENALVVGHDDDI

SEQ ID NO: 94909 - protein, 68 aa, Unknown
  Obtained from environmental sample
  misc_feature (1)..(68): Xaa is any amino acid
EKLDCDEQLFKTVVKTAFNQRRKTLRNSLKPLLAEIDTNLKIFNERPERLSVAQFVELTKMIQTKLVL

SEQ ID NO: 94910 - protein, 216 aa, Unknown
  Obtained from environmental sample
  DOMAIN (63)...(206): MotA/TolQ/ExbB proton channel family
  misc_feature (1)..(216): Xaa is any amino acid
METVSFSLLELFKLGGTAMWPLAAFSVATLAIGFERIFFLSYHNLRLNVIDRKVSEYVKNRDYKGAADYLTPLIKRSMGARILLALVKRAAPAPGKSFSESNMERAVETESMVCIGSLENGFNFLVALGSLSPLTGFLGTVSGMIGAFRSIAEATEVNAQIVANGIYEALITTVFGLIIAIAAMVFHSVFTHIVDKFAAEVEKNCSDLIAEIAGQQ

SEQ ID NO: 94911 - protein, 288 aa, Unknown
  Obtained from environmental sample
  misc_feature (1)..(288): Xaa is any amino acid
MTSPIAERQTKIYRISGSEPIEDIIKLRRPRYGFPMVSLLPTEIAANAEYAFEAVKVDSPAEAYQLLSSGEIDGYISLDTVEAAFDECGSVVTEDYFPLIFRSSCLLTRKEELKPIISVMEKALNDRTIAYLIELRNTGHKKYLRNKLYTQMTEEERSYIKNNPVVPVAAEIDNYPVCFFDTHTNLWQGIYFEALHEIENMTGLKFERVNGPQAQYPELVARLENGEALILSELFHIEDYQGRFIWSDVPILKDNYAFITRSDFPDIEASEIPYLRVGGRKNTPYLEL

SEQ ID NO: 94912 - protein, 116 aa, Unknown
  Obtained from environmental sample
  DOMAIN (13)...(106): FMN-binding domain
  misc_feature (1)..(116): Xaa is any amino acid
TVIGMALKLSRASYAGPIVLLVGVSVDKRITGVKIMEHSDTPGLGANAASPSYFVDRAKGITFYGQFAGKSVDDPFTVKGDVVAITASTITSRAVTAAVKAAGQAAVEWFSAGGLK

SEQ ID NO: 94913 - protein, 235 aa, Unknown
  Obtained from environmental sample
  DOMAIN (5)...(192): Rnf-Nqr subunit, membrane protein
  misc_feature (1)..(235): Xaa is any amino acid
MSENKSSFFRIFANGIIRENPLLMLMIGLCSSLAVTTSVDNGIGMGLSMTFVLLMSELVISAFRKLIPDSIRIPIFIIVIAAFTTVIDYVLKAWFPGLSKAMGVFIPLIVVNCIIMGRVEGFASKRPLSDCLADSLGMGLGYTWVLAGIALIRELLGNGTILNFQVMPLNYKPVLFFILPPGGFFVFALFIALNLYIKSRLKDPAASDDGGEGFGCCKPDNCAACGADAGMEGKE

SEQ ID NO: 94914 - protein, 217 aa, Unknown
  Obtained from environmental sample
  misc_feature (1)..(217): Xaa is any amino acid
ERSPATLPFRDDFTTALRDLSAAGRIVSIISAGEQPLKENPSSAAGATPEAKLASVARGTAASYSARWRFDLGLRLAATDLLPGEKKRAVVFVGAGVASGASGSLGSFDQYSLSELAAYLSNNNVVFCAVIVGGGSAAADVRFLCEQTGGKVLSLYRSEGITPEIRSLRERSSGYYVLSYRSQLPTDFGRAYLPLEAEVYLMERSGRDSTGYFSPIQ

SEQ ID NO: 94915 - protein, 282 aa, Unknown
  Obtained from environmental sample
  DOMAIN (1)...(181): ATPase family associated with various cellular activities (AAA)
  misc_feature (1)..(282): Xaa is any amino acid
STLARFLKVPFTIADATVLTEVGYVGEDVDSILVRLFQAAEYNVQAAEKGIVFVDEIDKIARKSANPSITRDVSGEGVQQGLLKILEGTIAAIPPKGGRKHPEQPLVHINTRNILFICGGAFETLDKVISRRVNSGGGMGFGADVVSKNETKIGEILSKCEPEDLIGFGLLPELVGRLPVIVSLDELDEAALLNILTEPQNSLVKQYTKLFAMDGIELSFTKDAFDAIVKKTVEQKTGARGLRSVMEKILMPYMFEVSKYREQAVLKIDSSIVEAAIAKSKR

SEQ ID NO: 94916 - protein, 427 aa, Unknown
  Obtained from environmental sample
  misc_feature (1)..(427): Xaa is any amino acid
LAKEKPDTVMNKEDAQFPQPDFEKAFPVVPLQKFVMFPRMGTRLSFDRQITLNALRHIDDSKGFVICLLQKNRDVEVPKEDELYKVGILAYVKGVSGTPNNLLLVNLFGVLSVDIDQMSFNDKDNDNRYFSATAKPRFLDFKDKKLSKSLAENMLGSMEQYIKTQQNLPENIKDILKGIPPEERCMIAHSFLKIPDDEHQSILECATLEEMYSKIDLAVNTAMEVHRIISLNRQQVEIKMQRSQREYMLQEQISQLQRELDEINVNDQDSESYSKKAKELRFPLSIKEKFDEEMSRLKLLNPMNPEYTVVRNYIDWLLALPFGIYTEDVLDIKRATENLNSKHFGLEKVKERILEYIAVLQIAEKLKNKEVKSPILCLVGPPGVGKTTLAMSIANAMNRNLARISLGGVHDDAEIRGHRRTYIGSMP

SEQ ID NO: 94917 - protein, 176 aa, Unknown
  Obtained from environmental sample
  DOMAIN (48)...(166): Response regulator receiver domain
  misc_feature (1)..(176): Xaa is any amino acid
KEAGIDKFIPKPIFPSSIVDSINEVMGIRRVHQPKEEERDITGIFARYNVLLAEDAEINAEIVKSLLEPTDISIDCAVNGTEAVKLFSAAPEKYNLIFMDVQMPEMDGLEATRRIRALDTPRAKTIPIVAMTANVFKEDVDMCLAAGMDDHIGKPIDMDELIGRLNKYLRSATSKI

SEQ ID NO: 94918 - protein, 417 aa, Unknown
  Obtained from environmental sample
  DOMAIN (26)...(142): Histidine kinase-, DNA gyrase B-, and HSP90-like ATPase
  misc_feature (1)..(417): Xaa is any amino acid
MSFRVDERSQTLKVYYDRSIPQPLLGDDQRLAQVIINFISNAVKFTPEGGNISLQTHLVDRNDDGCTVRVEVSDTGIGINKDEQQKLFKPFQQADNNTARKYGGTGLGLAISKNIIEMMGGNIGVESEAGRGSSFYFTVFLKYGEKKSAEEAVEVEDINWENVRILAVDDDPDVMAYFKEITESLGAKHCDTATSGTEALALIDKNGFYNINFVDWKMPEMDGLELTKEIKKRVPEGEKSAVIIFSSTDWSLIELPAKEAGVDKFIPKPIFPSSIADSINEAVGLHRIRRAEDEARNIAGIFAGYRVLLAEDAEINAEIVKSLLEPTGVSIDWAVNGVEAVKLFSESPDKYNLIFMDVQMPEMDGLEATRHIRALNIPRAKTIPIVAMTANVFKEDVEMCLNAGMNDHIGKPIDMDE

SEQ ID NO: 94919 - protein, 254 aa, Unknown
  Obtained from environmental sample
  DOMAIN (114)...(186): HAMP domain
  misc_feature (1)..(254): Xaa is any amino acid
SRAFLLDSDFSFLYAPGKEATSVDPRGKKLVDFPFLDKSGRHNFYDEMIAAAHKDGVFWGEMIGPFSGRPAFISFHTISFDNIVSDLEVKPLYLLMGTEIEILYSDANKHLHMILLITAVFIIIIGLVIYVNINSIAKPIKKLTDDVFKISNGDFSVSFEAVAEGDNSEIAVLNRSLAKMVGLLTGSLREVEQRVESRTHELSLMTQKAEEAKERAEEASKVKSQFLANMSHEIRTPMNAIIGMATMGKTTRDA

SEQ ID NO: 94920 - protein, 359 aa, Unknown
  Obtained from environmental sample
  DOMAIN (63)...(177): PCRF domain
  misc_feature (1)..(359): Xaa is any amino acid
MNERLNSLLKRYEELNLLIQDPQLVKDQNRYRETMKEHSRLSEIAEIQANIEGLEKQIIEAKTLVQEEKDQEMKELAREELKELETKLTDNKDKLKFLLIPKDPLDEKNIIMEIRAGTGGEEAALFASDLYRMYSRFAESKGWKFEIMNSNDTELGGIKEIVFSITGNNVYENMRYESGVHRVQRVPATEASGRIHTSAVTVAVLPEADETEIDIKTEDLRIDVMRAGGPGGQCVNTTDSAVRITHIPTGVTVHCQDEKSQIKNKAKAMRILRARIYEMEEAKAAAQRAEARKTQVGSGDRSQRIRTYNFPQNRLTDHRINLTLYKLDLIMQGDTAELFDALKLSAKEEMLQSGEAAAS

SEQ ID NO: 94921 - protein, 929 aa, Unknown
  Obtained from environmental sample
  DOMAIN (426)...(512): Alpha-2-macroglobulin family
  misc_feature (1)..(929): Xaa is any amino acid
GSADITHNVGKDGVEGVTYRYRLEASVLDAARQEISVRNAAIVHPASFYIGSRLDTGTLRAVDPASTKSSAFFLQSGSPATVSWALLAPEGTPFEQASGNQDMPEISFKLIRYEWKQSRQAGIGGRINLYWERVEDVVMERSFRPPRREYSGVIPFTPTTSGEYEVRLSSKDSQGRSALTRYSFYVTGSGWALWGRGDSDSITLRPDKNSYAPGETAKLLVQSPLPKGKYLLTLEREGILEEKIIELDGSALTIDIPIKESYIPIVYAAIASYTVRSGPPTHTYYEPDLDKPKGLFGLTSLYVDNENRHYAIEIEASKSVYRPAEQAEVTLKVSQNGKPAAGVEVTFMAVDRGVVDLIDYHVPDPLAFFYSPWNFPLGVRGADSRSLLIDPVTYSLSDLQGGDEEDNSKMEERKDFRPTAVFEPYLVTGADGTAKVKFNLPDSLTTYRCTAVASGTSDFGIAEKDLRVSAPLTAVAALPRKLRWRDTGTVSLILTNLENTAVEAKVSAATETIEGGVWDTVLEIDGAKEKTVKINPGATAEVSFRAAALGAGESRIIFTLQSPLVNERIIKTLTVDRPVLYETVTSIGSLASDNPFIEEGVILPSLVPEGTGSLSVSLSSSRLALLKEAVRYLLDYPYGCLEQRSAQLLPLVAFADRLETFELDSPVKNPKKVIEDELALLVKSQLPNGSFPYWPGGQFGDHYVTLRVAHIIYLARQKGYAIPETFNTQTLTKYITENDFSSTIFKEDPFLKGYSLWVRAMYGARIGAEISAFLRRGDELGISGWGFAGLAAIELGLKDLAVSARDRVRRFIRPGTRTLDLTDTYERSGNIWGYDTDRYAIATMLYQALSPADDMTTRLVNSLIERQRRGIWTNTASSFWAILAFSKIADAEEKDQSGTLNSRLSLGGNTLLEAAFKTAGGTPVSRTWA

SEQ ID NO: 94922 - protein, 299 aa, Unknown
  Obtained from environmental sample
  misc_feature (1)..(299): Xaa is any amino acid
RNAPLDANSSALKRKTKVEEAIGLIQDYKVPKKTPRENTEDDGPLIERRQKPIGLHRGRRAEDIYGTDEESPYSVDAVKAKPRPYLPDLMNSIGEERKQIKEKEAAYTREISRIEGWGDFDPSIVEDISKTIPIYLYEMPVDAFARLDKDFQYIKVKGDKSVIRILVPEKTIPGMAPFQLPQKSLNEYKKEIEEFNVDLQEIDKELESFADRRHALQKEMELVEYDLEFESAVAGLSKVEDVPSDFGLSWLTGYVPAEDLGLVKKVASENGWALSAEEPPETDEFVPTKLKNSKFVQLL

SEQ ID NO: 94923 - protein, 217 aa, Unknown
  Obtained from environmental sample
  misc_feature (1)..(217): Xaa is any amino acid
IHEKGGTSAQQATTPQSASQPTQSQPLTPAQPTLAPQNTKTSQGAPAPVAVSEQPMEVYKIGDKGPAGGIIVYVYNSEKNSYGRHNYLEAAPLDIGKAAWGLYGVDIDHISDDGKRSTERIIAILNQNRESGKAAQLCRAYTLNGYSDWYLPSMGDLQILFKYSLATNNKLGLSNGWYWSSHTSGYGDYANGMSYPSLYGYEGFRNATGSVRPVRAF

SEQ ID NO: 94924 - protein, 66 aa, Unknown
  Obtained from environmental sample
  misc_feature (1)..(66): Xaa is any amino acid
SKNNPLSEKEKAYNKRLARKRVAIEHINAKIKTFKIMAYPYRNHCERHLLRFSLICGIINFENRRK

SEQ ID NO: 94925 - protein, 342 aa, Unknown
  Obtained from environmental sample
  misc_feature (1)..(342): Xaa is any amino acid
MNTIPTTFNERIPSYTVIGGKERLGSTGLSAILLNRGRCYTRRNLFYDLEKTGFDMVVSVEPTPPSYDIDVLAERFPFVRFVLLQQPISLGEQINLAVSEIDSPLFFVLWNDLKIIAGGGAHRMAERLTYSDDSAGENKEKKLFKRLCTVPVIQTSRFETLPTLMVPALQRTKIRTLFLSPTSEGLPSVYPFDGVGIYDRERFIRLGGYDGTFKSAYWQLMDFGFRAYLWGEEISSTQALKLSYESSVPAEENKGGVDYNRFYLKNLAPLFQGDSAQLPLRRFPGFLLQTDGSIFAAWDDFSETRRWVNANRFRWHCDHRAIVKRWDLESAEENFFPGNGGR

SEQ ID NO: 94926 - protein, 290 aa, Unknown
  Obtained from environmental sample
  DOMAIN (223)...(270): Regulator of chromosome condensation (RCC1)
  misc_feature (1)..(290): Xaa is any amino acid
MNGGTISDNSADGDGCGVCVYSGTFTMNNNAAIERNFSSSNSYGGGVYVYSGAFIMNDDAAIKGNTSSVGGGVYVYGGYSPATFTMNGGTIAVNETTGYGLGGGVFVGGNFEMKGGDIMNNTAAKQGGGVCVDSSGNFKMSGGKIYGVDDTNVPSLSNIANGTNPKGVALYNSGGTAKYDGAYASYGTITTTDDTLPPPKPNGPVIIKTLSAGGSHTVAIKTDGSLWAWGYNSNGQLGNNQTTSEKVPIKIGNDNDWAFVSAGGYNTFAIKSDGSLWAWGENRDGQLGFG

SEQ ID NO: 94927 - protein, 378 aa, Unknown
  Obtained from environmental sample
  DOMAIN (1)...(206): Amino acid kinase family
  misc_feature (1)..(378): Xaa is any amino acid
VKDLALLAKTGFKVIIVPGVRENIDAVLKQHDINSSYASTQDSPVRVTTSEGISYVEMAAFHVASRIMTFLSGSRVDAVIGNFVRARGLGVINGIDAEYTGVVDKIYADSLARVLELGMVPILPCIGWSPSGKPYNVPSDEIAIAVSKALGAIKLFIITATEGLNITRLTPKETEDLINTGSNFMRELKLALKASQEGVHRVHIIDGRQEGAVLKEIYSNLGVGTMIYTDEYDSIRPLHSGDLPDILRLMEPLMQKGVLVRRNPEEIQEKKDDFSVLDIDGSIRACGALIDWGEKQGEIAAVATDPNYTDLGLGRKIVGFLIEKAKKSKMKRVFVLTTQTQDWFESLGFKDAPVDSLPEKKRKVYDQARKSKVFALDL

SEQ ID NO: 94928 - protein, 503 aa, Unknown
  Obtained from environmental sample
  DOMAIN (131)...(289): DEAD/DEAH box helicase
  misc_feature (1)..(503): Xaa is any amino acid
ARGITPKDVVKTLCEHSRYDIPAGITEGFAMLMSRYGKIRMLEDKNDPNILILKIDDKAIRLEIGQIKALEKYLVKKDDDFYLELIHRGSVKRELIRAGWPVQDDAPLTKGEDLQITLRGRCLSGRQFNPRDYQVTAALSVTGSGGPGSGYGVVVLPCGSGKTIVGMYIMSLLKTNTLILTTNVAAVHQWIEELLDKTDLSKEQIAEYTGDSKAVAPVTVATYQIIAWRPDKDADFPHFKLFRERQWGLIIYDEVHLLPAPVFRVTAELQAVRRLGLTATLIREDGAEDAVFSLVGPKRYDVPWKDLEGKGWIAEAVCTEIRIDLPEELKIPYAVASQREKYRVASENPLKEDIVTQLIENHGEDQILVIGQYLSQLDSLAKLLKVPLITGKTPNAERERIYGEFKRGELRIIVVSKVANFAIDLPDASMAIQVSGSFGSRQEEAQRLGRILRPKDKDAKHRNALFFTLVSRYTVEEDFAANRHKFLAEQGYKYSIQHWNTTK

SEQ ID NO: 94929 - protein, 265 aa, Unknown
  Obtained from environmental sample
  DOMAIN (21)...(162): Protein of unknown function DUF88
  misc_feature (1)..(265): Xaa is any amino acid
MPLLPFSNFQIGGHQPSEMNQAKLAVLIDADNTQPGIIEGLLDEISKYGIASVKRIYGDWTSTNLRSWKDRLLEYAIQPIQQFAYTAGKNATDSAMIIDAMDLLYTEKLDGFCIVSSDSDFTRLAARLRESGRIVYGFGEKKTPRAFVSVCDKFIYTEILKENQEESEDEDSKHVAKPKKDFKVDQKLLKLLRETVDDLAEESGWAYLGGVGNKINNRMADFDPRNYGFKKLGDIFRAIPQFETEERPQANGMGRQVYIRWKRKR

SEQ ID NO: 94930 - protein, 160 aa, Unknown
  Obtained from environmental sample
  misc_feature (1)..(160): Xaa is any amino acid
MKKLPLQKVFTLLESGPIALLTTACGGKQNIMALAWTMVMDYTPRFAFLTGPWNYSYKALKKTKECVIAIPAVDLAKKSVQIGMCSGAETDKFEKFKLTPLKAENVSAPLIKECYANIECRVIDHIQKHNIFVVDGLAAWIDDKREEKRCFHGIGDGKFI

SEQ ID NO: 94931 - protein, 494 aa, Unknown
  Obtained from environmental sample
  DOMAIN (59)...(288): Glycosyl hydrolase family 3 N terminal domain
  misc_feature (1)..(494): Xaa is any amino acid
MTIRQKIGQCFGIGFSGTSVSDDLRRLVKEYKVGNVILFRDNIENAAQVRSLCNAIQKLVKDETGYPAFIAIDQEGGAVTRLPEDMVNVPGAMALAASGDTGNVSLAARITAAELRRIGVNLNLAPVLDINCNRDNPVIGNRSFAPNAADAASFAVAAVRAFAEEGLMCCGKHFPGHGDTAVDSHLDLPLVDRSLDELEARELIPFRAAIEAGIPAIMTTHILFPQIESEKIPATMSGKILKGLLRERLGFKGLIISDAMEMRAIKDYYGIPQGCVSALAAGVDIVYVCHDPEDMEASLREITFACEDGRINEKELDASMERVLRYKERYGAFGPNAAEDPMEEISRRKEQNTALMRSALAAREKGKAPPPLGGEPFFVGCLAYRATIASTNPLASLSFASWFAEKLGGSFKETAVNPDAEEIAGVVSALPEASSIVLGTYNGNVNLGQIDLARALFEAAQKRKIPFMVVSLRNPWDLSLLPQGVYGLAAWEYS

SEQ ID NO: 94932 - protein, 303 aa, Unknown
  Obtained from environmental sample
  DOMAIN (195)...(302): Transketolase, pyridine binding domain
  misc_feature (1)..(303): Xaa is any amino acid
LGLLAADRIKGGNSRAIAVIGDGALTGGLAYEALSHAGHIGLPLIVILNDNKMSISRNVGGLSKYLSRLSMKTNYQTFRRNFDALAKKIPFVGEAFFNLVLRLKRAVKAVFYTDNFFVDLGFEYVGPIGGHNIQVLTEVFEDVRKINRPVVIHVITRKGKGYGYAEDDPDSYHGVGSFPVDSGIDNCPVNIHADKRLNFTKAFSRALFAAAQRDKNVAAVTAAMKTGTGLSNFAKTFNGRFFDVGIAEEHAVTFAAGLAAEGLKPVVAIYSTFIQRSVDQIIHDAALQKLPVIFALDRSGFVE

SEQ ID NO: 94933 - protein, 264 aa, Unknown
  Obtained from environmental sample
  misc_feature (1)..(264): Xaa is any amino acid
MSLKIKLTIIILVMILVSVAVLSVFTLTRSASLQSDTTQQYAGALAKLNSKEIQRQMEVFTDYGSVLVQIFDGYEGTEMSGRRAMYDDVMHSLIATVDSITGIWTAWLPGTIDNYDSRLGQYNTFFHRRNGPVVKEPAGYDGWQDHLARVTAKGLVSTTGAEPAFKELTDPYWANVAGKGNVPIVSAIFTFKNDAGRIVGLIGINFISAVQTVVDDLVKEVYNGAGMAAIYSDNGTIVAHWDKDRVKDNIKTNAKEKKLLETTL

SEQ ID NO: 94934 - protein, 250 aa, Unknown
  Obtained from environmental sample
  DOMAIN (45)...(228): Peptidase family M48
  misc_feature (1)..(250): Xaa is any amino acid
AFGSAAEDATPEQEYFIGRAVAANILSNYKIWDKNPELTAYLNYICGAIVINSPQPHIYNGYHVAILDSDEINAFTTSGGHIFLTRGLINVAKTEDALAAVIAHEVAHNQLRHSIKSIKTSRVTQAFLLTAGAGAGMIMGMDANEFADILNESVGEIMQTMVNSGYSREQEYEADIAAMCFLAAAGYQPSGLIDMLNELKAVHTLGSGLNRTHPAPGQRIYFAEKALGRYVVADTRPIRQGRFNEMLQRN

SEQ ID NO: 94935 - protein, 403 aa, Unknown
  Obtained from environmental sample
  DOMAIN (152)...(403): tRNA synthetases class II core domain (F)
  misc_feature (1)..(403): Xaa is any amino acid
MENKDIGSAFGSLSKLGVLAMDNEKKLTITLPLESLDDPAKNPVLAHFVVLHGLFKKILTAEGGLLAEASLNDEEKKFISGIAKKRGASDAAFRQIDREIVVYGFTVAEDGSVPAEAAAAALKAAGISGEEIGTLSQQMLETGSWKGKAFRSYNVKTPPTRLTPGRSNPYAKFLENVKDKLASLGFEEFDGPLVETEFWNSDALFMPQFHSARDIHDSYSLTDPAKPGEIAKAKSIEEPWLSNVASAHENGGNTGSRGWSYTFDREFTRRLILRSQGTVLSAKTLPKAKIPGKYFGIVRCFRYDRVDATHLPDFYQTEGIVLGESVNLRTLLGMLDMFAREVAGAKEVKYVPGYFPFTEPSVEVHIKHPVLGWFELGGSGIFRPEVTQSLGVDVPVAAWGIGI

SEQ ID NO: 94936 - protein, 483 aa, Unknown
  Obtained from environmental sample
  DOMAIN (191)...(469): tRNA synthetases class II core domain (F)
  misc_feature (1)..(483): Xaa is any amino acid
VGEIRRETMVFFELTDLGRAWKEKGSPEERIIELVKTKSGKLKLPDIAKALNIENKDIGSAFGSLSKLGILAMDGDKNVIMSKEPSVDHFAILRGLLEKGLKGAISEASLNAAEKSAMSGIAKKRGAADAPFRQIDRETVYFGFTTAEDGSVPALEAAQALKAAGITGDEIGTLTQSMLEDGSWKGKTFRSYNVKTPPVRLTPGRSNPYAKFLENVKDKLASLGFEEFDGPLVETEFWNSDALFMPQFHSARDIHDAYSVADPANKDGIARAKSISEPWLSNVASAHENGGTTGSRGWNYAFDREFTRRLILRSQGTVLSAKTLPKAKIPGKYFGIVRCFRYDRVDATHLPDFYQTEGIVLGENVNLRTLLGMLDMFAREVAGAKEVKYVPGYFPFTEPSVEVHIKHPVLGWFELGGSGIFRPEVTQSLGVDVQVAAWGIGIDRMALMALGLNDLRDLFSGNIEDVRLRRLTETNKIKEKANA

SEQ ID NO: 94937 - protein, 274 aa, Unknown
  Obtained from environmental sample
  misc_feature (1)..(274): Xaa is any amino acid
RTSTEIEENRNAEYNQNVGHKLEQHLVNLKARRSFAITEDKDQLLADTIDKWFEEFDENLKHLFEDDSAQLLFDSDKTKFSIQQKGKPQYTFQTLSAGYKAIFDVYADLLMRTEYFSISPTALEGVVFIDEIDSHLHISLQRLILPFFIESFPKVQFIVTTHSPFVLMSSRDILVFDLGKEMPYSISQVKSQNEILNEYLGVPTVMPVWAERSLTDILGKYLNREQNNISLTALKEELINAGLEEYFPDSAAKILEANNDSPDTARMSQPCGPC

SEQ ID NO: 94938 - protein, 281 aa, Unknown
  Obtained from environmental sample
  DOMAIN (1)...(281): Alpha-L-fucosidase
  misc_feature (1)..(281): Xaa is any amino acid
FGEFSAKEYNPAEWARLAKMAGMKYAVLTAKHHDGFCLWDTKLTDFKATNTPAGRDLVKEYLEAFRAEGIKVGLYFSIIDWRHPDFPHYGDRQHPMRDNPAYGNENRDFNRYLEFMHGQIKELLTGYGKLDIMWFDFSYTNPNMDLRGSAWKAQEIINMVRSLQPHLIIDNRLEGSGENSATILTANPTDFAGDFACPEQMIPPRGIVNELGNAVPWEACITMNNNWGYSSSDKHWKSAEMIIRMLVNCVSKNGNLLLNVGPDAKGRIPSASADILETVGR

SEQ ID NO: 94939 - protein, 302 aa, Unknown
  Obtained from environmental sample
  DOMAIN (61)...(257): Reverse transcriptase (RNA-dependent DNA polymerase)
  misc_feature (1)..(302): Xaa is any amino acid
LEVELLSLCKELETRTYELKPGICFINELPVKREIIAADFRDRVVHHFLYNRIYPIFDRKFIYDSYSCRVGKGTLFGIKRVMGFLRDDVWVLRLDIKGFFMAIDRDILFGLLMNGLRRTQPVCELLEFLIRKIVFNEPLKNARFKSPKSAWNDLPKDKSLINSAPNCGLPIGNLTSQVFANVYLNPLDHFVKRELKIKHYGRYVDDMVLIHRDKQILLNAIFYIREFMRNRLNLTLHPKKIKLQPSTKGFAFLGAYIYPHGIVVGKRVANNFKGCIFSPLANFEKQTQRVQSYLGLLTHFGG

SEQ ID NO: 94940 - protein, 327 aa, Unknown
  Obtained from environmental sample
  DOMAIN (9)...(322): Aminotransferase class-V
  misc_feature (1)..(327): Xaa is any amino acid
MWRVQLYKINYDEKEYQAVREVLDSGWLTMSQKTYDFEAAFSGFLGYDAQSLAVSNCTAALHMALLALGIGKGDEVITPALTFIADQNVTRMAGAENVLADITSMEDWSMDGDDIEARISSKTKAVIIVHYAGYACDMERIAALCKKRNLFLIEDCAHTPGADYKGQPLGTFGDIAAFSFFGNKNIAAGEGGMVVTRNPELFAKLKSLRSHGMSVQSFDRYKGRASSYDVESPGFNYRIHEIASALGLVQLRKLEDANNKRKNLVEHYFRRLDDVQSITIPYRHFSRGKPNYHIMPVLLSDSIDRNAVIESMKQDGVQTSIHYPSIQ

SEQ ID NO: 94941 - protein, 70 aa, Unknown
  Obtained from environmental sample
  misc_feature (1)..(70): Xaa is any amino acid
MVTDSDLDKLRSLQEIIYEKIGLEKNIQEIPKLLSTQEELLNRLKKTFIEKNSEYEKIKAEEIDFKNKLG

SEQ ID NO: 94942 - protein, 278 aa, Unknown
  Obtained from environmental sample
  DOMAIN (1)...(234): Uncharacterized ACR, COG1579
  misc_feature (1)..(278): Xaa is any amino acid
MISDLDKLRSLQEIIYEKIGLEKNIQEIPKLLDTQEELLNRLKKTFIEKNSNFEKVKAEEADFKNKLAEVESAREKSEKNMDMVSTQREYEALDKEIKEASEKEQQYRKELQQRGSILCELDDQIKQQTALIEQQEKELEERRKKIEAEINDKKKQIENLKKKEGKLTENLDSEVVFKFERIIKNKMGIGIVAIKGNVCMGCHMILPVQFANEVRIGEEYVFCPYCSRILYYEESGEGEEEFFNTEDTGALSDLDESEEDEYEDDDEEEEIVNIDSEE

SEQ ID NO: 94943 - protein, 351 aa, Unknown
  Obtained from environmental sample
  DOMAIN (71)...(168): GAD domain
  misc_feature (1)..(351): Xaa is any amino acid
MLVHVFKKTLGVDLPSHFRRLSHEEAMECYGSDKPDLRFDMPLQDFAPYVETGGFQAFKDALAQGETERQQSAAKKVTIAGGGVKALVVKGKADYSRKQIEELEAHAKIYKARGMAWMKVTESGSLEGGVAKFFTDNAAQIISGLGAAPGDLILIVADSRRNVANTALGAVRSKLGKDLGLGDKGNRFEFVWIVDFPLFEFNEEENRWEAAHHLFSWPQEKYHATLESDPGAVKGDLYDLVLNGYELASGSIRIHDPVLQQRIFSIAGFDPAEAEKRFGFLTGAFKFGAPPHGGIAPGLDRLVMLMAGQTSIKEVIAFPKNSFAEGLMDDSPGEIDQRQLDELRITIRKEK

SEQ ID NO: 94944 - protein, 56 aa, Unknown
  Obtained from environmental sample
  misc_feature (1)..(56): Xaa is any amino acid
LREYLELLWAFIVIGATTFGGGYAIVPALERELIRKRGWISMNEVLDFYTIAQITP

SEQ ID NO: 94945 - protein, 308 aa, Unknown
  Obtained from environmental sample
  DOMAIN (48)...(179): Phage Mu protein F like protein
  misc_feature (1)..(308): Xaa is any amino acid
MADFIPKAATDYIKNKNLKVGFSYKDVWHEEHATGFTVAKAMQYDVLSDMHNAATKAVENGQSFETFKKNLKPTLQQKGWWGRKEMTDPLTGKTVDAQLGSDRRLKTIYSVNMRSAYQKGQYDRAMESDLHPYLMYRTGPSVKHRKEHESWNGLVLPKNDPWWDSHFPPNGWGCKCYTRAVTESQRKKYEAEGIPVPQRADGTGGGTLKIKTEAPPVKYKTYINERKGTVEQVPEGVDPAFNWNQAKARNNITLQKLEDSKRYYEKAADVKPNEDSTKSMPDGKPDKFVLDEKKVAQALHKAGNVHKR

SEQ ID NO: 94946 - protein, 88 aa, Unknown
  Obtained from environmental sample
  misc_feature (1)..(88): Xaa is any amino acid
MKIIVDVNLAVRWANMLSSRGIESVHWTTIGSANAQDIEIMSFARENGYSVFTNDLDFSAILVSTRAAGPSVIQIRAEDTRPESHLIE

SEQ ID NO: 94947 - protein, 402 aa, Unknown
  Obtained from environmental sample
  misc_feature (1)..(402): Xaa is any amino acid
MARFKQTDNTQGQFMAVNLKEQLLPDTFEWTIDYLINKMDMSLFEKKYNNDETGAAAYPPRVLLKIILYCYSRGIITSRRIEKACRDSIIVKALAEDSEPDHATIASFISRNGEAVKDLFGQILTQCAQLNLITKEMFAIDGCKLPSNASKEWSGSIRELRRKRDKLKEHIEKIIKQHGELDKDEKAKKIQKPYAKTMGDDKERREKSVERLEKRLEKLNKFLKEAEPRKGVSAEEVQSNITDNESALIKSPHGYIQGYNGITIADSGSQIIVSAEVIGSGPESGSFPKMLDSFEENMKKITGKEEPLKKALLVGDTGYFSEANLQEAEERGINVLIPDPQFRQREPYYAEKKKEKVEKKKRYTAEDLKYNERNDSFICPCGKTLVYKGDVTLRNNSGRKYM

SEQ ID NO: 94948 - protein, 305 aa, Unknown
  Obtained from environmental sample
  misc_feature (1)..(305): Xaa is any amino acid
MLIIAVNIIARIVMFVEYRSLWLDEALLAESIVSRNWAELLVPPLSNGQSAPILYVIAVKAICSILGASENSLRLFSLFSFLGLLVCEWIFLKKILKIDNIKTGLIVALTASVPNYIYYSNELKPYMSDAFFVVLALLLHAFYTQNKLSLIKLTVFYVLILGFCTPAIFFIGGVLVTEFLTLALARDKKRAFHVLISGLSIVVSFGLYYYWWMLPVAGAMDDYWNKSLDRTLFEVFSIALVISSYFLYKKTKLPLTYLTIFYLLILGFCPPAVFFASGILVVELLIEIFARDKKQLVSISAHVCR

SEQ ID NO: 94949 - protein, 229 aa, Unknown
  Obtained from environmental sample
  DOMAIN (47)...(229): Pyridoxal-phosphate dependent enzyme
  misc_feature (1)..(229): Xaa is any amino acid
MSEGRFGEYGGQYIPETLMNEVQALEKAYTHYKNDPEFTAELNALFKDYAGRPSMLYFAEKMTHDLGGAKIYLKREDLNHTGSHKINNVLGQVLLAKKMGKTRVIAETGAGQHGVATATAAALLGLECEIFMGKEDTERQSLNVYRMALLGAKVNAVTSGTMTLKDAVNETMREWTRRVSDTHYVLGSVMGPHPFPMIVRDFQSIIGREARQQILEREKKLPAAVIACV

SEQ ID NO: 94950 - protein, 84 aa, Unknown
  Obtained from environmental sample
  misc_feature (1)..(84): Xaa is any amino acid
MNKIVSIYNISDYKLKVEFINGEIRIYDFSSQLDFPAFRPLKDKKIFSKVSLDRGIPIWLDGEIDIAPEVLYYDGVPEPQSGSL

SEQ ID NO: 94951 - protein, 948 aa, Unknown
  Obtained from environmental sample
  misc_feature (1)..(948): Xaa is any amino acid
VETSVTPAAGTQLSGNGLETYNLQSTWQKATYNIPTTNNGTTKRLVFSWRNDASGGTQPPIAVDNIMISPDPFANVSSGTGGTSATYTTPAATVAMSGYAYRCIVTNEFGQSTTSNYATLTVSKANPAYTTPTGLTATYGQTLANVALPNGWAWENTTTPVGNAGARTHKATFTPADTDNYNTIPSIDVTINVAKATGSFGSPSALSKTYETGLKLSDVTPPAGYVWDAPTTDLYAGNGQSFAAIYTDPSGNYESARGDITVNVAKAGGFHNTAPPSRQISASNTETHTIDLGILAFNENDHGAITYSLGAFTGDTDILSAPPSLGEDKLTLSYTGNRKTSGRATQVINIVSGNYRDTTTTITFTATAKEEVKITGIAAQNSVYDSNPKSGYTGTLSSGIYTGALLIRYTGSGIDGISTTAPTDAGTYTIKISLPDTAKYVGEWSDDFTIEKANPAYTAPTNLTATYGQTLADVTFPTDNWAWQEASTTEVGDAGQQKHKATYTPDDTHNYNEKKDIDVTITVARANPDVTFPTSATIIYGQTLADAVFAGQSSTTAGKFAFAESTTSLSVTQSGAKHEVAFTPADTANHNTLTKDIAVTVKKASGLSAENRTILISTSNTSPDKFELSDIAVSSELDHGAISYALGDYNAGDNVLAAKPSLSTSGDTLKYTGTGKTSGTATQEIIVRSDNYDNATVIITFRATPKTEVAIGGLTVVENIIYDGTAKRGVSGTATSGAYKGVLTYTYTGDGIATPTTEQPKNAGSYWLTVSVPSTDPGYFGEETYPFTIAKKQIAKPEVTAANLVHNGKEQSAGIAANDAYTVTDDRGTAAKSYTAKVVLKDKANHEWAGGGTDDLLLTWAIAEAGTPIFSSRENPIVGRIGVQTIDNTIMLSNLPSNAKVEVYNLQGKRIYSTTSHSPLATSLKIKVQTKGTYILKINNQIIRMPVM

SEQ ID NO: 94952 - protein, 151 aa, Unknown
  Obtained from environmental sample
  DOMAIN (43)...(77): Putative Fe-S cluster
  misc_feature (1)..(151): Xaa is any amino acid
MTIVLTTALLSLAIAFILGLALGFFKEFFAVEEDPLKGEIRAVLPGANCGACGFPGCDAYAASVAKGEAGINSCTVGGQAVAEKIASLVGGNADVKPMVAMLACRGTHEKALLKGEYIGVKSCRAAKISTGSIKRCTWGCQGLATYKGMQV

SEQ ID NO: 94953 - protein, 294 aa, Unknown
  Obtained from environmental sample
  misc_feature (1)..(294): Xaa is any amino acid
KSWIKNVYSGRETMAGALCVTVELPPNTSTRVQFSLALDFPLVRMNGLTSVKKYTVFYPDPDKRVKPMLSEFIEAIPRLESVIPQNYNKLVPEHSSKNFKTLAINTMSFLPEATVWDKDDRFLVRECADYPFFNSLDVYFYGSFSLLALLPRLDGCVMRNFADAVLAVNPQTRRHNSYVNLPYADLPDQKLEGPRGVKGAVIHDLGSPFDALPDAYDWHNVKEWKDLAPKFVLMVIRHYQMTGDISVLSYCRDAVYSAMEYLEKLVEPGQVFPLTHGTDDTFDNLASHGISVYC

SEQ ID NO: 94954 - protein, 291 aa, Unknown
  Obtained from environmental sample
  misc_feature (1)..(291): Xaa is any amino acid
LILAHRQRGLTPEKPSIRGTSQNPDTYFQSREGVNPYYTKVAGIVQAEMDKFAKITGRSYHVYDYFGAKDAEKVIIIMGSGADTCEETAEYLMGQGQKVGVLKVRLYRPFDAELFVKALPASVKSIAVLDRTKDPGALGEPLYEDVRTAIAEMQSAGKTPFKGNPVVVGGRYGLGSKEFTPAMIKAVYDNLSGKQIHSFTVGLKDDVTGLSLDYDEHFVIKEEGMSEALFYGLGSDGTVGANKNSIKIIGEAKPNLFAQAYFSYDSKKSGGFTVSHLRFGENPYAGHTSSP

SEQ ID NO: 94955 - protein, 288 aa, Unknown
  Obtained from environmental sample
  DOMAIN (119)...(254): Thiamine pyrophosphate enzyme, C-terminal TPP binding domain
  misc_feature (1)..(288): Xaa is any amino acid
CGETPYVKILTQLFGDRMIIANATGCSSIYGGNLPTTPYCQRADGRGPVWSNSLFEDSAEFGMGMRLTSDKLAEHAREIAVKAKSEGIAVSIIDKILANEQKDDAAIDEQRKYVDELKGALKNDSKPTAKLLVSLADHFIKRSVWSFGGDGWAYDIGYGGLDHVIASNRNVNLLVLDTEVYSNTGGQMSKSTPVGAIARFAAAGKEIVKKDLGAMAMSYGYVYVAKVAIGANMLQTIKAIREAESYDGPSIIIAYSHCINHGIDMSKGLDQQKAAVTSGLWPLYRYDP

SEQ ID NO: 94956 - protein, 334 aa, Unknown
  Obtained from environmental sample
  DOMAIN (244)...(334): GGDEF domain
  misc_feature (1)..(334): Xaa is any amino acid
VTGERKIIIVVDDSLENLAILKETLKSAYEVYPCPSAAKMFELLKHVMPDLILLDVEMPDMNGYEAAKKLKDNEKYKQIPFMFLTIRDDVKSEMDGLNLGAVDYIHKPFVAPVLLQRIKTHLALVDYEKIEIISIATVTAMKHIKEGFVLVDADNNYLSSNPAMAEMLPGVTKLAKGESIFSARGWPEELNTIEHGSVEFSITDENVRYFRASVSPVFVENKTLIARTFLFTDITDNVNFLKELEKAAYIDTLTGLYNRKHFTELAEMDIQRAARLNQPIFTAMLDIDFFKKINDTYGHTAGDMVLKTTAETIHRSIRSYDLLGRYGGEEFILL

SEQ ID NO: 94957 - protein, 232 aa, Unknown
  Obtained from environmental sample
  DOMAIN (69)...(144): Hpt domain
  misc_feature (1)..(232): Xaa is any amino acid
VITKPIDVMEMDSVLRKWVRKDTHENALIADAPVSPVEKKDGDFVIKIPGVDINKGLSLYAGDTDIYIPLLRSYIANTPETLIKLKAVTKETLSDYVISVHGLKGTSAGIGAEKIRAKALELEQMSRAGDLQGVLQKNGKLIADTEVIVANITAWLKDYDSMNAKPRQKAPDRKLLSKLKQCCENYDMSGIDEVMEELDKTDFEEDADLIAWIKEKIVISEIGEVAERLAQY

SEQ ID NO: 94958 - protein, 84 aa, Unknown
  Obtained from environmental sample
  DOMAIN (4)...(49): SpoVT / AbrB like domain
  misc_feature (1)..(84): Xaa is any amino acid
MEVAKITSKGQVTIPRDIRVKMDLKKGDKILFFEENGKYFLQNSNSIALKKIQDIMKGEAEKAGFNDPDDVVKYIKSRRKIKSK

SEQ ID NO: 94959 - protein, 390 aa, Unknown
  Obtained from environmental sample
  DOMAIN (165)...(389): Domain of unknown function (DUF323)
  misc_feature (1)..(390): Xaa is any amino acid
VFRSAGLINKTYGDVFTNAITGEHKGSGAITYSSSDTDVATVNNSGQVTIHKVGSAVISAEKEADLVYAPAQKVYNLSVNPKPVTITVSVENKQYDGDRTVKNTGTPVINGIINDDNVTVNEGTAEFESANIGVQTVTFSGWSLGGADAGNYTLSAQPSATATINLIEMVWVSAGKFMMGSPSTESYRDSDEGPQHSVTLTKGFYMGKYPVVQQQYEMLMGTNPSRFTSDPQAGEFISWRPVEQVSWYDAIVFCNKLSMKEGLSPAYSINGSTDPAAWGTVPTASDTDWNAAVLDMSKNGYRLPTEAEWEYACRAGTTTVYNTGDTISDDTGWYTTNSGAKTHEVGLKPPNAWGLYDMHGNVWDWCWDRIGTSTSSVSDYYTNSPALILG

SEQ ID NO: 94960 - protein, 260 aa, Unknown
  Obtained from environmental sample
  misc_feature (1)..(260): Xaa is any amino acid
MKRSWKVLIVLVIISIAGGAFYFYKQKNSKKNATLETVYPTIGNIVQTITATGRLQPIDQVDVGTEVSGTVSKIYADFNQQVEKGQVLLQIDPLKAKAKVQQTRAAYRSAENERQYQKRNYERTLELFEKGSVAKIELETAEYKYINAQNSLINSKSNLEQAELDLDNCTIKSPIDGVVLSRAVEAGQTVAASLSAPTLFTLARDLNQMEVKADVDEADIGMVKTGQKIEFSVDAFPNDKFTGEVQEVRLFSNISSNVVT

SEQ ID NO: 94961 - protein, 1004 aa, Unknown
  Obtained from environmental sample
  DOMAIN (1)...(147): RNA polymerase Rpb1, domain 1
  misc_feature (1)..(1004): Xaa is any amino acid
DKLAAELREKMIEKGAKSDKKLLKRIEIVENFRNSQNKPEWMILDVIPVIPPELRPMVQLDGGRFATSDLNDLYRRVINRNNRLKRLQTLNAPDIIIRNEKRMLQEAVDALFDNSKKKKVVKGSSNRPLKSISDMLKGKQGRFRQNLLGKRVDYSGRSVITVGPDLKIWQCGLPTKMAIELFKPFIMKKLVDKDVVYNIKKAKMLLEAESAEIFAILDEVVKEHPVLLNRAPTLHRLGIQAFEPVLVEGKAIKLHPLVCHAFNADFDGDQMAVHVPLTQAAQMECWTLMLSARNLLNPANGRTIVFPSQDMVLGINFLTRVKPNGKRPENLNPESKSRPPYYSSPEEALMAVENKFLDWGSLIRVKPVKFPIWDKIDHETVIPEDGIIETTVGRLVFNEEQPKEIPFINYEMKDKELRALIEYVFKKNGSWITVKMLDAIKSTGYRYATVFGATIGIDDIVVPKEKPEMIDKANMEVEAIQTQWRRGIMTQEERYNKVVDVWTKTHEELTNIMMKTLEADHDGFNSIYMMANSGARGSRNQIRQLAAMRGLMGKPSGEIIELPIRSNFKEGLSVIEFFISTNGARKGLADTALKTAEAGYLTRRLVDIAQDVVVNENDCGTINGISYTAVKEGEDIVEPLSDRIIGRYTIEPVKHPFTGEIIVDVNEEITEEIAKKITAAEVNSVRIRTVLTCEAKHGVCRMCYGRNLATNRTVDIGEAVGTIAAQSIGQPGTQLTMRTFHIGGIAAGQTREDTLVLKYDAIVKALPDNYIPLSNPLNKKLTGITPRKSEMVVQRIIASYNVTRWQTLRVREGDTVIAGDIIGIDENGKEVRAPQHAVILLEKKTHMVLASVTDNVLPLKVGSLLFVTSGEEVKAGTPFAKFDPYSEPIIAELAGTIYYENMRLGQNVKETIDEKTGRKQLVALEARKKGEEQLRVRITPTEGESREYMMPGGAILVVEDGKTINLGDTIARTPREQTKTKDITGGLPRVAELFEARRPKDPAV

SEQ ID NO: 94962 - protein, 383 aa, Unknown
  Obtained from environmental sample
  DOMAIN (18)...(112): Oxidoreductase FAD-binding domain
  misc_feature (1)..(383): Xaa is any amino acid
MSNTDPNASIAKDSSDEGYLIVEKALLAPETWKFSVMAPMVAVGMKPGQFFMVQPFENSERIPLTLAGGDASKGVFNFVMVEAGATTKAIGKLNTGDRLFAVAGPMGKPTELAKTGTIVLAAGGYGSAAILQAAEELSSAGRRVITILGGRSAERVLLADELNSASTELFITTDDGSLGQKGVVTDALKKIMSREPIAQVVAVGPMPMMEAVSELTRPAAIPTLVSLNALMIDGTGMCGCCRVSVGGKMLFACFHGPDFDGHQVDYKMLRSRQDWYRNQERTALTDHECRIGRKVLQMPELAIPQIEAVADVDLETADLVNLKATQRMKIPAQMMACQDPSERITNFMEVALGFSHAQARIEAARCIKCKKPDCISGCPVNID

SEQ ID NO: 94963 - protein, 302 aa, Unknown
  Obtained from environmental sample
  DOMAIN (150)...(183): Tetratricopeptide repeat
  misc_feature (1)..(302): Xaa is any amino acid
AFFFIYLNVYAQSRAAEALAEYRAGNYERTIQICRDDISENPNNIESHVIICWALMRQSRYEEALRFARAGRAINRFDVRIVQILGEINYFQGLNNEALQYFQEYVSLTSEGQRVETIYYYMGEIFIRQGKFRHADIALSTAVHWVPGNAAWWVRLAYARENTGDLSSALEAYEKALSLNAQLSDAQRGLDRIRRTMGGGTQASYSVQSQPAAAATPANTQTRPNLTGSIIINNAMPGVGDTLIASYTGNGSGTAAWQWLADETVIAGANSSTYVVGSNDLHRTIRARVSYSGQSGSVTSAA

SEQ ID NO: 94964 - protein, 265 aa, Unknown
  Obtained from environmental sample
  DOMAIN (99)...(211): Response regulator receiver domain
  misc_feature (1)..(265): Xaa is any amino acid
MPCMDGWRLAAEIRNNQFNNAHLVLLVPLGRANVHGEHHADTEKLPSEWFNARISKPVKRKELVETLRIVLQGHPETSGEIHRKHEEFLAGIAGENTKPVVLIAEDNQINQKLFGMIADKLGLSAILADDGLDALEKAHTHNPDLVLMDIQMPRMNGYEAAEKLRERGFKNPIIAITAGLFADEGEQCLRSGMNDILLKPFRKPELEKVVQKWLLSRKDSDRVPVVEQAVPTELSGLNAEISQAKPPGNKVFCVQELRESFMDND

SEQ ID NO: 94965 - protein, 230 aa, Unknown
  Obtained from environmental sample
  DOMAIN (169)...(229): His Kinase A (phosphoacceptor) domain
  misc_feature (1)..(230): Xaa is any amino acid
MKITKDLFFHFFSESDLALAILDTEGFITASNRQFENLLACLSTSAEPQEPMNPMNTEAQKENVMPRSIRDILSPRQTSMFWASLSSLINKERKETNFETELHPRHEEPGITHWYNFHTWLIEGHEAALSAAPSAEPSIGIIIEDKTLIHEEVKHLVEDKRVAERAMEAKSQFLANMSHEIRTPIQTIVGMTELLEDTALDHEQAEYSRQVKFSAEVLLSLINDILDYSK

SEQ ID NO: 94966 - protein, 292 aa, Unknown
  Obtained from environmental sample
  DOMAIN (187)...(292): Thiamine pyrophosphate enzyme, central domain
  misc_feature (1)..(292): Xaa is any amino acid
DYVFEFMNKKGINTVFYLPGGGCMHLLDSLGISGLNAVSLLHEQAVAVACEAYANTTGSEGMALITTGPGGTNTITGVLAAYLDSTPCFFVSGQVKTTDLKSRFGLRTHGSQEADIVGIVSSITKYAVMVTDKNSIRYHLERAWHEMTSGRRGPVWIDIPLDIQGAQIEPDSLEGFTVDKTDNKSIDINTVIDALNRSKRPVIIAGNGLAGCKNKFYKLMDFLQIPVIPTWKAMDYVPNGHPLYAGRAGGMGDRHGNLTMQNSDLILSLGSRLDFSITGFDRSEWAVKAKKI

SEQ ID NO: 94967 - protein, 222 aa, Unknown
  Obtained from environmental sample
  misc_feature (1)..(222): Xaa is any amino acid
ASLSYGLLYHQMPTGYKIYRSTSSSGSFIQIGSSTSDSYIDTGLSVNTTYYYRITAYNSYGESSQSRTVSATASSDTWTTVTNLDQINGTWKSYIEEEGILESLESFQGITFEDITYNAKEETTYTINASAKTRTVSFKIISTLSGSDSYFNDVWNFFKSTSPKPGTFNGITYTSEINESTHTITYTMLPVTESFEIAEFDGWQINQNGTRMRFLGKTFTKQ

SEQ ID NO: 94968 - protein, 89 aa, Unknown
  Obtained from environmental sample
  misc_feature (1)..(89): Xaa is any amino acid
MFGLKRNYSKQLDFWLNEILAKLNVIAFDDASAVVYGDIRTSLEKSGQILDNMDMLIASSAISVNAILVSHNIKHFSKIKGLKVEDWYR

SEQ ID NO: 94969 - protein, 92 aa, Unknown
  Obtained from environmental sample
  DOMAIN (11)...(67): Hemerythrin HHE cation binding domain
  misc_feature (1)..(92): Xaa is any amino acid
MLSLTKDMETGVEKIDSQHRELINRINNLIAAGEKAASKEETQKTIDFLGEYIEEHFGDEQEIHLKSKYPKYEEHKAKHAYYVNDFAKLKTN

SEQ ID NO: 94970 - protein, 194 aa, Unknown
  Obtained from environmental sample
  misc_feature (1)..(194): Xaa is any amino acid
VKINDSLGIKTPEWAKHSPYDSYFNFIAPEADRYAILLDAISALKFNSTVISVEGNRHIFIFPPGQKSLRAAGGIFPFSGTNPYLFSAHYDRVSGSPGANDNSIAVFHLLKAAVTLAQKNIDRWMIVFTDKEELSAGESLEKQGSFTLAKKIKSWGLEKAKIFNFDACGTGGVFIISTTTDLILKSGSEDGNYP

SEQ ID NO: 94971 - protein, 180 aa, Unknown
  Obtained from environmental sample
  misc_feature (1)..(180): Xaa is any amino acid
MKKIFLILIALSVLTLSCCDKGKKLPDNSNASSENVSSKEDFVIKENILVEYKGNSSEVIIPKGVTSIGDYAFYQKKNIESVIIPNSVTSIGDYAFYDCYLTSIIIPKGVTSIGNHAFDDCMLLDVTISNTVTSIGNFAFSKNMIRNITIPNSVTVIGKGAFADNNSGDVVKILKITIGT

SEQ ID NO: 94972 - protein, 207 aa, Unknown
  Obtained from environmental sample
  misc_feature (1)..(207): Xaa is any amino acid
MAKIQDLIERAERLHNSKITEPAFKTWRNDSIRFLQKVFGAESSEVVTFENIEFSITYLSFDFLRFNWKENILREKDTFEKGLKYAIYYLKTFESEILHDVDIEERGRKGLNNASYKESHKRNIFIVHGHNNGVKDKVANFITKLGIEPIILNDKINRGHTFLEIFEEYFDIKVAIIIFTNDDTSNDGSEYENRAGKNLIFEAGYFL

SEQ ID NO: 94973 - protein, 588 aa, Unknown
  Obtained from environmental sample
  misc_feature (1)..(588): Xaa is any amino acid
MPANPSGVSSNKGGGDPRARVTQMGVLGVVSGQVKGKSVASADVFGKGGFSNDIDAILSDVGGLKSGGDGGAGRKGTAGIGYGAGYGSGFGGSGGGADDLLGGLMGGSGGGLPLKKKTGELKVTSPDFLKGGNLTGGRSRASIQRVVMQNMAALRYAYNRRLRDIPDMNGKVTVKFAIDEFGKVIFAKVVESTLFDHELENTVLSKVNGWNFERIDKPGDVTEVTYPFVFFHDSIPLQKYLGPDAYNGAFAAASNLRYWWNTDFALPPKSKYPTPDKLNKIEGALDIYSAARDNGYLNKLTGRSAEDYKLYLKIRKDYAHSPAFYFDMASWFYSLDDKETALRILTSIADLELENASLYRLLGYRLKEHGEYALEKFVCGKVLIWRPMEPQSYRDYALALADNGETQTALDYLYGLLAKTYPKNIRDRSRGIEETVVTEINHLIAKDSTLNTSKIDKRLIINIPVDIRVVINWNMNSADINLHIKDPNNEECYRGRRETSIGGRISADIKDGYGPEQFLLKKAARGKYRVYVNYYGDNQLTDAGPSTVMAEIYTKYADATERRQVVCLQMSNATKNEGNFVEVAEFEF

SEQ ID NO: 94974 - protein, 762 aa, Unknown
  Obtained from environmental sample
  misc_feature (1)..(762): Xaa is any amino acid
VFEEIEQRKVDPGLLEKVEGNNFRTRIYPIPANGTRTIAIGYEEELTLEKELLQYRLPTAYPYPIEKFKVTATVWNSAREPIAPDIKNGLRFNKEGEKYTASFARKKYSPARELSFALPVPAGIPQIVMQPAQGSYYFLASVAPKTDQRKRRWDNSLAIVWDVSLSGSQRDLTREMEMLNIIFAEKKEADVNLYFLNNKNTHKGNYKITGGKWDKLKSVLDSAVFDGGTDFSQINLNNIIGKEILFFSDGISTLSDADISADDTAEIRPIHCVVSSAKADYSAMKLIADKTKGTFMNISALSPERLKNELSYESPLFLGAEHGEAVREVYPSIVTPVYGNFSISGIADTNSAEITLLFGFDSTVETRITVKLDAKSARSPVDAHKIWAQKKIAELESDYDDNRVEIAELGRQFGIVTRNTSLLVLETADDYVRYGIAPPADETELYAEYQRRTGNTRSGFDVSKRNANGINYSGVTGMGFDVDFKSQYSRSGSDIDAVLSGVGGLKSGGDGGAGRKGVAGIGYGAGYGSGFGGGGGGVDDLLGGLMGGGSGSGTTRESSRDERVANLVKPKEPSEERKIKPSNSGGVSSNKGGGDPRARVTQMGVLGIVSGQIKGKSVASADIFGKGGFATDIDAILSGVGGLKSGGDGGVGRKGVAGIGYGSGYGSGFGGGGGGVDDLLGGLMGGGGGGLELKKKGELKVSSPDFLKGGALTGGRSRASIQRVVMQNMAALRYAYNKRLRDKPGLTGKITVKFAIDEFGRV

SEQ ID NO: 94975 - protein, 331 aa, Unknown
  Obtained from environmental sample
  DOMAIN (96)...(214): Histidine kinase-, DNA gyrase B-, and HSP90-like ATPase
  misc_feature (1)..(331): Xaa is any amino acid
AILGITEIQMQNGTLPADIKEALNKISTSGYLLLGIINDILDMSKIEAGKLELAHLHYETASLISDAVNMNIYKYDYKPIKFSLVVDENIPVKLIGDELRIKQILNNLLSNAYKYTDKGSITMSINAEYPQQENSNQLTLVFRVTDTGQGMTREQLDKLFDEYTRFNMETNRAVEGTGLGMSITNNLVRLMNGGISIESEIDKGSVFTVRLPQHIADSKTLGKKIADNLMQFHHAHARQANKTLQLVREYMPYGRVLIVDDMETNLYVARGLMAPYCLSLETATSGFMAIEKIKAGYTFDIIFMDHFMPKMDGVDTTKIIRNLGYTHPIIA

SEQ ID NO: 94976 - protein, 510 aa, Unknown
  Obtained from environmental sample
  misc_feature (1)..(510): Xaa is any amino acid
MSLADELRTLPKIPVMDQWVAAVEKGKHIRIKESDYNEEQAAFMSVYGIKSMLLIPIFTHSNLWGAVTFQDHTNDRYFDDGCFDLLRTAARVFSNAIIRAETELTAKKAIESLKRREKMADTLNRAAVIFLSNSKEKFEETMTSGVGEIADVFDLDRFSIWRNYVKPDNLYVSQIYRWDRKSGGTTIPTKGLEDVTYKQFASRWEALLNSGETINSPVKFLPEADMLKSFGSISVFVTPLFFNNSFWGFALLEDRHNERFFEPDSVEIIRSATFLCANTVIRADMEREIADANEFNYAILEASPIGFTVFDEDLHVIDCSEVTLKTLGTTRKYYLEHFYEFSPEYQSDGLKSADKAVEVMKRAFKGEKLVLEWENCTVMGEIIPYEVTLVNTTYKGKNVVLGYQYDLRSIKKMTESIREQGEQLKMRLEQQELLSELSRGFISSGDSQSLVNEAVAKMGRYHDVTLVFVFTIDYDHKNTHLAYHWTADGAPPRMAIANLYEYIMNIFPLT

SEQ ID NO: 94977 - protein, 286 aa, Unknown
  Obtained from environmental sample
  DOMAIN (91)...(210): Histidine kinase-, DNA gyrase B-, and HSP90-like ATPase
  misc_feature (1)..(286): Xaa is any amino acid
MEIQLQKDDNPPDTKDAFEKIYESGNLLLNIINDILDFSKITEGKMEIVPVRYDIPSLINDTIQLNYLQCENKPIKFIVSVDADTPLELFGDELRIKQILNNLLSNAFKYTNEGEIEMSVFSEPSGGEVSSDNVIIVFRIRDTGQGISQEHIGRLFEDYMRLNRDINRSVTGTGLGLSITKRLLNLMNGEITVESEPNKGSVFTVRLPQKRFGDAVCGAENVRRLREFNFPGTAIAKKTQIVREYMPYGSVLVVDDVKSNLFVAKGLLALYGLQIDAIDSGIEAVK

SEQ ID NO: 94978 - protein, 302 aa, Unknown
  Obtained from environmental sample
  DOMAIN (151)...(231): Cache domain
  misc_feature (1)..(302): Xaa is any amino acid
VLIEQTENELLRLAQSKAAVSDEKMSATAEHIRTISQIATNIKSNPDKYGRREISFPDNTNTEGRVTVMVQIPNENTSIDTLRNEIGLMANIQDVLLAIQTNNKSVGTTYVGTEYGITVCADPDSARKTPYFDPRTRVWYISAKQANDLIWTDVFEDYLDRGLAITCAKPFYDANGNVAGVAGMGMFLVVLSEEVVGTKIGETGYAFMINEKGEVIISDSIKKDENGRIIRENILESSTFPLETALKMINRENGIEHVFMDGKEKLIAYHGLTTLPWSLAVIIDTEESISPAIMLEDNIINL

SEQ ID NO: 94979 - protein, 59 aa, Unknown
  Obtained from environmental sample
  misc_feature (1)..(59): Xaa is any amino acid
LQKNVDAVNRHLSEWEKIKKWKAIFATLSTENGLLTPTMKLRRSEVEKTFASEIDGMYE

SEQ ID NO: 94980 - protein, 470 aa, Unknown
  Obtained from environmental sample
  DOMAIN (1)...(470): V-type ATPase 116kDa subunit family
  misc_feature (1)..(470): Xaa is any amino acid
EHPYILPERPLSLVNERDMIRKAEMIKIEAELTALSTLKNQIENQKKSLLSDIEYETASAGMEQIENDTAVSGPSISWISGYAPASDVGLLKRASSENGWAFCADDPAEDDTAVPTKLKNNKLTEFIYPLTGFLEMSPGYRETDISGWFLLFFTLFFGMIFGDAAYGTILCLIAIICILKTSKKGTPLIFKFLFLMSLSNITWGVLTCAWFGLDVSSVPQVLQNISLPLIVNTSNESGWLSAYNANNFWIRSGLVAVYDNVDAMGKGITSNLMLFCFSVALTQLCIAHIKGVIANIKAKSPKVLAEFGQLGMLVGMYFVVLSLVVFNTGFGGVKTWQFVSLFGGFALNFVFGNYEGSVLKSFLSSCANILTNVLNITSVFSDIMSYIRLWAVGLAGASIASTVNGFAGPLIGHLIFFIFGLALFLFGHSFNMVLNVLSVLVHGVRLNTLEFSSHLGLTWSGFSYKPFAKR

SEQ ID NO: 94981 - protein, 389 aa, Unknown
  Obtained from environmental sample
  misc_feature (1)..(389): Xaa is any amino acid
MSALEDSSPEESAVPEESELATDDFDMSALEDTSPEESAVSEESGLAADDLDMSALEDSSPEESAVSEGSGLAADDLDMSALEDSSPEESAAPEESELATDDFDMSAFEDTSSEESAVSEESGLAADDLDMSALDSNVSAESDIALDDIVSLDDSDDLGSELSMDDLDMSALDDDISEESDVPEESAAGDEGEAKQEYIDTDIADLGVNLDSESIDSDSLTEEQSEQAAPDTPAEESADEPAEEPIDLSADTLDENIDIDLDATKDHDHEELEELRNKGATPVTFPPENSSYLEEDDHINLDLSEAVIDEPVLSTEGIDEPLTEPSLDVDSLDDLGITGDNEASDTSPADISSEDVPAENELSADESSTDELSADELSIDDLSFDEAID

SEQ ID NO: 94982 - protein, 146 aa, Unknown
  Obtained from environmental sample
  misc_feature (1)..(146): Xaa is any amino acid
PIEEEADTSDVKSADLTSIEEDEPVDADLSLEEPAEITAGDESTEDIDKIEEIGEIDDIDEIADIDEKPAKAASAPVSALASAPSSSLGQKDGNFQLPSALKKELKNILSYMDQLLESLPEEKIEEFAKSEYFDSYKKLFKDLGLV

SEQ ID NO: 94983 - protein, 225 aa, Unknown
  Obtained from environmental sample
  misc_feature (1)..(225): Xaa is any amino acid
MGSRYTFSESRSGEIVPSIVTEQGNSKPLHSLIDPKREAERLVSTIPRDTGFVIFLGLGGGFAPQAALSGTDAQVVVIDFDKDGIKELLSAINYAPLLNNGRFSLLTDFTLDEIKTFILANYNPALYGGIKVIPLRTRTEHDFEKFNRAAAAIQEAIEAASSDFSVQSHFGLRWFSNIIRNIKNAETPDQSFQAKKINEAAIAAAGPSLDGQINSLAEYKSPRSF

SEQ ID NO: 94984 - protein, 471 aa, Unknown
  Obtained from environmental sample
  DOMAIN (18)...(315): Glycosyl hydrolases family 43
  misc_feature (1)..(471): Xaa is any amino acid
MKKQGFNPYLPSWEYIPDGEPYLFNGRIYVYGSHDKFNGYAYCLNDYVCWSAPEDDLSDWRYEGVIYPKTSDPFNEDGSMCLYAPDVTLGPDGRYYLFYVLDKVDVVSVAVCDSPAGEYKFHGYVRYPDGTMLGRRKGDQPQFDPGVITEGEKTYLFTGFCGYDTKTRIGATAVTLGPDMLTVRDEPVLVAPGVYNGKGTGFEGHEFFEAPSIRKRGDTYYFIYSSIAMNELCYATSKSPTKDFVYGGVIISNADLHIGSYKPVGKPMNCGGNNHGSIIEIKGKWYIFYHRHTNGNEFSRQECLEPIEIKADGSIPQVEMTSCGPNGKPLIGKKEYPAYIACNIFSVENNRQLERQWPLHNQSLPKISQDGRDGDEEPGFVTNITDNHGIGFKYFDCKGIKRIKIKTRGYNSGVIHVKTKWDGEPLACIKIDYSNIWMEYASDINLPDGVHALYFIYKGTGSATMASFTLE

SEQ ID NO: 94985 - protein, 119 aa, Unknown
  Obtained from environmental sample
  misc_feature (1)..(119): Xaa is any amino acid
MESGKKPGNKLRLADVLVVLFCLSGAAYSINLFRLDLFQTLNGQNKAVIGTVIVKKNIVQRRMSDRVLWDRLIKESPVYSDDIIRVADNSEADLYVGGNDITLNENTLVRLRYDKETGT

SEQ ID NO: 94986 - protein, 621 aa, Unknown
  Obtained from environmental sample
  DOMAIN (290)...(359): HAMP domain
  misc_feature (1)..(621): Xaa is any amino acid
AVRFSIGTKLITIISIIVLISLGSITALVSWLVHGDLKISAEENNCEVNRRAAAEAEQTLEKMRLLSMTFSRTAVFVINADIIQKEADSFFTQNPQIAAFFYTTAADLSLSNTVFVNERFFLTRGIDAKLADAFRFNSVKEQENAEMGQTILVNASPLFNKAQSSIFLAAIFFPIEGGSGCVLFSTENLNESFGMGVNSSFLINASGDIIADADIDRVKIHVNLGEQEIIKQILNSPDRNKQMLVDIDNARRYLAYTRLDTGSSASGGIVITTIEYDKVFEGINATTRRNLYLTAAILFLSIMCIWFFAKSISVPIKTLAAAARKVEGGVFNVDLPPNSRDEIGVLTSGFRKMCSALSIFGKFTNRNIAVQAMRGKIKPGGLLKHATIFFSDIRGFTEKSENFVKVFGNDASDRIVFWLNEYLTRMVECVEKNNGIIDKFIGDAVMAHWGTATTAGSPQKDALNCIKAALMMRVALYKINKTRKKENMGNPPISIGCGINTGIVTAGQIGSDLRMEYTVIGDPVNLASRVEALNKPLGTDILITEDTWNMIKNHIIVEEMPPVTVKGKEKPVRLFAVVNLSALKTAPRNLAQVRQILGIKPPDISKADVNAKEHKYQIGGK

SEQ ID NO: 94987 - protein, 482 aa, Unknown
  Obtained from environmental sample
  DOMAIN (2)...(391): Bacterial extracellular solute-binding proteins, family 5 Middle
  misc_feature (1)..(482): Xaa is any amino acid
MQVIFTLRDNVYWSYYNSDKKIKVTSDDVIFWYNEIEGDTDFQSSGYYGQFLTMPDGSEAHIDISKLDDLRFVFHFPRIIAEPYLMTNMHFGPRHIYEPAKKQDGVEGVRNLFSVAVNPQTIPSMGEWFLIEYTPGQRLVYKRNTDYWRNDANGVTLPYLEEMVMRIIPDENTKLLLFKNGEIESYGLRPEDIDGLINKSDASYTVFNSEGSLSAAFWTFNQNPVNKKKPQLEWFTKKEFRQAMSCLLNRDRISAQVYRGLAQPKLNLFPEPNPYYNPNINLQYLFDVKRAQELLSSIGIKKDFRGIMRDSKNRRIEFNLVIRSESTIYQDTASIIRDELSKIGIKVNIRIVDFQKQVEQLFNTFDWDSTLIALSGSNIFPSQGSNVWPTTGNLHLWNPNQTTPATDWEARLDYLYNEGKFTIDSDRAQGIWDEFQSILMEQCAIIHLMRSRGFWAINNRWDFTNVYYDNLNGAETSFIYLR

SEQ ID NO: 94988 - protein, 242 aa, Unknown
  Obtained from environmental sample
  misc_feature (1)..(242): Xaa is any amino acid
MTDQELKDLVARLAVHDEERAEIEKERAEIEKERAEIYKERAEIDKERAARDRERDEKAACEIEEIKRIQRETAEQHKKTEQVMEDLGRTVKEVCGRVDRVCGKMGGIDANLGHHAEQFFQDVFERKKEFGGIKYDDVIPNFGRNDKVGKMEVDIALINGDSVALIEVKNRIHPDFVTEFAEKRVGKFRALYPQYDNYKIYLGIAAFSFDKKVLESAKENGIGIVKQAGESVEIEAENLRAY

SEQ ID NO: 94989 - protein, 368 aa, Unknown
  Obtained from environmental sample
  DOMAIN (36)...(363): Gamma-glutamyltranspeptidase
  misc_feature (1)..(368): Xaa is any amino acid
MNFDPNFVPYPSTRYPVYAREGMVATSSPQASLAGLEALRQGGNAIDAAVAAAAAITVTEPASNGIGSDAFAIVWAGGKLYGLNASGKAPANISWEIPPNGQGVAALAALNILGNLEFTARETPDTFHRQWEAMKLAFSDVLAHVTDSRFMKEDYREWLKPEYGKKRASEIGERACIPEPLHQPKEGTVYLATADGDGNMVSYIQSNYMGFGSGVVIRGTGIALQNRGADFSLDSRAPNALAPGKKSYHTIIPGFLTKDGKAVGPFGVMGGYMQPQGHVQVITNMLDFGLNPQQALDAPRWQWIEGRKIQVEPGFSSEIARVLANRGHEVSVSLQTSSFGRGQCIVRLDNGVLVGATEGRTDGSIACV

SEQ ID NO: 94990 - protein, 87 aa, Unknown
  Obtained from environmental sample
  DOMAIN (5)...(84): Plasmid encoded toxin Txe
  misc_feature (1)..(87): Xaa is any amino acid
LRKIWSDEAWNDYLYWQNENKNLLKRINLLVKDIERNPFKGLGKPEPLKNNLSGWWSRKIDDKHRLVYRIEKGNLEIAQCRDHYDSS

SEQ ID NO: 94991 - protein, 57 aa, Unknown
  Obtained from environmental sample
  misc_feature (1)..(57): Xaa is any amino acid
ECGFYVFAKTSVRLQKIPFEITAETNPFYNEANMKVLNKSIKQLEEGKGVEHELIEA

SEQ ID NO: 94992 - protein, 121 aa, Unknown
  Obtained from environmental sample
  DOMAIN (1)...(121): Protein of unknown function (DUF1044)
  misc_feature (1)..(121): Xaa is any amino acid
VRLFKNTWFNRFAKKEGITDAELHESVNRLEAGQADADLGGGVYKVRIARSGEGKAGGYRVIVFFKSEERTFFVYGFAKSNMANIEEDELRGFKKRSKTAFSMTEAQINSRLKDGTLVEVF

SEQ ID NO: 94993 - protein, 329 aa, Unknown
  Obtained from environmental sample
  DOMAIN (11)...(45): Putative Fe-S cluster
  misc_feature (1)..(329): Xaa is any amino acid
MSLKGLDIFKLTPRTNCKDCGCPTCMAYAMRAAQHGIEVCKCPHLSAEAMKVLGEAVEPPMKLITIGAGGCEHKLGGETVLYRHEKSFVSKPLYCVNVNAENIDAKLEGIKKIDYERISERMYIEAINVEYTGNADAYSGAVRKALATGRTLILDVKDAAAAQAALEIAKDTKPLLNGANESNYKEMGDIAVKYGVTLGVSGGTLESLHDTIAALEAGNKNLVIDIGAVSVKDVFARAVQIRRGALKDGDRTFGYPALVNIAKITPNNHEMQTALASLFTVKYGSIIIMDEISYAQALPLFGLRQNIYTDPQRPMKMEPGVYPMNKADE

SEQ ID NO: 94994 - protein, 162 aa, Unknown
  Obtained from environmental sample
  misc_feature (1)..(162): Xaa is any amino acid
VLLLSAHEENYKTVTVAAVQAYGHKAGAESSVDINLAKQLNVLIAQLGVQTENIVMNPGSAAAGYGFEYVSSTMDRIKAAALAENDAMLQMPIITPVGEEAWSVKETIVSEEEFPDWGPAEQRGIDMEIASAAASLASGSNALILRHPVSVSVIKNLIAELV

SEQ ID NO: 94995 - protein, 272 aa, Unknown
  Obtained from environmental sample
  misc_feature (1)..(272): Xaa is any amino acid
LSFTGCEFVFAENQKQVLKILSCKEDLPVLKTLISFDPVDSETEASASSAGVTVLYYASLVALGQKRENLKPGTAEAEMDKGDSEDTASIIFTSGTTGEPKGVMLCHRNFLYQLPAFIKFFELKPGDIWISMLPVWHVYERLIEYVIFYYSTSIAYSKPMAPILMADFLAIRPNWMVSVPRVWEAIMDGINRNIKAKGGFRKKMFDLASSYSMLYTYFKDLTFGLLPNFHGRFRALDSLLGFFPWLLLLPLEGLLRVVAFNRIKKEFGGHFK

SEQ ID NO: 94996 - protein, 86 aa, Unknown
  Obtained from environmental sample
  misc_feature (1)..(86): Xaa is any amino acid
MFATISLVTNRKINVPVIPRLSVINTYGSWIVFVVDDNNIARRREVTLGIDNEEQIEVLNGLNIGENVVSTGQNFLSDGDPVRIVE

SEQ ID NO: 94997 - protein, 192 aa, Unknown
  Obtained from environmental sample
  DOMAIN (103)...(132): Helix-hairpin-helix motif
  misc_feature (1)..(192): Xaa is any amino acid
EDDRQIINLSSSLYNKFLLKRVYYSAFIHPGGYVQKENSILSDSRLPEIVSPPLVREHRLYQADWLLRFYHFSAGEILNEDEPFLDTHLDPKTAWALKNLDFFPIEINRADYETLLRIPGIGAKTARRILETRRSKRITIETLQRIGAVLKRARYFLTAAGAFIERPDDPVRIRRLLSDTDGAGLQLPLFDF

SEQ ID NO: 94998 - protein, 294 aa, Unknown
  Obtained from environmental sample
  DOMAIN (70)...(184): Histidine kinase-, DNA gyrase B-, and HSP90-like ATPase
  misc_feature (1)..(294): Xaa is any amino acid
SNAGSNLLNIVNDILDFSKIESGKLTLSPVEYYMASLVNDVITLTITRLGEKPIAFYLDIPDDLPSKLLGDDIRVKQVLTNLLTNAVKYTREGRIDLIIRCTREGDIVWLDAAVKDTGLGIPKKDLNNLFLDYYQVDSTANRRIEGTGLGLPITKSLIEMMKGEIKVESEYGKGSTFSFRIKQGYVDDKVFGADVSDKLRHFCFIDDKRVNNQKLVRVDLSYARVLVVDDMRTNLDVAVSLLCKYNLQVDCLTDGPAAIERIQSGTPVYNAIFMDHMMPGMDGIETADQNSRVR

SEQ ID NO: 94999 - protein, 291 aa, Unknown
  Obtained from environmental sample
  DOMAIN (123)...(237): Response regulator receiver domain
  misc_feature (1)..(291): Xaa is any amino acid
SNAIKFTPEDGAIALDARYIGEKDGICTVQISVSDTGIGISAEQQKHLFHSFQQAESSTTRKYGGTGLGLAICKSIVEMMGGKIWIESEPGKGSTFTFNIEARRGTAKEKHGLLAPEVNWSNVRIMAVDDDPDTLIYFRDITAGLGVSCDTALSGEEALKLVDKTGDYHIYFIDWKMPNMDGIQLVRELKARTTETSVVIMNSAADWSAVEEEAKGIGVDKFLTKPLFPSTVADIINECIGVVQPQTEEEQTDITGIFAGRRILLAEDVEINREIIIALLEPTQLQIDSAE

SEQ ID NO: 95000 - protein, 837 aa, Unknown
  Obtained from environmental sample
  DOMAIN (686)...(765): OB-fold nucleic acid binding domain
  misc_feature (1)..(837): Xaa is any amino acid
KHLTDEGLAMRYAKVKESDSNKWEEIKKRADYELDTIISMGYTGYFLIVWDFIKYAKENNIPVGPGRGSGAGSIVAYSLRITDIDPLKYGLIFERFLNPERISMPDFDIDFANEGREEVINYVTRKYGKERVAQIITFGTLGAKAVIKDVARVLGISIPESEMITKLISFDPEITLDKAKEDEPRLRELESDPRFTELFAIAHKLEGLNRHSSIHAAGIVIGKKPLIELVPLFQEREEKGGNIATQYSMNFLEECGLVKMDFLGLKNLDILKHSQELIRRRGGKYANFNMEDIPEDDKKTFKMLGEGKSHAVFQFASDGMQDILRQTKPTSIEDLTALNAMYRPGPMQFIPRFVDCKNRKTPITYPDPSLEGILKETYGVIVYQEQVMEVARIIAGYSMGKADLLRRAMGKKKKEIIDEEKTPFLEGAVKQGYSAQRAGAIYDMLVPFAGYGFNKSHAAAYSVLAYQTAYLKANFPAEYMAATLIVEIKSTDRLLYSIVETRKMGISVDPPNINYSDKLFTVVDGRIVYGFLGIKGVGDAPADEIVRGRKDGHYKSFMDFLNRVDIKSVSKKVIELLIQTGAFDDFNVSRETLAGNMEKAIEYAQKRKEDKQLGQSNLFGESNDADMPDFKFAEFPPVSRAERLNLEKKLIGFYFSGHPLDEYKEIWQDVVSVNLGQVETYKTGNCVLVGIIKNIKPITTAKGGKMAFATLEDYNGEIEVTFFSGAWERCERLVSDDSVVILKGKIDYQKDKDRYSFLADGVISKQEVPTVVKEVKELDEKNKLHKNTWLYMADLKSSYILQAKKGNYTVIGFLKSLRDFKDKNGNDMAFGTLQDFE

SEQ ID NO: 95001 - protein, 188 aa, Unknown
  Obtained from environmental sample
  misc_feature (1)..(188): Xaa is any amino acid
MNNEFSLLKQVPDVLRARDFRLYTKAGRLVDLWQNNGAAILGHTPPSLLRELKNTASRGLYAPFPHFLETRYHKALSRIFPDRTFRLFSAAPPGLETLVANGNASLWRPFADSAKPLEVPESTPVLIPVVPGIQTWRAGLPLGLCVLAIKKDIAIQPGDFLPPVLLAAAIRGIYDLISVASARANPNI

SEQ ID NO: 95002 - protein, 308 aa, Unknown
  Obtained from environmental sample
  misc_feature (1)..(308): Xaa is any amino acid
GAITPDNKNAKQPKTKKKTTKAKSAPGDGALAAGDGLSVCVAMMLNNSGIAEYHITQDDITGNQRLNNMQELVNAASLYEGSVTGLLEFLEHIELDRSLEERKPQDSAGSPAGDDEKNRVTLITFHNTKGLEFRRVIMTGLEQGVFPREDKKNEELEEERRLFYVGATRAMDELYLTTCSWRRMFGRLTPLQPSLFLNEIDKKSLKIIGNAPYGFTAPSGTNAPSGAYAARGNSGWMTSGLAENEAEKASGWRRGQRLFHDDYGYGSVVDVRDSEDGPVVRVIFETGKELRFLSEHQSSSIVKIGDDQ

SEQ ID NO: 95003 - protein, 372 aa, Unknown
  Obtained from environmental sample
  DOMAIN (1)...(372): UvrD/REP helicase
  misc_feature (1)..(372): Xaa is any amino acid
MAERARNIDERAGYAMLRTFHSFGAWFLRRNGHFCGLDSNFTIYDDDDVISFLSTIMEGAQKTEVKRAAYNISRAKDYFLSPEDPSLALIDSNKKFRDIYAEYERRLSHTGNVDFGDLIKKPVEILRKEPDVCRRFRERFSVIMVDEYQDANVAQFEMLKELAGPETYVCVVGDDDQSIYRFRGAEVKNILEFPEKFSDADIIRLESNYRSTAPILKAAASVVDHNKGRLGKTLRAERGNGQLPVLAFLPNQKEEANFCASLIEKSVKSGNAKTQAAQWSDWAVLYRTNAQSYDFETEFLHRRIPYKLVGSLKFYEREEIKDAIALLSFMVNPRDEVAFRRMVNKPARGLGAVTVDRLINASLAEGKNLLET

SEQ ID NO: 95004 - protein, 120 aa, Unknown
  Obtained from environmental sample
  misc_feature (1)..(120): Xaa is any amino acid
MRHAVDVRHINAAAALVVLREIDKKCLKIIGNAPYGFAAPQAAKNSGWMSSGFVENEAEKASGWRRGQRLFHDDYGYGSVVDVRDSEDGPVVRVIFETGKELRFLSEHQSSSVVKIGADQ

SEQ ID NO: 95005 - protein, 260 aa, Unknown
  Obtained from environmental sample
  misc_feature (1)..(260): Xaa is any amino acid
MNNEFSLLEQVPAVLRARDFRLYTKAGRLVDLWQNNGAAVLGHTPPSLLREIKNTASRGLYAPFPHFMETRYHKALSRVFPDRTFRLYSGSPPGLEKIVADGDAALWRPFTNSAAPLEVPESPPILIPVIPGIQTWRAGLPLGLCVLAIKDGAATGGDILPPVLLAAAARGIYDLISAAKARANPIYPHIAKALKNNLQNFWQRNGIYLTPKQKPSQEEWAALFRRFLENGFLLPPHPSQPLILPGVLSPGEEAKLVSLL

SEQ ID NO: 95006 - protein, 155 aa, Unknown
  Obtained from environmental sample
  DOMAIN (72)...(105): Tetratricopeptide repeat
  misc_feature (1)..(155): Xaa is any amino acid
MAGVFFKSDGKFRLFSVFFSLILLVSMFSGCAGLAASAQEYYSIGMAYYELGKYEEAEKWLNRAKLADRTMTASQYNLGRIAFETKDYEEAAKHFEGILRKDPDNLLALRAAAFTRIKMNEIEKAEKHYNKILALVPESADDGYDHALVLFAMER

SEQ ID NO: 95007 - protein, 89 aa, Unknown
  Obtained from environmental sample
  misc_feature (1)..(89): Xaa is any amino acid
VTTLSSQLSWSHFIEILPLETEKARLYYANDAITKKLGIRELRNQISRKAYESKEIANAQIKEKSKNYHLPFFSFLSSFAKLCEIRAST

SEQ ID NO: 95008 - protein, 530 aa, Unknown
  Obtained from environmental sample
  DOMAIN (66)...(460): Conserved region in glutamate synthase
  misc_feature (1)..(530): Xaa is any amino acid
MNLGTPNANDATRTVNRSRSVVPSSGLCSRCMDDCRGNCEIFKATFRGRELIYPGPFGNVTAGGDKNYPVDYSHLNIQGYATGARGLPQGVAAGPDAALFASVNTETEYGWDKKVKMRVPIFTGALGSTEIARKNWEHFAVGSALAGVTLVCGENVCGIDPALELDGQKKVKKAPDMDRRIENYKRYHKGYGEILIQMNVEDTRLGVAEYIIEKHGIDTIELKWGQGAKDIGGEIKVGSLERAIELQSRGYIVTPDPSNPVNQAAFKAGAIKEFERHSRIGFIEEDAFYAEVERLRKLGYKRVTLKTGAYNLRDLAKAIKWSAKAHIDLLTIDGASGGTGMSPWRMMEEWGVPSIYLHSAAYEYTSILAAKGEKTADIAFAGGFSSEDGVFKALALGSPYVKAVCMGRALMIPGMVGKNIDQWIKDNKLPKSVSEFGNKVEEIFVNYEQVKSMVGEKEIKNIPLGAIGIYSYADKLKVGLQQLMAGARCFNLPSIARTDIMSLTEECAKITGIPYLMECYRKEALDILNK

SEQ ID NO: 95009 - protein, 137 aa, Unknown
  Obtained from environmental sample
  misc_feature (1)..(137): Xaa is any amino acid
MSALDDLIRQVADDALRERLHREASRLGESKKFGLVFEDHIPECTPLYEVPIREGAYVAEKGVEIHDTYMVDRIHDGIVECHHKETREPAEFLVGDVVNVAHFGEAIFPHLVSAEKVENAPDSDLWHALIEADNYHA

SEQ ID NO: 95010 - protein, 277 aa, Unknown
  Obtained from environmental sample
  misc_feature (1)..(277): Xaa is any amino acid
LFLQELKEKGETIAPPFLKGAPSAQYMLPKSYRDKLSEKTDIVFNSFPYLSDDEDDKPAMSMLTARLLLAEKELFFAQLENFLIKFISFFAGFSVAASEGKYTLNKKFYYLNGYIDCVLEKQDSEKQGSLVIVDFKTKYMPDLSDCIGLAGLADFQLPMYIRLAENEFKKPIAAALFFSILDAVPQVLFGVIQDALSDEIIPGKEKNRIMRGSGEYERIMGEFDKKAEQFATEISNGTFAFSPSHWELCQQCGYNRVCRTLYKVFQGEKQWNQKKLI

SEQ ID NO: 95011 - protein, 383 aa, Unknown
  Obtained from environmental sample
  DOMAIN (8)...(381): UvrD/REP helicase
  misc_feature (1)..(383): Xaa is any amino acid
MEPKKINLNDEQQAAAYCNENAVVAAGAGSGKTMVLASRFAWLVTERKCRVREILTLTFTRKAAAQMYRRIYLMLAEIADGDSGTKSKLAREALEEFAQARIQTLDSYSAAIVKQAANRYGISPEFSIDEERCLRLAHDEAMSFFISKRRHPAIKRLYPNKSPVSIANDIFASGLFNYTHIDIRPNPEKDFTRQCDTICNEWERQCGQIISLLREINEANTENEYLLPDLAPVISPFTLGKVVFPDVHELGEYFEQLTAIPHDLIINWTDSHPLRMALINVMNFLLSLVSLNLLKGKRQNNPVKELIKELRIIFKEFSSIMVFCMQAGLNCSTLKLLSDLQHRYVDRKRVEGVLTYTDIARLAKTILIEQKDIRQSEKESLKR

SEQ ID NO: 95012 - protein, 394 aa, Unknown
  Obtained from environmental sample
  misc_feature (1)..(394): Xaa is any amino acid
ARYNAVKVDCPAALSDRYKNAATGGPPNPGGGNPTPTTFTLTINRNPTAGGTATAGSQSGIAAGTQVNITAAAATGYTFNNWTITGSGTIANASNASTTVTVNGNVTVTANFTQNPTTYTLTVERNPTAGGTTNPASSQTNINAGQQVNISATPASGYTFANWTITSGSGNIANANNVSTTITVNGNVTVRANFTQNQTQYTLTVNRNPTAGGTVKVGNNDYSSPVTVNSGTSTAISAAAASGYTFTNWTVTSGSAQINNANSASTTVSLSGNATITANFTQNPVTPATYTLTVSRLPSNSAGTVKVNNADYSSPVTVNSGTAVNIVATPAADYRFTNWTVATGTASIANASSATTTVTLSSHATVTANFTSTSSGSTGGGRKDTIKVEAGELH

SEQ ID NO: 95013 - protein, 305 aa, Unknown
  Obtained from environmental sample
  DOMAIN (212)...(283): Bacterial flagellin C-terminus
  misc_feature (1)..(305): Xaa is any amino acid
MIDDGTSTTTIRIMVSGNELNITYNSVDGILKVGNDIVAPGRSITLDDGTVLVHASTLAEPNEPTGRIFVDVGRITLAEDITAIDGNVQGFSLAKDSTMTAKTKITDGIHLMAGTVITTSDKFYPGSVTMAHEGRSVQFSANADVMLGARYYDMAVSESMTYIFSRYEPASSNLKDSVMAQIGANSGQTAFVSMGDMRAVALNVHNIDISSKWGAATAIETVNNALQRVSHQRALLGAMQNRLEHTIKNLDASTENLQAAESRIRDVDMAKEIMEYTKDSILMQSSQAMLAQANQIPQGVLQLLR

SEQ ID NO: 95014 - protein, 297 aa, Unknown
  Obtained from environmental sample
  DOMAIN (3)...(254): RNA polymerase Rpb1, domain 5
  misc_feature (1)..(297): Xaa is any amino acid
ATGIVSESAGRVLNIVDNGDHKIIQLSPGENYPVQAGSHLYFNAGDKIKMDEVIALESSVSEGSARDIVAGLPRVEELFEARHPKRAAVLSEIAGVTEISEQEGKRIVTIIAGKTAKKKYSIPFGIRLKVFPGKHVQKGEPLTEGVKDPHDVISILGKEAAQEFIVNEVQKVYLSQGVTTNDKHIEVIVKQMTKKVRIREIGDSEYLVDDFVDVFEYEDVVKQLKADGKTPPVGDEVLLGLTKASLNTDSYISAASFQETTSVLTKAAINGTTDPMYGLKENVIIGKLIPAGTGLSL

SEQ ID NO: 95015 - protein, 56 aa, Unknown
  Obtained from environmental sample
  misc_feature (1)..(56): Xaa is any amino acid
AAAGEPFDPMIHEALMKAPNAQIPADCVAEVFEHGYRLNDKVIKHARVVVSSGNGG

SEQ ID NO: 95016 - protein, 528 aa, Unknown
  Obtained from environmental sample
  DOMAIN (323)...(394): HAMP domain
  misc_feature (1)..(528): Xaa is any amino acid
MKIKIKLSLMIIAIVAVIVTGVAVLLLRQASSIALDLSKQKTMYLARQRAQYWDGRMGGYIDVLQTLSNIMNFYENLPPAERRQTYEDTMMSVFEDMPDFVRMFTVWKPDAIDGMDAKNIGRMGSTATGQFAYALARDTGEIKPLTAVVVDEVMAQITGPNARVVGMSDPAPFKNMGKDTYAVRIVVPIINKRLNETVGAIGCQLDISMIQPRVEQTIKDFDEVTSMVIYSDNGFVLGNYLPEFIGKQIDTETQYGPYLQEVKDVIKNAQEWQGTAYDPELKTNMVMAIANIPIGVSPTTWSVMVGSTEAYILKDVNAMRNFVIILALIALVAAVALIYLVLSRTTRPIVKLADTLKDISEGEGDLTRTITVNSKDEIGDLAMYFNKTLDKIKNMIIHIKDEADGLSVIGNDLASNMTETAAAINQITANIQSIKGRVINQSASVTETNATMEQVISNINKLNDHVEDQSTNISRASSAIEEMVANVGSVTQTLVKNVDNVNSLKEASEVGRSGLQGVVADIKGIAIE

SEQ ID NO: 95017 - protein, 238 aa, Unknown
  Obtained from environmental sample
  misc_feature (1)..(238): Xaa is any amino acid
ANGRLGENPYFEGVSRKAPSCARVVYEFYGGDEKLGGRFAEMIRYVDKVDSADLSPDEIMNANGWVLLGFIMDPRTGLGRFRNFTISNYELMKKLASACATMNIEEIMAMPDVKERVAVYHEQEKLFLEMLKKYIRIDGNVIVADLRGAETINAGNRFLMYTMHPEQNISVWIVDGKNKQNCSITVGYSIINRSATVDVGSMLLRYGGGGHTQVGTCQVPYEKADMAIADVICQCKFV

SEQ ID NO: 95018 - protein, 357 aa, Unknown
  Obtained from environmental sample
  DOMAIN (264)...(335): Bacterial flagellin C-terminus
  misc_feature (1)..(357): Xaa is any amino acid
MEAGNYKFAAAETLNTNVTIGNGINLTTGTTGQITSLATGSVLAKGSSIDMLTGTMGTASSSTIKIEVSGKEVDISYSVDAAGAGTLKVGGELVAAGKSITLEDGTVLMHNATTAATGKIFVEQGSIKMVTELNPATSGGNVKAFSVTKDSTLAAGTKLAANTTLMGGTVVTDEKTTVGGSIDFNGSNIQFSANVKTALAADYNKAAVGDSVTYIFSNYQAPSSQLNDSVMAQIGANSGQTAFVSIGDMRAKALGVADVDVSTKWGAATAIETVNNALQKVSHQRSSLGAIQNRLEHTIKNLDTAAENLQAAESRIRDVDMAKEIMEFTKNNILQQASQAMLAQANSQPQSVLALLR

SEQ ID NO: 95019 - protein, 611 aa, Unknown
  Obtained from environmental sample
  DOMAIN (76)...(145): HAMP domain
  misc_feature (1)..(611): Xaa is any amino acid
MSDVEVQFGTHLKAAFEAVQAGKEYACYSYAPTMKTNIQISLIPVPLGQSETTWAIMAGTEEGYIMKDIYPMITFAIIIAAIAIIVSAIIIFVVLDRTTKPIGIVADTLKIAAEGDLTKQVSVNTNDEIGGLAKDFNFTMNKIKGLINQIKYKINGLSNTSYELSVNTSKTSSAVEQITSHLDKMKGLMVKQENSTGEANKAVTEIKENIDNLKEMIASQTDSVNVSSSAIEQMTANINSVTKTLSENSKNVTALTEASENGKSGVQTVAQMIQEISKDSEGLLEINAVMDNIASQTNLLSMNAAIEAAHAGEAGRGFAVVADEIRKLAETSGKQSKTTAAMLKKIKASIDNITKSSNEVLERFGAIDSSVKTVSEHEQNILRAMEEQETGGKQILDSIGRLRDITASVKKGSDEMEESGKTLVKETGDFIKTSQEAAGGMSEILKGVNQIKVSVNHVNDMSMENNRNFESLKHETDKFKHTVGDEKHKILVVDDDSIVTTLVESMLSNDYDIITAQSGKEALGLFYQGLVPQLILLDLIMPEMDGWSTYSRIKAMSSLYDTPIAFFTSSDDPKDKQHAREMGAVDYIKKPYDKDDLLRRVAKALNKGEMK

SEQ ID NO: 95020 - protein, 702 aa, Unknown
  Obtained from environmental sample
  DOMAIN (191)...(256): His Kinase A (phosphoacceptor) domain
  misc_feature (1)..(702): Xaa is any amino acid
MRKTYDYSIKLARSQHTFLFSVTALFFCILVLLFILFLRNRRIGKWLKDMVQERTNELVIQSATITAAFDATPDLIFCKDLNSRFTRCNKTFENYFNVREADIIGKDDVEAMGISPEEAEKYKERDRNVARKGQTLVFEEYIPSADGTTQLFETSKVPMRQNERIIGVLAISHNITERKAMEEQALSASRAKSAFLANMSHEIRTPMNAITGMTAIGRSAFDTERKDYCLSKIEVASNHLLGVRNDILDMSKIEANKFDLSPAEFDLEKMLRRVVNVVNFRIDEKQQKFSVHIDRSIPRTLIGDDQRIAQVITNLLGNAIKFTPENGSIALDVRLAGQGFDLCTLQISVSDTGIGISPEQQAKLFKSFEQAESSTTRKYGGTGLGLAISKNIVELMGGSIWIESELGKGSTFYFTIQLKRGTNEKPKSLPPDINSKNLRILAVDDDADILTYFNEIAQDSGLICETAASGEEALELIDQNGGYHIYFIDWKMPGMDGIQLAHEIKARVPENSIVTMISAVEWSAIAEEAKAAGVDKFLPKPLFPSAIAEIMDECLGIDKQMVEETQSADITGIFAGRCILLVEDVDINREIVIGLLEPTQLEIDCAENGVEAVRMFTEAPDKYDLIFMDIQMPEMDGYEATQRIRALDVPRAKTVPIVAMTANVFREDVEKCLNAGMDGHVSKPVDFEEVLNRLYSYLGVRK

SEQ ID NO: 95021 - protein, 134 aa, Unknown
  Obtained from environmental sample
  misc_feature (1)..(134): Xaa is any amino acid
MAKKTAEKRKYIGKDIQDVMELPDLVDIQLASYERFLQREKFRNREKPAVQGLEEVFRTTFPIESPNGGEMVLEYEYYTLDEESIKVSELDCKQKGITYAIPLKARVNLVFQQTGEIRQKDIYMGDIPIMTERG

SEQ ID NO: 95022 - protein, 345 aa, Unknown
  Obtained from environmental sample
  misc_feature (1)..(345): Xaa is any amino acid
MDSPEGVTILAAAVFDDVLGIIILAVVLGVVAMFAGHAEAEGNFSAAAILAIAGKAFGIWLGFTALGLFFSRQLASFLKIFKNSSDFSILALGIALILAGFFEHGGLAMIIGAYIMGLSLSKTDIAAVIQGRLEGLYEFFVPLFFAIMGMMVNLRELFSTQVLIFGGIYTIAAIFAKVIGCASPALLLGFNLKGALRIGIGMVPRGEVALIIAGIGLTLGVLDNQLFSIVILLTLISTVAAPPLLAASLKIHGQGTRKAVRDKDAIHIQWDFNSHDVAKLMVDRLLIDIRAEGFYVQTMNLDNNVALARKEDISFTISCEGKAVTVKTSKSDLPFIKNVIYEGYT

SEQ ID NO: 95023 - protein, 560 aa, Unknown
  Obtained from environmental sample
  DOMAIN (11)...(231): FAD dependent oxidoreductase
  misc_feature (1)..(560): Xaa is any amino acid
MNLNIQHIDTDFLIIGGGAAGCWAALAFRELSDARVLIVEKADIRRSGCLAAGVNALNAFIAPGKTPQDYVDYARNDADGIVRGDLLLTMAEGLNRAAEKLEKLGLTILKDKDGRYAARGWRNVKINGENIKPILAKAVSTQKNITVLNRANVFEYIVKENRILGAYAVDIDKPILYVISAKAVLCASGGASGLYKPNHPGDSRHKMWYPPFNTGAGFAMGIRAGAEMTTLEMRFIALRCKDTIAPTGTLAQGAGAKQINSAGEVYEDKYGLTTSQRLHGTVMEILSGRGPCYLKTTGITKEQETDLIKAYLNMAPSQSLRWLESGLPPGVKDVEIEGTEPYITGGHTAAGYWVSTDRETTVRGLFAAGDAAGGCPQKYVTGALVEGEIAAKGAVKYMVDKTPELNNDEAEAVKRKLEGYLSPIGGGEISFSVDDLEEEMQAAMDKYAGGIGASYRFTEASLKTADKKIRELEARSGHVFAADMQELVYILELKERLTLCKSLIVHLSARKETRWHSFAERADFPAKSEKWECYVNSRLENGKINAVWRPLVGEEDRYEH

SEQ ID NO: 95024 - protein, 372 aa, Unknown
  Obtained from environmental sample
  DOMAIN (9)...(151): GTPase of unknown function
  misc_feature (1)..(372): Xaa is any amino acid
MNNADLGLLKFITCGSVDDGKSTLIGHILYDSKLLYADQERALILDSQVGSRGGKIDYSLLLDGLMAEREQGITIDVAYRYFTTEKRSFIVADTPGHEEYTRNMAVGASFADLAVILVDAKRGVLPQTLRHARICALMGIRNFVFAVNKMDLAGYSQERFNAISREIEKLIGDLRLADAVVIPVSATEGDNITVRSGNMPWYDGKALLSHLESADIGGGQIEAGFYMPVQRVCRPDHTFRGFQGQIESGTVSTGDEISALPSGETAVVKAVYITDKQANSATAGQPVTIRLDREVDVSRGCVLAREAALKTAKEFEATLLWMDNQKLAVGREYWVKVGTKLLPAAVSKIKHKVDINTGALMAVDTAVRTRLS

SEQ ID NO: 95025 - protein, 172 aa, Unknown
  Obtained from environmental sample
  DOMAIN (2)...(172): Phenazine biosynthesis-like protein
  misc_feature (1)..(172): Xaa is any amino acid
MRLKIHQIDAFAERPFEGNPAAVMPLEKWPPDSLMQTIAMENQLSETAFLVPEGDGYNIRWFTPTCEVDLCGHATLASAWLVLNELRPGLVSVEFRSQSGPLRVASDGDWLVLDFPRRAPVPAPEHLPALAKALGAAPSEALVSRDLVAVFDTEGQIRDLVPDFALMVALPG

SEQ ID NO: 95026 - protein, 68 aa, Unknown
  Obtained from environmental sample
  misc_feature (1)..(68): Xaa is any amino acid
MKTVIIYGIEHKGSNYNVIQLFKEQLNIDENELTEFYLPKDLPNFCRGCNTCFEKGKNFVRIKTMLPQ

SEQ ID NO: 95027 - protein, 117 aa, Unknown
  Obtained from environmental sample
  DOMAIN (62)...(106): Bacterial regulatory helix-turn-helix proteins, AraC family
  misc_feature (1)..(117): Xaa is any amino acid
MKRGYDLLNNVLIDIEKGIKTDINSDVIAKKHTLSESHLQRLFRSAYNQPIGLYIRSFKLTASINDLLNTDSNILDIALGYGFNYEQSYIRAFKRQFGITPGKLRKRGRIHTEEKVI

SEQ ID NO: 95028 - protein, 347 aa, Unknown
  Obtained from environmental sample
  DOMAIN (166)...(328): Glycosyl transferases group 1
  misc_feature (1)..(347): Xaa is any amino acid
MLEALLEMFPQADIYTHVYNPKTVSPLINSHRIITSRINRLPFAKKLYQFYMPLMPNALIDFDLRSYDLVISSEAGPAKGVVANPDAYHLCYCHSPMRYLWDMYHEYFRGTNPLVRFFMKRLIPTLRLWDITSANLVDRFVTNSHYVAKRIRRVYNREAEVVYGPAAVEKYLATERSPAGYYLFFGQITGYKRADIAIEACVKSGRKLIVAGAGMKKRDIKKTEKTGLVRFTGRVSDDEAAALFAGARALLYPGIEDLGLVPIEANAAGCPVIAFREGGAADTVKENITGLFFDEQTPESLIAAMERFERDEVTFSRRKVFNEHVQQFSKTAFIDRMRKVLEERKRI

SEQ ID NO: 95029 - protein, 210 aa, Unknown
  Obtained from environmental sample
  DOMAIN (4)...(84): B12 binding domain
  misc_feature (1)..(210): Xaa is any amino acid
MSRIEEIAQAVEDGKLKIIQDLVNKALNEGVDALAILNDAMSVAMGRVGEKFQKQEIFVSEMLLAARVMKLGVEVLKPKLAGKANVSRGKCIIGTVHGDLHDIGKNLVALMIESSGFEVLDLGVDVAVDKFISMIKENPDVKVVALSCLLTTTMPAMQETVAAIKASGLAGFKVIVGGAPVTQAFCNEIGADGYSPDAGGAGQLARELAA

SEQ ID NO: 95030 - protein, 306 aa, Unknown
  Obtained from environmental sample
  DOMAIN (88)...(164): Helicase conserved C-terminal domain
  misc_feature (1)..(306): Xaa is any amino acid
MITAFTATASAPVLEKIKKYIFGEIEAHQIVGNPDRPNISYSAKGCIVRNLAVRDLLVQNARPAIVFCSSRPGTENLARYLRISLGEMGMDWHNEIRFYHAGLSREEKSSVEKWFMGNSRAVLCATCAYGMGVDKADIRTVIHRDCAPSVEAYLQESGRAGRDGSQSKAILLWGPEDKTSLQRAKTDADRTRLSGLLEYARDITQCRRQTLLKMLNFDSGGESPETQCCDVCEHEASAALREEAGVLNFFRRNKRCYSINEACGKLAQSESHYWSEGEAKQTINHLLSAGKLKESKNPLFNRRIIC

SEQ ID NO: 95031 - protein, 241 aa, Unknown
  Obtained from environmental sample
  DOMAIN (116)...(241): AICARFT/IMPCHase bienzyme
  misc_feature (1)..(241): Xaa is any amino acid
LASFLTGSGWEILSTGGTSKYLQENKIPVTDVSSVTGFPECLDGRVKTLHPAIHAGILARRDVQTHVDTLKDLNFGYIDLVCVNLYPFFEKVQTGLSLQETIEFIDIGGPSMLRSAAKNFRDVIVLTDPADYPQIIDGLKAGNVPLEFKKQLAGKVFDLTSAYDAAIARYLLEDEYPKYLLLSLEKGQHLRYGENGHQSAALYLHTDSTGVLKGMEQLHGKELGYNNIRDFDLAWKAACAF

SEQ ID NO: 95032 - protein, 384 aa, Unknown
  Obtained from environmental sample
  DOMAIN (41)...(268): Beta-eliminating lyase
  misc_feature (1)..(384): Xaa is any amino acid
MVKVESGKKRIYLDWAASSPYSKTDNSVPFGNPSSNHSEGRLARQSLEDARRRCAEVLNVPPETLYFTSGGTESNSIALFSNLTRPGKGRVISSLAEHASVREGMVTLDKMGKSTGSVTVDSAGMVTPETFTKALDKYGDVRFAAIMSVNNETGAVTDVASLKEVVKKRKESAPIHFHCDLVQAIGKIPIDISNWEIDSASISAHKISGPRGIGLLYLQKPLEVFYSGGGQEKGIRGGTENTQGGIELANCLTRYANAETVQLEHARAKARCKKLMSSLSAMERCTIIPSCRTPEDDRFSPYILQVAFKNIPGEVMARALDDLGFAVSTGSACSSSSPERPVLAAMGIEENLRIEGIRISQGYSTTDEEIDLFLEAVAEVLKFL

SEQ ID NO: 95033 - protein, 345 aa, Unknown
  Obtained from environmental sample
  DOMAIN (222)...(326): Restriction endonuclease
  misc_feature (1)..(345): Xaa is any amino acid
MSEHYNCFSITDLYSNEEIFKSLTVGNTGGIRIKKTSQGEIRRIVIFTSIPTVRQIAENPYHDRLEGDILIYTGAGKAGEQSVTGYNSRIIEQGKHQFPIYAFIQIGNRRNTSIGVKRWGFLGLLEYLRCYQEEQIDSRNEKRTVWVFEFRVHTNPSTITITEDMEIMKKLLSNVSKDNDEDRKVVNHIINESRSNNVDITALEDTRKQLLACEPQRFEHIISDILLHSGFDDVNVTRYSQDGGIDINARLDKKIWPLRHLLTQIQAKRWLHTVGRKEVAELRGSLQPHAAGCIVTTSHFSRAAVNESMETGKIPINIIDGYELAYIVQSIKLDLSGVIFPLITK

SEQ ID NO: 95034 - protein, 207 aa, Unknown
  Obtained from environmental sample
  DOMAIN (1)...(178): NADPH-dependent FMN reductase
  misc_feature (1)..(207): Xaa is any amino acid
MKVVLVNGSPNANGCTFTGLSIIKEQLAKHGVDSEIFQVGKKPIIGCTGCRTCRQPEKGGRCVFDNDLVNTVAQAMEEADGIIIGSPVHFASASGAATSFFDRLFYCRFGMNRLKFGACIVSCRRAGSTATFDQLIKYFTLSQMPVISSCYWNGIHGYTPEDVYADKEGVRTLTILANNMAYLIKCKQQSNIELPEEPPMVMTNFIR

SEQ ID NO: 95035 - protein, 71 aa, Unknown
  Obtained from environmental sample
  misc_feature (1)..(71): Xaa is any amino acid
IASDTNLRLLDAPGNVFIRKKESKLTDDSVIIVAQLYAIDRGRFKKKVSKVDKEIMEKVEVGMKLVLGINQ

SEQ ID NO: 95036 - protein, 284 aa, Unknown
  Obtained from environmental sample
  misc_feature (1)..(284): Xaa is any amino acid
KKKGSAPDVYVLGAKGTGEVTEEEEITQPALWKNGVEVPLGLGSDASVSVVFVSGKDVYLVGNQQVPGPENGGAGDYPLTLWKNGVAQRLGQGNVGTVFVAGQDVYMAGSVDHAGDTSMWKNGTAQRLGGRGWVHSIFVSGDDVYMAGCLYGKTDGEPYVATLWKNGEPQRLGDGKVNSSASSVFVSGKDVKDVYVAGYEAAQEGVAAMLWVNGEAKCLAEGKKFGEAHYVSVSGSDVCVAGREDNEQGTTVATLWKNGVPQHFDGVPTPTASNSYGCWGLITH

SEQ ID NO: 95037 - protein, 323 aa, Unknown
  Obtained from environmental sample
  misc_feature (1)..(323): Xaa is any amino acid
LLNKKILVLCSSVFFLSGFLYARGANESGVKPLTVYGIKGSSGVGIVRLFEEPPKIPGFDVKVEALAQADQMAARFISGEARVGILPPNMAAKIALSGKDIRAAAIIGNGMLSLLSSDASVHSIADLRGKTVEVAGQGATPDYVFRRILEFNGLSPERDVALGYSMAPSEIAQSLIAGRVSVALLPEPFATMALTGKPDLVSVVDIQREWTRAGGKENFPMTLLVVDGAFASENPGAVKEILNAVKVSSEWVRTNPADAGKLVEKHELGLSAPVVAAAVPKSNYVFIPPSEGRTALEALFNLFLEYAPASIGGALPGEGFYFK

SEQ ID NO: 95038 - protein, 238 aa, Unknown
  Obtained from environmental sample
  DOMAIN (33)...(221): Nucleoside diphosphate kinase
  misc_feature (1)..(238): Xaa is any amino acid
EEANTDLRLIANCIEGKENIVQNVIHPDPSKIERTLVIIKPDNWTHNSSRPGAIIDMFSRTGLRIIGMKIHHFSLSEALDFYGPVENVLIDKLSSSFGNKAKEILETEFDIKTSKETANVLINDFGVQCAKKQFHDIIEFMSGRRPGAYHEDDMKKPGQVKCMIIVYEGENAVHKIRDVLGSTDPTKATNGTVRREFGSNVMVNTAHASDSKESYEREQKIVRINHNSVASIIKENLG

SEQ ID NO: 95039 - protein, 353 aa, Unknown
  Obtained from environmental sample
  DOMAIN (42)...(143): Phage-related baseplate assembly protein
  misc_feature (1)..(353): Xaa is any amino acid
MLDLDREINKLLEKHPDPRKGIDGRIEFRKRKETEAGLPRFGTVVDNKDPQCLGRVRVACDTIAPGAVTPWIQIIALGATNKTGWWQLPDIGTQVVLGFVGKGHNNPVVLGCIYDLKHLPPEHTPKKESDSKVWQTKKHRLEFIDEEGKETLIISSAKGKMRCVLSKDKGIELVNELGDIEIKCRKFTVEGEKGIQIEGKKKVTIKSEDKITIKGSKGIKLENGKEVKIKGKNIKLEASKGITAEGKQIAAEGDKVTGFDVHQMVIPSGSGTAVAPLPHPFLGKMADKLSKDVKIKGHNAAVKGSVAKHDDPMHNQLPGTIQFQQAPKKEGEVTGGTSGKVKINGKEAAVIGS

SEQ ID NO: 95040 - protein, 336 aa, Unknown
  Obtained from environmental sample
  misc_feature (1)..(336): Xaa is any amino acid
DSFHESGFIEFVTPADMAAKNEFSKNLHWLRLCLVSGGFEAQPVIMSIFNNAVYAQNKTSHVNEIAGSGTGAPGQSVSPAHGPLLPGIEIFVDEGSIPPTNEIEMMTAEGIKEPYQIDGESVWVRYKEVDNFYSSTPFSRHFVVDYREQKIHFGDGQRGINPPRRKFNIRIASYSTGGGADGNVAAGTLRTLTQSIAFIAGCDNQFPAEGGADMETVDNLKSRAAGVFKSLQRAVTSEDFQWLSREASASVGRAWCLKEKNKQGEIVIVIIPIIPSGETLAYKLIPSRELLRRVTSYLEERKLVGTKIHVQGPVYRVFNIQLNMVFRSDILDLERL

SEQ ID NO: 95041 - protein, 397 aa, Unknown
  Obtained from environmental sample
  DOMAIN (42)...(143): Phage-related baseplate assembly protein
  misc_feature (1)..(397): Xaa is any amino acid
MLDLDREINKLLEKHPDPRKGIDGRIEFRKRKETEAGLPRFGTVVDNKDPQCLGRVRVACDTIAPGAVTPWIQIIALGATNKTGWWQLPDIGTQVVLGFVGKGHNNPVVLGCIYDLKHLPPEHTPKKESDSKVWQTNKHRLEFIDEEGKETLIISSAKGKMRCVLSKDKGIELVNELGDIEIKCRKFTVEGEKGIQIEGKKKVTIKSEDKITIKGSKGIKLENGKEVKIKGKNIKLEASKGITAEGKQIAAEGDKVTGFDVHQMVIPSGKGTDVVPLPHPFLGKMGDKLSKDVKIKGHNAAVKGSVAKHDDLMHNQLPGTIKFQQSPKKQGEVTGGTSGKVKINGKEAAVIGSTVTTCNDIGIRDNSVIIAAGASVPMPVIINPKNTAEYREEREKE

SEQ ID NO: 95042 - protein, 418 aa, Unknown
  Obtained from environmental sample
  DOMAIN (211)...(276): Histidine kinase
  misc_feature (1)..(418): Xaa is any amino acid
MDNGMKQNQRKKFFIFTAVFYMLVGAACGHAQNREISILEITEQWTAIEHVFMEKQVSGENNFNYEKIDALSGSLNAFLNSETYRIFRLAPLSSETDRILGPSEPNEIPEISAAAGLLLEFREALSKGETEKALLVSADITHNFVMALARSTEAERYAYTAYFRLLLVFIAFIIFTALLSLFLYRSLTKSLKREAYGSWFSQSVILAQEKERSRLSRELHDTVAQDLRCLLLGMDKIGNCSDREERVKLCTEAAASHSSLIRKVRNICDYLVPPDFRFQGIENALRQLCLDYGKRTGIDCRVEIAEDVNLERLGEEKQLQIFRIIQEALTNVEKHSGATEAIVIIRRGLDNNIRVGISDDGKGFIPVIAYDLRTPYEDAHLGIRGMNERAALLGGSLLIKSEPGEGTLVCLEIPITAE

SEQ ID NO: 95043 - protein, 98 aa, Unknown
  Obtained from environmental sample
  misc_feature (1)..(98): Xaa is any amino acid
TMTQSGRITLFTQIVANAVVEADNEVGLKIIETLGDEDEDMESMMNDISMKEEDREIDIEKYTTEEAYKAAKADEEVPEDDEDDTKIKVDIDKVYNDE

SEQ ID NO: 95044 - protein, 339 aa, Unknown
  Obtained from environmental sample
  DOMAIN (52)...(339): Amidohydrolase family
  misc_feature (1)..(339): Xaa is any amino acid
MHYDLILKNGTIVTSKESLKTDIAVKNGKIAKTGSLENSCTADDIYDAAGMYILPGIIDAHVHFRDPGLTEKEDFETGSIAAAFGGVTTVADMPNVVPVTATAAEYSKKVKTAKEKSYVDFAVFALLTNNNLKDMDGLKNAGALGFKVFFGTSTGDVAAPSAPILIQQMEKSVNLGMRIGFHCETSDLNSCFTEIWKKKKDLNEGFLLSKARPVISETLAIRTVIFYADYTKANIHIHHITSNKSALLVAQAKKRKINITAETCPHYLLFDGEQCVHKVYPPIRSMEHGKAIWKALKKGVIDMIASDHAPHTPEQKALPLWTAPAGLCGVETIVPLMLN

SEQ ID NO: 95045 - protein, 213 aa, Unknown
  Obtained from environmental sample
  DOMAIN (15)...(80): ATP synthase alpha/beta family, beta-barrel domain
  misc_feature (1)..(213): Xaa is any amino acid
MAENSENKNTDTGVLIKISGPVMDVRFDSGVAEPLLNELLVTSDGRHMEVSANFEPGVVRCVALDATDGLCCGTEVFRVGHGIRVPVGSPMLGRVVDVLGRPIDNGPPIENTLQWDIHRPPPSFTDLTPVTEFFETGIKVIDLLTPYSKGGKIGLFGGAGVGKTTLIMELIYNIATVHGGYSVFAGVGERSREGSELIHDMKASGAIDKTALV

SEQ ID NO: 95046 - protein, 496 aa, Unknown
  Obtained from environmental sample
  DOMAIN (4)...(395): Glucose inhibited division protein A
  misc_feature (1)..(496): Xaa is any amino acid
VNFDTLVIGGGHAGIEAANAAWKIGVKTALLVFDKKSICRMSCNPAIGGVGKGQMVRDIDAMGGLMGVLADKAGIMFRTLNSSKGPAVWGNRAQCDMNLYSEIARKTLEGLDGLEIIEGEAVLLEKNEKGWKVGLHSDVQIQCRSVIIASGTFFKSKMFTGLDKVSIGGRVNEPSSDLLPESLGKLGIKTRRLKTGTPSRIDSASVDFSECEVQIGDANPWAFSSKTDAKNLCNSAKCYLTRTTKETHRILETAFEKSPLFTGKIQGLGPRYCPSIEDKIKRFTDKESHQLFLEPETKEAKRIYINGFSSSLPEEAQIQAMRTIPGLKNASVLQIGYAVEYDAIKATELHPTLECKQHCGLYFAGQVCGTSGYEEAAAQGIIAGINAALKIKGKEPFILSRAESYIGVLIDDITGMEWSEPYRMFTSRAEYRLFLRADNSEQRLCEKAHKAGMLSGAEWKNYEEERSRVEEAKKFLSENSGEPEQIAPIWQKAVKR

SEQ ID NO: 95047 - protein, 66 aa, Unknown
  Obtained from environmental sample
  misc_feature (1)..(66): Xaa is any amino acid
MLPEIRWIQRLDSFERAFAVLQRIAAIKNERELSEAEELGLIQSFEFSFECAWQLMKDFLTYTGIS

SEQ ID NO: 95048 - protein, 156 aa, Unknown
  Obtained from environmental sample
  misc_feature (1)..(156): Xaa is any amino acid
MSTLKISVLNVGHGDFIYAETPLGNNLVIDCGNDGGDVTPSRFLNGIPKIDELQISHPHTDHFGDIIKIGAKTINSFRCPSLKNFTDKVIGWRNSDQAIINKLRTLKNNIAPNDDAVSCDSNFSHLVYSPQNVDYTNANTASYVTILSYAGVKVLF

SEQ ID NO: 95049 - protein, 338 aa, Unknown
  Obtained from environmental sample
  DOMAIN (69)...(322): Methyl-accepting chemotaxis protein (MCP) signaling domain
  misc_feature (1)..(338): Xaa is any amino acid
MQVLIFFAGIIVTCAVLVPALLSYKKRIRELEEKTEQSFASVSNFKGKTIKLAAAVKESADVVSRTGKNNKTSGGGQTGSMEKVESTINENARIAADIVEKTRSVAVIASKMEEDVLDGFKVLEKNVKKMGDIKEKNSGVINGIISLGNKVNKIRDIVRVINTITDQTKVIAFNAALEAASAGETGKRFAVVAGEVNRLADDIAVLTRQIREQVEEIQSSSSSLIVYSEEGSDRIAEGYKLIKDLEDVFKEIRAGAEITSNQAQAITVSTQQQLKSSEKVSFAISEVSQGVKHFIGAVETAATSAGTLTERTRELERFLTSQGAAGVKETIGQGEHGG

SEQ ID NO: 95050 - protein, 306 aa, Unknown
  Obtained from environmental sample
  misc_feature (1)..(306): Xaa is any amino acid
KVKAGGKDEIRAPLFQKELSSLAANEEYAIPAAETGDEEKPQQKSKADDAKHRPDDTSIRIPLERIDKVIHDMAALQSLEIIARNIARDTEAVNAANRNFAKLLSSSLPWNSPIIQEFRPIELLTGKLGSVVRNYSLDVGNHIRGAYDSIISLRMLPLSTVLDEYPRQVFTIASELGKKVKLHIEGAENEIDKNLIESLSEVFLHMIRNSIDHGIETPDERRKAGKDETGLLTINCVRESGNMKVTIADDGKGINIEGIRKKIVEKGLVAPEAAAALGEEELINFIFQSRIFNRAEDFQCFRARSR

SEQ ID NO: 95051 - protein, 286 aa, Unknown
  Obtained from environmental sample
  misc_feature (1)..(286): Xaa is any amino acid
FKDGKASYGSAVSISSGSVNLESCIFSGNQSSASNIGGTIFNASGILSVNGCTFYGNSAVFGGAIFNYNTSCNTTLTGNLFYRNTAISYPVIYKGTVTSAGYNVVDVPLGTGTNQSGWAGQSTDKTISSIPILPLNFKLLSGSEAQNVIINLPTGYPIVDFYGNTIPTTGAAAGAVQEPASSGYLVELTVNNNILGSTEITSAPARNDDGLYPGGSITFKANPEAGYELQYWLVNNQHYTANPLTLPLNSHYIVQAVFDRAGIKLEFLHNPNYRDFAIESILDSSQ

SEQ ID NO: 95052 - protein, 508 aa, Unknown
  Obtained from environmental sample
  misc_feature (1)..(508): Xaa is any amino acid
MTTYLRKNFGKRPLGCWIPGMIWEQHLAAALAASDMQYTFLSQDQFIQAGLSGKDLYFPCISEDQGKLITVFPVSMSVQEVLAQKSASQVFIEMKNTITEKTAFSSDIIMTVFPEKPFSDPQEAQETAWNRFFEELSLSKDFAETILPLKVIKANKFFKKASFPNSSSLENNFSPRRFLIEHCEANGIYSKMIFTSVLVNQLKGDKYRKQNAREELWKAQDSCLFVPGNGFLRHELRKAAYSSLLRAERLSREKGRFVSSLVQHDFDLDGVKEYLFQDARINCYIQLKGASVFELDYLPKDWNYLDCGSTNSAKDRRTSFADALIPASSQADFQISFPPGSRLCFNEQYEEISQDRKGKSCFKLPAASVDTPYNGIVIEKCYLLKKDVLSVNYELKNTGDKPEDFIFVTVINFSFAGNGEEFVRFHVIDKNGKEIPAENILTGVDTLKILDVTNEVQLLLGSAKSFNACLLPALDDGLYQSSRVITQFAVSLKSGENWENEFSLKFSH

SEQ ID NO: 95053 - protein, 222 aa, Unknown
  Obtained from environmental sample
  misc_feature (1)..(222): Xaa is any amino acid
MPEQKIAYRNKPQINLSYPSTGRMWLVSVCAFLCALQSALTDDGNSLIIAGTTVFSAVLIELLLTVRQFGVSKIKDGSAVATALILSLILPNQIHPVYAAFGAAFAIVIVKYSFGGLGSNWLNPALGGWLFIRFSWPSVFVKAIDNNVSEMIVSGLSSIDNSVTTFFNDTVLSVTGVQLPSGYINLLFCNNPGLIVDRGLFTLLLGTIIITALGITGGGCRW

SEQ ID NO: 95054 - protein, 405 aa, Unknown
  Obtained from environmental sample
  DOMAIN (33)...(352): tRNA synthetases class I (E and Q), catalytic domain
  misc_feature (1)..(405): Xaa is any amino acid
METTNTSENLNSGGSDFISDFIKEDLKNGRYDHVHTRFPPEPNGWLHIGHCKAFYIDFLMAEKFGGKCNLRFDDTNPEKEDQSYVDAIKRDVKWMGYDWEDREYYASDYYDYLYELAVKIIKKGKAYVDDLSDVEMSEYRGTAVADKNNITVTPPGRNSPWRDRGVEENLDLFARMRAGEFPDGAKTLRAKIDMAHPNLLLRDPVMYRIRREHHYRTGDSWCIYPMYDFQHPLSDAKEGITHSLCSLEYEIHRPLYEWFINEAEVFQSRQIEFARLNMTRTVMSKRWLLRLVEEKYVSGWDDPRMPTIAGLRRRGYTPEAIRSFVSQVGIAKTDSMADIAFLEYCLREDLNKTSLRVMAVLRPLELVIDNWPEGKVEEVEAVNNPENESAGKRKIPFTGKLWMNG

SEQ ID NO: 95055 - protein, 573 aa, Unknown
  Obtained from environmental sample
  DOMAIN (361)...(559): tRNA synthetases class I (E and Q), anti-codon binding domain
  misc_feature (1)..(573): Xaa is any amino acid
MENTNTLEDVNSCGSDPKSPATDFISDFIKEDLKNGRFDHVHTRFPPEPNGWLHIGHCKAFYIDFLMAEKFGGKCNLRFDDTNPEKEDQSYVDAIKRDVKWMGYDWEDREYYASDYYEYLYELAIKIIKKGKAYVDDLSDVEMSEYRGTAVQDKNNITETPPGKNSPYRDRSIEENLDLFARMRAGEFPDGARTLRAKIDMAHPNLLMRDPVMYRIRRETHYRTGNSWCIYPMYDFQHPLSDAREGITHSLCSLEYEIHRPLYEWFIREAEVFPSRQIEFARLNLSHTVMSKRWLLKLVQDKRVSGWDDPRMPTIAGLRRRGYTPQAIRNFVSQIGIAKTDSMVDIAFLEYCLREDLNKRALRVMAVLRPLKLIIENWEENKTEEMEAVNNPEDEGAGKRLVPFSRELWIEREDFEEVPPPKYYRLFPGNSVRLRYAYIVTCTGFDKDADGNITAVRCTYDPQTRGGNAPDNKKIKSTIHWVSAAHSVPMQARLYDYLFSVEKPMEVSPRPDGSPGEFTDNLNPNSLEVIENAQGEPSLSDVSPGKVFQFERLGYFVRDPDTALDGRPVLTRL

SEQ ID NO: 95056 - protein, 247 aa, Unknown
  Obtained from environmental sample
  DOMAIN (41)...(198): CDP-alcohol phosphatidyltransferase
  misc_feature (1)..(247): Xaa is any amino acid
MRKVTLKDGIYIIPSLFTCGNMTFGILSIFSSINGHFIQAAWLLVGALACDILDGRIARMTNTTSDFGMELDSLSDLASFGIAPAIMMYMLVLKTMGKIGIAIAILYVLCCALRLARFNVLAQSGELQKHFVGLPTPASAGVIISFVLSYELLGPAEKYALNFKTIPILMTLMPTFFRVMPIVMAALSFLMVSNIPYMSFKGIKLSKVRTIELLALMIVLIIVVVVYPQNTFFIIFSVYAVSGLLFY

SEQ ID NO: 95057 - protein, 518 aa, Unknown
  Obtained from environmental sample
  DOMAIN (1)...(494): tRNA synthetases class I (I, L, M and V)
  misc_feature (1)..(518): Xaa is any amino acid
TMEPYYMETIWWVMKSLWEKGYLYEGHYILPYCPRCATVLSNHELNLGGYKDVHDPAITVRFKVVGATPPNTYFLAWTTTPWTLPSNLALTLGADIDYVLIEDLPSTPHSPLPTPNDHYILAEARLSAYYKNDTEYKVVWRKKGSQLAGLQYEPLFPYFKDAPNSFRTFLGDFVTTEDGTGIVHTAPGFGEDDARVLKGTGIPVICPVDEECRFTQEVTDFAGVFVKDADKAIIEKLKREGKLIKREQILHAYPHCWRCSSPLIYRAVGSWFVSVEKIKKDMLDANSQIYWVPEHIKEGRFGKWLEGARDWAISRSRYWGNPLPIWRCPDCGKTICVGSRAELKELSGVYPDDLHKHFVDEIKIPCSCGAKMSRVPEVLDCWFESGAMPYAQNHYPFENKEFFDSHFPSDFISEGLDQTRGWFYTLTVLAAALLKKPAFKNCIVSGLVLASDGKKMSKSLRNYTDPNEVINSFGADALRLFLVHSAVVKADDLRYSDDGVREIMKSIIIPLGTPTVFC

SEQ ID NO: 95058 - protein, 83 aa, Unknown
  Obtained from environmental sample
  DOMAIN (4)...(66): DnaJ domain
  misc_feature (1)..(83): Xaa is any amino acid
MKRDYYEVLGVAKDASLDEIKKAYRKLAMQHHPDANPGNKESEELFKEAAEAYGVLSDADKRRQYNQFGHAGVGGGGFQFDPG

SEQ ID NO: 95059 - protein, 191 aa, Unknown
  Obtained from environmental sample
  DOMAIN (31)...(186): GrpE
  misc_feature (1)..(191): Xaa is any amino acid
LRRAPLDAQSEEESSAIEFLDTGCSECTGQAQGGTAELNAKVSELEKSLAEERDKYTRLLADYDNSRKRSAKEVQLGVEQVERQILLEVLQVMDSFRRCLASNYASVEDFRAGVGLIERQFDSALRRLRVSEIEIGVGGEFDTHVAEALTTVKMAGFPAGSIVEVCERGYRIGERLLRPARVVVAAGDDAP

SEQ ID NO: 95060 - protein, 268 aa, Unknown
  Obtained from environmental sample
  misc_feature (1)..(268): Xaa is any amino acid
IDIPHKKLETEDFRDVKIYVKASITDIRVVLEPLIGAALGFIQKTSNSTLSFTKPNTDYLIREILRFIGHGTSHENIRVDKSIFDTTFDERKSFLRGFADVTGYIRKSNYFFQTYKHRVYLEVPHNWGLVIDVCNLLKSIDIPVQAIDWAHPNIRDGKLTKYNEGNTNFWKKEHQIKIWANEFEPVGFGILHKKSALTTFADELKLGLENDGKDVLSVTHKFYWELSGKSKSKPKHPAENDAFIHQSIRGKHFDSWREIAKELGYGEN

SEQ ID NO: 95061 - protein, 264 aa, Unknown
  Obtained from environmental sample
  DOMAIN (3)...(264): CorA-like Mg2+ transporter protein
  misc_feature (1)..(264): Xaa is any amino acid
IKTIQHEKEFHHELAKRRKRFFFFQKEEEEMLQEFVIDQVSVIIMKNTLITFQEIEGDSFDAIREKILTGAGEIRTMEMDYLSYEIIDAVVDEYFLALNHLEDDIEDYEDRATKTNDDMFIQELQDTKKYLLKIKRAISPLKDNVSIILRQNKFLLADKLKPFVQDLLENLHNAEIIVEHYREWLSNIMDVNLSVLSQQTNKVMKVLAIISTIFIPLTFIVGIYGMNFEYMPELTKEWGYPVVLGLMGLIAMTMILTFKFKRWF

SEQ ID NO: 95062 - protein, 211 aa, Unknown
  Obtained from environmental sample
  misc_feature (1)..(211): Xaa is any amino acid
MATTTKAKVIPPPPTGEGLTFEKVWAMFQEIAERQKETDRQMKETDRQMKETDRQMKETDRKMEETDRKMGDLYNRFGEMAEHLVAPSIHERFNELGYHFDAVAPGGYVIRNEENEVLAEVDILLENGDYIMAVEVKAKPRIKDIQHHIKRLEILRQHRNKLRDTRKIQGAIAGAIFGSREKQAAMEAGFFVIEQSGDTMKIDIPKGLFPE

SEQ ID NO: 95063 - protein, 280 aa, Unknown
  Obtained from environmental sample
  DOMAIN (1)...(274): Omptin family
  misc_feature (1)..(280): Xaa is any amino acid
MVYGQANEIVYKNSITSDFLSELQWDIMPLLYAGLAVDFGPVDNFAKHGLIGSLSFKMGIPQQTGIMTDRDWQYIDSNALTDYSRHDNFSERAIMADLSFGYSFPLLNFIALGANLDFSFMHYYWIAKDGYYQYLNPGQTWADEIPKVNVEGRVLEYTQNWFILSPGIFIKFRLGSYFSLNGNFNYSPLIYCADRDEHPLKNTTYQDFLYYGRYLKGSGGLTFSPLDYLDLTLFLSYSSITNSRGVTYINSQKYPYPIAGGGYFAFEIGLSARFRLFGKR

SEQ ID NO: 95064 - protein, 691 aa, Unknown
  Obtained from environmental sample
  DOMAIN (427)...(656): Methyl-accepting chemotaxis protein (MCP) signaling domain
  misc_feature (1)..(691): Xaa is any amino acid
MNYLANEQATYWDGREDGYIKQLTGIADIMGEFEMLPPQDRRDQYDNMLKATLNNNANFVRIFSIWKPNAMDGMDSLYIGRPGSTPTGQYAMTWGRDTGPIEVKPNLILDEINAWMNGPNALKTRVENPTPFTNAGKETFIFRIGVPITRSTSNEVVGHLCVLIDIAPMQAVVEKTIKDYEEISALVLYSGNGMIMGHLVPERVGKMLIDVDTIYGDYIKEADKAVKEGKEFECSSYSPVLKADMKITMIPFQIGDSDMNWTIMIASSETYIMQEVNAITRFTIILAAIAIVVAAVIVYFVLNSTTKPIVKVADTLRDISEGEGDLTRTIAVSSKDEIGDLALYFNKTLKKIKDLVLNIKKEAGILSEIGNDLSSNMTETAATVNEITSNIQNIKTRVINQSASVTETNATMEQVVENIKKVNKHVENQSEDISQASSAIEEMVANISSVTNTLVNNAANVKNLLESSEIGRAGLQDVAQDIQEISRESEGLLEINAVMENIASQTNLLSMNAAIEAAHAGEAGKGFAVVADEIRKLAESSGEQSKTIGTVLKKIAESIHKITSSTENVLHKFEAIDSSIKTVSQQEENIRNAMEEQGEGSKQLLHSAGDLNESTQQVKTGSNEMLVGSREVMKESRNLEKLTQEITGGMNEMATGADQMNVAVHHVNEISGKNREAIDILMKEVSRFKVQ

SEQ ID NO: 95065 - protein, 848 aa, Unknown
  Obtained from environmental sample
  DOMAIN (59)...(278): Bacterial extracellular solute-binding proteins, family 3
  misc_feature (1)..(848): Xaa is any amino acid
TGNPELKHIISVVQKALQNGSMRYLTSLYNKGGDAYRRHALFMRLSEEEKAYMREHTVVSFAAEYDNYPISFYNRFEKEWQGIAHDVLKELEALTGLTFEITNDHDMEWTALLNKLSRGEVSMISELLRLPEREESFLWPKTAIMTDHYALISKLNYPRLRINDVLSVSVGLIKETAYASLFKSWFPEHKNIVEYESTNAAFDALEQGKVDLVMANLSQLLMLTNYYERTGYKANIIFNFVSESTFGFNKDETVLRSIIDKALLFVDTKDISGQWMRKTYNYSAKLALLHRFWLIVASILLSSVLLLMFILFQKSHRAEKRLETLVKKRTNELVLQSATINAAFDVTPAMVCCKDLNLRFTRCNKAFEKYFNLREADIIGKGNVDGLGIPAEVAAQYIELDRKVINDGVMVVVEEHIPSADGTGQLFETSKVPLVQNGQITGLLVISHNITHLKAMEEQALSASRAKSLFLSNMSHEMRTPLNAITGMTVIGRKAKDIERKNYALDKISDASAHLLGVINDVLDMSKIEANMLGLSPVEFSFEKMLQKVVAVINFRVNEKRQNFTVNLDDAIPPVIIADDQRLAQVVANLLSNAVKFTSEEGSISLTAVLIGEENGICTIQVSVSDTGIGISEEQQKKLFNSFQQAESNTTRKYGGTGLGLAISKSIVEMMGGKIEIRSELGKGSVFTFTVQAQKASYIENNASADDAPDNGRADITGIFEGSSVLLVEDVYLNREIVIALLEPTRLSIDCAENGAEAVRMFAENPDKYALIFMDVQMPEMDGYEATRRIRAMDMPKAKTIPIVAMTANVFREDIEKCEAAGMDSHIGKPLDLEELLNKLRGYLLHNT

SEQ ID NO: 95066 - protein, 281 aa, Unknown
  Obtained from environmental sample
  DOMAIN (199)...(278): Response regulator receiver domain
  misc_feature (1)..(281): Xaa is any amino acid
MSKIEANMLALSPIEFNFEKMLQKVVTVINFRVNEKRQKLDVRLDDAIPQTIIADDQRLAQVVANLLSNAVKFTPEEGSITMEASYIGEENGVCTIQVSVSDTGIGISGEQQKILFNSFQQAESNTTRKYGGTGLGLAISKSIVEMMGGKIGVKSEIGHGSVFTFTVQAQKGSYIKDAPDPEDAADKGKADFTGIFEGHHIMLVEDVELNREIVKALLESTRLAIDCAENGMEAVRMFKESPDKYALIFMDVQMPEMDGYEATRTIRAMDIPKAKTIPISL

SEQ ID NO: 95067 - protein, 705 aa, Unknown
  Obtained from environmental sample
  DOMAIN (439)...(623): Radical SAM superfamily
  misc_feature (1)..(705): Xaa is any amino acid
MATHYNEPIDIASSSLTEEGTVFGGETNLLKGLKNLIDLYNPQVIGVCTTCLAETIGEDVGAVVKKFYEQNPHTSVEIINVASPGYGGTQNEGWFAALRAVVGQIDPDKIPNGKVNIITPQISPADTRWLKGFFTEMGVDYILLPDISDNLDGVTEKPYNRLKMGGTPLSDAAKMAGARLTIEFSEYTNADNSPAEYLRKAYNVPFVKLPLPVGVRAVDTLINTLKTLGGVVTQNILKERGRYLDAMVDSHKYCSEARAVVFGEPDFVTAVVRLCCENGILPVVAATASVSDKLKETLIAETKDTREFNFGQEISIVDDSDFLEIEKLCADRNANLLIGSSDARRISHKLHIPLIRCAFPIHDFVGGQRVRVLGFEGSLNLLDQAANAMINKTETSFRGDLYQQFFKNKDERSQISVADQTAAHPCFGKHACSNARVHLPVAPECNIQCNYCLRSFDCMNESRPGVSSKILAPHEAFDRYKILKQTLTNLTVAGIAGPGDALANFEETCETLRLIREYDPNVTFCIATNGLMLPQYVGELKALGVSHVTVTVNAVDPKIGAKIYKHIHFMGETFTGIEGASILIANQLAGIKMLKDNGIVCKVNCVTLKGINDSHIYDVTKKAAELGAFITNIMPHIPVKGSAFEELERMTNKEIEALRTQCGANIKQMTHCKQCRSDAAGTLTEDISLDFRETAPMATEKTETR

SEQ ID NO: 95068 - protein, 225 aa, Unknown
  Obtained from environmental sample
  DOMAIN (1)...(225): Dihydrouridine synthase (Dus)
  misc_feature (1)..(225): Xaa is any amino acid
MEGVTDLPFRRFIRELSKDKQPFFVSEFLSTGSSLFLTPVNTRAVRFDKEEEPFCMQLFGHNAERLSAAALQAQELGAAFVELNAGCPAPKIANKGSGSGLLRDLPNLQKILESMKNVLKVPLFLKCRLGWDENSIVINEVLEMAEGCGVEQLTIHGRTKVQGYKGLANWDAIGAIAAKAKIPIIGNGDIDSAEKALNAVKLYGVKGVAIGRAVLRNPLDFFANS

SEQ ID NO: 95069 - protein, 202 aa, Unknown
  Obtained from environmental sample
  DOMAIN (2)...(202): Glutamine amidotransferase class-I
  misc_feature (1)..(202): Xaa is any amino acid
MIIVDYGAGNLTSVYNALGFLGIKSLVSSEPEEIENAEKIIFPGVGAAAAAMDNLNKSGIGAALEKAFKKRIPILGICIGCQIILEESEEDGGVKCLGFLQGKAAKFRKEPNLKIPHIGWNQVNFTKEHPIFKGIPNNSNFYFVHSFAPFACDTETIYGTTTYGSQTFPCIIGNGCNLIATQFHLEKSGDIGLEVLRNFSSL

SEQ ID NO: 95070 - protein, 174 aa, Unknown
  Obtained from environmental sample
  DOMAIN (1)...(158): GGDEF domain
  misc_feature (1)..(174): Xaa is any amino acid
ELTQLKNRRDFQQTFRRYLSNYRTSDNWLCIAIIDIDFFKFYNDHYGHPGGDECLRAVGRVLNSLKDSHNVYAARVGGEEFALLWFETEASHVDVVISHLQKLIKELKIPHEKSKVSPYVSISIGVFVERSGAPTDTQTMYDMADKALYNAKEGGRNCAVIFGNKIEQYKITPL

SEQ ID NO: 95071 - protein, 131 aa, Unknown
  Obtained from environmental sample
  DOMAIN (1)...(109): Fumarylacetoacetate (FAA) hydrolase family
  misc_feature (1)..(131): Xaa is any amino acid
FDYVLGYTCFNDVSQRNIQKSDASGWFRGKSFDTFGPIGPVIVPHGDIGDPQTLRLTCKINGAIKQDGNTGDMIFSIPVLISFISKQFTLEEGDVIATGTPSGISPIVSGDIVEVEVEKIGILRNPVVEER

SEQ ID NO: 95072 - protein, 331 aa, Unknown
  Obtained from environmental sample
  DOMAIN (24)...(215): Flagellar motor switch protein FliM
  misc_feature (1)..(331): Xaa is any amino acid
MVEELSKQEIDQLITVINATPAVMETKRSNKFSAEQLQAVSYIHDVFANLTTCNLSAYMRSMCQVYVSSVDEFTYEEYLRIALFAPSTLAVVNMNPLKGSAILEVNPEIKFAIIDRLCGGSGDGKKFQHELTDIETSIMETIIAHILGNLREAWNQVLVMHPQVKAINTDPQSVRIVSPNEIVILVTLGTKIGEEEGMINICIPSSTIEPVMEKLTNWYWNKNQDNTQSVSSVTEKPSKEKSGHIPKEKKRKKFKLFNRINRTDPATLLNFIQSEHPQIIALVLAHMKPDKAAIILLNLPFNMQSDVFRRITVMDWVRDEIASEIERVMEN

SEQ ID NO: 95073 - protein, 75 aa, Unknown
  Obtained from environmental sample
  misc_feature (1)..(75): Xaa is any amino acid
MHKEISEKHHKPHIHVEYAEDEVVMALDGEILEGSIPKSKIKLVEAWLEIHHDDLEANWKLLSKGEEFFKIDPLK

SEQ ID NO: 95074 - protein, 82 aa, Unknown; identical to SEQ ID NO: 87492
  Obtained from environmental sample
  misc_feature (1)..(82): Xaa is any amino acid

SEQ ID NO: 95075 - protein, 365 aa, Unknown
  Obtained from environmental sample
  misc_feature (1)..(365): Xaa is any amino acid
MESLGEKLKTARNEKGLSIDQISRDTNISIRYLEALESENFSIFPGEPYLIGFIKNYGAYLDLDIQKLISLYRALKIQEQPIPVEQLLKSPPQAPRFLLPTIIILAVLGLSGWLVYSLIINNKDRPSLSIPTGRTSAEYIMEGNSMERRLYKNDSVLIPVDNETYKLELYNMGEAVTIRTPAGMEILDLSQEVNIDLNNDGIPELRITVADFAKNNADMGALLHFYLMDAAVYTGAEIEQNITHTVNTVNAASTTIFPASATAYPFTLQAGFQGYCMFRWEILNERDRKGSTQRYFQRSEVLDIQAQNGIRIWVSNAQTAKLQVIGGGRTVPLEIGSAGEVVVADIRWVRDEENRYRLVLIKLET

SEQ ID NO: 95076 - protein, 158 aa, Unknown
  Obtained from environmental sample
  misc_feature (1)..(158): Xaa is any amino acid
MESLGEKLKTARNEKGLSIDQISRDTNISIRYLEALESENFSIFPGEPYLIGFIKNYGAYLDLDIQKLISLYRALKIQEQPIPVEQLLKSPPQAPRFLLPTIIILAVVGLSGWLVYSLIINNKNRPSLSMPTGRTSAEYIMEGNSMERRLYKNDSVLI

SEQ ID NO: 95077 - protein, 74 aa, Unknown
  Obtained from environmental sample
  DOMAIN (13)...(67): Helix-turn-helix
  misc_feature (1)..(74): Xaa is any amino acid
MKIKDSKSFGAAVRAYRKRQGATQIQLAATANTGVRFIGDLENGKPTIQLNKALRVADILGIKIEALNINEDSK

SEQ ID NO: 95078 - protein, 834 aa, Unknown
  Obtained from environmental sample
  DOMAIN (745)...(828): Hpt domain
  misc_feature (1)..(834): Xaa is any amino acid
MHTMEFNLEHRLIAESKRLASMVSAEELDRFRSIQDMKRPDYKALRRRMLDFSIEADVRYAYYIRPVDSGLQYIIDNDFNEKTRVGLDTPPFDPRSVPWIVSSLEGQAVCSVLGNYNPGWEGLLSGYAPIFNKDGKVTAVAGVDIEDRHIVRAWRLVSILTIVQFITAAAIFVMGIIYLIYLYRQLEIAREASSAKSDFLAKMSHEIRTPMNAITGMAELALREEMPQTVHDHILTIKQAGNNLVSIINDILDFSKIEAGKLEIIPVNYMLSSLINDTVNIIRTRIMEKPLRFFTNIDGTIPNNLIGDEVRLRQILINLLSNAVKYSEKGYIGLTITSDKRDDKRIRIRIAVSDTGKGIKPEDQTKLFDEFVQVDMKKSQNVEGTGLGLSITKLLCIAMGGDIRVESEYGKGSVFTALIPQGIETEEPFAVVEEPGKKNVLVYEGRTIYAKAVSWSLENMGVPHTMVTNQDDFTAALYQAEWFYVFSGYGLYEKIAMIMQKGDTAFRGRKKPSLALMVEWGTEAYIPGVRFVSIPVQSLSIANVLNDRADDKGYIKTSGVIRFTFPSARILVVDDISTNLKVVEGLLAPYQAAVDTCLNGLQAIELVKQAAFRKREYDIVFMDHMMPEMDGVEATAVIRAWEKEQQEKNPDHPQTTIVALTANAVVGMREMFIENDFNDFLAKPIDVSKLDEILDRWIPREKRAMNEKQNNPPDKDTNSSLSSIPGVDTQKGIDMTGGTIDNYKQVLFMFCKDAKARLPLLQETPEGDELTVFITQVHALKSASATLGAEKFSKEAEELEYAGKAVDMAFIREHLGAFAQRLAELIRNIEKAID

SEQ ID NO: 95079 - protein, 282 aa, Unknown
  Obtained from environmental sample
  misc_feature (1)..(282): Xaa is any amino acid
MKDGRMSLFAPDVTKGPDGRYYLFYVLNMADVVSVAVCDSPAGEYKFLGYVHYPDGTMLGRRKGDQPQFDPGVLTEGDKTYLLTGICGHDTKTRPGSTAVTLGPDMLTVLDEPVLIAPGVHNSKNTSFEGHEFFEASSIRKRGDTYYFVYSSIAGNELCYAISKNPLKDFVYGGVIISNADLRIDTYKPAEKPMNCGGNNHGSIIEIKNKWYIFYHRHTNGHEFSRQGCLEPIEIKADGSIPQAEMTSCGPNGGPFEGKGEFPAYIACNIFSTEDGNQRACR

SEQ ID NO: 95080 - protein, 233 aa, Unknown
  Obtained from environmental sample
  misc_feature (1)..(233): Xaa is any amino acid
MSKKINRSIVNFHFLALAAIIIFTAAGNLAAQNTQRVDPLRSPVGAAPLWETAIGDTIKGMPHLQASSVVLVGESGSVRSFFMSGTPLWNFDARGTAVPYIARSYEAATYICNTDGVFMAINRVGRELWRLNLGKPVSYSPVVGWDGRVFVFIDSVITCRTASGSSLWTFDLGSPVAFSPMIDHTGSTAAILSNMDFVKINQFSHVERIKLDRLPVMIVSLSEEGRQSYILLY

SEQ ID NO: 95081 - protein, 176 aa, Unknown
  Obtained from environmental sample
  DOMAIN (19)...(153): ABC transporter
  misc_feature (1)..(176): Xaa is any amino acid
FNNPRSAISSGLGYISEDRKTLGLVLIQDIKTNITHASLNKISSFGVIDNQKEIREAERYRKDLNIRTPSINQLVRNLSGGNQQKVVVSKSLFANPNILIVDEPTRGIDVGAKTEIYGILNNMIADGKSVIMVTSELPEALGMADRIYVMNEGVIKGELPKEGATQEKIMHMALVG

SEQ ID NO: 95082 - protein, 480 aa, Unknown
  Obtained from environmental sample
  misc_feature (1)..(480): Xaa is any amino acid
MTPVEKTLLENINNPNSLFVFPTDIAASSWADHILRLNGGSVAMKKFIAWDEFKQNSIKSKVQNKKSIPSVLRKIFVSNIVNENAQAAQQGKTPVFSSLIKVEYAQTAAQFTPWLTSVLPQLGGWFNRVTGLKTDNILGKEAETAADKMEGDDRDIFALARRYALFLDEHNLFEPAWETPPFNDEGKEVFIFFPESLSDYGEYRELLADSKHVKTLNAPNTDNLKSDTFFYTNSRSEIKEASLYIRSLNENHGVNWDSIAVCIPNSENYEPYVLREFTNRNIPFVKRTSKLLSDYQAGGFFRSILECVSHDFSFSSLVSLIMNKTLPWKNSLPIEKLVQFGIDNNCLYSWTEEIDGEKKYINIWEDAFKKPIRYYDKEIPDFFNELKKRLNSFRRCESFNELRRQYFIFREKFFDMDNCGEESDLVLARCISELMELVEIEKSFPDVKAPDPFLFFSEYLDEIPYLPQQKFSGVAILPYK

SEQ ID NO: 95083 - protein, 266 aa, Unknown
  Obtained from environmental sample
  misc_feature (1)..(266): Xaa is any amino acid
MVSVPLLINNLKNGVLRKIRNEEPKKEKLLNILMKTSLFIQKIAPKTGDLFVRKHITKSVIKKLFGDTFAWICVGGTHVPTDSLKFINGLGHIATIGYGMTECGIIAFEPGTVFKKRIDGTTGPLMHGFTSKIIDADGNAADTGELLLKGSSMHTGRMQNGKMIPSDVDENGWLHTGDIARFIKGSLVIEGRVKEVILNESGENIYPDELEDYFDGLSNIVKRYCILGLNDKGNEKIAIVVEVQDNADNEKGFEEISHIVNTVNGQ

SEQ ID NO: 95084 - protein, 292 aa, Unknown
  Obtained from environmental sample
  DOMAIN (11)...(44): Tetratricopeptide repeat
  misc_feature (1)..(292): Xaa is any amino acid
MGYRRAAIETADMYLQKAKELEKQQRYDEAQQEVLRALKFDPQNSLALDWAEALEEKKNELLGSPEEDLATIRSRAEKTSVIMLETKEPILKLFNIANRKLAEVFETLGKHFGINFVLHSSLQNDTSSITFKLEDMTLERILDIVALQTDIFYRYIDTKHVMVFKGGQNAAQRAELENQQYKTIYLDNAKPNDVNTTLSRVFGQSQRIQITPDNRLNAIIVKGRPTDIKTATKMAQMLDKAKAEVMVYVELLEVTESSLETVGLTPVIQPGGDAVYQLGATLDNSGGPNINK

SEQ ID NO: 95085 - protein, 332 aa, Unknown
  Obtained from environmental sample
  DOMAIN (1)...(264): Nucleotidyl transferase
  misc_feature (1)..(332): Xaa is any amino acid
MSLERALRVVPENDGRVIVVSGKAHMPFVITACSSLSKADKKRLVLIPEPEAKNTAPAIACAIAYAGITGGRDRTMLVLTSDHIIKPLDVFLKNSGTAAQYAEQDKLVVFGISPSGPETGYGYIEAAEKLAGDVYAVTAFHEKPDRETAERFLASKKHFWNSGMFAFRCEFLAEEYRRLAADVNSPFENLKTPDKKSYTKTKGLCVLDSWAGLDKAYNQAKGISFDYAIAEKCAQTVMIRADFDWIDVGSWDDYARLLSNNSAKDVYAAETNGCFVDSDIPVALAGVDDLIVVIRSGKDGSPPAALITQKGKTQLVRDIVEKIKQADRTEIL

SEQ ID NO: 95086 - protein, 1347 aa, Unknown
  Obtained from environmental sample
  DOMAIN (1)...(185): RNA polymerase Rpb1, domain 1
  misc_feature (1)..(1347): Xaa is any amino acid
MQLPTEEEYYEAQERHSGSFTAGMGAEAIRTLLENTDLDELAAELRAKMIEKGSKSDKRLLKRIDIVESFRTSKNKPQWMILDVVPVIPPELRPMVQLDGGRFATSDLNDLYRRVINRNNRLKRLQVLNAPDIIIRNEKRMLQEAVDALFDNSKKKRVVKGASNRPLKSISDMLKGKQGRFRQNLLGKRVDYSGRSVITVGPDLKMWQCGLPTKMALELFKPFIMKKLVDKDVVYNIKKAKILVEQETPEVFAILDEVVKEHPVLLNRAPTLHRLGIQAFEPVLVEGKAIKLPPLVCYAFNADFDGDQMAVHVPLTQAAQMECWALMLSARNLLNPANGKTVVFPSQDMVLGINFLTRIRPDGKRPGMERAKAIVGKGKSNVQTKANAPCEKCGKELHEGLTACPNCGKSVGDPPRYSSVEEAYLAVETKALDWEAVIKVKVPKLPVWEKVGKKATIREDGLIETTAGRLIFNEEMPREIPFINYELKDKELRALIEYIFAEKGSWTTVKMLDAIKSTGYKYATVFGSTIGVDDIVVPKEKVEMIEKANKEVEAIQKSFISGHLSPEERKNRVIEVWQKTNKDLTEILMKTLEADRNGFNSIYMMANSGARGSQNQIRQLAGMRGLMAKPSGDIIELPIRSNFKEGLSVIEFFISTNGARKGLADTALKTAEAGYLTRRLVDIAQDVVVNDDDCGTINGIDQAAIKTGEDVQEPLRDRIVGRYTLERVKHPITGEVIVNVNQEITKEIAAQIEEAGIESVYIRAVLTCEAEHGVCRMCYGRNLATNRTVDIGEAVGTIAAQSIGQPGTQLTMRTFHTGGVATSISEENRIFLKHPVYVKDITGAHVDKVDEKTGEPTGVMLFTRKGHATISRIMERHLLDSHDELLVENAQRVIRGVPIIKRGKEQILSKENALAMVIKDDKGTTLYLIGQDQKVEIRNGSEVIIKKGDVVEAEKTIATFDTFSDPIIAEVGGTVRYEDIIPGTTLREEINEERGVERRITDIQQLEKQPRILIVDDEDNQVASYFLPGGAILQVDEGEKIRAGRTIAKTLKESTQAMDITSGLPRVNELFEARKPKSPAVLAEVSGVVRFKNIIKGKRIIIVEDAFGKEYKHLIPMTKRLLVRDGDSVEAGEPLCMGAINPHDILHILGESNLQRYLMNEIQQVYNLQGVSINDKHVGVIIRQMMRKVEILRVGDTRFIYGQLVDKYAFKEENNRVINEGGQPAVARPVFQGISKAALNIDSFLSAASFQETTRVLTNAAIAGSTDYLRGLKENIIIGHPIPAGTGMKRYRDVKLFDDDQQDLDEYLNEILERRKLEKATELTSDNFLVEDNDQDNEPDAESDSED

SEQ ID NO: 95087 - protein, 288 aa, Unknown
  Obtained from environmental sample
  misc_feature (1)..(288): Xaa is any amino acid
LSILPRSTYAPFTLDFTFKKAFANEQSKDLLLFMLNTFLERVLKKPITDVKIIHTVQLGKTRKNRGAVFDMQCEDASGTRFIVEMQVNEHEHFIKRSIFYLCMAVANLAKKGKMESKGKKIPYDYNIPVVYTLSFLDFDADFGKNCDEVIQYLSLSNELHPEVRYNFMHLIYVRLTKFAKTEEECKSDLDKLLFTFKNAHNLSKRPKNFNKMEFKRLFDIARISNFTGKDLMNYEREMKYFSDHMNALAYAKKKGVMQTAKSMLKEGLNPTLVARITKLPREEILALR

SEQ ID NO: 95088 - protein, 285 aa, Unknown
  Obtained from environmental sample
  misc_feature (1)..(285): Xaa is any amino acid
MLFDFLFALKRIKVFALVGESGTGKSFRAKLVAQKYGIEYIIDDGLLIKENKILAGHSAKKEKTFLAAVKVALFDEKNHRDEIARKLQSEKIRKILVLGTSDKMVNKIAARLQMPTPRKIIKIEDIASQEEIDKAIRTRRIEGKHVIPVPSIEIKRSYPGIFHDAIRIFKKSMTPKGIGPTPSVHEKSVVRPEYSKRGKVIISESALSQMVIHCVDEYNQNIRIKKIIVRDNEMGYSFVITIDVPYDIQLGGNMHELQNYIIDNIERYTGILIEEVNIIIDKIIQ

SEQ ID NO: 95089 - protein, 557 aa, Unknown
  Obtained from environmental sample
  DOMAIN (296)...(499): Phosphoribulokinase / Uridine kinase family
  misc_feature (1)..(557): Xaa is any amino acid
MSDIKVSLASGASGKIETFDCPFGIIADTLLPHFGIAENAVVALRVNNEIRPLKTRLEVNSRLEPVLMDSPEGAMIYRRSLSFILAIAARELFPDKRLYVGHSLGNSYYYTFASGDPPCENEITALQEKMEALVKEDLPITFKYMAYEEALEVFRKNNQTDTALLLDQRATSRIKVNECKNNIDIYVEALAPRTGLLSSFELKSYEEGFLLRFPTVGKGRIIGPFTDDPKIFNVFNEYKKWGRVVGVRVVGDLNSLVAKRNIRDYIRIAEAHQARKMSEIAEQIYNRKDTVKTVLLAGPSSSGKTTSAKRLSIELMVLGIKPVAISLDDYYVGKEFTPKDEKGDPDYECLEALDIPLLNEHLQALYRGEEIRLPVYDFRTGSRREGGGRTIRLDNRSVLIVEGIHALNEALTPSIARNTRFKLYVSALTQLNLDDHNRIPTSDNRLLRRMVRDYQFRAKDAAGTIKMWPNVQAGERKHIFPFQNTADAAFNSALDYELSVLKYYADPLLRAVKPGQREYAEASRLLSFLENFAPILPHYVPGTSILREFIGDSEFQY

SEQ ID NO: 95090 - protein, 326 aa, Unknown
  Obtained from environmental sample
  DOMAIN (78)...(288): ATP synthase alpha/beta family, nucleotide-binding domain
  misc_feature (1)..(326): Xaa is any amino acid
VQLMAFEETGGLEVGNRVIARGSRLEVPVSTKLLGRVLDALGNPVDGKGEIESPVMYPALANPPDPLKRRRVTERIVTGVRAIDGLLAVGRGQRLGIFAGSGVGKSTLLGMIARNTNADVNVVALIGERGREVNDFIENDLGPEGLARSVLVVTPSNSPPLARLRGAYVATAVAEFFRDQGLDVMLLFDSVTRFARAMREIGLASGEPPATRGYTPSMFDSMPKLLERSGTSDVGSITGFYTILVDGDDMDEPVADTVRGILDGHIVLSRRLAQAYHYPAIDVLQSISRLAPSVSGPSHNKAAASLRRSMAAYAEVEDLINVGAYH

SEQ ID NO: 95091 - protein, 130 aa, Unknown
  Obtained from environmental sample
  misc_feature (1)..(130): Xaa is any amino acid
TLNHLAHYAKRHFGAEEKAQAAIGYRGLEAHRKGHADFFRRFQDFKRRFETAPPARQAHVAKEIHHFLIQWFRDHIMSQDRAFAESYKKTGRRQARPAGKSMVFYTGCSISGAGLKTLPAGAFSRSFGTN

SEQ ID NO: 95092 - protein, 409 aa, Unknown
  Obtained from environmental sample
  DOMAIN (183)...(387): 60Kd inner membrane protein
  misc_feature (1)..(409): Xaa is any amino acid
MFELTVSLDGGYSVPGFNFGGSAYTLSFGPQIGPQFKKLDNRYDYRQYMTYTNGKRKMEKANDSLISSNPKWAAISGKYFSFIANPLLPQYQLNFSDRSEPGIASASRLNIIRPVINTPRVSDVYRFYLGPKNQEALNVYNTGNNGFNLTDMQLVEVANTRGILSPLEKLLKWMLLLFYKLIPNYGIAIILLTLTVKILFFPLTKKSSEATLRMQALAPKIKELQAKYKDNPQKMNAEMAEFYKKEGYNPLSGCLPMLLQIPIFFAMYNLFNSHFDLRGAMFIPHWIPDLSVPESIWDFPSGARLPLLGWTALRLLPFIYVGSQLLYGKVTQTPDQKGNTQMKMMLYVMPIVFFFILYDVPSGLLIYWIFSNLLTLVQQLVINKYFIPRKKQAEPEEAPPAFTQKRKRR

SEQ ID NO: 95093 - protein, 247 aa, Unknown
  Obtained from environmental sample
  misc_feature (1)..(247): Xaa is any amino acid
MLSLPVFSASLEDFIDQGIAASLRAASEPITELQMKNPVPRLTPGHEELQRFVRETLRGLEPNILVETLSLYRRPQSSTGWSRDEQAGLFNQLLAISTLTGIQYYSESRKAMRIFYESSTVIDDPAKKKPQPDPTFAVCPDSLALYARQKDLTFGDNIYRFEYHTDADIILFSQENLSSMNLGIIPAISKNKFRTVMAVIDAGDSLLIYAAAMAKTASVPGMGDRIGSSFTNRVKAILKWFVGRVEI

SEQ ID NO: 95094 - protein, 277 aa, Unknown
  Obtained from environmental sample
  misc_feature (1)..(277): Xaa is any amino acid
VRQIAVQPLSHDSAGDFWDAVSFELSGLRKKVKFAGADVVCSVPCDMAVVRTLEAESDELDQNEVLRFEFGVGLLGGISEYAYDFYEVEPGNTADLRRYLGAALRKETLAKLKKVVKGAKLNPYIVDVDIFALTNVFQANYRDVFTGAAVLVLGEHRRTKLILVSNTSYIDYGVVEYDVDERGIGGYVSALGGEIGRLVSDNASFLRGTVPPVYLAGGLFADKDVASKVCSGVPNSEMLNPFRKIQCTAGIDAAQLEANACRLAVAVGLALRGEEGQ

SEQ ID NO: 95095 - protein, 46 aa, Unknown
  Obtained from environmental sample
  misc_feature (1)..(46): Xaa is any amino acid
ILEEKHEGLTFIEVKVKKGSRKDLGRPKTTPQENKAAFMKFIEEYR

SEQ ID NO: 95096 - protein, 287 aa, Unknown
  Obtained from environmental sample
  misc_feature (1)..(287): Xaa is any amino acid
MPELSKLVIEVDSKGVLKATGDLEVFSKMGQKAGKSTDELANKMGAMQLIANKLPGPLNSIAAGLMGMVTPATAAVGALITAGEAAIKYVQESINAYAESEAQLVRLGAVLKATGAETWTSTSALTKYANELQSTTGKSASEINRMQSVLLGFTSITGENFDRLTKNMLDMVDVMGGDMVSAANTFGKAMDNPTESLGALSRYGFKFTEEEKNMVKAMQEANDIAGAQVVILKSMEKAFGGAAEAHLKTIQGMKEYIKTLKEQHKALQAEYSGMAGIAKSYYEASDK

SEQ ID NO: 95097 - protein, 501 aa, Unknown
  Obtained from environmental sample
  DOMAIN (250)...(435): ATPase family associated with various cellular activities (AAA)
  misc_feature (1)..(501): Xaa is any amino acid
AINTIERGRTLEILKDVAGTLSLTFFVHTLSKGVYDISTEKTVSEDKSIYGAIDFMSDQMKRKQYLTLVLTEVPDLSGNSNDSKQILDLVTLAEESGGAVIVLTNNSIWNQLQRLGMVIKIDLPNEDEMYSIIKEYIDDYRKEIPIEWDNNDIREAAALLAGVTRIEAQNVIAALIANKRVKKSDMDEIRFAKDRLFSDISGLEKIDVDESVKNVGGLGGLRKWLEEKKTLLSAEKRDEMKARGLQSPRGILLVGVPGCGKSLSAKSIAVNWKLPLYRLDFATVQGMYVGQSESQLKDALATAEHVSPCVLWIDEIEKGLSGHGGNLDGGVSTRMVGQFLFWLQECKKQVFVVATANDVSKLPPELLRRGRFDELFFVDLPTAEERREILTMYFKKYLTMNFAGDFIDKIVVITEGFTGADLESTVRELTYRKVANNSFDLVESNIISAFNNVVPLSQTSPETIEAIRDWGKERAVPASGKPIGGQELSHKTGVRMRKVLV

SEQ ID NO: 95098 - protein, 214 aa, Unknown
  Obtained from environmental sample
  misc_feature (1)..(214): Xaa is any amino acid
MRYKFDTPGGHISVERSDKTLTPFGGLVAFASFLSKTGIIERLVETCPVTRTSNNATPVRDILIGFILMCVQDGTRFAHIRSIQNDPAIAKIFNLERRILGEDTIRRFFESVESVAGRDWMYAANSLIYESLGTPYILDWDSTVTTRYGEQEGVEAGYNPHKRGRGSHHPLVCSVAGARLCLDMEHRSGDSGSSCGWIEMMERLFSHLPADKRP

SEQ ID NO: 95099 - protein, 200 aa, Unknown
  Obtained from environmental sample
  misc_feature (1)..(200): Xaa is any amino acid
ALNAAMQAAHSDEAGNGFASVANDMRNFALRCSMTAKNITDMIEESANEIVDGIKITEDALGYIGKTVDRADDLDIQIDNMVEVSSKQAQNIRRLNAALSRMNLTTQRNAAYFDNPTNTSEKPNRRLQELAKPADDSTANTDNEPCADNICEQRGLPNRKTMYAAFPYKKTFSAATLAFWAPERVEAEEAFTVDDCEKWR

SEQ ID NO: 95100 - protein, 396 aa, Unknown
  Obtained from environmental sample
  DOMAIN (4)...(251): BadF/BadG/BcrA/BcrD ATPase family
  misc_feature (1)..(396): Xaa is any amino acid
MKTLGICFGATTVQYVKLNASKTSADGAIEATGRVAHEGDPKGVALKLLSDPELASVDRVAVTGRAFRSSVDLSAISEPEAVECALRRTYSGGGYPHLVISSGGETQLVYVINSKGGVSSVHSGNKCASGTGEFFLQQIRRMDLTLEEAVELAKRGTPHKIAGRCSVFCKSDCTHALNKGEPRANIAAGLCLMMADKICDLVKDMRGGKSTLIGGGSLNTAMVNILKERLGDLDVPDTAAVFEAYGAALWAADNECVPLPKDLSEAIHDAPTSFGRHAPLAEALPLVSFKEMKKDTVKSGRRVRAGVRRRVDHHQGGADEAQRQSRRRLRLPEDQRRPHRRLAQLLQGRPRAGREHEVRHYRARGDGVGPPDRGAPRAHRQRHKRDHSPRHRGGLF

SEQ ID NO: 95101 - protein, 693 aa, Unknown
  Obtained from environmental sample
  DOMAIN (330)...(504): von Willebrand factor type A domain
  misc_feature (1)..(693): Xaa is any amino acid
MKAKNCVSQLMLERYNLGKVSSGERKFIETALESDTELRLLYEEIKKSDEEIRLLYPLENLPQLAAIKDTVVPIPVDESSSRARFRLVWYRAKKVKWGLAAAALICVVFSVIYFLRWRSNNSAERPLAAASPQAPELLFYDLNSGVANEKIGSLSIKPRTPGLAYDDSTITGSITRSKSASTTNWHGTGFNPQGPAGLEGQVPPAFKDMSNLYGRMTQEEFNTSEFDHIIDNPFMRVIDNPLSTFSVDVDTAGYSITRYFLMNERKPPKSAVRIEELINYFDYDYPPPMDGKPFAVHVETSAAPWNTDHLLARIALKGKEFPVNERPKVNLVFLLDVSGSMDEPNRLPLVISSMKMLVNELKGTDKVAICVYAGAAGTVLPPTSGDSKDKILAALNKLKAGGSTAGGEGIQLAYKLAEESFDPNAVNRVILCTDGDFNVGVTNRSDLVDMVVAKAKSGVYLTVLGFGMDNYRDGTLKQLASKGNGNYGYIDNIEEAGKILVKQLSGTLITIAQDVKIQVEFNPETVSSYRLIGYENRLLRKEDFNDDTIDAGDIGAGHTVTAFYELIPKGAEDNAMPKVDPLKYGTPVASNGNLDELLTVKLRYKLPKETESSLLSFPVFVSSVRKAGEESGDFRFASAVAGFGMLLRDSPYKGNAGFDSILNMAQRSIGNDLSEYRRGFLELVRRAQAIGNR

SEQ ID NO: 95102 - protein, 333 aa, Unknown
  Obtained from environmental sample
  DOMAIN (235)...(268): Tetratricopeptide repeat
  misc_feature (1)..(333): Xaa is any amino acid
MTEPGIKYLYAEELLAYAATSFRETEGQGNLVLRPIEDFSLIDPFINTGELKFQAMSSGMLRIDQVDKTPVPLAFGDTMIRVLPAGRYIIDLTYRNGYKETRTVELRKKESRWVIFSYTVPYLAGDFSALYGQGGRLPGGINISELNPASYQRVNREAMESMGMAPYYVAFLGGEKYYRDGDYDKAIAEYNRCISLKADYPEAYASRGNAYRRKGDVSRAIEDYTRAISLRSSYAEVYNYRGFLFARQGEPRRAVEDYTQAIRYKSDYADAYFNRAHAYGQLGNWDLSIADYTQVIRLEPKNGSAYTQRGNAWYSKGDRVKAAEDYAAAERLK

SEQ ID NO: 95103 - protein, 279 aa, Unknown
  Obtained from environmental sample
  misc_feature (1)..(279): Xaa is any amino acid
SESGSNQVRVSDRVQAALAGINDTLPQGITLEVLSDNTTMIRSTLNQVYTNALQGAALGMLVLFLFLRSFKGTLIIGLAIPISMLLTLMSMSVFGFTLNLLTMTGLIMGLGMTTDASVVILENIYGYRERGAKPEIAAILGSREMMRAIMASTITTLCVFIPLIIFKNDLKQMGLMFSDLIFTVIISVAVSLIVAITLVPSLSGGILKLYTRKQKPLKFPPLRFIDNIMESFLRFIETQYQTALKYCLSHRFIILFLVTLILAYSFIQFKGVGMNMYVR

SEQ ID NO: 95104 - protein, 579 aa, Unknown
  Obtained from environmental sample
  DOMAIN (44)...(255): DEAD/DEAH box helicase
  misc_feature (1)..(579): Xaa is any amino acid
SIQHQLPEVKRLGYYDLLDAPVDWQKIYDGLSGKNAAVKKYDPKPHQQEAIAKVHDYLKTNDRGKLIMACGTGKTFTSLRIAEKETSDNGLILFLVPSIALLGQTLREWSAQCRKLIHAICICSDVAVSKKSETDDASQVTTTDLALPASTNIKNIEHQYERARLFQKTEGGNIVVFSTYQSIDVISKVQKTVNQKKKNSFVFDLIICDEAHRTTGVTLSKTDESAFVKVHDNNFINSKKRIYMTATPRIYSEDSKKKAKEASAEVCSMDDTELYGEEMHRIGFGKAVDKDLLSDYKVIVLTIEENQLNEKIHNSIDEKNKEINAEDRLKIIGCINALSKKSLTDKELFELADPPPMRSAVAFCQSIAVSKLTKEAFNICGEAYFSALTEQQRSEIVSVEADHVDGTMGAQVREQKLHWLKSADSSKRECKILNNVRCLSEGVDVPSLDAVMFLSARNSQIDVVQSVGRVMRKAEGKKYGYIIIPVVVLPDADTDKVLSADRYKVVWTVLNALRAHDDRFDATINKIELNRKIQIPDKILVIKPNIGVGDDTDNGVSSKGQGGLSEFQKQLGLDFAKLQ

SEQ ID NO: 95105 - protein, 69 aa, Unknown
  Obtained from environmental sample
  misc_feature (1)..(69): Xaa is any amino acid
TRMNALKAAKPWFLAGGVGLDNMEQALSFNPFALDISSGAETDGIKDREKIVQLVSMVRGYAGTQRNKV

SEQ ID NO: 95106 - protein, 395 aa, Unknown
  Obtained from environmental sample
  DOMAIN (48)...(377): Pyridoxal-phosphate dependent enzyme
  misc_feature (1)..(395): Xaa is any amino acid
MSKKGRFGDYGGQYIPETLMNELLNLEKAYNHYSKDSAFNAELNDLLKNYAGRPSLLYYAEKMTRDLGGAKIYLKREDMNHTGSHKINNVLGQTLLAKKMGKTRIIAETGAGQHGVAAATAAALLGLDCEVFMGKEDTIRQALNVYRMELLGATVHPVTSGTQTLKDAVNETMREWVSRVHDTHYVLGSVMGPHPFPTIVRDFQSVIGKEAREQILTAETKLPAAVLACVGGGSNAMGIFYNFLPDTNVRLIGCEAAGRGIDTEQHAATIAKGSVGIFHGMKSYFCQNDEGQIAPVYSISAGLDYPGIGPEHAWLNDSGRAEYVPVTDEEAVCAFEYLSRTEGIISAIESAHALAHAQKIARNFGKEQNIIICLSGRGDKDVASIARYRGRAINE

SEQ ID NO: 95107 - protein, 381 aa, Unknown
  Obtained from environmental sample
  misc_feature (1)..(381): Xaa is any amino acid
IQEFAGTRNGRWYYPIISGIAQSYNYYPFSFLKPDDGLCVAAIGHGCYVVSGGAAYRFSPKYPKVDATVSGSRIDSTQRNFYALDMEDRALNLLEGDEVTLKCLDISEAESNEDFAMTASTYNREDDRLEPGIGRPGLRVINFAPILKYDLFPFAEVLEAVLNIASKSMGLPVEIEFAVSRHKEKLIFYLLQVKPLIQNTGRQETNIDLQDIDKCFVFSGRSMGNGRDTTISDIVWVDPETFSPTHTATIAKEIETLNGMLKAQGLRYVLVGPGRWGTRDYSLGIPVNFPQISFSRVIVETNLPNFNVESSLGSHFFHNVTSMNIGYLSVSPGHEKDHVDWEWLKSLHCEKKTQFCRWSKTEEPLDIVMDGRIANTVIYKR

SEQ ID NO: 95108 - protein, 240 aa, Unknown
  Obtained from environmental sample
  misc_feature (1)..(240): Xaa is any amino acid
MTGFDKSFEENKTAYNVIWKPQYKQYLALKSSAFELLFGGAAGGGKSDFLLMDFYAGVNRYLKHWRGIIFRRTYAELEELLRRADELYKPLGGRFTKHDKTYTFPGGATIKFRYLEHVSDVQNYQGHQYTWIAFDELGNYPTDFAWRYMIIRCRSSAGVPCYMRATANPGGVGHAWIKARFIDGFEPYVTHRTVESNGLLSVPITRAFIPSLLDDNEALMKNDPGYAETLKLLPSHLYRA

SEQ ID NO: 95109 - protein, 262 aa, Unknown
  Obtained from environmental sample
  misc_feature (1)..(262): Xaa is any amino acid
FQTALPELKKRYPHDFLIACADGATGGNGLGRNHAAYLHKIGANVITTGECCFFKKDLTENLEKIPYVLRPDNLNPQAPGTGSRIYKAAGQAAGQAAGEKVAVAVLLGQSGFNRLHSHSPFVRLPVLLERLRQETPYVIVDFHAQATAEKKTLFFSADGGCSAVIGSHTRVQTADEAILPKGTAVISDAGRTGSSESVGGCDTASRIQEYLTGIPEWTKDAWDKPELQGVYIDIAPDGKARSIERLKIKVETGDQTAMRNEE

SEQ ID NO: 95110 - protein, 167 aa, Unknown
  Obtained from environmental sample
  DOMAIN (1)...(153): Peptidase family M50
  misc_feature (1)..(167): Xaa is any amino acid
LPGIIIGFTIHEYCHAAAAYKLGDITAKEDGRLTFNPFRHIDILGLIFIIFAGFGWAKPVRFNPDKLKNPKRDKAIIAAAGPFSNLILGVIFLFIIKGLWALDIYDEKLFDIVDFVIDVSYYWAYTNIGLFVFNMFPIPPLDGSHIFLSGLNLTHETETKIMQIGSG

SEQ ID NO: 95111 - protein, 661 aa, Unknown
  Obtained from environmental sample
  DOMAIN (18)...(533): RecF/RecN/SMC N terminal domain
  misc_feature (1)..(661): Xaa is any amino acid
MAFVQFSGLSLAFGDRDILKNINLRLAEGSRTCLTGANGCGKSTLIKIIAGLVQADSGDRAVQKGTRISYLPQSGIVHRGSSLRDEAETAFGFAHNLIERLDETGRLLEKAKDGDSSTQALIEEHHNLQEQIENSGYYRREASISSVLAGLGFSSSDINRDTGEFSGGWQMRIALAKVLLEQPDILLLDEPTNYLDIEARTWLEKWLENFHGGYLLVSHDRYFLDVCVNEVYELFQGNLKRYAGNYTSYEKVRNVELASLVKRYEEQQEEIIKTEALIRRFRYKASKAAFAQELIKRLEKMERIEIPESLKKINITFPPPPHSGNIALTLEGVGKCYGEHRALSNVELCLEAGERLVVAGPNGAGKSTLLRIIAGADKDFEGNVKYGSGIRAGYFSQTEAEEPTALASNLADAQNTQVLDFMEAGAPSALIPKLRDMLGAFLFRGDDVYKSISVLSGGERSRLALLKMLLKPLNLLILDEPTNHLDLNSKDILLDALSNFGGTIIFVSHDRSFMEALSTKTLELASGNPPRARLFYGNYSYYLDRIASETEDALPKTAAKTARAEKTTEPQLTSADRRAADKQRQAAVRRLERQEAELLKTLEELEKTKASLEAELSLPEVYSNGQRAKEVKSKLDDCTAAIEVKTAEWEKAASALANTTA

SEQ ID NO: 95112 - protein, 242 aa, Unknown
  Obtained from environmental sample
  DOMAIN (28)...(179): ExsB
  misc_feature (1)..(242): Xaa is any amino acid
MTQSELDKLEDTLVQGIRDFMRKNGFGRTHLGLSGGIDSALVAHLAVQAAGAENVTCISMPSRFSSQGSKDDAAALAANLRCRFETIPIEGIYSTYLTALEKVFENRPFDVAEENLQARIRGTLLMAYSNKFNSVLLATGNRSEAAMGYCTLYGDTCGAIAPIGNLFKTEIYALSNRINARAAAAGSKQIIPQAIIDKSPSAELRPGQKDEDSLPPYDTLDAILKLRLCENLSQGEITARGW

SEQ ID NO: 95113 - protein, 577 aa, Unknown
  Obtained from environmental sample
  misc_feature (1)..(577): Xaa is any amino acid
ADRDALYSRLEMLRIGEMGDGTALGTGLAAAAYHLDKSNAKRKIAVLITDGENNAGAIHPEAAAAMLHEIGISLWVIGIGSAGEVPIDYLDPFTKIRRTGRFDSRFNIESLRRLSITGGGTFIFAPTANSFAAAFSKLDEGEITVQISRLINRRRSVSIYFLIPAILLVASVWIIRRLLYRYNLSDELDKKMKMSAVFFFLFAAFAVIAVLNPKWGTQLTVSEYRRGLDTVFAIDVSHSMDIHDAQTDGAQSRLERGALIAMETVKAVTGARFAVAIGRSKGYLSVPLAWDSEAPLSFLHALDAASMTGRSTNLEALLDAAADAFDESSPAKKVIVLVSDGEALGGFLGNALNRCIREDIIVNTVALGSDKGRPVPQYYSSAETPVIISRREAPVMRMAAEKTGGIYIDGSRDDAAVVLANHLLSISQQTGAGRSRNEPKERRSLFIIFAIIAYGLSKFIPLLPGIPLLPLAAIIFIFNSCSEGKLLLLEANYLQTRGRYDEAILRYLKAQDFKDAAPYAEYGLGLTFYMMDESKAALKSFDNSQKILETLPDAGHSELRFTNSYNSGIIFFEEGDY

SEQ ID NO: 95114 - protein, 243 aa, Unknown
  Obtained from environmental sample
  misc_feature (1)..(243): Xaa is any amino acid
MKLFHSLRFRFAFIFSVFIIILSVSLSLLGIRQTTKAASDVFSAQGIAIVEKAVSFVDGDSFETLVKSLDKNDPFYEETRVKLFELKELSGCRYLYTMAQVDKNIWRYIIDGSGEPDDPDNFSALGDEEDTGPYDDAFRQVLISGKTESGTRIKLYEYKIAQIDKKMLNLLKSAYGALHLAGYYHGDTKISTIKDGFDDAYEIIEKIKPDNPIDMPETRGDKALRIWNRFVISLSVMFMRKPY

SEQ ID NO: 95115 - protein, 188 aa, Unknown
  Obtained from environmental sample
  DOMAIN (41)...(188): Leucyl/phenylalanyl-tRNA protein transferase
  misc_feature (1)..(188): Xaa is any amino acid
VPRFRPGPDPDFPYLEPTEYFQFPDPNECEDSIIAVGGNLSPGMLLSAYEQGIFPWYSPGDPVIWQSPDPRCVIFPEKLHISSSMRKILNGNVFKITYDENFEGVIKNCAKKKRPNQNGTWITDDIIEAYVELHQLGFVHSAEAWQDGILVGGCYGVLLGKVFCGESMFANVPNASKAAFLTFAELLF

SEQ ID NO: 95116 - protein, 356 aa, Unknown
  Obtained from environmental sample
  misc_feature (1)..(356): Xaa is any amino acid
ASGDETAASDESASSDEIEEKQEFVDSDIADLGVSLDAESLDTESTDIDSLDAESTVTDEQPDLSVNALDDNIEINVDAEKDHDELEALRENGVTPVTFPPENSSYLEEDDHINLDLSEAVIDEPELSTEGIDEPPITEPSLDIDSLDDLNISVDNSDLASTDLASADLTSEDLASADAPSEDISIDDSSIDGSSSIDDVDIDIAMPLGDVKDDEQDLSLDSGFQSGGDISIDDQMPEGFEDELQDAPVPLEEEADISDIKSTNIKSADLTSVEEAEPAEITAPDESVEVIDKVEEIGDIDDVDEIVDIDEKPAKAASAPASAPSSVPASMPSSALAQKDGNFQLPSDLKKELKNI

SEQ ID NO: 95117 - protein, 195 aa, Unknown
  Obtained from environmental sample
  misc_feature (1)..(195): Xaa is any amino acid
MGSRYTFSESRSGEIVPSIVTKQGNNKPLHSLIDPKREAERLVSTIPQDTGFVIFLGLGGGFAPKAALSGTYAQIVVIDFDKDGIKELLSAINYAPLLNNGRFSLLTDFTLDEIKAFILANYNPALYGGIKVIPLRTRTENDFEKFNRAAAVIQEAIEAASADFSVQAHFGLRWFSNIIRNIKNAQTADQTFHAK

SEQ ID NO: 95118 - protein, 256 aa, Unknown
  Obtained from environmental sample
  DOMAIN (65)...(236): Glycosyl transferase WecB/TagA/CpsF family
  misc_feature (1)..(256): Xaa is any amino acid
LENKPDRIILLRIPLDIVSPEELPEIINNLVPNDKDPYESQEKRNIVLLSLWDLLKARRNSEYRDYLFNAVLVIPISKSLVSGARFITGKKLYRYMPFKFVISLLSILEKREYPLFLRGGKSQILKKAEKNIRATFPGLKIVGRCEGKIRKQEEAAVIEAIRKSSPSILLAGRGVRGKELWIARNSNRLNSGFRLWCSDLFEVFAEKRNRPSDAVFEKGLESIGFCFKNPLKFFRVFLFIYYNLLLLVNKISKNKP

SEQ ID NO: 95119 - protein, 376 aa, Unknown
  Obtained from environmental sample
  DOMAIN (7)...(376): PEP-utilising enzyme, TIM barrel domain
  misc_feature (1)..(376): Xaa is any amino acid
ALIEPDPKGSGLLDFIALSKSFLKKFHVRCNADTPKDAALALSFGADGVGLCRTEHMFFKAERIHVFREMLLSTDNKEREKTLAKLQVMQRDDFYGILKVMAGKEVTIRLLDSPLHEFMPHNDDELAAYMAHVAKGKKTKPSKSEILAQIDGLHEFNPMLGHRGCRIAVSYPEIYAMQIRAIFEAAYKLRAEGVDVRPEIMIPIVMNASELKLIAYGKKIEGANYKGVVDIEDELRTQKKAKPVEYKIGTMIELPAAALGAGEIAKYGSFFSFGTNDLTQTTLGISRDDFTAFMPDYTLFDLIQGNPFSTLDPRVKELIAMATARGRLTRPDLTCGLCGEHGANPGNVKFCMEAGLDYVSCSPYSVPIALLAVAQS

SEQ ID NO: 95120 - protein, 323 aa, Unknown
  Obtained from environmental sample
  DOMAIN (3)...(323): Pyruvate phosphate dikinase, PEP/pyruvate binding domain
  misc_feature (1)..(323): Xaa is any amino acid
MDNRIHFFSQKEVIPSKIESEKLGIRGRQANEFAELGFPILPGFILDADIASEIKSDDIKKDVAAMLDKCAALVGKKFGDKENPMLLKVVISSNLAITTYPTLHNFGLAKPTIDGFSKWVGNEFAAHEVIFLIRGMLKIEERIKELEAKSGEMKEIGDCLKIVDRMLGIEGPSNELGKKEEPIPIDKSAIEYMSEYTRFFPLGFFESAEEQLLITLSEISRMFRMDDQNDTDTALMVAPMVYGNYGKDSCAGDFFSRNVVTGEKKLQGKFFRGKFNEVGASGQSIENVGDKHLKELQKIAWTLEDRFKEIRQVRFCIETANCG

SEQ ID NO: 95121 - protein, 373 aa, Unknown
  Obtained from environmental sample
  misc_feature (1)..(373): Xaa is any amino acid
MSKESTNLEVLSTRSGFNTAVRHMNKTMEISGALGSSNLGDLLYERGDENLSGERGALLLRMLLIDKLGYKSVSVNLESVASDLPALASEFSKWNGVDLIAAYYHPDLGLLIANPKIAEELANFGMLRKRELLVLYAGKGANPADASCQKAAELAVKLFEGKKAKASSDLLQGEFTVKELKKSKEETEEKAEGEAPVKAAKAKKKAPGRGRKAASKAGARAQQAAAEEDEEEEEEAPEAAPKEGARVAPPVVTAAAPAISKGPVRMTPMYSVVVANELFHNGNVEAWKRIVASYNAKYPALQVYIYYEGERILDINSLFKWGKVKHGSSIQFAVSGNDIKDVAKLQRYLVQGASKQFEAFLHGPVNNVFKLFG

SEQ ID NO: 95122 - protein, 533 aa, Unknown
  Obtained from environmental sample
  misc_feature (1)..(533): Xaa is any amino acid
MYGHLQGHVQRGVNELETHTNSILRQKTDTGAFVRGENAYSIVKCAFKDNLLKPKTVTDVKLSVNILDSELISPIFHYQVAVEYLIKDLLSNHLISTIDHAIEKVKEDRIDQGLEELTDSEIIFNKIGQVQNFTDDDVDNPKSRRYTNVSKMILEKIANLRAEIDPETFDQMNMRENIKKIVDIENIRNRGFNTAINSITSILDTSKMGYQYIENLKNAREVYIREYEDTDLANLPDERYQIKLRYFDNSQLVEDRKAYEVQLKSIETEIQHLWDTLDVIYEDSKSGFKVTDFNDLAKKKKPSIKKRIKDKTGEPMYEDIAKVWDEISFVGVGETEVERSNRTFLFEKDRIRTRIILMRNKMKEMYDYLYPIERRVMEDRLSFLEKEYYRFDYAINPYHLQPGILLDVDITSIKRKKATLDAMANVLNEFLSGVSKGFSDAAFASFSRRRSTVREDLAQSFSASEDEKPAAAAKAAPGGSAYLDLINTDAPASVSSPEPKAIAAPKRGRAAKPKDAAKSRGRPKATDSGLKEV

SEQ ID NO: 95123 - protein, 472 aa, Unknown
  Obtained from environmental sample
  DOMAIN (1)...(463): FHIPEP family
  misc_feature (1)..(472): Xaa is any amino acid
EDITAALKTYIRFSVGDGLLSQIPALLISTAMGIVVTRAAATGNLSEQVAEQFTISSRIYWISSAVLVCFALLPSAPISLRVVLILLAGLMAFAGYSVGVKKKKAASFNDMMAKSKDPKKAKEDGSDMSPIVPFDVLSLEIGYGLIPLVDKEKGAELLERVQGVRRQSALELGLVIPKVRIIDNMVLDPSEYCFKIKGVDVGRSKIRMGYFLCIIPGTVTEELPGDKTVDPAFGLPAQWISENRRDDAERAGYTVVDPPSIIATHLTEIIRRHAAEILGLQDTQSILDTLRKEYPAVVDEVMRPELKIPVVKIQRILHGLLKERVSIRNMVTILEAVAEYAPLSSNVQFLTEKVRQALGSQICHQYTDDNHKLRVLTIAPELEQKIIESKYETSSGMVCAWEPQVQTAWIKAVTKSAQAVRSRGYQPVILCSEQARFLVKNSTDRELPELAVISVQEITPDIIPEAVGIIRL

SEQ ID NO: 95124 - protein, 287 aa, Unknown
  Obtained from environmental sample
  misc_feature (1)..(287): Xaa is any amino acid
MVGLAAGTIVESLRGHGAAVGLVYGSWWFMLLFALMAVNLSMSLARRFPFKGRGGFALVHASLFLIMAGAGITRFCRVEGTLLLWEGQSGAAIVQHGADESIASSQELPFVVTLEKFVLDTYPGTNKPSGYASFVQIEDRGGGRSFKSKIWMNHPLKYRGFTLFQSSFVREGDRWATVLAVSKDPGQAVVFIGYFTLLAGLGWMIANVFRASKLPKTPVEPSAKVKHLWVPAILLLPILLLSAQASAAGKNFVSEPSAELTKLAKLPIQHDGRAMPFDTYARDMVKA

SEQ ID NO: 95125 - protein, 295 aa, Unknown
  Obtained from environmental sample
  DOMAIN (13)...(262): BadF/BadG/BcrA/BcrD ATPase family
  misc_feature (1)..(295): Xaa is any amino acid
LIKNAKISYYAVTGINIGSTSLKMVLFEYQSSPENGRVIWSASVPHEGDFGAAVHKLLAEGDILAGIPALVTGNEGRFMFDVSGTLEPLCVEAALRTLGIKADAVVSMGGEDLIVYSLDADGKIINNFSGNKCASGTGEFLKQQLARMDMTLDDIEKVPDTARVYALSTRCSVFMKSDCTHRLNKREATKDDIVLSLSDVMAVKVIDFLKRAKVTEGRVVLTGGITLNRHIIRFIREKAPQIEFIIPETAPVFEALGAAALAPQSGSRLPPADKLLKPNEVRFGTLGALRDWKDK

SEQ ID NO: 95126 - protein, 284 aa, Unknown
  Obtained from environmental sample
  misc_feature (1)..(284): Xaa is any amino acid
DDSTGDGNGNGGEEGEKSYDGFSWTVGANGFTGKMPSSTIAFGNGKFVIDSVDYSNVKMSTSKDGITWTTGTDSVLNNNVKTIAYGNNKFVACGLSNSISYSSDGITWTAIKNVPTGNSNASINTIAYGNGKFVAGGTDGSRVIYSNDGITWTGIETYVLGNKEGIPNYNNGTRNGAYAIAYGGGNFVAIGSKNIAYSSDGVTWTTTTTNNLGLGSISIDAIAYGDGKFVAVGGVTTLKTDIVYSSDGGITWTAVTTTAFDYLYNGKPSNGVINAIAYGNGKFV

SEQ ID NO: 95127 - protein, 294 aa, Unknown
  Obtained from environmental sample
  DOMAIN (1)...(293): PEP-utilising enzyme, TIM barrel domain
  misc_feature (1)..(294): Xaa is any amino acid
DAKRAFDFGAQGIGVCRTEHMFFDKDKLKLFRAMIVADNDEERKKRLKKILPLQQKDFLGIFKAMEGHPVVIRLLDPPLHEFVPHTSAEVEELASDLGMSTDTLRTKIDRLVEANPMLGHRGCRLAITYPDIYDMQVEAITRAAVECVKQKIPVNPEIMIPMVITARELKFLRPNAEKVIEKVFDETKAKFPIKIGTMIEVPRAAIRAGHIAQYADFFSFGTNDLTQMTFGFSRDDVASFLPVYLEKNVLEVDPFKSIDEDGVGSLMEVAIHLGRSVKPDMTIGICGEHGGDPA

SEQ ID NO: 95128 - protein, 440 aa, Unknown
  Obtained from environmental sample
  DOMAIN (36)...(244): ABC transporter
  misc_feature (1)..(440): Xaa is any amino acid
MAFVQFSRVCLAFGDRDILKDVSLNLSSASGLCGSGSRAALAGANGAGKSTLMKVIAGKLPYDSGERSVQKGCRVSYLPQSGIVHHGKTLREEAETAYESILLLIARVEELGRELEKTTGDSGRTRTLLEEHHRLLSEVENSGYYRRDAVISQVLSGLGFSESDAERDTCEFSGGWQMRIALAKVLLEQPDILLLDEPTNYLDIEARTWLEKWLESFPGGYLLVSHDRYFLDVCVNEVYELFQGNLKRYAGNYTAYEKVRKTELASLVKRYEEQREEIIKTEALIRRFRYKASKAAFAQELIKRLEKMERIEIPESLKKINITFPSPPHSGNIALTLEGICKSYGEHKVLSGVELCLEAGERLVVAGPNGAGKSTLLRIIAGMDKDFEGNVKYGSGIHAGYFSQTEAEEPTALASNLADAQNTQVLDFMEAGAPSSLIPS

SEQ ID NO: 95129 - protein, 152 aa, Unknown
  Obtained from environmental sample
  misc_feature (1)..(152): Xaa is any amino acid
KVSSIGTKGEYENRMLTSVVLPSSLTKIGSGASKANNLNSITIPYGVTSIGKEAFYNNQLTSVTIPDSVTSIGEQAFQRNPLTSITVSGNVSWLESSSDEDPELSEYLASIGIVVIDTSAFGSDFVETYNANDRQAGTYTRPDIKSTTWTRQ

SEQ ID NO: 95130 - protein, 240 aa, Unknown
  Obtained from environmental sample
  misc_feature (1)..(240): Xaa is any amino acid
MRCEHFSASSGQLSARVCGDGFERLLHSALNPEQERNWFRPSSLSGIIFAFGTGLGYHLEFLKDFPKNEIPLIILCDAFAENIGIVKEKLANQNVVLFSDDLSQFDSIFKNNKITVIRHPAAARYCTEQAESKLKTIITPKLSTLHSPLSTPIALPFGTHFLQQEILNALKDLQIPCITLPQQSKDPVQQESLLMELFQKNTPHLVLSVNAKGIDSEGILLSVCNRFSVPVHIWFVDDPR

SEQ ID NO: 95131 - protein, 419 aa, Unknown
  Obtained from environmental sample
  DOMAIN (130)...(324): FtsK/SpoIIIE family
  misc_feature (1)..(419): Xaa is any amino acid
ATRQDAKKTESAPTKRKGLPYYVPVEGILKQYPDGEYWIIDEETRSAAVTLKETFKEFNIQVEVTGIRKGPVITMFEILPAPGIRLTRIESLADNIALRLAAQSVRIVAPIPGKHAVGIEVPNAKRNIVSFREIIEGEINLGRKKAEVPIVLGKDITGEAVTVDLVQMPHLLIAGATGSGKSVCVNTMILTLLYQKPPAECRLILIDPKIVELKLYNDIPHLLTPVITEPKKAFQALQYCIYEMERRYSCLDSMGVRDIRSYNKRIVERDIAAEYMPYIVVVIDEFADLMATTGKELESTVARLAAMSRAVGIHLVLATQRPSIDVITGLIKANIPSRIAFMVASKMDSRIIIDMVGAEKLLGKGDMLYAGAIDPFPVRMQGAFVSEEEVERVVDYVKGLGEPDYIDDEIFLTRKKKTP

SEQ ID NO: 95132 - protein, 246 aa, Unknown
  Obtained from environmental sample
  misc_feature (1)..(246): Xaa is any amino acid
LAAQKRPQPIIGKKKASLNREFWVKDDILNLMNNNVIKQLCAEVKLPKMLRVKQLFDRDRIDPAKIPEAVFAQMSRPELGDYIKPGKRIAITSGSRGVANIAIITKAIADFVKSRGAQPFVVPAMGSHGGATGEGQKALIEGYGVTEEFIGCPIVSSMETVIIGKTDEGQDVRIDKNAACADGIIVAGRIKPHTDFHGNYESGLMKMMAIGLGKREGADICHRLGFGHMAHRVHLFGKAIIKHAPV

SEQ ID NO: 95133 - protein, 302 aa, Unknown
  Obtained from environmental sample
  misc_feature (1)..(302): Xaa is any amino acid
MAKKYGLAMSVEDLCFCREWFSSINREPTLAELRALDTYWSDHCRHTTFNTILEKVEIGGGPLAPALNNALALYEEARNEVYGGSAINGDAANRPRSLWDMATIGAKVLRKRGLAGDVDESKEINACTVKVKAEFSDGSAEPWLLLFKNETHNHPTEIEPFGGAATCLGGAIRDPLSGRAFVHQAMRVTGGGDPRSPLSETMPGKLPQIKIAREAAAGYSSYGNQIGLATGQVAEFYHRGFLAKRMELGAVIAAVPAALVRREEPAPGDLVLLVGGKTGRDGIGGATGSSKVHSGESVETAG

SEQ ID NO: 95134 - protein, 76 aa, Unknown
  Obtained from environmental sample
  misc_feature (1)..(76): Xaa is any amino acid
IRYGMPAYYINGHPFINFGAQKNHLGLYGSIPEIFKNKLNEYKCTKGGIQFPYKNPIPYKLVAEIIKYKAKEVGYI

SEQ ID NO: 95135 - protein, 208 aa, Unknown
  Obtained from environmental sample
  misc_feature (1)..(208): Xaa is any amino acid
MVKLIPLLGIFSVIFYFLHVILGEIFYEGYNPLAQAISDLTASNSPSKNIARLFSTLYGICTVCFSIGFFVYLKNKINKALTVSSFVFCVMNTISFLGYTFFPLSESGYAGAFQDKMHLVVTVLVVLLTIISLVLFSIGFFKAKEHKWLTVISICTLLVLMTGAMLINILPKAYFGVAERINVYSIIIYTGILSLWMKKHIKISGIEP

SEQ ID NO: 95136 - protein, 95 aa, Unknown
  Obtained from environmental sample
  misc_feature (1)..(95): Xaa is any amino acid
MNSILVSGHIGIEITAKIDKFPIEYTPIEYEFFGVNTTISSVGYNIVKAIKTLGGDPMFFSITGNDIYRDIIKNEIENIGINTKYVLPIAEKTSQ

SEQ ID NO: 95137 - protein, 140 aa, Unknown
  Obtained from environmental sample
  misc_feature (1)..(140): Xaa is any amino acid
TSNIGSHLILGGEANKKETVLAELRRHFRPEFLNRVDEIVVFDPLDKKEIREITAIQTQGLIKRLSDMHIETQINEEALDLIAQKGYDPVYGARPLKRVIQRELETPVSKMIISGEITDGGTLKIGVNDGRLIFVAEPIG

SEQ ID NO: 95138 - protein, 423 aa, Unknown
  Obtained from environmental sample
  DOMAIN (55)...(248): ATPase family associated with various cellular activities (AAA)
  misc_feature (1)..(423): Xaa is any amino acid
MNSNKTPNQQEPTALERFSRDLTDAARHGKLDPVIGRDDEIRRMIQILSRRTKNNPVLIGDPGVGKTAIAEGLALRIIRGDVPEGLKSKSVVSLDMGALIAGAKFRGEFEERLKAVLQEVTERGDVILFIDELHTVVGAGSAEGAVDAGNMLKPMLARGELRTIGATTLDEYRKYIEKDKALERRFQTVLVDQPSVGDTISILRGLRERYELHHGVKIKDSALVAAATLSDRYISERFLPDKAIDLIDEAAAKLRTERDSNPVELDEAMRRQMRLEIEIEGLKKEKDKGSKEKLSKLQTELADVRKTASSLKNQWETQKAQSDRLQKVREEIDKARVDLERAERDYDLSRAAELRHGRIPELERKMADIETEIKNSDDGTRLLKEEVGEEDIAEIISRWTHIPVSKLVEGEKDKLLSLSKHLH

SEQ ID NO: 95139 - protein, 261 aa, Unknown
  Obtained from environmental sample
  DOMAIN (2)...(260): Putative esterase
  misc_feature (1)..(261): Xaa is any amino acid
MANIRVEFYSTSLLRSVAFEMYMPNDHRPEIQIQNNPYYDRKCKTVFVLHGFTGWGKGWDVLYELAEKYNLALIFPSGENSFYLDTEASTGKYGTFIGSELVEYIRKTFGLCRSKEDTFISGLSMGGFGAIHTGLAYPDTFGKIVALSSALIIHGISGMKPGENNEIANYYYYRNYFGDLEKLIESDKNPETLLKKLIQQKKNIPKIYMACGTEDFLLADNRRFHNFLVEHNVNVEYIESNGGHDMAFWNEYFAKGFDWLA

SEQ ID NO: 95140 - protein, 225 aa, Unknown
  Obtained from environmental sample
  DOMAIN (179)...(212): Tetratricopeptide repeat
  misc_feature (1)..(225): Xaa is any amino acid
MRKFFGIIVCFSLIILHAQAQTSGGAGAQPLNALQNYQRGRDSEAQNRAGEANAYYNEAVRICLEEVSRNAANRDTYTVLTWTLQRQRKYSDVVTWGDRGLRIYADEYRIVETMGEAYFYLGNYERSLLYMQRYANALPQGERVSTAFFFIGEIHRLSRRYHHADIAYTTALRFEPSIALWWYRLATVREQIGDRRSAIDAYQQSIRLNPNYSDAREGLARLQNN

SEQ ID NO: 95141 - protein, 132 aa, Unknown
  Obtained from environmental sample
  misc_feature (1)..(132): Xaa is any amino acid
MKTENNSINDVLAKNATSFFIPPFQRAYAWGKPEIERYFSDIMRIIESELDPNQHDKLQHFFGTIVIKTESEGFAHKSVVVDGQQRLTTTLLFLIALRDIETDENNKNYITQNYLTNNASTFEDKIKLKQVQ

SEQ ID NO: 95142 - protein, 177 aa, Unknown
  Obtained from environmental sample
  misc_feature (1)..(177): Xaa is any amino acid
MARKKKSEEAIPSTWLNTYADMITLCLCFFVILFNPDEVTQAQLDAISASVQTGGIGAMPGGLTISAGRMAELGNTIMSLPSMERGRLMGTAIRRAVSVFSPEIRSNKIKITHDERGLVITLAGDAFFNPASARINIDATRDILLRLGTYLSSEELRGRKFRIEGHTDAVDVDPNGP

SEQ ID NO: 95143 - protein, 281 aa, Unknown
  Obtained from environmental sample
  DOMAIN (1)...(128): Transposase
  misc_feature (1)..(281): Xaa is any amino acid
MTYSIDFREKVLEFLDRGRTMREAADAFGIALGSVNNWKRKLLKTGGLEDAPLRAGFRTLDPEKLRAHVAARPDAYLAEIGEAFGCNESAVRKAFAKLKITRKKTRRFKEQKPELVERYLAELEKVSGRPAAYVDETGIDTWLCREYGRSERGDAVTGKMSGRKFKRVGLVAGQTGKSIVAPMQYGGPMDSERFESWFDAWLLPSLPDGSVVVMDNASFHRKGRLHALAEKAGHALLFLPPYSPEFNPIEHFWAWLKGRLRKTLHLFASFDEALHEAFQVN

SEQ ID NO: 95144 - protein, 66 aa, Unknown
  Obtained from environmental sample
  DOMAIN (4)...(62): Ribosomal protein L35
  misc_feature (1)..(66): Xaa is any amino acid
MPKMKTKKSAAKRYSFTGTGKVKYKKQNLRHILTKKSTKRKRGLRHAGILDESNVPVIKKKLLPYG

SEQ ID NO: 95145 - protein, 417 aa, Unknown
  Obtained from environmental sample
  DOMAIN (212)...(363): HD domain
  misc_feature (1)..(417): Xaa is any amino acid
MDSEVDFKDIIRLDSELNQIQDYDLLLERILFEARKVVHADAGSIYITVPTEKGEEGTEKLAIKYSQNETIQKKMPPGQKMIYSIFTVLINEKSISGYCAFKRTLINVPDMYNIPPEMPYKFFSDFDIITGYKTISSLTIPLVATDKRLMGVIQVINSKDENENIIPFSSSDELMLTHFATNATMVLQRAYLTRAMILRMIKMSELRDPKETGTHVNRVAGYSVEIYDKWAFHHKIPVDEREKYRDSLKISSMLHDVGKVAISDAILKKPARFTAEEYQIMQNHTIYGASLFRDTSSFIDQLAKDIALTHHENWDGTGYPGWIDPYTGKTEKADKDGKPLGKKGEEIPLGGRIVAIADVYDALCSRRVYKDPWNEKDVLDEMRKLSGSKFDPELIDIFFEVLPNIKQAQNQYPEDVK

SEQ ID NO: 95146 - protein, 191 aa, Unknown
  Obtained from environmental sample
  misc_feature (1)..(191): Xaa is any amino acid
ISSGIIFPDCKENANNIKDTRDGKTYKTVKIGKQIWMAENLNYETEGSKCQDKKTTGCEKYGRLYNWDEAKTACPTGWHLPSDEEWNVLLKFANPNCSDSSDYAGAGTKLKAKSAWRYGTDAYCFSALPGGYGEGGNFFYVGYYGYWWSSTGEQSANYAYSRNIGYDGGEGGVVRIKNNKNNLLSVRCLKD

SEQ ID NO: 95147 - protein, 91 aa, Unknown
  Obtained from environmental sample
  DOMAIN (2)...(91): Thioredoxin
  misc_feature (1)..(91): Xaa is any amino acid
MPAIHLTEDAFKKVIKSSQPVMVDFWAPWCGPCKALGPTMDKLSDLYKDKAVVAKINIDEVPSLAAELDVSSIPTVKFFKNGSEIESFTGA

SEQ ID NO: 95148 - protein, 390 aa, Unknown
  Obtained from environmental sample
  DOMAIN (181)...(321): Phosphoribosyl transferase domain
  misc_feature (1)..(390): Xaa is any amino acid
MSDSIVVTGTFTDDSFAMDVAQFLGVRGDISDEVSLKTYANSEFCPRYISDIEDLERVGRYLEGKVVIICSVSLSDRSRNDCAMRNMILARAAKDNGAKRVVLVEPDLFYSAQDRGAYRFGEIEKDREISDLKKFDGQAFTSLLYAKLLKEAGVDTVITVHNHSIKVENLFRDIFEGDFHNLIPAEIYAHYIKTSDFVQTGKDGDNLIIVSPDKGSASFGKRVCDTLDLPECKRIILDKKRTGEREVSMALNPASEVDIGYLTGKDVIILDDMVRTGSTIVQCCEYLKKSANPRRVCFGVTHFYSSHEAREKLNSPFIDEIMTTNTLPDILNRDCQGRLRRKIVVLKLGQWIARYILRMFDMDYSYLSKQFYMVDMSSKNPRWPPPSFLK

SEQ ID NO: 95149 - protein, 437 aa, Unknown
  Obtained from environmental sample
  misc_feature (1)..(437): Xaa is any amino acid
MAANPFDAEVHVKTPESDMQVAAKLAGKIDFNSLVDIVPLDDITLKGLLDCDLALAGRMSTFQNERYEDVDARGMLKLNGFNFESPDFPQAVEIASTQLNFTPRKVDLVNFDAVIGNTDIAMNGTLEKFIPFIFKGDTVHGNLSLRSNNINLNEFMTGEKPEETKESAPLSVIEVPKNIDFTVNVNIAHLLFDKLNISNTTGTLLVSDGKLQMRNLAMNMLDGSVVLSGEYNTQDINVPSIDFNANIRQVDVASAISSFDILQKVLPQPQNYAGKVSTNLTLSGVLDEHLSPVLDKVVSKGQIQTNSVEIRNSELFGSMANMLKNESWRQPSLTNLNIRYEIKDGQLMVEPILMNILQNKLELSGGQGLDMTLNYKVNATVPVSSIGSGATDLLSKIPGGSNVKEIKVTGLIGGTATSPVVSLGVADMASSVISSVT

SEQ ID NO: 95150 - protein, 495 aa, Unknown
  Obtained from environmental sample
  DOMAIN (6)...(494): Pyruvate formate lyase
  misc_feature (1)..(495): Xaa is any amino acid
VFNYVAPEWISCYEAGIYTEFMEQRAPGHTVCDGKIYREGFLDYKKKIGKELEKIDYINDPKAFEKQEELKAMAICCDAIIIYANRYADEAERLAALETNKSRKEELLAIAKNCRRVPAHKPENFWQALQMYWFVHVSVTSELNTWDAFSPGRLDQHLYPFYKKECREGNLSEERARELLQCFWVKFNNQPAPPKVGITLAESGTYTDFCNINSGGLTSDGSDGVNDVTYLVLEVIDEMQLVQPSSNIQLSKKNPDKFLNKACKVIKRGMGQPSVFNADAVVEELVRQGKKIEDARDGGTSGCVEAGTFGKECYALTGYFNLVKVLEITLNNGYDPIAKKQLGPKTGEASSFKTFEDLFNAYEKQVRHFIDIKVAGNNIIEALYSNYMPCPFLSTVIDDCIASARDYNSGGARYNTRYIQGVGIGTLTDSLSSIKYNVYDNKNITMDKLSDALLKNYDGYEAERQMFRNKTPKYGNNDQYADEIMLRAFNMYYSM

SEQ ID NO: 95151 - protein, 270 aa, Unknown
  Obtained from environmental sample
  DOMAIN (1)...(169): D-alanyl-D-alanine carboxypeptidase
  misc_feature (1)..(270): Xaa is any amino acid
MFLASGQIVTLREIMLGMAISSGNDAAVAAALYLAPSVADFAGMMTAEARRMGLVNTRFVEPSGISEDNMTTAADFAAFCLEYLRLHPYTLTEFHSVREFAFPKKENMGEAFRGNPRTIVQPNRNNLLRTFPGTDGLKTGYIDEAGYNIALSAERGGTRFIAVILGAPARYGGDRIRDRDGESLLTWAFGNFKTVRPEIPPLEQPRLWKGREKQVSLALAGDPVFTAPLDRAGSLRYRLIINEPLIAPLPASYPVGLFLLADDEGELRRM

SEQ ID NO: 95152 - protein, 277 aa, Unknown
  Obtained from environmental sample
  DOMAIN (70)...(277): tRNA synthetases class II (D, K and N)
  misc_feature (1)..(277): Xaa is any amino acid
IQCTFDRGEGALQAETEKALAGLGTGTAVIVKGRLVPSPASGQAVEVSANSIVVLGEAPANYPLQKKRHSMEFLREITHLRPRTNTFGAVLRLRSRMAFAIHEYFTGHGFQYIHTPIITAGDAEGAGAMFQVTTLDLEAMAKAGNAGSPKISYDKDFFGRKTFLTVSGQLEAETCATALSRVYTFGPTFRAENSNTTRHLAEFWMVEPEMAFADLGDDMALAEDFLKFIFKKALEECVDDLKFFDAHIEKGVIDTLTHVVNSKFTHISYTDAVAELE

SEQ ID NO: 95153 - protein, 280 aa, Unknown
  Obtained from environmental sample
  DOMAIN (1)...(256): Glycosyl hydrolase family 53
  misc_feature (1)..(280): Xaa is any amino acid
DGINWIRVRLWNDPFTADGLTYGGGGNDIQTAMAIGKRAKKWGMKFLLDFHYSDYWAHPGQQARPKAWVGYNTADELAPVLKNWTKDVLHIMYSEGGFLPDMVQIGNETVNGFCGFTDQGSLSATKPNEKKLLAAGLQAVREISEQYNFPILTMIHAANSMETIDKYIGIILQEPALDFDVIGFSYYPYSYGNRDDFENGLQNLADKYKKPLCMVEYQVNFTGVSPLDSSYWGGSDENTASFIDSGTDRTISGQAQVIRNMNNAIMNNTVSGGVRYGIGS

SEQ ID NO: 95154 - protein, 284 aa, Unknown
  Obtained from environmental sample
  DOMAIN (1)...(284): Glycosyl hydrolase family 53
  misc_feature (1)..(284): Xaa is any amino acid
AKKWGMKVLLDFHYSDFWAHPGQQAVPKSWKDFANVDELAGLIKAYTKNVLSDMYAAGAMPDMVQVGNETVSGFCGFADNDNVKANEKKLLSAGLSAVREVSAQYGYPVKTVLHVTNGMDTIKYWFGVMKFMDFDIIGISFYPQWHGTLSDFKNGLQDLANTFKKPICVMEYSISYTSQAGSPNGSNMYGNSNDKVKTFLNAGETDRTIQGQASVIRNLNNAIMNSTVSTGTRYGIGAFWWEPAWLPLNGTAWAFTASGEWYKMGLPGSDSGAVNNPGNNPRVT

SEQ ID NO: 95155 - protein, 235 aa, Unknown
  Obtained from environmental sample
  DOMAIN (1)...(234): tRNA synthetases class I (I, L, M and V)
  misc_feature (1)..(235): Xaa is any amino acid
VKSLWLDGYESPYVPGWDCHGLPIEHAVEKELGSKRREISRADFLAKCRSYAQKWVDVQSAGFQRLGVLGAWQAPYITMAPAYEAEVVRSLGKLFQRGIVRRKLKVVHWSYGARTALAEAEVEYADKTSFAITVAFPVPNEEAAKFGLPAPLYLPIWTTTPWTLPSNLAIAMHPRMEYAIVEGNGRHYIVSTSLLENFQAKLGHALRTLEVRKGNTFDGLKAKHAWINRDSLVLL

SEQ ID NO: 95156 - protein, 309 aa, Unknown
  Obtained from environmental sample
  DOMAIN (62)...(306): TonB dependent receptor
  misc_feature (1)..(309): Xaa is any amino acid
LAFKSGFDYRFIYLDSTDIGSRDRHDGGIYLTAEFKPVSQFMIIPSLKAVFTNKGGALLTAVPKLGLLWNLNDSLALRNNYFRSFKFPDFEELYWSDGGSAFGNAGNPDLKPEDGWGADIGFSWRYKHLINFESTFFSHRLKDSIHWYQGANGIWRPENVGDAMFFGLDNKLRFEIPVNLGKIKKIIPSVSYQYLLSYLLSFGYDFADNKRIPYSPVHTLGGSLEIPWDTGSVIISGHYESERYNDRANITKLKPYFLLNANINQKTGKNLTAFAVLRNILNESYESFIDYPMPGFTVTVGLRANLEVK

SEQ ID NO: 95157 - protein, 466 aa, Unknown
  Obtained from environmental sample
  misc_feature (1)..(466): Xaa is any amino acid
MEGAESFDFFRQPDFVEEPFLRGSYAVYKKETLVGEGTGKLCHIHRPEVIDARGRRCWGELSVVGNELHITIPENWLAEAKYPVIVDPTIGTTAVGSQYLIEYDPPYDPWIQIMFEGSIPVNRFLAADTLNGQCTAYLYTNDSFYTGEEYGRPVLYSDNSNKPQTRKSINEGLADFHIYRGLPAGWRNANFSTNGTIASGSYIWFGVFVDFFWEPRFDFGAKCYSCDWYDIGNSIPNTYPLYNANWYNDFKLSMYFTYAGAGQNHQRTLTQGVSLPDNKILTGNYKRTASQTVQADATPIKHLTIIKNIQDTLSSFDFAKKTLSIVTQIQDTLGSFDLAARIHSVLASIKDAFSCFETSNTSFLLYSNIHDDLTATDTLYHFRNIIRGLLGNVGVRSEEKAGFFYLRAISETALVVSSIARGLFLFIRIVSSIFIRDRLLGRFLKSKAELSLKSCVTREITLESRC

SEQ ID NO: 95158 - protein, 229 aa, Unknown
  Obtained from environmental sample
  misc_feature (1)..(229): Xaa is any amino acid
MGTISVEYSSNLYWLGRYTERAYTTLNTFFNYNDKSLDKDKNSYKEFLDNLEIEDKYGDHRRFIQGYLYDNADCFTISSTLRLAHDNALVCRNVIGSEALAYIQLAADAFRSSHDAKKLRLALMPVIDYLLAFWGSVDDKIASGEARTIVKCGKLVERLDLYFRFSYKYKLINSEYEKLCHVLARVRKGFCNAQHLAVLVEALATEESYKARMEEVLESLNRLFEEQAA

SEQ ID NO: 95159 - protein, 262 aa, Unknown
  Obtained from environmental sample
  misc_feature (1)..(262): Xaa is any amino acid
AGITADIIIATDGGNWALQHIYPFYRNYKNVNTGALAVNLCAALPSQCANTAQLIINDGSFWQSIVLHDINLPSVIIPQRGTVTATAIELAILLSSGNIYLAGLDFSVNDIRTHTRPYGFDNLFYGHANRFIPFYSQSHSRASLLHKGGSMNIYESWFKEQLTKWPKRIFSIGGNKIFENGEPATRYGLKNTDGFFSVVSHEDHNNFCEKGVQALLNAIKQPQYSQNLKQELNSLLFPGENIVTQDELETAIKTVCAKGIHG

SEQ ID NO: 95160 - protein, 546 aa, Unknown
  Obtained from environmental sample
  DOMAIN (38)...(66): The GLUG motif
  misc_feature (1)..(546): Xaa is any amino acid
VINSSNNGSVTGNNQTGGIAGTAQGKIENCYNTGTVTGSQQVGGIAGTNVGSGNYIKNSYNTANVTSNASASNVGGIVGFNQANTTLEYCYNTGIVTGSSAVGGIVGNVAAGSTVRYCVSLGERVTGSGTNIGRIAGIYNATLTGNVARELMRIGASGSESVVTGATTQGNGLDVSLGVGQQGSVFSGWNNSTIWNISGNLVVGGDLPTLKDNTQSPAPTLPGSNPSPGTAANPFLVTNEADLRKVGTGTDGWTLSAHYKQTQNITLTSNLSVIGTNINKFTGSYDGNEKIISGLTMTRTSVSYFGLFGYIGSDGVVKNVTVTNGSITGTASSYFGGIAGQNEGTIENCSFSGTVNGDTTSDDVGGIAGRNTGTIINSRNNATVSGRTRVGGIAGSNNGKIDNCYNTGAVTGSQQVGGIAGGSSNSGNYVKNCYNTGNVTATTTTTTANAGGIVGQSSALIEFCYNTGNVSGTNNIGGIVGYINPGCDVQNNVSLGLKVNGTTAGRIGGTNAGGNTTSNLARQDMKTGPVGSEAIVNTGAAGNMAG

SEQ ID NO: 95161 - protein, 150 aa, Unknown
  Obtained from environmental sample
  misc_feature (1)..(150): Xaa is any amino acid
LPPQLNSGFTPLPGIQCSDKTALGRSVLCAIGSSVRRAVETLESQGLPVKAMRVSGGQGKNPLWNQLKADICDVPFLIPEICDGELAGSAVLAACALENRPASEGDFERVLDATVSRMIRFREEYSPRKETAQFWTKRYRAANNVAHCNS

SEQ ID NO: 95162 - protein, 280 aa, Unknown
  Obtained from environmental sample
  DOMAIN (16)...(236): Methyl-accepting chemotaxis protein (MCP) signaling domain
  misc_feature (1)..(280): Xaa is any amino acid
MEQLTVNIHKLNTHVEKQSSQVSRASSAIEQMMANINSVTGTLINNAVNVKTLREASEVGHKGLQDVAKDIQEIAHESEGLMEINAVMENIASQTNLLSMNAAIEAAHAGESGKGFSVVAGEIRKLAESSTEQSKTIGNVLKKIKGSIDKITKSTENVLGRFEAIDSGVKTVSQQEENIRHSMEEQDEGSKQVLQSVGGVSEITQQVKLSSEEMLNGSKEVMTESQNLERVTQEITGGMNEMASGADQINSAVNNVNEMTTRNREAIDALIEEVSKFKVE

SEQ ID NO: 95163 - protein, 145 aa, Unknown
  Obtained from environmental sample
  DOMAIN (18)...(136): Response regulator receiver domain
  misc_feature (1)..(145): Xaa is any amino acid
GIARARLAGVPESVFTGRRVLWVEDIEINREIVLALLEPTRLEIDCAENGAEAVRMFAEAPDKYDLIFMDVQMPGMDGYEATRLIRALDVPRAGTVPILAMTANVFQEDIEKCLQAGMNNHIGKPLDLDEVLDKLHTYLSSPKGR

SEQ ID NO: 95164 - protein, 277 aa, Unknown
  Obtained from environmental sample
  misc_feature (1)..(277): Xaa is any amino acid
MRHFEKVYATYLTTRADLEWGKLHPEELSQVYLMTPHTTAQAETLEIYLLKGYYEEEIQINKLEDPVRWWEVIDRTSGEVVQPELWSWDFDRGTVTIKAEKWHVYTVTFLAFQIWDAVCMYNHLTNNWGDKPHDLPYDVYNSLTREHVLQFLRDWLRDNPRPDVVRFTTFFYQFTLIYDDKKREKIVEWFGYSGSVNPRLLEDFEKEYGYRLRPEDIVRQGWHNGAFCVPTRQFLDYMDFVQRFVTKLAKQCVDLVHAAGKEAMMFFGDHWIGTEPY

SEQ ID NO: 95165 - protein, 313 aa, Unknown
  Obtained from environmental sample
  misc_feature (1)..(313): Xaa is any amino acid
VNSEQAAGSNEQVPAELTIVISSELSPAELAITEPTDTVELSDAADSLSEPPVSMEAVAEEEKLQAEYVTALSLLDDHQEIAEETELQPTDQPVIVMETLRPAGAASPVEPASPSETLPKPTTPALPERQTAQIVPPDFSPPVRESRTPLPPKPERESAELATTEGSIVEDPPEERVLQPDYPITFSRTARVTVGQLVEIPFHGRDWVFIGEVGARRGIAYDSRKMDPEGESFIFRVEASGVYALKFYRQDFTHDLILNDHVQIIAGRAPETTGLTWFNPPIDRSRVIAGPRWPNFLEQTPLVAQPSVTVQPP

SEQ ID NO: 95166 - protein, 483 aa, Unknown
  Obtained from environmental sample
  DOMAIN (46)...(111): His Kinase A (phosphoacceptor) domain
  misc_feature (1)..(483): Xaa is any amino acid
MLANYFLVFAVMVVIESTRKTKDRMIEAQNRKLQELTEEAQTANRIKTNFLASVSHEIRTPMNAIIGMAELLMRGKLSDEALGYAQDIKQAGNNLVSVVNDILDFSKIEAGKLEVVSKKYLLASLVNDSISIIRMRFMEKPIRFYTNIDGNLPNGLIGDVTRLRQIFLNLLTNALKYTNKGHISLSITQEKREGSRIWLRVEAADTGIGIKAEDQARLFTDYVKADTKRSQNVEGIGLGLVITKRLCHAMGGDITVQSEYEKGSSFTVVIPQEVYHEAPFVTVEEPDKKRALVFEARDCYAESLEWSLENLKVPHVIVRNQDAFAEEIFRREWFFVFVSYSLYEKIKPLMDRPAGDFPGSKKPPLALMVEWGMEDYIPGARFMSLSVQSLSIANILNGKADNRGYFDNTVNPNAVQFTLPGARLLVVDDISTNLKVAEGLLAPYRATVETCMGGLEAIDLVKQKASQKLDYDLVFMDHMMPDV

SEQ ID NO: 95167 - protein, 413 aa, Unknown
  Obtained from environmental sample
  DOMAIN (192)...(261): HAMP domain
  misc_feature (1)..(413): Xaa is any amino acid
MNNLKVSMKLLVGFGVMVALILTVSLVSISNLLGIDNAYSVVIQNHAMPLNPAINVVGDIQAMRSEARNCVIFTGNKENVRDAKVALDRLTREFEDSAASFAKSIVNPEVKAKYDEAMKSFTDTFKPSVYKMVAEAEKGAPLAEMVGHLTSLKASADLITDNMIYATDIKAGQLATESEKSTEHSKSIVALMIVILIISIAIALFFGIYISSVISKPLTTTVNMINEMAGGRLDKRLRLTREDEIGVMAKTMDNFADTLQSLIIDDGGRVLTAAANKDMSQRLTQEYKGAFAKMKENINTVVQNLDTALSQVSEAVGQVTSASGQISSGAQSLAEGANTQASSLEEVSSSLEEMSSMTKQNADNSNQAKILAGEARVAADSGDASMKKMAEAINQIKASADNTAKIIKSIDDI

SEQ ID NO: 95168 - protein, 323 aa, Unknown
  Obtained from environmental sample
  DOMAIN (192)...(261): HAMP domain
  misc_feature (1)..(323): Xaa is any amino acid
MQNLKVAMKLLVGFGVVVAVILAISLVSIFNLRGIDDKYSQVVVSHGLPLNPAINVVGDIQAMRSEIRGFALYTGNKDQVKNGRKNLDKLSKEFEDSSKAFGKSIISPEVRAIFDEAMKLYNETFKPGAYKMADEAEKGAPREELMSKLAELREAAEKITDNMQSATDVKAGQLLSASEECSKQAANVITMMVIFLVVGIIIAVFFGVYISTLISKPLGVTVNMINEMSKGHLDMRLRLDRQDEIGIMAKTMDNFADDLQNNVVGNMKKISDGNLEINVSLKDSRDEVSAAIKNTVESLRSLIIEDGGKVLLAAAGKDCRKGY

SEQ ID NO: 95169 - protein, 301 aa, Unknown
  Obtained from environmental sample
  DOMAIN (18)...(98): Cache domain
  misc_feature (1)..(301): Xaa is any amino acid
KKRPWYKAAIAASGGVAATTPYVDAHTGEMVVTYSKLIFDKEGKQLGVVCIDLLLDRIAKYVVSTRLAEGGYGILLNENLEIIASSTKRNIGKSLSELPHKDFLDIADGLKQGIDISEHKIVDDRHDFVLFTKRFDNGWHMGIITPTDQYYQKVTNMKVFIAVLGVCLALMLSFILFRLAMAKQKADEKNQLAEAASKAKSDFLAKMSHEIRTPMNAIIGMAELALRENKPNIIREHIITIKQAGANLLSIINDILDFSKIESGKLEIIPSHYQFSSLINDVVSIIRMRVVDSNLSFVVNI

SEQ ID NO: 95170 - protein, 242 aa, Unknown
  Obtained from environmental sample
  misc_feature (1)..(242): Xaa is any amino acid
VTTPATCVATGSKTRACIGNASQTETETIAKLPYDNATQICDVRDGKIYKFAVIGTQTWMAENLNYAVGGKCYAEGVDGVSADSIAKNCATYGRLYDWSTAMGIDSRYNSEVWGGSDVKHRGVCPSGWHLPSDAEWDALMTAVGGSSTAGKHLKAKDGWYSCGPSGSGKSYSCEDTHGFSALPGGYGYSGGSFSNVGSDGGGSASEDGSNSAYRRYMYYNYEYALYHYLNKSYLFSVRCLQD

SEQ ID NO: 95171 - protein, 120 aa, Unknown
  Obtained from environmental sample
  DOMAIN (2)...(104): CheW-like domain
  misc_feature (1)..(120): Xaa is any amino acid
EDIRLIDNNEVFNVRSDVISLLRLNRLFGIRSEAQQEYHFIVIVGSADKKMGFMVDSLIGEEDVVIKPLRDQYTNSPGIAGASILGDGSVSLIIDVGQLLELGLKKEMENRRAREASSRW

SEQ ID NO: 95172 - protein, 384 aa, Unknown
  Obtained from environmental sample
  DOMAIN (33)...(247): RNB-like protein
  misc_feature (1)..(384): Xaa is any amino acid
MQNAELEKEFPKEVLEETQKFSKEIFAKDKNRENFRHLHIICIDPLGARDHDDAISVEETSNGYILGVHIADVSHFVKPGSALDTEARKRGYTQYLPWTAVPMLPDILSGDLCSLQENENRFSFSCIITLDKKGRMQKYRFAKGIIKVSRSITYEQAKELHDKRDKEICLLARVAANMKKLRSENGMLEMDSAEFKCQFSKKGLPQCIVPRQTVISNSWVEECMLAANKCCALELQKRKLSGIYRVHEAPDPEDLAELMQTEPTLFFDSPIDPHKLLKNYTGKNSQERQIFDLYSHLVKKAKKDPSITNRILRSMQKAIYSDKCTGHFALHWKDYAHFTSPIRRYADLWCHRELAGKRGKINDLCTVINEAEIKNQKTERKALK

SEQ ID NO: 95173 - protein, 616 aa, Unknown
  Obtained from environmental sample
  DOMAIN (1)...(64): Putative carbohydrate binding domain
  misc_feature (1)..(616): Xaa is any amino acid
MQYGYFDDNAREYVITRPDTPYPWINYLGSEDFYGLFSNTSGGYCFYRDARLLRLTRYRYNNVPTDAGGRYFYLSDSGDVWTPSWMPMKSALDRYECRHGMGYSRISSARNGLAFSQTSFVPLKDNCEIHKIVLTNESKADKDVDIFSFIEFCLWNANDDMTNFQRNFSIGEVEVEANGARIYHKTEYRERRNHYALWAVNVPVAGFDTDRQTFLGLYNGFDHPETVFAGKANNSIASGWSPIGSHHIKAHLKPGESKALVFVLGYCENPDDEKWASAGVINKASANALLDKYGSPEAADRAFAALKDYWDALLGRFSVEAEDKRMARMAGVWNQYQCMVTFNMSRSASYFESGIGRGMGFRDSNQDFLGFVHLVPERARARILDIAATQFPDGSAYHQYQPLTKRGNNEIGSGFNDDPLWLICGVAAYIKETGDYGILDEKVPFDNDESLADTLFVHLKRSFDYTVTHKGPHGLPLIGRADWNDCLNLNCFSKTPGESFQTTANFESGVAESVLIAAIFAFTGPDYAEICRRTGRNDEAQYAEKAIAIMIEAIDQHGWDGDWFVRAYNAYGKKIGSRECEEGKIFIESNGFAVMAGIGVKDGRAQKALDSVKEHL

SEQ ID NO: 95174 - protein, 63 aa, Unknown
  Obtained from environmental sample
  misc_feature (1)..(63): Xaa is any amino acid
MSRYKDFAEYKKLGEPEKTEKVVIWETAIGLQQVDGLTPSSYLIETAKEHIDGNITIDEVKAR

SEQ ID NO: 95175 - protein, 320 aa, Unknown
  Obtained from environmental sample
  DOMAIN (117)...(313): Predicted permease
  misc_feature (1)..(320): Xaa is any amino acid
VLVGKKGKTGASIRAIDPSFWEEQGSKEYLKLIDGTARIETDRQMLLGESMAASIGAEIGDTVRLMTILAGDGGMNIPKITPFTVSGIVSAGYHELDALWCVISGEGGRRILPPEASSSLIVKVDNPYKNVDTLTWQLYAALDSGFSVYTWKDLMRSQFSSYESTRQILLLIMALVVIVAAVNVSSATSMLVIERQRDIAVLKVTGAGARGITNVFLWGSFLTGLCGAIIGIAAGLLLGNFINHVIRSLEKFLSFFSRLAGGSEVKILDPGFYLETIPIVIDWKAVFLIGCFTVLCSVLASWLPATRAGKLKPMELLRKN

SEQ ID NO: 95176 - protein, 761 aa, Unknown
  Obtained from environmental sample
  DOMAIN (600)...(704): Putative tRNA binding domain
  misc_feature (1)..(761): Xaa is any amino acid
MKRRLITSALPYVNNVPHLGNLIQVLSADAFARFCRLRSYETLYICGTDEYGTATETRAAEEGLSPRELCDRYFAIHDDVYRWFNISFDKFGRTSTPIQTEVTQDIFKKLDAAGFITEKTVEQLYCGQCGRFLADRFIRGICPNCGSADARGDQCEACGKLHDPTDLKDPRCSTCGSTPSMKPTSHLYIDLPGLKNKLKEWIHIASEKGFWANNAVQITQAWIRDGLRERAITRDLKWGIPVPKPGYENKVFYVWFDAPIGYISISGCLGKDLADGFHDFAQAARKTKFPNWQKFVDYWWKSPDDVELFQFIGKDNIPFHTVIFPSSLLGSGDNWTMLHHISSSEYLNYESGKFSKSRGIGVFGTDAMETGIPADVWRFYIFYNRPEKSDVQFTWKDFQEKVNGELIGNLGNLVNRTLLFIIRYYDGRLPTGLPDQVLWQNVRKYENSITEKLERVDLRDAFREIFELSSYANKYFQDAEPWRLRTEDPVRAKAVIRDLAHVVRDIAILIDPFMPQIATRIISFFGLPFGETFDWKILGSANGLDPDYRIKCEVLFSKLEDDLINSLRDRFSGSQNDRLNEEAASLSNEKKPAFEQTIDLRVAKIEKVEKHPKADKLYIISLETGEGTSGAREERTIVSGLVDFYSAEQLMGKKIIIAYNLKPAKLRGVESRGMLLAAGDNGGPESAKERCEVLDSGDASTGTRLLPEGAAAGTAPAEINIETFLSYPITVRDFTVQYNETPLCLNGKPVRTSVIGEGEVH

SEQ ID NO: 95177 - protein, 504 aa, Unknown
  Obtained from environmental sample
  misc_feature (1)..(504): Xaa is any amino acid
MEGPENFNFFRQPDYVEEPFLKGSYAVYKKERLIGEGTGKLCHIHRPEIIDARDRRCWGELSVVGNELHITIPENWLAEAKYPVIVDPTIGTTAVGSQYRWRPSAGDPLTTLMFEVEIPVNRFLVTDAISGSCTGYAYVNSDDPEAAGRPVLYSDNSNKPQIRKSLNENLMDLRVTSSKPKGWRTATFTSNGSIASGTYIWYGIFCEYFWFPRFDTGARCYSDFWDAYTSIPNTYPIYNVNWYDDLLLSMYFTYTSGQNYQRKLTQGVSLSDSRTRTGNYKRNAAQTIQAEATPKRELTIFKNIKETINNFDVANRMLSFLTSIQETLSSFDFTKKMLTVYTSIKDTLSGYDFAKKTLSIVTQIQDILGSFDLAARIHSVLVNIKDAFSCFELSNTSFLLYSNIHDDLTATDTLYHFRNIIRGLLDNVDVRSEEKAGFFYLRAISETALAVSSIARGLFLFIKIASSIFIRDHLLGRFLKSKAELSIKSCVCSEITLESHITER

SEQ ID NO: 95178 - protein, 439 aa, Unknown
  Obtained from environmental sample
  DOMAIN (134)...(436): Poxvirus D5 protein-like
  misc_feature (1)..(439): Xaa is any amino acid
MESKIGDESIFLSIDELKKGKVQLTDATNARRLFEEHGKDIRYIAAWKKWIVWNGRFWDTDEGGALVHEKGLEMIRNIYDELLKTDDPRERMEIEKYGIISESTRRRESLIKAAQWITELNVKPEELDINPWLLNVRNGTVDVASGEFKTQCQKEMITKIANVEYNPNADCPQWKKFVREIMDYKAELIEFLQTAIGWAITGDISEQIMFILFGTGANGKSTFLNTIMYLLGDYATATPTETFMKKNGDSYSNDVARLRGTRFVTCTEVEQGRKLSEPLIKKITGNDQMTARFLYGEYFNFNPTFKIFMATNHKPVIKGTDHGIWRRIKLIPFMNRITEDKQDKFLEYKLRDEASGILNWLLEGIEIWNKERLQTPKAVLFATDEYREEMDVFGNFIQERCVQKKEASINIKVLYKAYSDWCVENNEHPVSERFLALRL

SEQ ID NO: 95179 - protein, 692 aa, Unknown
  Obtained from environmental sample
  DOMAIN (545)...(612): Phosphopantetheine attachment site
  misc_feature (1)..(692): Xaa is any amino acid
MAAFLSKNLGLQSGSFVGLALENSHLWQVCFWALLMDGYKPVLIDVNQKEEIVDYIIESAGIQTLIVKNPFELKNKVRQIPADELKSVKEKAEVTPQWADTLALCTSGTTATSKVLVFDGAAITSQLNGFYRTYVNAPRIATAPTPVKILAFLPLHHVLGFITSCIAYPFLNKTIVYLRDRAPASIQSACQKTGVTHMVSVPLLINNLKNGVIRKVRQEDPKKEKALQFLMKVSLFIQKLAPKTGDVFVRRHVTKSVIKKLFGDTFAWICVGGTHVPTDSLKFINGLGHIATIGYGMTECGIIAFEPGTVFKKRINGTTGPLMHGFTGKIVDADGNEAEVGELLLKGTSMHSGRMQNGGMIPSDVDENGWLHTGDIARYVKGSLVIEGRVKEVILNESGENIYPDELEDYFDGLSNLVERYCILGLNDKGNEKIAIVVEVKKDTNNEKGFEEISNIVNTVNGQLPFLKRIKLIYAAKEPMPLANGMKVKRQKLKEMLENNTFPAAEIQMNASSQTPSMAAPAVERVKTSGHTETELDGRFIQIREQVMECFVKVLDTTSDKIGLDMRFAEDLGGDSLDSLELLTMAEARFGVMIEESEYFRCRTVNDVSRLIYEKITGLSAGQESRGQASPRQENVKPITRFVDTPEYKSFEARLESLKETKNPYYIPHDSALRDTSVVMGKEVINFGSYHY

SEQ ID NO: 95180 - protein, 479 aa, Unknown
  Obtained from environmental sample
  DOMAIN (137)...(206): HAMP domain
  misc_feature (1)..(479): Xaa is any amino acid
YQIAWTKPYVDDSGSFSLMTTAGAGIYSQDRLIGISTIDWEIDEVIRELTDIKPTKNSFILLSVPEKDYVISSTRDGIDAGASIKSLPWNINADSFSLDDINYLSFGRSMDNGWLLSVQIPKLEIFNEVEKQNSRFSLIIALAAVVMTVLAYCLISKFVNAPIKRLTQDVSRLSLGHLDTHIEINSNDELGLLAKTFNKMTCDLKNSIEENTRERAEKERISAELDVAAAIQASMLPNIFPPFPERTEFDLYASMLPAKEVGGDFYDFYLIDKDNLAVVIADVSGKGIPAALFMMITKTMIKDSSPSKNLKDIFETVNRKLCEGNEADMFVTVFMGIYNIPGGKFVFLNAGHNPPLLKKRGGAYEFLETEPGYVLAWMKSAKYKETEIILEPGDVLYLYTDGVTEAMNQRKELFGEQRLLSVLNANKGCPPKELLSAVKREIDNFEDGAEQADDITMLALKVNGALQSNGALHSNAVKK

SEQ ID NO: 95181 - protein, 206 aa, Unknown
  Obtained from environmental sample
  DOMAIN (18)...(206): Chorismate synthase
  misc_feature (1)..(206): Xaa is any amino acid
MNTRIMLHTSPNTFGHSFKVTTFGESHGAAVGAVLDGVKSGLPFDLDAIQQELDRRRPGQSNMASKREEMDKVQVLSGVFESRTTGAPIALMVFNEGQRPEDYQAIKDIFRPGHADMTYSRKYGLRDHLGGGRASGRETLARVAAGAWAKQQLAPLGVTIRSFNREIGGVRCEALDWGFVEKNPLRSCDPNAFPAQREAVEAAMAD

SEQ ID NO: 95182 - protein, 379 aa, Unknown
  Obtained from environmental sample
  DOMAIN (290)...(329): Topoisomerase DNA binding C4 zinc finger
  misc_feature (1)..(379): Xaa is any amino acid
MINNATKIVQEKGVFHYKYIIIDEYQDIGMDRYKLIKAIIEKTSAHLMCVGDDWQSIYRFAGSDANLIMQFSKYWGETQISKIENTYRNSQELINIASRFVMKNPNQIKKMLQSKKSCQNPICLYYYNENNFNAVLERLFDFIVKEYGENANILLLGRTNNDIEQLKTGAFIIKNDTIICKKYEQLKIQFLTVHKSKGLEADNVIILNMKNDKLGFPNKIADDPILQLFLPTEDNFAFAEERRLFYVALTRTRNKTFLLVPDRNASEFANEIKALCHIEVPEGEKLIINNPTCPKCKTGRLVIRQANAENFVGCTNYPVCDYTNKNTSIIKNPIKCPICDGFLVVRKSKRGQFLGCTNYPNYCKYTAQINNSKFEKNKS

SEQ ID NO: 95183 - protein, 498 aa, Unknown
  Obtained from environmental sample
  DOMAIN (130)...(332): Transposase IS66 family
  misc_feature (1)..(498): Xaa is any amino acid
ELETKYQQIEIRNHELQNQVIEIETNHKQDYQQLYNEYLILKEQYDLLVYKRFARSAEQLLEDEKQQLLFAEEDEQPETNEEKPEELQTVKSFTRKKNGGRKPISANLERRPRVIDIPESEKTCACGANLTRIGEETSEKLVIIPPQIYVDQIVRPKYACRQCEGTEEEEEPAVRIAPVEPSIIPRSIASPSLLATIFTQKFEMHLPYYRQEKQFERIGVAISRQDMSNWQQQAYEKLKPLSALLEETVKSGPVMQMDESEVQVIGEEERSDLQKSYMWLARGGPVGKKVILYKYRPTRAAYNVMEFLQGYRGYLQTDGYIGYDSAAKDLPGIIQVGCFAHARRKFFEAAKISCKGRSAEEDIKYIRRLYQLEDTLRSKWKDDLEKFHEERKKEAAPILAEFEQWLSKRVDEVPPKVLLGEAIHYTLNQWNKLIKYIENPYLTPDKNTCENAIRPFVIGKLVILPERRRGLKFMRYVYPYRNGKAKRPCPVQISDGCF

SEQ ID NO: 95184 - protein, 67 aa, Unknown
  Obtained from environmental sample
  misc_feature (1)..(67): Xaa is any amino acid
MDTSIPKPKTGEKVQGNHPTLKPLDLLRRVVLASTKENDVVLDPFCGSGTTGIACKDIGSQFSSELK

SEQ ID NO: 95185 - protein, 81 aa, Unknown
  Obtained from environmental sample
  misc_feature (1)..(81): Xaa is any amino acid
VLLPKPTLDKLEAFFAEKLAAQLKNGLEIKSDHNLSGGFRIAQKDGSAYYDFSAEAVAEMLSAYLNPQLAEILKSSVKKEA

SEQ ID NO: 95186 - protein, 589 aa, Unknown
  Obtained from environmental sample
  DOMAIN (8)...(72): ATP synthase alpha/beta family, beta-barrel domain
  misc_feature (1)..(589): Xaa is any amino acid
MTGTKGTVVAVNGNMVSARFDGAVSMNEVGYVKVADKKLKSEVIRIRGEVCQLQVFEITKGIAVGDTVEFTGDMLAVELGPGLLGQVYDGLQNPLPQLAQAAGYFLERGVYMDPLPDNKKWDFTPTAKVGDKVVRADTLGTVMEGAFTHRIMVPFNLYGSYTVSKISKAGSYKIKDTVAELKDEKGKTVNVTFSFRWPVKRAVDCYEERLKPEEPMVTRVRLIDTFFPVARGGTYCIPGPFGAGKTVLQQITSRFADVDIVIVAACGERAGEVVETLKEFPELKDERTGRSLMERTIIICNTSSMPVAAREASVYTAVTLAEYYRQMGLNVLLLADSTSRWAQAMREMSGRLEEIPGEEAFPAYLESTIAGFYERAGLVRLKDGSIGSVTIGGTVSPAGGNFEEPVTQATLKVVGAFHGLSRERSDARKFPAIHPLDSWSKYQGIISDQKVSYARKILMRGTEVEQMMKVVGEEGTSLEDFITYLKAEFIDAVYFQQNSFDAVDQAASPERQKYVFTQILRILGSSFNFKDKEEARTWFNSLRQKFIDYNFSAWQSDGFKKIEAELLALVRDKAGKMDPTAEKFIAGLI

SEQ ID NO: 95187 - protein, 300 aa, Unknown
  Obtained from environmental sample
  misc_feature (1)..(300): Xaa is any amino acid
MFRLFRDGYHAFALFAGAATCFVTLIMLRDSLTAWRWLAAGLVMAVLFTVYPILYTVYLSYTNMSGGHLLTKAQVVRRLSEEMYNPDDGGSWGWTAYRKGKDFLLLLQQDNSFSSIKPGGSLEERDFKEPPLKVDGYTIMKPAEIMQNFKELGQVEFGRPPFVVKILSMQEASVQLPLYTYNSVEDTFTDNRDSVVYKNVIGTYTSQSGKTLTPGFFTTIGWKNYNRFLTNKGYLKPVFGIFIWNISFSLFSVLISFALGMLIALLFEDLKYKRLIRTLLIVPYPIPVLVSIMVWRGLLN

SEQ ID NO: 95188 - protein, 223 aa, Unknown
  Obtained from environmental sample
  misc_feature (1)..(223): Xaa is any amino acid
MVFYGSMIMEGVIAMIWAAVTMAHFKYVGVESAVSAPVVVTKSSVEYMGWVGGILAVFGVVACPITSGDTAFRSARLTIADIFKFDQKPIKNRLSVALPLFAIGVILVLFSISSTQNFNIIWRYFSWSNQTLATIALWAASAYLAKTGKLYWFTLLPAAFMTVVVTSYFFTANECLGPLMTKITGSPATTYSIGIIIGLILSAMLLALFIPIIGIKEKGTIKD

SEQ ID NO: 95189 - protein, 377 aa, Unknown
  Obtained from environmental sample
  DOMAIN (230)...(255): The GLUG motif
  misc_feature (1)..(377): Xaa is any amino acid
LKIDKINTLAFAILCTFGVHTSFAQCTASLFAGGTGTEANPYKISTAEQLQNLNQCLGSSYQNNYYVLNNDIDLTLYLQGAGNNNGMGWKPIASSSYYFFGGKLNGDSHKVSGLWINRPDDAYVGLFGSTYEVEIMDISVEIDDDKGGVRGIDGGGLVGCNDGGTISNSYVTGNVSGTNYVGGLVGTNNNGTISNSYVTGNVSGTNQVGGLVGGNGGTISNSYATGSVTGSRDVGGLVGSNGGTVSDSYATGSTTGKDGVGGLVGMNVGTVSDSYATGSVTGNGSEEDGVGGLVGRNGGGTISNSYAMGNVSGTNQVGGLVGMNVWDGTVSGSYATGSVTGSRDVGGLVGSNWNGTVSGSYATGNVTGIAHDNRHGG

SEQ ID NO: 95190 - protein, 229 aa, Unknown
  Obtained from environmental sample
  DOMAIN (161)...(226): GTPase of unknown function
  misc_feature (1)..(229): Xaa is any amino acid
EVLVSVFRAPKSYTGEDSLDISCHGGSAAGKGVMAALRACGFRDALPGEFTFRAFMNGKLDLTQSEAVMELVSARTDKGGSHAISRLSGVLEQEINAIKQQLVEVLSGVEIFLDYSEDEISANADETAGYFSGQQPVREILARLRTLAQSWRWEHIYQDGILAVIAGRPNAGKSSLFNLLLKEERSIVTEVPGTTRDWIEAVISFDGIPVRLADTAGLRESLDPVEKSA

SEQ ID NO: 95191 - protein, 313 aa, Unknown
  Obtained from environmental sample
  DOMAIN (45)...(311): Phage portal protein
  misc_feature (1)..(313): Xaa is any amino acid
MSIFDRISSIFKRNDYRRQINKAALCETDNEPFLPVDDCFSKFYGKPLFGEPYLLNAWVNIAVNILIRNIARADFVLEKDGVEIKSGSLYSLFHRPNPTLSRYDMWKETAAWWLIEGEAFWWYGADYSGGLPKEIYILDPRKIQLEGEGLDMGGSNKTRRWFYNAGAELVPIFSDELVHFRDWNPWNPLRGVNPLVSLSLELEQDFYANKANNTLLKNNAIPQGLLKTDQTLRPEEADALERRWESKYGQVKAGRQIAVLGKGTSFEALSFNPDVIKLFELKKWNLYTILAKFGIPPRVANISDRSTAVSGKD

SEQ ID NO: 95192 - protein, 428 aa, Unknown
  Obtained from environmental sample
  DOMAIN (195)...(339): GAF domain
  misc_feature (1)..(428): Xaa is any amino acid
YSRLLGALTAIIVRITQKESTAFILILAAIAVSVLVSMYISNRKKIYTPIRWFIIFTVCDFLFPCMFFVMGGINSVMMVYFILSIAVVFFLAWGKSLLFFLFTHLAIIFVCYYLDFMGLFPSFSARSKGITPFEQIFSFLLTGVCIGLMIVFQRRIYVSEKEKTDLAKETLGLKSRLLEVVASTSEILLTTETDDLDKTLLKAMELMAGCVNIDHMYIWKNQTFGGKTLFEKLYEWVRGKGNIETPLIGNRYFYRDALPDWENYFSPGNYINSPIRSLPEAEYKFLAAFGIRSILIIPVFLQESFWGLVSFADTKQERTFSDEEISVLRSGCLLLANATIRYQNQVLIETRMRQQRLMADISRSFISREAVGQLIDNALKQMGEFMGVSRIVVVATYDNIDESWLVYSWHRGDQWRHTDAHSRFKSLI

SEQ ID NO: 95193 - protein, 69 aa, Unknown
  Obtained from environmental sample
  DOMAIN (5)...(69): Heavy-metal-associated domain
  misc_feature (1)..(69): Xaa is any amino acid
MEKMVLKVDGMSCEHCARAVTNAVSGISGTQDVLVDLEGGTVSFNFDSGKAALDAIEAAISEEGYTVKH

SEQ ID NO: 95194 - protein, 88 aa, Unknown
  Obtained from environmental sample
  misc_feature (1)..(88): Xaa is any amino acid
MKYLIITGNPKKDGLCHAVTEEVKKGAEAGGAIVDILNVAKIERCHVCGTGWGTCREKQVCAFGDDGFNEAQAKAHEADMLCFITPVY

SEQ ID NO: 95195 - protein, 78 aa, Unknown
  Obtained from environmental sample
  misc_feature (1)..(78): Xaa is any amino acid
EIIYHANTDTSGFPPIDNNEYTSGSYATVLDKNTLEKTGHEFNGWNTKTDASGDHYNVGDQIEIKNINIFLYAVWEQS

SEQ ID NO: 95196 - protein, 191 aa, Unknown
  Obtained from environmental sample
  DOMAIN (2)...(190): Glutamine amidotransferases class-II
  misc_feature (1)..(191): Xaa is any amino acid
MCGIIGYVGKENAVPIIVEGLKKLEYRGYDSAGIAIYEKGGFNVVKQKGRLAALEERLLGQSISGRMGIGHTRWATHGEPSDINSHPHVGSKNKIAVVHNGIIENYKQIKERLENHGVNFYSQTDSEVIAQLAEHYYNGDLLDTVVHVSNALEGSYALGIMSVDDPDFIVAIKKDNPLIIGVAAHGRFHCL

SEQ ID NO: 95197 - protein, 442 aa, Unknown
  Obtained from environmental sample
  DOMAIN (2)...(77): Uncharacterized protein family UPF0004
  misc_feature (1)..(442): Xaa is any amino acid
MSCLNKAGWESANAEDADIIIVNSCGFIESAKQESINAVIEWRKFYPNKKILLAGCLAQRYAKELAGSLTEADGFFGIENIADITNVVSKITGGAQDKSANSAAVESRPVNSGDKHETGKRPLLSLPGSAYVKISEGCNNCCSFCAIPLIRGKLVSREIPDIVEECRILLERGIAELCIIGQDIGAFGKDTCAESKLPELLKAISSLEGHFWVRLLYIHPDHFPLQILDIMENDTRFLPYFDIPFQHASAKILSAMNRRSNAEQYLALLETIRVRLPRAVIRSTFLLGFPGETEEDFAALLDFQKKAKLDWLGCFTYSREEGTPAYSMKSRVSAKTAAARKRTIEDQQIPITEKNMERFTGQTLEVLIEERIDAAGEACAEDTENFWLGRLYCQAPEIDGAAVIADSGADGINPQIGKLAKCKVIARRGFDLEVKLMIDSNN

SEQ ID NO: 95198 - protein, 74 aa, Unknown
  Obtained from environmental sample
  misc_feature (1)..(74): Xaa is any amino acid
ALFSRAEDLNIQAQNGIRIWVSNAQAAKFQIIGGGRSVPVEVGAAGEVVVSDFRWIRDEDSRYRLVLIRLETGS

SEQ ID NO: 95199 - protein, 235 aa, Unknown
  Obtained from environmental sample
  misc_feature (1)..(235): Xaa is any amino acid
MPIYLLFGILVSSVIAQTIILPFDPAVRINGRFAKEADIARASFSGVEFIIAFEGTEASVLLKSPGNVFSVILDGKQMPPLDLSVNAKEKHLIAKNLVKGTHVISIAKRTESIQGDALFKGFEIKGIPKKEALLQKPKLKIEFLGNSITAGYGVLDSIKEHTYSPITQDVFSSYAGVAAKELNAEMRTVAFSGRGVFRNHPDSEDQRTLPEFFPYISVNSKIPWDFSWQPDIAVI

SEQ ID NO: 95200 - protein, 65 aa, Unknown
  Obtained from environmental sample
  misc_feature (1)..(65): Xaa is any amino acid
MYPNVLVSSVPENSLTIMSCASSPYTLKIMSIVAVIFVPIVLAYQIWSYYIFRKRISSRNIHSEV

SEQ ID NO: 95201 - protein, 278 aa, Unknown
  Obtained from environmental sample
  DOMAIN (174)...(278): CheB methylesterase
  misc_feature (1)..(278): Xaa is any amino acid
KNYRQQIMINTLIVDDSPLARDILRDFLEEDGNFKIIGEAVDGEDGVQKILSLNPDLVTLDIEMPRMNGLQVIDTVMKKTSVPIVVITSHDTAKNAYEATVKGALEFYSKDTFTASLSPQRRQQIYETLKRISSVKASMKKTDDEPQVISRMNAPEENLVTKSRRQVEKRKIDAVVLASSTGGPKSLSIFFSVLPDTFPVPIVIVQHNSSGFDKSFAQWLGAYTSLKVKLAEEGENPKPDTVYIARTDKHLELCLAPDQSMILRYNDDEPENNQKPAA

SEQ ID NO: 95202 - protein, 487 aa, Unknown
  Obtained from environmental sample
  misc_feature (1)..(487): Xaa is any amino acid
DPESVFCGQIGGGDDVPIGKTKVRNGAVESDESGDGDDDNYEYVYDEEEGGYYKRYKSGGSNGWKPKENLASTRYLGGAGPVKWVGFVFSTKVDPSSLSRLVSVEVCPLPGVGGKGCRAVRQSEYKVREDILGAKSFAYRVMFNEPVGYGQRVNVTLKFADKAEFKGAQETYVIETKPEFTLEKAGVYGQMYTLNANGVSYDARQAVKLGSDREFTLEFSAEPSDPGISVMRSMVSVSPSPPTFLYSISGNKIFVNLGMEQEKLYKVVLNPSTITDIAGRALTNKKPNSFYVYLPKIKPNANWDRGSGIAERFGPQQFPITASGVSSLDFRVYKIDPLHTAFGDFPSAQVEVSETSMPPGPGEEPSSMDSDYGKTRYGYSYENVNIVKHIRMLGSPHYSGIVDVGGEGGRKISSVDLKPMFAAVSGKDKPGTYLVGFRLLDGAQNRYYAKVSVTDLCLSAVESNLKGNKVMFAVTSYSSDKPVADAS

SEQ ID NO: 95203 - protein, 80 aa, Unknown
  Obtained from environmental sample
  misc_feature (1)..(80): Xaa is any amino acid
AKEIGAQTAVLSGKVDAIVFTGGMARETCFIDDMKSYVGGFAKTLVYPGEFEEEAMAAYAAGVQSGEIKPQVYTGEPQIP

SEQ ID NO: 95204 - protein, 224 aa, Unknown
  Obtained from environmental sample
  misc_feature (1)..(224): Xaa is any amino acid
MIAEENPPIEPILEPIEVAETKNSDLETVIPFSLVPEGFTWNKKLPPAEAPVRPTKPEIPEFIMGNGLISPEDMSAFLLAANSAAEREFVENLAFFYVEESAAEGVNHDTAFAQMCLETGYLSFTGLVSPEQNNFCGLGSIGPGQPGEWFPDPRTGVRAHIQHLKAYATDTPLKQELVDPRYFFVSFGSSPAIRGLSGTWAADLLYADKIANILERLYSFAYGI

SEQ ID NO: 95205 - protein, 719 aa, Unknown
  Obtained from environmental sample
  DOMAIN (3)...(111): Toprim domain
  misc_feature (1)..(719): Xaa is any amino acid
MAKNLVVVESPAKCKVISKYLGKDYAVKATMGHVIDLPEREFGVDIEHGFKPKYTISKGKSRVLRELKDEAAKAEKIYLAPDPDREGEAIAWHVANNIAAEGVTVQRVMFNEITKRAVLAAIDTPREIDMNKVNAQQTRRILDRIVGYQLSPILWRTVFKGLSAGRVQSVALRLICEREDEIKAFVECEYWSIHGIFKYKGAAFSAKLASIDGRKSGSNDKNPLLPNGAAAKAVLERLAGEKFSVTNVQRTEKNRKPYAPFITSTLQQEAARKLGFSAARTMMVAQQLYEGLELGPLGSMGLITYMRTDSTRIAAEAITDARGVIKKLFSAKHVPSSPRYYGKSKTAQDAHEAIRPSQVNLDFAPDKVKGFLTRDQHKLYELVWKRFLASQMENALFDSTRVDIGGGGCVFRASGSIMKFDGFLALYDETVEDAVDTVEGENDTLPELEVGAVVDNKELVDKQHFTQPPPRYTEASLVRELEDKGIGRPSTYAQIIDTLKRRKYTTVEARRFSPTDVGYMVKNTLVNQFPDVFDVGFTADMESRLDEIESGGADWIGVLKTFYTPFADRLEVVRGNIKDLRAQNQEVTDRKCPVCQENFLVVKWSKNGRFLACQGFPTCKYTEPLEKGAAMETDEKCDKCGAPMVVLTMNNSKFLGCSRFPECKNTKSLSIGVPCPQKGCDGSVVERKTRRGKVFYGCNRYPKCDFASWDRPITESARS

SEQ ID NO: 95206 - protein, 730 aa, Unknown
  Obtained from environmental sample
  DOMAIN (13)...(117): Toprim domain
  misc_feature (1)..(730): Xaa is any amino acid
KGTGYNHGKTFSDSRVPGEMQSHLQYLGKDYAVKATMGHVIDLPEREFGVDIEHGFKPKYTISKGKSRVLRELKDEAAKAEKIYLAPDPDREGEAIAWHVANNIAAEGVTVQRVMFNEITKRAVLAAIDTPREIDMNKVNAQQTRRILDRIVGYQLSPILWRTVFKGLSAGRVQSVALRLICEREDEIKAFVECEYWSIHGIFKYKGAAFSAKLASIDGRKSGSNDKNPLLPNGAAAKAVLERLAGEKFSVTNVQRTEKSRRPYAPFITSTLQQEAARKLGFSAARTMLVAQQLYEGLELGPLGSMGLITYMRTDSTRIAAEAISDARTVVKKLFGAKHVPSAPRYYGKSKNAQDAHEAIRPSQVNLDFAPDKVKAFLSRDQYKLYELVWKRFLASQMENALFDSTRVDIGGGGCVFRASGSIMKFDGFLALYDETVEDAVDTVEGQNDTLPELAVGAAVDKKELVDKQHFTQPPPRYTEASLVRELEDKGIGRPSTYAQIIDTLKRRKYTTVEARRFSPTDVGYMVKNTLVNQFPDVFDVGFTAEMESRLDEIESGGADWIGVLKTFYTPFADRLEVVRGNIKDLRAQNQEVTDKKCPSCGENFLVVKWSKNGKFLACPGFPTCKYTEPLEKDASVQTDEKCDKCGAPMVVLTMNNSKFLGCSRFPDCKNTKSLSIGVPCPQAGCDGSVVERKTRRGKVFYGCNKYPKCTFASWDKPIARKCDKCGNPY

SEQ ID NO: 95207 - protein, 283 aa, Unknown
  Obtained from environmental sample
  misc_feature (1)..(283): Xaa is any amino acid
VTSFTAIARVNRVCGTDKKCGYVVDYVGITRHLKEALAVYADAEDCADEPMIDVSTDIDRLNSAYNEICSFIAQKISYDPFKQHESVIEELVADEELRNAFNELFKKLSTYYDRVLPNPVALNYRDDYKLLAFIRETVANRTRDQRYSMKDASVKVRSIIEEYLRVRGVGVEIPPIDILSPDFIAGVEKPEKSDRAVVDEIKYAVIDHINKNKSKDPELFERFSERLDKILKEFNGNWISLRAALTKFVKNDLYNTRQNEETYGYEANREMPFFSLLRKEVFD

SEQ ID NO: 95208 - protein, 157 aa, Unknown
  Obtained from environmental sample
  misc_feature (1)..(157): Xaa is any amino acid
NEAYDRVKTIRFLGKSVTVHYLILENLSLVEEQILAAAKVNPQVQSWINSVNSLEGWSWRNIADTQSRSYHSYGLAVDIMPKSYGGKETYWLWASNRRSDWWNISYNERYHPPAAVIKAFETYGFIWGGKWLYFDTMHFEYRPEILILSGMPPNTRR

SEQ ID NO: 95209 - protein, 113 aa, Unknown
  Obtained from environmental sample
  DOMAIN (18)...(72): Helix-turn-helix
  misc_feature (1)..(113): Xaa is any amino acid
MANIIDEQYIYKLISSNIKRLRSLQNISQLGLAINTGLTHNFINDIENCKKGISAKSLAKLSNALNAEPYQFLLPEGLHNNDMMIYVKDFNDSLQKVVSDLTGQYLAKEKKSR

SEQ ID NO: 95210 - protein, 171 aa, Unknown
  Obtained from environmental sample
  misc_feature (1)..(171): Xaa is any amino acid
MTTLVAWKEGMALSQQHLQQSDRFFLRHIKNAAGLPRGMNFGFGKLVFAEELIREGLLAIKECEAIFPSGLSFMDYENPAVKIEARNFAKIFDKNLNVLDVYLALELNGPVEFSEEQNSRYKVVWENYPDSYSAGNSLQMPISVPMPTIVFSGESLDGKEFVPLARLLRNM

SEQ ID NO: 95211 - protein, 326 aa, Unknown
  Obtained from environmental sample
  DOMAIN (4)...(279): Isocitrate/isopropylmalate dehydrogenase
  misc_feature (1)..(326): Xaa is any amino acid
MKFSVAVIPGDGIGPEVIAPTLEVLDAVGDKYGHIFNYVELEAGGLAIDHTGEPLPQETLEAAKQCDALLLGAVGGPKWDTLPGHLRPERALLGLRSGLGVFANLRPAALLPQLKSACPVKDEVLIASNSEGKAAFDLLIVRELTGGLYFGKRGRIDEPSNGHTPGAAFDTEAYSWMEIERVLRAGYEAAKVRRKKLCVVDKANVLESSRFWREVAAVVSKDYPDIETSYLYVDNAAMQLIRAPGQFDVIVTSNLLETYFRRGVRAYRFNRNVGVGESWLSRADRDKARNVRAHSRFRAGHRRKRHRQSARDDSFRGNDAPLFIQS

SEQ ID NO: 95212 - protein, 189 aa, Unknown
  Obtained from environmental sample
  DOMAIN (108)...(170): SAF domain
  misc_feature (1)..(189): Xaa is any amino acid
MSLAHIKIGFALLLAGTAYAQTMPARQDIEALRPIAEQFLITQTAGIAGKSEITLGAVDKRLHLAACQAPQAFLHAGAKAWGKTAVGIRCTAPATWTIYIPATVRVYGDYIVAASALPQGHVIRETDIKLTTGDLTALPAGVMTNTALVIGQTLARSLPIGSPLRPEALQVKKVITQGQTVRIVATGPG

SEQ ID NO: 95213 - protein, 194 aa, Unknown
  Obtained from environmental sample
  DOMAIN (4)...(111): Thiamin pyrophosphokinase, catalytic domain
  misc_feature (1)..(194): Xaa is any amino acid
LLDGKEIFVIAADSGLITAEESGFKPVFVIGDMDSLDDDSRLSAYPPDHVIRYSHDKDYTDTELAFSLAAEKGCDDIWLVGGGGGRIDHLFAIRSLFERERFPRRWITGAEDICCIDANTPYNEFSRRIAVNACVSVFPFGSSPWKASSKGLKWPLDALSWDRGFFGISNVAVDGDFSIKAEAGRFMIILSLEE

SEQ ID NO: 95214 - protein, 178 aa, Unknown
  Obtained from environmental sample
  DOMAIN (123)...(178): Tetrahydrofolate dehydrogenase/cyclohydrolase, NAD(P)-binding domain
  misc_feature (1)..(178): Xaa is any amino acid
MSAILMDGKALGLKIRENVKTRASAIKAKGITPCLAVVLVGEDSASLSYVNSKEKALAEAGMESRDIRLPQNTSEAELISLITELNKDEKIHGILVQSPVPKHINEEKVNAAVAPEKDVDCFHPVSVGNMMLGRAGFLPCTPHGVLVLLKEYNIPVSGANVVIIGRSNIVGKRACESF

SEQ ID NO: 95215 - protein, 51 aa, Unknown
  Obtained from environmental sample
  misc_feature (1)..(51): Xaa is any amino acid
DAVYKFKRYEDSSLSYTGIDKHDGETEVGGYDTVISKKEFDRLFMAQQASM

SEQ ID NO: 95216 - protein, 433 aa, Unknown
  Obtained from environmental sample
  DOMAIN (293)...(380): Hpt domain
  misc_feature (1)..(433): Xaa is any amino acid
VVANQYDCAEALRHAEWFYVFSGCNLYENIKPLLEQPDSVFPGCRKPPLAVMVEWGTETFIPNVRSVSLPVQSLSIANVLNGKADSKGYTENSNAVRFSCPHARLLVVDDIATNLKVAEGLLAPYRAVIDICLNGLQAIEMAQQHHYDLILMDHMMPEMDGIEATVAIRTWEKEQQKKDSGYRQVPIIALTANAILGMREMFIENGFNDFLSKPIDVSKLDEILDRWIPKERRDQGPDNSEQLTINNEQLAISNEGQDTHPPVPGPQSLIPIPGLDVQKGIYMTGGTVDVYTQVLSLFCIDARDRLPLLQKAPEITALSAFITQVHALKSALASIGAAGISTIAAGLEAAGKAADMAFIREHLPAFAQQLEELIKNIQTALQLNEPAAPQSPVPKAALPPPQSLFQELADALRAQKISEIKRILNDLNQQTRD

SEQ ID NO: 95217 - protein, 172 aa, Unknown
  Obtained from environmental sample
  misc_feature (1)..(172): Xaa is any amino acid
MEGKVSMKEDSAKQSEYAEKTKSYSSSIEQLLKETQDVDAALKQGSMPDPEFMKIKMSITMLTLVSNYLAMNQVAISVFGKVNENLLNEARKSMHRCLAYLEEVVTKIVDAPFSDYEEGLAKIAAVSPAQRYSLVEKIGQQMICLKEAYGKNSKWTWTFVELEGRYAVSPRI

SEQ ID NO: 95218 - protein, 311 aa, Unknown
  Obtained from environmental sample
  DOMAIN (8)...(270): ATP-NAD kinase
  misc_feature (1)..(311): Xaa is any amino acid
MACLPVKSAILIVNLHKKDAADAAEEIRRDLENGGVQTTLFAFEGRPASPPQGKWDIAFSLGGDGTVLYTARILAHTGTPILPVHLGTLGFIAGVERHEWTEVYRRWLAGESALSRRCMLEFSIERGGKYAVNNSVCLNDVVISSLGIAKLIRLQARTEVAPGEFAEIGCYRSDGLIIATPTGSTAYSMAAGGPILDPEMEAQIISPICPFTLSNRPLVLPSRQALQITVCKEQRSGVLLTSDGQETFALEPCDLVTIKHSPHYAILITAGYSSYYKALAEKLAWSSEGGMSSKGVGASKGVGASIGGAHA

SEQ ID NO: 95219 - protein, 164 aa, Unknown
  Obtained from environmental sample
  misc_feature (1)..(164): Xaa is any amino acid
MRELHQRLLKMHGKPYGVYKSLQGQFFSFGDFTLKFTHIQGDPHAQPSRIMLSAKMDALGFAEELHNTREKEIALADFLLRQFTRNAENISIVKAHCQIMQRNSLYIENGIVRILASVNLPGESRRIEGEKASELLIGTLSDWITTAMYWNNLAKEKCKAHLEC

SEQ ID NO: 95220 - protein, 217 aa, Unknown
  Obtained from environmental sample
  DOMAIN (9)...(213): Class II Aldolase and Adducin N-terminal domain
  misc_feature (1)..(217): Xaa is any amino acid
MDVYKTLREEAFQANLEIQKQNLAIYTWGNASAFDPVKAVFAIKPSGVRYDNLSSESMVLVDLDGKIVEGKLKPSSDTKTHQVLYREFSQIAPDSGIKGITHTHSPYAVAWAQAKRPVPVFGTTHADHSTEEIPCTDYISEHALKNDYELETGKLIVEHFINNKLNPAHVNMVLVAGHGPFTWGSSAAQSVYNGAVLEEVCKMAFLTLKIDPQAKPS

SEQ ID NO: 95221 - protein, 289 aa, Unknown
  Obtained from environmental sample
  DOMAIN (1)...(225): Iron only hydrogenase large subunit, C-terminal domain
  misc_feature (1)..(289): Xaa is any amino acid
ASVFPGEHLKLNGCLKSIGVEAFFDVSLGAELTVISYLNYIKEKKPRTVIAQPCPAIVNFIEIYHPELIPYLAPADSPMLHTIKMIRQYFPQYRDYKTAVISPCIAKRREFDETGHGDYNVTMFALKKYLHDQNINISSKQEVPYTGILAERAVNFSSPGGLLDTAERFIPGIRRNTRKIEGLHNIYPYLTEIAEELLHQQGVEFPLLIDCLNCEKGCNGGPGTGNHSVPLDKLETPIRKRSAEHEKQIARKNNKNNYKKYHEQLNQFWKRGLYDRSYRDRSGNLVLRH

SEQ ID NO: 95222 - protein, 260 aa, Unknown
  Obtained from environmental sample
  DOMAIN (90)...(215): MotA/TolQ/ExbB proton channel family
  misc_feature (1)..(260): Xaa is any amino acid
MNLGTLIGVLGAMTMVIGSILLSGNSIMAFVDIPSLALVLVGSYFALMIAFSLSDALSVFAAIKLTFKQQVFNQQGVIQKMMAFSEKARREGLLALEDELEDLDDEFMKKGLRLMVDGTDAAVIRDLMELELSQMQNRHSFKIKLLNMWTSLTPGLGMLGTVMGLVGMLRNLDDKASIGPNMALALITTFYGSLFSNVFFAAWSSKLSVFDAEETNVREMIVEGVLSIQAGENTRILALKLMAYLDPVARRSLESEMLKD

SEQ ID NO: 95223 - protein, 81 aa, Unknown
  Obtained from environmental sample
  DOMAIN (17)...(76): Flagellar protein (FlbD)
  misc_feature (1)..(81): Xaa is any amino acid
MGSRIVTCFPFSVNCGMIKVTRLDGKEYFLNPHQIECIEVRPDTTVVMLSGKHHIVREEVDEVLSRIEAYRKRLSPPVAQE

SEQ ID NO: 95224 - protein, 273 aa, Unknown
  Obtained from environmental sample
  DOMAIN (233)...(271): Domain of unknown function (DUF1078)
  misc_feature (1)..(273): Xaa is any amino acid
GRQVLDGTWSTQIDTYDSFGDKHILQVEFTRVPGTTNSWNAAVTVDPQNQNPTNTTIGLGAEAPAAGGPTTFVVNFSNNGTLLSAEDGAGNVSGTGQVQMNVAYDVQTATPNADGTPVRQEFVLDLGQVGGFTRSITQYAEQSSSKAVEQDGRTMGYLENFKIDSSGVITGVFSNGTTRALAQVAVATFANQGGLEKAGDNTFRMSNNSGLANIGPSGAAGKAEIVAGVLEMSNVDMADQFTDMIVTQRGFQANSRTIQTADQLLQELLSLKR

SEQ ID NO: 95225 - protein, 277 aa, Unknown
  Obtained from environmental sample
  DOMAIN (71)...(277): Binding-protein-dependent transport system inner membrane component
  misc_feature (1)..(277): Xaa is any amino acid
MKLLKNLLKSPMFVIGASIFLLTLLIALVGPFFYKITTARVGAQYDAPTAKFILGMDDLGRDYVSLLLLGLRSSLFVGFLAGVIATTIGTLIGIYGGFRGGVVDDILNMVTNLFVVIPSFVVLILISASFSEGRSLTLIGVIIGMTTWTWSARAVRAQSAALKSKDHISLAKFNGDNTLRVLLVHILPYIFSYVFMVFILQVSSGILSEAAISMIGLGPMDTVSLGTILNQAKNTGALGDGIWWAFIPATVVITLIVFALYLINTSMEGVFNPRLRK

SEQ ID NO: 95226 - protein, 360 aa, Unknown
  Obtained from environmental sample
  misc_feature (1)..(360): Xaa is any amino acid
GKLPAPEYIIHPIYKNNDHFAIALQQGKLDASQTFMPRIWLKKKDGVSTWYDEAPYFVPGAMPMLLINTTKAPLNDPQYRRAMAAAISYADIKELAVSGYAPDVQPGLIMNQGLEGKYFNDGDAKEFGVTYDPAKAKKILADAGYKSVYKRGDKDSTLDYMTDKAGNKLPVLSITVPAGWSDWEAMVQIAVKGLRAAGMDVREGPVDAGLYWPALPSGSFDLIMHKPAASVTPSLPWNRFEAVMSSRNWVPVGGDNKMNENQGRYNSPKSETYNPRVDELLRKIPTLEKEEELTAAYRELNKIFMKDQPSLPLCYLPEQFYEFSSKVWKNWPTSANPYAPPLLPWVGASTKILWNLQPAK

SEQ ID NO: 95227 - protein, 268 aa, Unknown
  Obtained from environmental sample
  DOMAIN (87)...(253): RNA pseudouridylate synthase
  misc_feature (1)..(268): Xaa is any amino acid
MPSFSCTVEDTLAPGLRLDRYVAERLQILSRSQIKARRLEARVGGRAVKISRILNGGEQIELSWLESESPFLIPQELPLDVIYEDERVIVVNKAQGMVVHPGAGNRQGTLANALLYRKLRSTERLPDFSPDDTGGLAGLRPGIVHRLDKDTSGVIIAAWDEQALAFLSEQFKKRKVRKTYAALVQGCPRDKEGCIEKRIARSRRDRKTFTVSDTEGRKSMTYFRLIRSYGKYSLLLLRPKTGRTHQIRVHLKYLGNPVLGDPIYGQRD

SEQ ID NO: 95228 - protein, 225 aa, Unknown
  Obtained from environmental sample
  DOMAIN (118)...(225): RadC, DNA repair protein
  misc_feature (1)..(225): Xaa is any amino acid
MGGKRDALNPQPNSLPPPAATGSSGHRGRLLEKYADRGLSAFSDYEVLEFLLTFALPRADTKPLAKNLLARYDTVSAVINAPLDELCEIKGLGRRSAVLLTLVKDLIAYSLRERIVDRPIITQRSDVENYLRSDLSGLRDERVIALYLDNGNRVLGMETVAEGTVNRCVIFPRKVMEGAIKHSAASFILVHNHPGGTAAASEEDWKTTERLFNAGKQIDIPMLDH

SEQ ID NO: 95229 - protein, 485 aa, Unknown
  Obtained from environmental sample
  misc_feature (1)..(485): Xaa is any amino acid
LDDLNDLAQLKDDINKLLNGRNRKDLQDKEELRRLNDLERRERKIKADMADVYRRDIPSLVMVPTMDMEFAHIDGYNGVPIYQRDEKTGRLFYKRHGGKGAVYLNDDEVLIFQNWKRQISDVEAAAISNPLRLFPLFSYDPRRYRLSDADTAKNGWGTWREPFARIVGHSDSAKDVRKIWLGFCMNPTLGFRPFDEYCDYLPMFYKECEKNNIPLLVNCVAGGITSHDAAYYEHDWDKRESKNSERYKMMVEKGLADSQNTAAAHNSSNRYYGGERVFSDGFYNGSMDYFYQGLDYFYMNYGHPRNWIPVLDFFPDLRLCFAGFGGNDEWRLAEWYDSTSLPTRQWLRVIIKLTARYKNVYADISGLNIYDEKVRDGLLELLKLIQDDKDNNFKHLKYKLIFGSGWYSTYLTDAAAGGKSVDGPDTVKHSYGNYCHEFKKLFDKADKGGNGELWEYLSLFNPWNFYGLSKDKIDKIRRELSIDNN

SEQ ID NO: 95230 - protein, 322 aa, Unknown
  Obtained from environmental sample
  DOMAIN (53)...(322): Domain of unknown function DUF81
  misc_feature (1)..(322): Xaa is any amino acid
MIKQKFLKPPWLEMIIMLAAVALSAVGLLIISYLSRPNISAQMNYGTIGLWLLAFFLLSFSIGLVSVLAGIGGGIIFTPVMLAFTPVNSLIIRATGLIVAMFSGLISTGIFMKKGLGNLKMSMILAVSQGIGALIGAQCAVIAADLLGDMGEGMIRALLGGFLVLIAINFLLADKKYDWPNIVITDKITEWMGLRSSYFEESEKRAYSYKVTRIILGLALVFCVGLLGGFFGIGAGWAITPIQNLALGVPLKVAAANSGIILGMVNCVAVWPYMLAGGIIPLFVLPWLSGKVAGGYIGALVFVKAKVTVIRIILSGIMIYTS

SEQ ID NO: 95231 - protein, 137 aa, Unknown
  Obtained from environmental sample
  DOMAIN (12)...(137): short chain dehydrogenase
  misc_feature (1)..(137): Xaa is any amino acid
MEINDKFSLKGKIAWVTGASYGIGFAIAKAFHKAGAVIVFNDIGKEQLDKGLEAYKAEGIPAHGYVCDVTDENAVNAAAANIEKEVGVVDILVNNAGIIKRVPMTEMSAADFRLVIDVDLNAPFIVAKAVIPSMIKK

SEQ ID NO: 95232 - protein, 883 aa, Unknown
  Obtained from environmental sample
  DOMAIN (58)...(472): Ribonucleotide reductase, barrel domain
  misc_feature (1)..(883): Xaa is any amino acid
MVTLDADHPDIEDYIAWKAREEHKVASMVTGSQIVNKNLSEIKKALVSFRGPDVDRFNIQKNHELETALRSALGHKIPPSYLYQLLRQLQQGDKDLNPAVFSTAWDDEAYNTVSGQSSNNSVRLTDDFMKAVIDDKEWKLSGRVAGNTEKTVRAAKIWEDIARSTWACADPGLQFHTTINDWHTCPSGGEIRASNPCSEYMFLDDTACNLASVNLSRFYDKTARTFDVEKYLHAIRVWTTILEISVVMAQFPSPEIAELSYKYRTLGLGYASLGSLLMIMGLAYDSPEGRAVAGSLSAILTGEAYAQSARMAAEFGPFAQYAENSNAMLRVIRNHRRACYNAPPSQYEGLHTIPQGIDPAKCQAAFDLSCFLDAAKKSWDDALALGEKHGFRNAQVSAIAPTGTIGLLMDCDTTGVEPDFALVKFKKLAGGGSFKIINQSVPPALTALGYSEAEIEAITAYATGRKTLKGCPAINAESLAEKGFTPEAVALAEEALKSSHSLEAVFSPWVLGKDFIEKKLKIPQASFSQNGFSLLKHLGFSSAEIEEAELYACGTMGLEGAPGLKKEHYSVFDTATPSGKHGKRSIPWTAHVEMMAACQPFISGAISKTINMPNAANYEDVKGAYVLAWKRALKAVALYRDGSKLSQPLSSSARGNASGNASGADPIADTILGVERSLSAGVSGEDKTDKKRSGGKTRGTRKPLPNRRSGYTQKSKIAGHSIFIRTGEYDDGSLGEIFLDMHKEGAAFRSLLNSFAIAVSLGLQYGVPLEEYVDAFTFSRFEPNGIVKGHDYVKMATSVIDFIFRDLAISYLKRVDLGQVKPEDLLATGTKADNRMENGTGHWNNEDGPYQARIKGYEGDACPSCGSFTLIRNGTCRSATLAG

SEQ ID NO: 95233 - protein, 734 aa, Unknown
  Obtained from environmental sample
  DOMAIN (24)...(567): ABC transporter
  misc_feature (1)..(734): Xaa is any amino acid
MDKLIIKGAREHNLKNIDLELPRDKLIVVSGLSGSGKSSLAFDTIFAEGQRRYVESLSAYARQFLGRMDKPDLDYIEGLSPAISIEQKTTHRNPRSTVGTVTEIYDYYRLLYARIGIPHCPVCGREIREQPVDSIIESILQMPVGTRIQLLAPVIRGKKGEHQKIIDDARKAGFARARIDGVPVELDESIRLDKQKKHSVDIIIDRLVIGPDIRLRLAESVETALQTSDGLLLVLSQNPESSNKSMTENFFSQKNACPDCGVSIPELQPRLFSFNNPFGACPSCSGLGSRLEFDPDLVIPNPSLSFNEGGIVPYNPDSAWHRSRFESLAKHYKFSLDTPLKTLPKKIMDAILWGSRDEIKVRYNNREGTGHFEYQSRFPGVLEDLKRRYLETQSPGVKEWLEKFMSQKHCEDCEGKRLKPEVLGVTVAGKNIWELSSLSVTDSLKFFESVKFNKNEKKIAYQILKEITARLGFMRNVGLDYLSLERKASTLSGGEAQRIRLATQIGSSLVGVLYILDEPSIGLHQRDNQRLIDTLLYLRDLGNTLIVVEHDEQTLRVADHIVDLGPGAGVHGGRIVAQGSPEEVMRVPESLTGQYLAGTLAIEIPKERRKGNGKFIKMRGVSEHNLKNINVDIPLGVFTCITGVSGSGKSTLMSDVLYPALANRVYGSNHPEGSYKDIKGVEFIDKVIDIDQSPIGRTPRSNPITYVGGFTAIRDIFANLPESKMRGYRPGRFH

SEQ ID NO: 95234 - protein, 357 aa, Unknown
  Obtained from environmental sample
  DOMAIN (2)...(142): Anticodon-binding domain
  misc_feature (1)..(357): Xaa is any amino acid
GAAMDVYDLSKAIDPIVEFIDLLNNWYIRRSRRRFWKNAGPDVTSDTDKVEAYGTLYAVLKTIVQVASPFMPFTTDAIWQNIRSSSDPESVHLTDFPVTGNERRDLDLEFRMAAVQHAVSMGRALRSQYNIKVRQPLKSVEMVTKNQEEKKVLREMEEIIREELNVKELIFRDNEEELVEYEAKANFRVLGKELGKDMKAAAEKIAAFNHSEIRSLLEGATLSIELTDSAQAERRLVDITAEKLDIRRLEKPNLKVLNEGTLTVALNTEITEELSKEGDVRDLVRGVQNLRKESGLEVTDRIKLTLTGSGRLKSAWEAFADYVSSEILSSQMVWAEAEGMVEIEAGEDKWRVKIEKT

SEQ ID NO: 95235 - protein, 189 aa, Unknown
  Obtained from environmental sample
  DOMAIN (16)...(184): Restriction endonuclease EcoRI
  misc_feature (1)..(189): Xaa is any amino acid
MSKGQTRRLTKQHISSGGASGIFGEDAHVHEKSVCRASKGVFEDLKQKYHRYQFRFRQAINKPEINDKLNSIDNRLGETFFVKESNIKPDGGIIEVQDKNKKWRVVLVSEAKFQGKDVENVKAGVLVGKNKDQELMVAGNAIERVYKNINEIRNFMLDEYHFPYAVFCKARTLQLKLFKCLNQTVLLWK

SEQ ID NO: 95236 - protein, 275 aa, Unknown
  Obtained from environmental sample
  DOMAIN (171)...(275): Semialdehyde dehydrogenase, dimerisation domain
  misc_feature (1)..(275): Xaa is any amino acid
MAKIPVGILGATGMVGQNYIALLNDHPWFEVRYAAASPRSAGKKYAQAVAGRWQLEKTYAPHVGEIMVEDANDVSRAIQAQKRGDCAFVFSALEMGKDETRALEEAYAAAGIPVISNASAHRWTPDVPVLIGEVNHHHTDIIPIQQKARGWTKGFIAVKPNCSIQSYMIPLHALALAGYQAQRIIVTTLQAVSGAGYPGVPSLDMLDNIIPYIGGEEEKTEKEPLKIFGSISGGVIQNAVLPKISACCNRVPVVDGHTACVSLEFGEKKPSIEEV

SEQ ID NO: 95237 - protein, 165 aa, Unknown
  Obtained from environmental sample
  misc_feature (1)..(165): Xaa is any amino acid
QAAEQSLTLGGGDTAAIPATPGVSVFGIFRILLTLAVVAAAIYGLVYFLKFRRASRDKRELDPFLKILASIPLGASRGVHVISVGPQAWLVGSAETGVNLISEIGDKDTINAMLLEDSKRIAAPPTGGAPLLDFKAILGKLGISTKNEGSGPEQIRKRSERLKGL

SEQ ID NO: 95238 - protein, 193 aa, Unknown
  Obtained from environmental sample
  DOMAIN (35)...(190): FliP family
  misc_feature (1)..(193): Xaa is any amino acid
MPTPPSPPIIPFIDLTVRNPASGNEVAFSLQLLLLLTVLSLAPSIIILMTSFLRVSIVLDFIKRALSLQQVPPNQVIMGVSLFLTILIMWPTISEIYNKSLQPLSAGEINVETAYREADAPLRLFMFRQMRSRSAGRSGAEENILLFMGMRGLPQPNSLADVPTYVLIPAFILNELTVAFKIGTLLFIPFHRY

SEQ ID NO: 95239 - protein, 751 aa, Unknown
  Obtained from environmental sample
  DOMAIN (245)...(411): Radical SAM superfamily
  misc_feature (1)..(751): Xaa is any amino acid
MQIQEKLGKILPFVESPARYIGGEANSVIKGKNDVLASMALIFPDIYEIGMSHNGMRILYNAINKEPDLLCEVAFAPWSDMAKLMRQNDIALYTHASFSEVSSFDAVGITVQTELNFTNIPYVLELAKISAFAADRKEEEPIVIAGGPAMANPMPIADFFDCLCIGDGELATPKVLRLIGEAKKNKKSRAEILEQIANLESFYVPAIHKGEKIVKRVYIEKMTKELLPTKNLIANMPLVHDRFCVEVMRGCTQGCRFCQAGYWYRPTRELDADDVLDLAKEGIKATGDRQLGLLSLSTADYSPIEPMLDSFINEPFFDNIDISLPSLRVSSFGGSLANKAYALKGGRSATFAPETGSERLRKFINKTITNADIEQAAESAFQNGFNKIKLYIMVGFPTETEEDIQALVKLTETLLGIGLRYNKKCQINLSVGIFIPKAWTPFQWANFAEKETAISHIKILRERFFKHKNVKVSWNSWETAHLEAIYSRAGRDLAPLIYEAYKRGLVFESDSNNLKPDEWVNIRRDFNYDDSWVFKGFSLEEILPWDIIDARVSKKFLQREFENACNPDSKWVENCKHGKCQACGIPGNGKDTVLGKVPEKYAAQPRTAQEIEELQKSRVHKGTQIFAYRIVFRKMKSSRFLPHQNTLSFFERAFARLDIPIKFSEGFSPKPRITNTGALPLGLESLCEVLSVELLQKLDLENKKAELVKSINETFPQGLEIVQIESLKCKLSANMPKFMEYCLHAEYPSGL

SEQ ID NO: 95240 - protein, 568 aa, Unknown
  Obtained from environmental sample
  DOMAIN (420)...(564): Histidine kinase-, DNA gyrase B-, and HSP90-like ATPase
  misc_feature (1)..(568): Xaa is any amino acid
MNLLSNTENYVAIVDEHNEIVYASKTLSQLGMVEDQTLVQGRPLIDLFPGRSLKLYAGKMLNQKEDYAEDWEFSLNGQKRYFKAASHALPGGHNNGTLINLYDMTYLAERDEIAAMKDSMKIGLFFMDSNYVIQDHYSRYLEEMLSETGLFGRTFTDVIKDSVTENELQTIKDYFSMVIEQKYDQEILDDINPLNQLHYINKNTGSKKVFQCGFAVVERGRGEIFILVTVYDITARVELQKRLEEEQNKRQEEMQSVFELIQVDPAVFSDFMEDIGLEFDAIDKVLKNKELSTHESLVKIYQSVHAIKSNAVILGLNVFGNKVHNMETVIKKLREQKDEVPFVEMLNLTMQIEQLSNERESFKMVIDKLNSYTKDQGGKNQSLSVLITSLAKAAEKAAADMGRKVRFISSDIDLAAVENGPRRVMKEILMQLIRNSVAHGIEPPDVRRAKGKNETGIIKLSIKLVSNIINIELRDDGKGLDYKKISEKAVRNKIIRKEDAANKNMLIKAIFAPGFSTAENEGMHAGRGIGLNLVRDRVKEVKGAIKLRSEPNKGTAFLISIPIERRKR

SEQ ID NO: 95241 - protein, 278 aa, Unknown
  Obtained from environmental sample
  misc_feature (1)..(278): Xaa is any amino acid
GAGYGLEANTIIAEGGEIKNIADSTDVFSAQTPPVTSLVLGEKLTEKELAAVGDGSTLASGSSFTLTADIGIVGIGAATTLSIDNGVLLITDGTDTLARVEAGKSITLDNGTVLKNNGGGMVSVENGSITLDGNDLDNSNTTSFTIATQSTLSGDSQTKLDDTNIVLASNILVKAGTIDKNITVGNSVNLTSTTTNTGTYNGDIEELAKGSVLAKGSTIEMKDSPAGTYALKLEVNGKEIAITYDSSNGILKVGGETVAAGKSITLEDGTVLTHNSNI

SEQ ID NO: 95242 - protein, 197 aa, Unknown
  Obtained from environmental sample
  DOMAIN (122)...(197): Smr domain
  misc_feature (1)..(197): Xaa is any amino acid
SGLEESFKAESANLERENFALASERRRLENGAPAGVEDEQGFSPGMEVLAGENRRRGRIVRLDKKGAGSDPSSWIVEIGSLKMSFSEKDLVPVSAEAQDAAMRKSATWAVDLAPASQVQAELRLRGMRFSDAMEALGKQLDAAVLGGLHQFAVIHGKGEGILQKGVHDFLKKDPRVADFFFSRPEAGGFGRTEVILK

SEQ ID NO: 95243 - protein, 260 aa, Unknown
  Obtained from environmental sample
  DOMAIN (59)...(187): ATPase family associated with various cellular activities (AAA)
  misc_feature (1)..(260): Xaa is any amino acid
MNEKQVKVEDVNRLTPREIVAELDKYIVGQKKAKRAVAVALRNRMRRLKLDPELRDDVAPKNILMIGPTGVGKTEIARRLAKLAGSPFIKVEATKYTEVGYVGRDVESMVRDLMASGFQMVKQEMQESFIAEADKRAEEILLDLLLPGTGKKSKPKKPAPAPVVRPMGSFTFGPENGQGAGLIGTAIQVGIPSFANQGEEKTEVEEAEKPEEPQPSDGTGDPGASRTREKFRTMLREGKLEDKTVELMVNQNPQFPPFEM

SEQ ID NO: 95244 - protein, 250 aa, Unknown
  Obtained from environmental sample
  DOMAIN (4)...(44): UBA/TS-N domain
  misc_feature (1)..(250): Xaa is any amino acid
MAEISAADVKKLREKTGAGMMECKNALVSTEGDFAKAEKLLKEKGLAALEKRSGRATNEGKIFVKVKDDGSAAVLVELASETDFVARNPDFIALGWAITDKALEEGHTEPHEGLSGMVQDLATKIRENMGLKRLKAIKANKDEYLTMYIHGDGNIGVVVKCKSDKPEIFKNEDVKAFIFSLALHIAAFNPWPWIKAKSIPPTSRSRKRFSANRWRKTKNSRANRPTCLKAYLKARSTSTFRKSAFLSRVT

SEQ ID NO: 95245 - protein, 76 aa, Unknown
  Obtained from environmental sample
  misc_feature (1)..(76): Xaa is any amino acid
MKNLAQRLLIFFIGFPAIIVIVLFLPHYHHIVFNLLITVFSSLGAAEFSAMLSQKKMSIPKKEAALFGALPPLAMI

SEQ ID NO: 95246 - protein, 380 aa, Unknown
  Obtained from environmental sample
  DOMAIN (83)...(113): Putative Fe-S cluster
  misc_feature (1)..(380): Xaa is any amino acid
MSEDKLESLIRKRSAEHERKLTSKQRKRQYKEYHKLLNQYWKPGLYDRSYRNLSGNVVMRQPNEAELTEIYRKMKKFTKEDLYDCGACGYGSCKGMAVAIHNGINKTENCAHYTLDILKEKKDADELVRLLQEQISQGSGLAEGITKLVHELNATIGSQSEAVDQSSAVTVKMIDSIRDTSAVSMKQQESVKGLIENTDKSQESMRATIQSVDDISQSVDGIAQAIKIISAIAANTNLLSMNAAIEAAHAGEAGRGFAVVADEIRRLSESTRENSQNISRTLKNIINGISVSSKQSGDTNGRITEMAKEINGFAETMTGLIETFSKLSTGSSEITSELDSLRDQSKTVKTGYAEILSMTDKLQTWLVDLAKLSEKTAAAK

SEQ ID NO: 95247 - protein, 281 aa, Unknown
  Obtained from environmental sample
  DOMAIN (5)...(213): Sigma-54 interaction domain
  misc_feature (1)..(281): Xaa is any amino acid
ERGSGKIRETVIQAAASDARILITGENGSGKEVIARAIHSCSARADNPFIDVNCAAIPETLIESELFGHEKGAFTDAVSTRKGRFELAHGGTLFLDEIGDMSLSAQAKVLRVIQEQKIERVGGEKIIETDVRIIAATNQDLEKACNVGRFRQDLFFRLNVIPIHSPPLRERKEDIPHLLYHFLKVLKKEITLEGDALELLAAHDWPGNIRELKNLAERMAVMHQGNVINGEELGKLLNIRGKKPLNTGQNGMEPAIASNILEQNYNEAKDNLKNIIGIPTL

SEQ ID NO: 95248 - protein, 288 aa, Unknown
  Obtained from environmental sample
  DOMAIN (187)...(233): Bacterial regulatory helix-turn-helix proteins, AraC family
  misc_feature (1)..(288): Xaa is any amino acid
AWNASGASVEEMVKVAALQHLGEFAAVPFLCYGEPGERTIGVKSSIIDAVEYILKPSQKGAVLFIGSSESGVEQLFLEGGLEQIHIDSMTAFNETVSAITPSLVVFNSLNIAGAVAVRQHPLTIMVPIVMISSRIDKAADVMRLSQYPRLIICHRAVSSSPEFRARLKALIGRDEILPPHTGVLVKKALLYFDQHSESQISRWKLADSVNVNEDYLTRIFHREMGMSPWDYLNRLRVFLAAEFLRQTDRTIQDIAFQTGFNDQAYFCRVFKKIYGVSPKQLRKVGIIQ

SEQ ID NO: 95249 - protein, 161 aa, Unknown
  Obtained from environmental sample
  misc_feature (1)..(161): Xaa is any amino acid
MLNELIDKQIDISIFDRKYKNDETGARAIPPGVLLKLIIYGYSKGMNSSRELWKLSRENIIARALTGDMEMHWTTIADFISGSSEEFAVIFTKVLGYCYELDLIGGATFAIDGCRLPSNASKALSGTKALLEKRLEVFRRMAEVHIAKHRRKDERGETDEA

SEQ ID NO: 95250 - protein, 312 aa, Unknown
  Obtained from environmental sample
  misc_feature (1)..(312): Xaa is any amino acid
MNVNSQYKDSVFSLLFSDPDVLRELYCALENVTLPPDTPVTINTLQNVLFMDSINDISFEIGGRLVVLLEHQSSINPNMGLRFLMYIAKIYETMNERRVLYSTKLARIPQPEFFVLYNGLAPFPDEQILKLSDAFMDARELGIPKQDPSLELTVRVLNINDGRNAELLSSCKALGEYSEFVAQERSFERQLGDRQKAMQAAVRYCLDRGILRSFMEKHSREVLRMRITEWNTEEAKVVWYEEGVEDGIEKGLERGRAEGKADGLAEGQKEGLERGRAEGRAQARETARKLKAMGLSAKQIAEATGLSPDELE

SEQ ID NO: 95251 - protein, 628 aa, Unknown
  Obtained from environmental sample
  DOMAIN (1)...(393): Bacterial DNA polymerase III alpha subunit
  misc_feature (1)..(628): Xaa is any amino acid
MGYTGYFLIVADFINYAKERNIPVGPGRGSGAGSIVAYSLRITDIDPLKYGLIFERFLNPDRISMPDFDIDFANEGREEVINYVTRAYGKERVAQIITFGTLGAKAVIKDVARVLGISIPESEMITKLISFDPDITLNKAKEEEPRLRELESDPRFTELFAIAHKLEGLNRHSSIHAAGIVIGKKPLVELVPLFQEREEKGGNIATQYSMNFLEECGLVKMDFLGLKNLDILKHSQELIRRRGGKYANFNMENIPEDDKKTFKMLGEGKSHAVFQFASDGMQDILRQTKPTSIEDLTALNAMYRPGPMQFIPRFVDCKNGKAPITYPDPSLEGILKETYGVIVYQEQVMEVAKIIAGYSMGKADLLRRAMGKKKKEIIDGEKIPFLEGAVRQGYSKTKAGQIYDILVPFAGYGFNKSHAAAYSVIAYHTAYLKANFPAEFMAANLTNEIHSANKEKLSECIDEARRMGIAIDPPDVNHSEKFFTIVDGRIIYGLLGIKGLGDASADEIVRCRNASEGNAASEGNAASEGSAASERDGPYRDFMDFLSRVDIKLVGKAVIEKLIQTGAFDRMGISRENLLGNLERAVEYAQKQKEDKKFGQTSLFGGTDEEEYTDFVFENFPETSRLEK

SEQ ID NO: 95252 - protein, 120 aa, Unknown
  Obtained from environmental sample
  DOMAIN (5)...(102): CHC2 zinc finger
  misc_feature (1)..(120): Xaa is any amino acid
MNFQYNDDAKELVRRRANIADVVGRYVNLKQRGRVMVGLCPFHKEKTPSFQVNPEMGFYYCFGCGKGGDVFRFVQEMEGLDFREALETLAETVGVELPRYERRESPGEGGRGGGASKTDL

SEQ ID NO: 95253 - protein, 153 aa, Unknown
  Obtained from environmental sample
  DOMAIN (6)...(151): Phosphoenolpyruvate-dependent sugar phosphotransferase system, EIIA 2
  misc_feature (1)..(153): Xaa is any amino acid
MNNISGLLDPSCIQLELAARSKDVAIKELVRLLADAGKLNDSPESYVGEVMAREKISSTGIGNGIAIPHVLVAEIDKIMMAVGRSAKGVPFESVDGKPAHLIFLIIGPQGRNNEYLKILSKLSKYLNDRGFFDALMKVETPAEVVDLIKERER

SEQ ID NO: 95254 - protein, 217 aa, Unknown
  Obtained from environmental sample
  misc_feature (1)..(217): Xaa is any amino acid
MANTELNALNKAQAYQLADITKTPPQFGAITPRWLTRFLEFKGLDAGIYRVNKVAEGETPLDVLCSSEKKSAEIPEGYVEYQQKPREYTLNSISTIINVDTAVEDVFSSPYDQTKEQLHLAIESLRERQESQIINNDDYGLLKNVPDSQRITPGNKAGSPCPTIWTNCSQKCGKNRRSFWPTRGLLPLFSVNVHAGAFPPLPRRFLAAHLYCGAAFR

SEQ ID NO: 95255 - protein, 336 aa, Unknown
  Obtained from environmental sample
  misc_feature (1)..(336): Xaa is any amino acid
ELTRASYVYNGLGEMLRALDADGNPLSAEYDRLGRRTKLSSADIGVKEWRYDASGNVVWETDSELSRQGKRIQYDYDGMNRLLKITYPFSEATVYEYGEAGRQDNAAGRVVKVTDEAGSIVYKYGLLGQAEEETRVIKLLPVSGGKTKSATMKYESNYLGQMEKIEYPDGEAVSYAYNWGGQIAKVTGNRKGTEFPYVKNIGYDEYGQRVYIEYGSGVKTRYSYDPYRRWLSTIRTESPEMGHPFQDIQYTFDAVGNVLGYENTAYGHTTSQNYAYDGLYQLIEAKGASRSHPYGTGTEYVTDYKQDFSFNKIGNMTKKVSTEHVSNTNRIGANLN

SEQ ID NO: 95256 - protein, 123 aa, Unknown
  Obtained from environmental sample
  misc_feature (1)..(123): Xaa is any amino acid
VDYVFDASFFGALVIPDEKNPRVDKIHKSIGQNEVIFVPQLIWYEIANVFKNLMRRKRYQFNDVLELSKLLTKDRLTCDFETGPGYAEKLLRLCNDYNISSYDAAYLELAGRKKAALCTLDEN

SEQ ID NO: 95257 - protein, 83 aa, Unknown
  Obtained from environmental sample
  DOMAIN (3)...(65): Phd_YefM
  misc_feature (1)..(83): Xaa is any amino acid
MLNQQIGAFEAKTHFSQILDKVEHGGDFVITKRGKPVAKIIPFQQEPEMTRQEVLAKFQEIRKRYRGEPGSFNIREAIEDGRK

SEQ ID NO: 95258 - protein, 275 aa, Unknown
  Obtained from environmental sample
  misc_feature (1)..(275): Xaa is any amino acid
MKRFLIYLKSRPLGMASVIALIVLYLMMVFAEFIAPYAPITSFPEQTYHPPNVRFYQGNFQAQEHRLINTVNWKYVRIRDHYSRIELFGKGEPYKLWGLIPMERHLFASKDYPVFLMGTDTLGRDLFSRIIYGSRISLTIGFIATAISLILAIFFGGFAGYFGGGTDWAVMRLAEFLMLIPGLYLILFLRSLLSSSMDTGKSYMMITLILSLVGWPGSARTLRGMTHAIKREGFIQNAQLEMIPSGVIIFRHIIPQIASLLIVSIALSVPGFIMT

SEQ ID NO: 95259 - protein, 113 aa, Unknown
  Obtained from environmental sample
  misc_feature (1)..(113): Xaa is any amino acid
ALDAALENRVPAIKELFASDTTGDLLADTGIAYNVDTIVKPFVETGGIITLKNSTLDSRISQDERRITTLDRQLAAKEADLKTQYARMESAYSRMEQLSNSLDNFSQQNRSNR

SEQ ID NO: 95260 - protein, 86 aa, Unknown
  Obtained from environmental sample
  misc_feature (1)..(86): Xaa is any amino acid
MSDVYIPGVRSRFNSEKIIEDLMSLERIPKERVERNIENLQVQKGYWQEVGRRINSVRESARFLYSFQNPFNDRIARTENDNVITA

SEQ ID NO: 95261 - protein, 232 aa, Unknown
  Obtained from environmental sample
  DOMAIN (1)...(189): Radical SAM superfamily
  misc_feature (1)..(232): Xaa is any amino acid
VLFSNTCRFDCAYCVNRSSADTKRTSFTVNELVDLTCNFYRRNYIEGLFLSSGIFADPDIVMEKLIETARKLRTEVGFGGYIHLKIIPGAGEKTIREAGLWADRLSANIELPTDKSLQYLAPQKSGKVIFGAMEEAFNAGIENEEDRRKFNRGGKNTVPEFAPAGQSTQLVVGASPENDKTIINLSSALYKKYELRRVYYSAFFPVGVPGYGGIPDPRLPSMELNEHRISSF

SEQ ID NO: 95262 - protein, 317 aa, Unknown
  Obtained from environmental sample
  misc_feature (1)..(317): Xaa is any amino acid
MARSTNDLDAVRTAIGMGLVALVDFVVMTTAILIIIFVQDARSALFSVIPLPLVTILILLFGKSVGKKFTAYQEAYSKMSDTAQETFAGLRVIKSFVKEWWFIKKFAADNDEYRTASMDLIRLFGVFFPLVSFLSQFTVLLMLVTGGIRVINGLMSPGSLVAMFRYLNMLIWPLMGAGFTVNMIQRGAVSLGRVNEILNTVPSIRDKEFFTTEDTELHGVLVQKSSFPPCNSAYSVVNLFFLAVYMRKNKNCSAISAAVRLREKPKLPVLQNTHPAGQPAWVERQAVKRDFPSFNRTDSIFKPSLSAITIFSDDLSS

SEQ ID NO: 95263 - protein, 297 aa, Unknown
  Obtained from environmental sample
  DOMAIN (112)...(255): GAF domain
  misc_feature (1)..(297): Xaa is any amino acid
AIEKWISITSQGGRVRIKESDYSKDEAAFLCPYGVKSLLILPIFTRGKFWGNVSFHDHTNDRYFDEDCADLLYSLARVSTNAIIREELRDSAKMEVSLNRAAILFLSQQEETFEAVMTAGIREIADTFHLDRFSIWRNTSMPDGLHLGQIYRWDRKSGGTTVPVKNTEDTTYKNFAPRWESFLAADKIINSPVKLLPEADILKSYGCVSVLIIPLFYNNKFWGFAFFEDLSRERFFEDAHINMMRSAAFLCANTVIRADMEREIIEVNEFNRSLLDASPLGLTVFDENANVISAMIR

SEQ ID NO: 95264 - protein, 255 aa, Unknown
  Obtained from environmental sample
  misc_feature (1)..(255): Xaa is any amino acid
VYVKSNINKVWVVGLPEGWHGGRNQMDKIEIPFSRFELVGSKRKAKMRAEAFSKYALSYAENLQDGLPIRDAPDNNGRRIYRLKMGEIIKILSVTEGSPAIGSTGEPLPGEWYKVLTEDGSMGYCFSYRLRIFEYGGGEFATSVAVVNEQVEDPELDMLLSKTWSPESYLTMINSKRIDLEDMSRHWRFDPGQETGLARIFIPDIDNSYLYTGIRPDGNRAWRFEGTNLSMQLRAETTLAVQFLEGSGSTRTLLF

SEQ ID NO: 95265 - protein, 161 aa, Unknown
  Obtained from environmental sample
  misc_feature (1)..(161): Xaa is any amino acid
FGDGRGKSARRSLNDKIRALTAQAGKAEDRKVEVAGTKDAKTAEYLANFNKALEDDLSTPRALAELWGVLRDSSINPKDALAAAFDMDGVLGLGLAEEAVLRPKSESLSPETESYVKNLIEERNEAKKSKNFKRADEIRNMLKEKGIILEDSPLGTSWRRA

SEQ ID NO: 95266 - protein, 220 aa, Unknown
  Obtained from environmental sample
  DOMAIN (42)...(109): Sigma-70 region 2
  misc_feature (1)..(220): Xaa is any amino acid
LFTNNNGETRSDNISRESSIPKETSVSKETSIGGGRAEFRKLYETVFPILFRIAYRITSSEAAEDLCQEAFFRLHEKNMVFPNQEEAKYWLIRVVKNAALNYAKRKQRERRAYQRAFKENARKEETGEEQIVKKETREEVLEALNKLPENLRTVLILKEYSEMNYREIGRVLGVNEGNVKVRVFRARERLAALLRGIADGNDNGIAAAAVSGTENQGRAK

SEQ ID NO: 95267 - protein, 280 aa, Unknown
  Obtained from environmental sample
  misc_feature (1)..(280): Xaa is any amino acid
NGFRVNNQHYKALIIPAARFLPEEVIKAAIKLHSQGFPVVFVESLPLAICSGKNNSELLKSLNDFPVLPLDELSRYLRGIGCYDIEIKPYNNRLRYYHYRNEGDIYLFVNEGTEIYSGTIEIPLQGDCIVYDAWNNRLEKAHASSSTNSTSLSVKIEPGKSLILVFDDTGNWPVYEKPRLAGNEIALSSWKRGLCRSAEYRNYKDFTPVSIPDMLAEQKPDFSGFCCYETEFFLDEAKPLFLEISDAAEGIEVFVNGKSAGIEIVPPFSYDLSALFKGKE

SEQ ID NO: 95268 - protein, 360 aa, Unknown
  Obtained from environmental sample
  DOMAIN (220)...(356): Hexokinase
  misc_feature (1)..(360): Xaa is any amino acid
MYKFNPDELSDFARFYGFHYDSIKADAIVKEALIEMDRGLSGVPSSLQMIPAYITPVSRIPAGKKVLALDAGGTNLRVSLVQFNEDGEASAQGTAKSPMPGTGGHVTAKEFFDTIAKAALPLLKDTKVEGIGFTFSYPMEITSEADGILISFSKEVDAPDVVGKAIGKGLRDSLAQMGCKYDGPIVLLNDTAATLLSGFASISPDGEAKRTKNDFDKAGGPVIGFILGTGFNTAYMETVIPKIGFNSPSSPQIVVCESGNFNVLHRGQLDREYDSTTKNPGAFTLEKATAGAYLGPLTLHILKQAIKDKVLCFKRSDEILAMPHLETRFVNEFMHAPLKAEGPLGSLFAADESAALPPSS

SEQ ID NO: 95269 - protein, 132 aa, Unknown
  Obtained from environmental sample
  misc_feature (1)..(132): Xaa is any amino acid
GAFCRRQGVGKPLGRSPLGKIAESAKLRENEFSFRSFLKNSEGKEVFINGTIDLFFEDSGFFHVVDFKTDIKETPVEHTAQMACYYRAVSALFAVPAKKECRAWLYYLRTGHAVEMTVKVKQFNLENKAFIR

SEQ ID NO: 95270 - protein, 640 aa, Unknown
  Obtained from environmental sample
  misc_feature (1)..(640): Xaa is any amino acid
LDIWVSDSLGNETSDPGIVFMVDTRTPILLGVSGIGDNIPYDGNNNLTLTGVVSNVYDVTRLSLLFNKIELVEQTRGTEEGPGKYLNYENGGFPFGFTLPTEGLYGPQSVSITAVGSSGKTATNNYNIIIDTKGPNVTFSVPSSKIYLTDADKNSLNTALNSGSLNGDQQTTYDILKNMLITDTSTKLSGTFNDEYSAVANNDNKTFWWQIDGGAWTTGTLAVSDNKSVGWEIPIDTLGDGVHLLNIRAKDKWGNGYAGGSAPAGDGGQGYENNIAFMIDRSSPEITNLKVPEDALKTQFTVSGKIENTYGVKRLSIKLGNDEIAVINENGVPSYPDVKGIIYGSDITIERGTGKTFDFTAKIDPALGELSDGPISLTFTAIGSSGQVAIGVNNFILDKTGPAITVGAPINDSVYLSSDNDLTILITAVNSGDFSAVSAGTELNSRYEKIYKTRVKDNSASFAITFTDDKSPVFSAEKNIYWYSFDGQDFVSKEIDAAEYGKKSVSIKLPLPTETQKDGLHSLSIRVIDSLGNGYNSNHVINQPGFKDGYINKLIFMIDSGKPELSFNINGPATINDQGSLTLSGEITDTFEVQELSVKIGTTVVASKAGEGGTNINVIGAENKKKFSFNDVNINKNSIK

SEQ ID NO: 95271 - protein, 899 aa, Unknown
  Obtained from environmental sample
  misc_feature (1)..(899): Xaa is any amino acid
TGMTFDFEVEINPAVGSLEDGPKSLMFSAVGSSGQSGMTTSSFTLDTKGPSIAIGAPISGDVYVTNSEWGILEDAVVKDDFSSASSVDSIYDKVFAARIKDISPSFAVTLSDEASDIFESGKDKFWYKFDGDTNWTDVQVAASEFGKKSVNLSLPLPKDKQKDGVHRVSIRATDSIGNGYNDSTGNSSALETGFGVGYQSNLVFMIDTGVPVLIVKNYEDKTVPGEAADFGIHNKSFNISGEIKGTFDVQDLSVKIGSTVVAGKAGENITLINVNETNNKKKFNFANVNINNSAISKATEGKEGSYTISVTVKGSSDQSEMKVDTFILDTNGPAISINAPIKEKIYLKGTQFSDINTAIENNNISLMANDTKAIYYKLLSYNVKDVSAGLTGSFADTYSDIGDFWYSFNGGGWIEGTPIQNGSNKKSMDWQIPLSGLTDGLNQLSIRVKDTLSNGYDKYSDPEGDNDSGNGYETNISFILDTGIPVISTDENIFKDNTVYGPTPNHFTVSGQITGTFMVKRLSVSLKPPMATIIEIPIGDGASKITSNDGYIKGIEILPAAGIEKAFNYSFDVYYQGGGISPLGYGPHSITVNAIGSSDQSDIKILPFIYDNEGPKVTVSAPVTKKFYLTKPELDLIKANTIEPGSVLEDKYNQLIEMGIKDASSGLNGYFNDDYSPVAGDTHNTFWYKFLDDTDPAASWKPVTITNITEKSVAWNIPLTDPKTPGTAESPIFRKDGLYRVSIRVRDSLGNGYDNDAADSEIKKNSGPGYESELGFIIDMGIPEITNFTLKKKDGTLLPDSNIFLNDDFIITGTILNTAKIAKLNAQIGNYVITAVEENIKKVSDKNFTFEIPVSPKTLGLGEKAHSLSVTATGSSGQSAIEVSNFTYDITAPTVSFNS

SEQ ID NO: 95272 - protein, 492 aa, Unknown
  Obtained from environmental sample
  misc_feature (1)..(492): Xaa is any amino acid
GTVYTYAYTGTTAEKGGDFSGDNAADTFTSFTSMQDTTGKTYDANGKMNLLHDKRFIVKVYDTTVSGGNEIDQLAHVALLNVDFDNNDGQKPLVSFKPFYWNSLTDNSVYESDKISSSLTDVKKREALQGHIELEGDLPSSFNQTAGINDRDPKVSGRVSFRGTAYDNIVIKNIYFAIDNHSGYGVTDTYNDGGNHYLAASFNSGVWTKADRFTANGWKFDIEKETLDQDGHYIEWRLDYDSSFTNNKANLDNTLTIIARDSKASPNTSDKQNKRFDIVPYITKISTRLSLAYSPNQSAFNRSARGWYPVHEDEIITIDGFNLYNTGNPLVDIRQASNATTIGSALYTTSVGSHNANKVFARVDDDKDNDNTNSIVSGYLVVRVNNIDSLNNINNNSAADYNKEGNGLNNDTLNDDRALYVWNTGYISNEIVGRVSHPFMRMDNNGGRLLSYGYYNGSATGRLRVLRNNDLIDAGIGRSNRIFNTTVATRRY

SEQ ID NO: 95273 - protein, 501 aa, Unknown
  Obtained from environmental sample
  DOMAIN (1)...(395): tRNA synthetases class I (I, L, M and V)
  misc_feature (1)..(501): Xaa is any amino acid
LFNWCSTCGTAIADDEVEHEDTPGKMYHLRYPFADGSGFVELATTRPETLLGDTAVAFHPKDERYTGLEGKMLRLPLANREIPLVADSYVDREFGTGMVKITPAHDHNDWELARRHGLSELNILTSDGRLNDAVPEKYRSLKVMEAREKVLEDLKAGGFYIREEAITHAIGCCYRCHTVIEPYLSEQWFVRMKPLADKALAAWRQGEIIFFPKKWENTYEHWLENIRDWCVSRQLWWGHRIPAWYCGDCGKTSVSRVDLAACPHCGSKNIEQDPDVLDTWFSSWLWPFTVMGWENDKCDTEDFRRYYPTTALVTAYDIIFFWVARMIMAGLEFTGKAPYRDIYITQLIRDKQGRKMSKTLENGIDPLEIIDKFGADALRFTLAYLCAQGQDILMDKDSFKLGSKFANKVWNASRYILMNLEGRDLVENPGLLPVDKWIYARLNSTARAMEEAFLSYRFNDAAGTVYEYFWNDFCDWYVEATKLSMKGESNEEKDRASTVLL

SEQ ID NO: 95274 - protein, 238 aa, Unknown
  Obtained from environmental sample
  DOMAIN (1)...(178): Beta-ketoacyl synthase, N-terminal domain
  misc_feature (1)..(238): Xaa is any amino acid
MDLYTQYAAAAAAQAFGDAGLEAGSGDPFRQAVIFASGIGGITTLQEELFKFAASSGVPRFSPFMVPKMIGNIAAGVIALKYGFRGPNYGTVSACASSSHALIDAMNLIRLGKADVVIAGGSEAPINVTGLGGFGAMRALSTRNDDPATASRPFDKDRDGFVLGEGAAALVVESLIHAEARGARIYAELAGGGMTADAFHSTLPHPDGTAVEKAMAFAMDDAGANPEDIAYINLHATS

SEQ ID NO: 95275 - protein, 150 aa, Unknown
  Obtained from environmental sample
  DOMAIN (31)...(119): Biotin/lipoate A/B protein ligase family
  misc_feature (1)..(150): Xaa is any amino acid
MAADLYLLRRCANGGDVTIRLYSWLRPTVSIGCMQSPETELDLNALQAAGGGWIRRITGGRAVLHDGDITYSATFPKSLREMGNGIAQTYKIISKCLMDGLSRASINCEAHDSDGGLSGIGRQVKLPCFLAPNRDEIMTAGKKLVGSAQK

SEQ ID NO: 95276 - protein, 474 aa, Unknown
  Obtained from environmental sample
  DOMAIN (129)...(304): Integrase core domain
  misc_feature (1)..(474): Xaa is any amino acid
MEKAKEILRLSLQMGLCQRDVAANLRFDGTGCSLGMVSMVLSRVKEAAVTDPFTLSMKELGSIIYPPAKEKDKAEIDFQHVDREMKKKGVTLGLLWEEYKTRHPDGYMYTQFCTRYREYRKKNSVYMRKFYKYGERMMVDWAGLTMRYTGENRNIKTVYVFVAILPASSFVYAHPFGDMRMENWIQGHVQAFEYFGGVPRLSVPDNTKTAVVKANRYEAELNKSYQEMAEHYGIAIIPTRPYCATDKAPVETAVQIIERRIIAKLRHCQFLSYDELAEAFHAELETLNDQPFQKQPGSRRSVFLEAEQHELQKLPSRRYEYAQFKQAKAGFDYHVALDKSSFYSVPYQYAGKTVLIRWNSRTVEVFYEGERIACHMRDGEGRKRYTTDPAHMPESHRAVSDWSPQRFISWAAKYGEQTRKFITTLLELKEHPEQAYRTCAGILRLAATVKPHQMEAACTEAMARNLYSYSCLRD

SEQ ID NO: 95277 - protein, 264 aa, Unknown
  Obtained from environmental sample
  DOMAIN (108)...(257): Poly A polymerase family
  misc_feature (1)..(264): Xaa is any amino acid
MRYRYSVTENGKHEKKAAIYTKDEHGINFADVDSEAVGIVKKLKSSGYDSYIVGGAVRDLILGKKPKDFDIVSAATPTRIKKIFRNSRIIGRRFRLVHVYFGQRIFEVATFRSLKDGNTSNTFGKIDEDVFRRDFTMNALFYDPEQQIVVDYVGGMDDIKKKQVVPLIALSEIFTDDPVRMIRAVKYAAMTGFSLPMNLKLKIKKQSGLLASISPSRLTEEIFKIIHSNKAAVIVDMLDKMGLYSYLQPEAVKLMRKNKDYRQR

SEQ ID NO: 95278 - protein, 919 aa, Unknown
  Obtained from environmental sample
  DOMAIN (282)...(501): Bacterial extracellular solute-binding proteins, family 3
  misc_feature (1)..(919): Xaa is any amino acid
NMARPLIISRAFSSYKEIPGVTEEEAAAIEALRVKYKDSVLIHGISESTEAFRGDDGEVHGFAAHVCGYVAELFGLNIKAAIFEWGDLISGLESGGIKFSSDLTPTDKRKHELHYYMTGPITNRATAYFHLEESEPLAVIAARRALRYGFLEGTTTYERVRELSPDKFEAFFVTKYDDARDMLKSGKIDAFFEESTAKAVFDAYGGIKSSVFLPMIYEPAALCTHTPEFAPVISVMEKFLNNGGLGYFATLYGRGLYDYNARKLYLLLTDEEKEYIRKRPTVLYAAEYDNYPFSFYNPNDKQWQGIAHDILREAEALTGLAFKIANDEKTEFVELFKMLEAGEVSFITELVRTSDRAGRFLWPNTPMLLNRYALVSRLDYPDISMNDVVGVRVGVQSGTVYEELFKRWFPEHPKITAYSNTNEFFSALERDEVDIVMSSQNQVLAVTNYMERPGYKINILFDYASESALGFNKEERVLCSIIDKAQGLMDLSRITDLWLHKTYDYRVKIVESRQPLLISISVLLICVVGLLFVLLKRKFEAGKRLETLIEERTAKLHSQNNLLEAVTNNYKGIIWSIDTHGIVTLFNGCSLRKLGIDRSLFMGQNMENARKIDYRVNRVLDTQKQMSLIDGPHEWINEVDGETYLSNTVPIYDTDGKILGITGTTDNITEIVRLNKELETALEAAEAANRAKSAFLANMSHEIRTPMNSIIGFSELALDCEIPEEPKSYLRLIIENSKGLLQIINDVLDVSKIEAGKMDIESIPFDMHDVFALCRSATIPKAMEKGLLLHFYAEPVINKRLMGDPTRLRQIFINLISNAVKFTNSGVVKVLATILSTTADTITIRFEVKDSGIGMTAEEVNRVMEPFTQADHSTTRKYGGTGLGLSIVNSLVEMMGGKLRVESTPGVGSKFFFNLTFGM

SEQ ID NO: 95279 - protein, 51 aa, Unknown
  Obtained from environmental sample
  misc_feature (1)..(51): Xaa is any amino acid
MPKVKLTDLVLRDAHQSLFATRMVTADMLPICDKLDKVRLLCVRSLGRSHF

SEQ ID NO: 95280 - protein, 49 aa, Unknown
  Obtained from environmental sample
  misc_feature (1)..(49): Xaa is any amino acid
AVDCKIDVAGKKLTFTGTGGAKSVDFNLSQFDNALVEAGGWVEFADKKY

SEQ ID NO: 95281 - protein, 272 aa, Unknown
  Obtained from environmental sample
  misc_feature (1)..(272): Xaa is any amino acid
VQGTTFSTFFKGEIIFPLFDKFVDYTVIGVHDLDYSLQNLMDLTKDRKYQILAANVFNKYAKPFSGHAAAIREVDGVKVGFFGLTKLITEILQAAKNMGDLNFAPVEETARSMVQSLRAQGADIVIALTHQGLEEDKKLARTVEGIDLIVGGLSHTNLIKGFQTFDTIIVQAGYRGENVGKVTIRYDKKKKAVISITPTIIPVIASSPVDAETAKIVEEYAKNMADQMGVILAKTDVYLEGTREVVRRTETNLANLITDFMCMSSGAELCLV

SEQ ID NO: 95282 - protein, 296 aa, Unknown
  Obtained from environmental sample
  misc_feature (1)..(296): Xaa is any amino acid
MSMKKYTRDMSAGLFNLTIDIVGPYTAASNASYYGQNSRGEDRRPATLVREAVLAAQAANVDFAPYDNDGDGYVDVAMVIHAGPGEEASEVASDIWSHAWNLNAGKGNNDGDGAVEASGKTINEYCIQPEYIFLAGDSTIGVFCHEYAHILGLPDMYDTSDATQGAGDFTIMASGTWLGPNDDGSYPTPFLAWEKHLLGWLTLKVPDGALASLDTVKTPVFAALSGVPEYPHAKPPIAARIAFFAGFLASGGLIWYTRRARAAAVMLAFVFLLGAMVWGVNCGGSPSPAGPDDSGA

SEQ ID NO: 95283 - protein, 401 aa, Unknown
  Obtained from environmental sample
  misc_feature (1)..(401): Xaa is any amino acid
MKTKKIKSKAEMVVIACAVIAAVAVLNYAAGKFFYRIDLTENRQYTVSGATKRILKGLDDIVAIKVFFSKELPPEMHATVNAVRDLLSEYKNIAGGKLRVTWEDPAENDEVRGMAMSLGVPEIRLQTFKRDKAETMLGYMGIGIMYADKKEAIPVVQNLANLEYDLTQAIMKVKRASMPKIGILKSQTADFIPPEIGARMNMGDDRTEKRFAPIFENFKRDYDVVTVDLSEGKPIDKEIRTLIIPGGDRYTDRTLFEIDQYFMNGGNLIALANAVNVSFQYGPQGTVRETKLLELLEYYGVRVERNVIMDASCGQVQVPRNLGMFTINELLPYPYFVRITQSGLDRDNPVTSSQSELMLGWASSLTLAPDTSGKHKTTTVTLASSSEQSWEVKENFDLTPK

SEQ ID NO: 95284 - protein, 923 aa, Unknown
  Obtained from environmental sample
  DOMAIN (719)...(881): Alpha-2-macroglobulin family N-terminal region
  misc_feature (1)..(923): Xaa is any amino acid
SPRTQEGDSIPISVEFSQEVEPNDVEKYFSVAGFPALKKDNVNVYGSRVVINKLPLEYEKKYTVRISADLKDLYGRALGKAENVTAEVDEANSYVYFRNSRARMLEAGYPPKIIWETQNPVSIRSRIAQAQSPYEIIPLSGLSEIDISKLTQNSKHYFTEDLSPFLNAAGKGSAAMRWDYRTKSSWEKGKIYSNNQWLTVQVTNIGITLRYGYNMVLVWATHLSDGSAVPNADVELLESGKVVLVGKTDAQGLAVFNFPKGDFISKFSEPQSGYWNNTFGNGFRIRVSEGSGPTQDRAEFIPNDSHNLWRFSVEETVSPFEAEKERPVIFLFTDRGLYRPGETVTFRGVDRNLTNGQYAAYKGPYQIEVSTGAYQAPVIATLKGDTTGNGGSFGSFTLPPNLDPGQYRIIYRRAATTSPGREREPENSVAFTVANFERLRFESSLRFTDPVVYQGEKLNASLSASWLAGGGLSGAPYRWYLTREPASVIPGGTEGPWRYWHFGPDFDDERSYVGEGEGTLGPDGKASIANMTSGEGIEGAAYRYRLEASVQDAARQEISARALTLVHPASFYIAARLDSGTIKTAATGADEAASPSHYFLSAGQPATLSWALVSPDGDGAQNQGGDLSIQLVRHEWKQARQQGTGGRINLVWERVEEIAAQRNVKITTGNNSGVFNFTPDKSGLWELRLSSRDQKQRTAATRSRFYVSGAGWVRWGSDDVDTITLTTDRPSYAPGETAKIMIRSPLEKGKYLLTLEREGIISQKIIELNGSALTIDIPIEESYIPIIYATLSSYTVRSGPAQNSYYEPDLDKPKGIFGVTPIYVDNKSRHYQIEIDTGRNAYRPAEQAEVKLTVLLNGRPAPNTEVSFMAVDRGVVDLIDYHVPDPLAFFYHPLAFPPGSAGCGQPFPADRSGDIQHFRSPGR

SEQ ID NO: 95285 - protein, 464 aa, Unknown
  Obtained from environmental sample
  DOMAIN (80)...(166): Alpha-2-macroglobulin family
  misc_feature (1)..(464): Xaa is any amino acid
LTTMFQIRLPFFITPWHFPLGVRGADSRSLLIDPVTYNISDLQGGDSDNEEKGGDGAGSLKDDMKERKDWRPTAVFEPYLVTGPDGTVTVKFKLPDSLTSYRCTAVAIGVNNFGIKENDLKVSAPLTAIAVLPRKLRWRDTGTVSLILTNLENAAVEASVSLASSAESHTGSDIIIEVDGADSKTVKVLPGASQEVTFKVAAVGVGVARLAFTLRSPEVNERILKTLLVDRPSLTETVTTIGNLGPDNPFIEEGIVLPSLVPEGTGNVSVSLSASRLATLKEAVRYLLDYPYGCIEQRTARLLPIVAFGEYLDTFDLESPLAAFGEYLDTFDLASPLRGFSPWNPQKLVEKELEELAKFQLADGSFPYWPGGRYGNLFVSMRMAHIAALAKAKNMKVPDSIDTRKLLSYIAAESSDDKLEDPFIKGYSLWIRTMYNEKISSEITAFLKRGDELGISGWAFAGLA

SEQ ID NO: 95286 - protein, 93 aa, Unknown
  Obtained from environmental sample
  misc_feature (1)..(93): Xaa is any amino acid
MASNLTQIQNMIYEIRGHKVMLDRDLAELYEVEVKRLNEAAKRNIKRFPADFMFQLTQNEWKILRSQIATAKKEISKVRYLPYAFTEHGVLIL

SEQ ID NO: 95287 - protein, 178 aa, Unknown
  Obtained from environmental sample
  misc_feature (1)..(178): Xaa is any amino acid
MIVSVSRRCDIPRYRFKWFMESLDAGFCDVANPFNRNQIKRVSLLPGDTADNVEAFVFWTREPKNILAKTEELEKRGFRFYVMVTITGYPAELEPDAPDTSKVLANMKKLSQNIGQDRVIWRYDPVILTSVTDEDFHLRNFDFLARELADCVRRVIISIYDEYPAANKRLELKEKLGF

SEQ ID NO: 95288 - protein, 499 aa, Unknown
  Obtained from environmental sample
  DOMAIN (279)...(350): His Kinase A (phosphoacceptor) domain
  misc_feature (1)..(499): Xaa is any amino acid
MDFIFKRPGSKFNIRLLAYFAVIVIFTIAPITLMTSAALNQIVRFWHSIDSNASTRAANSFIADNYSLHLERFENILRQNNFSTTALQGKLPQDISSVQVFNSVNGQWTEISYTGDEQFKLPSPPSEETGFVMRVLPRDQGTIRYVQRAGQNSLRVINYNLGIDFDRGKSALDNQAERFETINLLRENMRPLLIYYYTAFFLPILLMTAIIAISFTRRITRPIAELTEAIQRVAEGDFSFQILSNRNDELGLLIRSFNSMVQDLEKTREALVRNEKISIWQNMAQQLAHEIKNPLTPIKLSAERVLRRWQNNPEEIGEIIESSMMAIIQETEGLSVLLNEFRTLSKPMEPSNSLALLKESVEEVINAYSGSYPNVKFNLEHIQTDIQIKIDKHRLSQIITNLVINSIDSMSGNGEIELRSDIVKKREVCYCRISVKDSGKGIGEEEGKQIFTPYFTTKASGTGLGLPIVERIVTDHGGTIWFDSALGIGSTFYIDLPSA

SEQ ID NO: 95289 - protein, 88 aa, Unknown
  Obtained from environmental sample
  DOMAIN (1)...(84): PTS HPr component phosphorylation site
  misc_feature (1)..(88): Xaa is any amino acid
MTEKIVTVSNRAGIHARPSALLVQTTKNFSSNIYIEKGTDRINAKSIMGIITLGAAYGTELKIIAEGEDEVTAVDTLVKLFESKFEEE

SEQ ID NO: 95290 - protein, 679 aa, Unknown
  Obtained from environmental sample
  DOMAIN (91)...(193): PAS fold
  misc_feature (1)..(679): Xaa is any amino acid
MNGYVYEVITTDYRGIKSIVFLERLENGWYMGVVTPRNKYYKSTRSVALFLTAMGAVLATALIVILLAIFNEINKENEKSMSMAHWYNSILNAIPLPITVTDADTKWTFINTAVEKFLGITFEEAIGKPCNNWGINICNTPDCGIVCAKRGLKQTYFSEGDSSYQVDVAILKDKKDETMGYIEIVQDITNLKLITKKQADAEAANAAKSAFLAKVSHEIRTPMNAILGITEIQLQDESLSRGTKEALERIFNSADLLLGIINDILDLSKIEAGKFELIPAQYDIASLIHDTVQLNMMRYESKPIEFKLEIDEKIPVILFGDELRIKQILNNLLSNAFKYTHEGMISLTISTEPMDGDNVMIVFRISDTGQGMTAEQVQKLGSEYSRFNMEANRKTEGTGLGMNITRNLLRMMNASIEIESAPNKGSIFTIHLPQKFLDSDPIGRVMAENLMQLNFVNEQRMRNLQINREYMPYGRVLIVDDVETNLYVARGLMASYDLSIDTAMSGFEAIDKIKNKFDYDVIFMDHMMPKMDGIETTKKIRELGYTKPIVALTANALTGQAEMFLKNGFDEFISKPIDIRQLNMVLNKLVRDKYPPEVVEAARKQKELIAGRTKPHNVDSQLLEFFIRDARKAIGILESVYLNKCRRIDDLPMFIINIHAMKSALANVGEKELSAEALI

SEQ ID NO: 95291 - protein, 168 aa, Unknown
  Obtained from environmental sample
  misc_feature (1)..(168): Xaa is any amino acid
MNNLTVVEYQNQRVLTTQQLAEVYETDVDNINQNFNRNKARFLEGVHYYFLQGETLKSFKAGFPSESQEPLKFVPQLYLWTEKGASRHCKILDTEQAWKQFDILEETYFRAKEAAAVPPPEKPKPEMTEAKKAELEIKSKRANAMLKNAKLRQATFLLKGAEQYKSLL

SEQ ID NO: 95292 - protein, 324 aa, Unknown
  Obtained from environmental sample
  misc_feature (1)..(324): Xaa is any amino acid
MAYIRYIKKSNGQEYASLADTNRSGKQVKQEYLGNLGLVVDKEAGVFQSRERGTFRYTLEEGFCDLSDAYSNGLGSAKSERLILDFGDSFFLSQYFERQVFRDAFHQVLPEQTDTLLSLMFYRILTDKKANCYADMWWQGNYASILFPGAKLASQRVSEFLVDIGDEEVQRRFFHEYFRILYGSQSATGILIDSSGCPNASKMSVTQISNHNGDISLEARLIYVIDRVTGMPIYFRYCPSNIVDVTTLCTTLAELRQYSIAIDYAIVDAGYCSEYNILELYENHVRFLTRLAPNRTLFKDVAEEHLPSLMTSANALRYGTVCCT

SEQ ID NO: 95293 - protein, 96 aa, Unknown
  Obtained from environmental sample
  misc_feature (1)..(96): Xaa is any amino acid
MDEIPDIPVSRTRLESLSTAELIKLADNFGIDIPYGLERIFMIEELLEYSNTGIQEKTDDLEINPAYTETVVLPKQYNISYVEVIIRDPLWVFVYW

SEQ ID NO: 95294 - protein, 198 aa, Unknown
  Obtained from environmental sample
  misc_feature (1)..(198): Xaa is any amino acid
MADTNSYSDTYKPIAAIQKISTETGIPIVLIHHTRKGSKDGSGEGWADEGMGSQGINGAVDTIILLKKPDGKPEGTMRIKGRDIEETCYDITFDKDICTWRITGKGDVIRSLPKAQADVLAILEAAGEKGISTGEIAIKLGKTSNAVLDTLNHLLKASKAKKICHGIWASTEIKENSELNMTEYENKELNENHCKTED

SEQ ID NO: 95295 - protein, 237 aa, Unknown
  Obtained from environmental sample
  DOMAIN (97)...(218): Domain of unknown function DUF147
  misc_feature (1)..(237): Xaa is any amino acid
LDVALLAFLLYKGYELLVKTQAMQLVKGAGFLVLVYGIAYLFKLNTLQWVLNIIGPGLFIAVAIVFQPELRKIIMRLGQANFFRPDTKPNIGQLEAVVTAAEILSQQRRGMLVVFPRKTNIKNITETGTRINAEISSSLIIAVFEFDGPLHDGAMIIQNGRIVAAGCLLPLSEQQDIRKSFGTRHRASLGMSEQSDAVVLVVSEETGAISIAFDAKLYYDLSPVEVTRKLKELLDRE

SEQ ID NO: 95296 - protein, 98 aa, Unknown
  Obtained from environmental sample
  misc_feature (1)..(98): Xaa is any amino acid
RYFHPQELAAALSKGPGADLSLSARFAAKEAFGKALGTGLAGIVLKDIMVVNRHNGRPDIHVSGTALSALKKTGANRIHLSLTHDHDNAVAMVVLEEI

SEQ ID NO: 95297 - protein, 172 aa, Unknown
  Obtained from environmental sample
  misc_feature (1)..(172): Xaa is any amino acid
MTRTKAKVKEDKELKVSFYKKDEYKCPACGATFRKEELLTGSGRLIAGALTRELHRLYEPSQKYGNLYPLAYQAVVCPACWFASTEADFPLLPDPNKAYNDQERRKADTLLIFPDVDYELPRRLIEGAASQYLTLRCYDYYPKQFSPTIKQAIASIRTAWLLDELDKTFPKQ

SEQ ID NO: 95298 - protein, 291 aa, Unknown
  Obtained from environmental sample
  DOMAIN (97)...(246): Fic protein family
  misc_feature (1)..(291): Xaa is any amino acid
LDLIARIDEFRGTWHYLGTLELDRLSALRRVATVESIGSSTRIEGSRLSDSEVRQLLSNLAITKFDTRDEQEVAGYSELMDLLFQSWMDIPFNENYIKQLHQILLQHSQKDEWHKGQYKTGPNSVAAFNENGEQIGVVFETATPFDTPRLMTELVQWVNDVLGKDALHRPSAPLATLHPLLAIGVFIVVFLEIHPFQDGNGRLSRALTTLLLLQAGYAYVPYSSLESIIEANKETYYLALRQTQGTIRTEAPNWQPWLVFFLRSLAEQVRRLEKKVELEKTVLAALPTLSL

SEQ ID NO: 95299 - protein, 831 aa, Unknown
  Obtained from environmental sample
  DOMAIN (365)...(552): 3'-5' exonuclease
  misc_feature (1)..(831): Xaa is any amino acid
MKSTALPPLYLIDAYGLIYRSYFAFLTRPLRNNAGKNVSALFGFARTVISLIDDGAPVADNDGKCLHQEKPVRLAAVFDSRTLTFRHKMYSEYKANRQKTPEDLHEQVPLVEEFLTVLGIQSLKVEGFEADDIIATLAEKCRAEKRQCYILSSDKDLLQLVGDGIFELRPAKINRKNETAATPGPVWDLIGHNEVKEEWGVEPPKVLDLLSLTGDNSDNVPGVAGIGEKTAVKLMTRYGSLDDIYKNIAAIEGSTGKKIAEGKENAYFSQSLIRLRNDVELTINFIDELSIENLDRPAGARVLIREGIRQSAKQLDPNVKPAAQTAAEQSSVTQNSSIKETNNVNQSESVSFPAAEQALIGDGVYKTILDIDELISVLEQAKKQKLLALDFETDSLDAWHSHPVGISLAIKPKEAFYVPVAPHGDGGELSEFNNPEKVRALLSPLFADNEMTIAAHNAKFDYKVSRGWGIERWKCKIWDTMTAAWVVDPERNTYSLDSLAAYTFDCTPIKYMDIVPKGMTFNVVPLETATRYSGEDADFCIRLKHHLEPVLKKTESIALFENMEMPLLPILAEMEGAGIKIEPKALTSYGKELAIELNTIQSETWKTVGHEFNLSSTKQLQEVLFVERKLKPVKKTKTGYSTDAAALEELAREDPVPALILRNRILAKLKSTYVDTLADMADREGRLHTNFIQTGTATGRLSSREPNLQNIPVRAEEGRRIREAFIAKPGCLLISADYSQIELVILAHLSGDENLLSAFRDGKDVHARTAALIFGIDESEVKSEQRRIAKTINFGVIYGMSSFRLANELGISRSDAANFISAYFNTYAGVR

SEQ ID NO: 95300 - protein, 119 aa, Unknown
  Obtained from environmental sample
  misc_feature (1)..(119): Xaa is any amino acid
MFPFGGQGGPKMPDFKGFGGWKFLLVYIVILIIGMSLFNYVFLNKMNPAIDFSEFKTRITTGEIKRVELTESYFIGFTNPDKKESSRAIQRSYGSSQDKVYRTVSILTEDFLKFLDENN

SEQ ID NO: 95301 - protein, 453 aa, Unknown
  Obtained from environmental sample
  DOMAIN (233)...(367): ATPase family associated with various cellular activities (AAA)
  misc_feature (1)..(453): Xaa is any amino acid
MSENSGDKNDKGGPMFPFGGPPKMPDFKGFGGWKFLLIYIVILIIGMSLFNYVFLNKMNPAIDFSEFKSRISAGEIKRVEITESYITGYTNPDKKESPRSITRSYGQAQHDKVYRTVSILTEGFFDFLDANNVSYGMVSREGNAVLNFLFSWVLPIAFFIFIWRFVFRRLGNMGGNVLSIGQNRAVIVAEGDIVTRFSDVAGVDEAKEELVEVVDFLKNPQKYKEIGGKIPKGVLLVGPPGTGKTLLARAVAGEARVSFFRMSGADFVEMFVGVGAARVRDLFKQARNKAPCIIFIDELDAIGKSRINNIGGGNDEREQTLNQLLVEMDGFDNAGGLIILAATNRPDVLDPALLRPGRFDRQVLVDKPDLKGREAILEIHSKNVIKDPSVNLETVARVTSGFSGADLANIVNEAALLAVRAGRKMVAQRDFDEAIEKTVAGLQKKTRVLKLKE

SEQ ID NO: 95302 - protein, 224 aa, Unknown
  Obtained from environmental sample
  misc_feature (1)..(224): Xaa is any amino acid
LILPLRYYEENLYPLQDGVMSTISKCGVRFFLTGGTALSRAYYNHRYSDDLDFFVNDDDDYPAQVKEIFFKLKEDKFIWSSTVDFISNKNFTSFKVGWEKSDTLLKLDFVNDVASRFGDIVKTELFVRTDSVRNMLSNKLTALFRFAAKDVADIREIALHEKIDWHQAINDARKKEAGLEIPIICDILQGMPQSEFETVTWTKKPSWKEFRSDIERIVLEMISG

SEQ ID NO: 95303 - protein, 258 aa, Unknown
  Obtained from environmental sample
  DOMAIN (9)...(152): GAF domain
  misc_feature (1)..(258): Xaa is any amino acid
MLSRSENDEFENSLAKVMAIIAVCVDVDRVFVWQNENKNGNLHFFSRYKWIKAEQTGYKYSSTSFMYAEDAPGWEPRLYSGGVINGPTVSLDDDIKKIVCRYGTLSVLIIPVNLNGEFWGFVSFGDCHKERYFEEDEINILRSVCLVMVGSVSSYDKSIRLLESHEHIKIMLDAMPYTCHLWDKNGNIFDCNEESLRLYGASSREEFLGNFFRFSPEYQPDGTLSIKKASMHIKEAIESGRYRFEWMHLTKDGERMPC

SEQ ID NO: 95304 - protein, 260 aa, Unknown
  Obtained from environmental sample
  DOMAIN (48)...(163): Response regulator receiver domain
  misc_feature (1)..(260): Xaa is any amino acid
MMGGSITLESEYGKGTKFTVLIPLVEGDKNRVEKAGSSQEYMFCAPEANILVVDDNEFNLKVAQGLFGLLQIDIKTADSGKQAIEMVKKEDYDIVFMDYMMPEMDGVQAMELIREIGEKYASLPVIALTANAVQGAQEMFLQNGFDDFISKPIDSKHLNELIIKWLPHDKIRMKDGVKTPDSPDSPDPGSDDSEEDFLEKIGGVKEINMAIGLSRASGIVSMYRDTVELFHNKLDCEYEKMSGFLAENDLDSFTISVHAM

SEQ ID NO: 95305 - protein, 267 aa, Unknown
  Obtained from environmental sample
  misc_feature (1)..(267): Xaa is any amino acid
LADVVVIDMNKLKEEGKVKTVSVDSFEQNNLVLVDEAHRGLAGDVWRDYRARLSAEGGFAFEYSATLKQAMKTLNVKKDYKLLDEYFRSIIIDYSYKFFYEDGYGKEYRIYNLRESIDEEQRQLYLTGCLLSFYQQLKLFAKKDKEYAPFRLEKPLLVFVGNRVTAKTSVAEMTDVEEILDFIDKFINNRNQTIKRIHDVLHKTTGLMDSRGRELFSQCFNALPALFGRAPKADEVYKDILRLVFNCDAASDEPRLHILNLRQVQGE

SEQ ID NO: 95306 - protein, 252 aa, Unknown
  Obtained from environmental sample
  DOMAIN (1)...(251): Glycosyl hydrolase family 9
  misc_feature (1)..(252): Xaa is any amino acid
MNTVIECTGGWHDAGDYGRYIAPAAVTVAHMLYSFEFFPQVYRDQLNIPESGNGVPDILNECRYELEWMLKMQRADGGLYHKVATKYFAKFIMPEEDKDELFLFRVSHCSTAGFAASAAQASRVYRAYDAAFADRLLGAAKKAWDWMEANPVFEPFKNPPDFHSGGYGDSSCEDELFWASAELYSVTGDDRYLSAIKKRIATVDIAQFGWRETAGFGALCCLFIMKDKLDKNLHASLKERFLQSADSFLDLT

SEQ ID NO: 95307 - protein, 190 aa, Unknown
  Obtained from environmental sample
  misc_feature (1)..(190): Xaa is any amino acid
MDEASLSNLQSEIAELEQKLADKKHRLEEAQAALEKQTVDATTTQRLFSGDSSKASLIEINNYSPPEIKIALFRSLFRGREDVYAKRFESRKTGKSGYQPACRNEWVKGICEKPRIKCGSCSQRSFELVTDDVVRNHLTGFIVMGIYPLLANETCHFLAIDFDKETWREDVRAFMDTCRMEEIPASLERS

SEQ ID NO: 95308 - protein, 431 aa, Unknown
  Obtained from environmental sample
  misc_feature (1)..(431): Xaa is any amino acid
IITQAKYNTELNNAILVEFSTNAGNAKDNKYSRLIQATLASVPHDEDDYYCAECLNIDVLDQWIEKARNCVRSKQYDEALLICKGLIEEHSQWLYNIGENLSMIFSLEYQSVPFDIIINIIEHIDKKELYNYCMSEMKKGKYEKTDFYEGFQRLSEELLAIIDPDAFIALQDKLLADVKNIHKAETILRRKIKFFLRLGQKKKAWDIIKENMQIVSFRLKAVKRKIEEQDFRTAKELINDFINAKGEDTEKYFNSTWLGLLLDIAQKENDIPAVRKLSYKFIKDYLKKEYYQMYKATFSPEEWADEREKLFLHYYSDKNYFDHSAANFLAEENDVGRLLNYVEKYLSMDNLERYYEVFAADYPEKTLEMFKEALLRYANNNTGRGYYEQILSLLKKMSKIKGGKKAASDLVADFRLQYKNRRAMMEVLRGF

SEQ ID NO: 95309 - protein, 149 aa, Unknown
  Obtained from environmental sample
  misc_feature (1)..(149): Xaa is any amino acid
MADSPFLGPVIAIGSAVLLTVILILINSARPEKTLTAFFLGPWSSPWFFGNTLDGIALLLTASLGAAIALRGGTFNLGGEGQIYVGGLTASMVLLTHSPLPPALLLLLAALAAMLAGGLLGGISGLLKKHLDMNELITSFLFSSALIPL

SEQ ID NO: 95310 - protein, 135 aa, Unknown
  Obtained from environmental sample
  misc_feature (1)..(135): Xaa is any amino acid
MNYFNHCQSVEEAKRHYRKLIMKYHPDHAGEEGEAITKEIIAQFNAFLKNFMAHSFNSYYEDKEWKPAAGAETPFQEILQKIINLDCEIEIIGYWIYCFNSKAVKDQLKELGFFFSGKHKAWIYSGKPKKNYSSR

SEQ ID NO: 95311 - protein, 258 aa, Unknown
  Obtained from environmental sample
  DOMAIN (1)...(63): Putative carbohydrate binding domain
  misc_feature (1)..(258): Xaa is any amino acid
MRYGFFDNKKNEYVIEKVDTPMSWTNYIGTENMVGVFNQTCGGYLFYKSAEHHRITRFRGNAVPADRPGHYVYLRDDETGDYWTISWQPTAKPVSCYKARHGLSYSVYSCEYSGIYAEQTLFIPRGADVELWDVRIENRSGKPRKISVFSYAELSWHQIDGDNKNFQSTLYCAGASYKDGVIEQELHYEQNSYQFFTADFDPDGFEIERERFTGVWQSESNPEAVEKGALHGCACWQGGNQCAALHKRLLLPEGKGIR

SEQ ID NO: 95312 - protein, 93 aa, Unknown
  Obtained from environmental sample
  DOMAIN (20)...(88): Ribosomal protein S17
  misc_feature (1)..(93): Xaa is any amino acid
MSDEKIETAKGRSGKKEFVGIVKSDKMMKTIVVSIETMKLHPLYKKYVKRAKKVKAHDEKNDAKIGDRVRVIECRPLSKEKHWKLAEIIERAK

SEQ ID NO: 95313 - protein, 303 aa, Unknown
  Obtained from environmental sample
  DOMAIN (180)...(298): Response regulator receiver domain
  misc_feature (1)..(303): Xaa is any amino acid
MTNIIDIASIRAQEKHQQIVVNMSPDIPSIVICDELRLAQVITNLMTNAIKFTPDNGKVQLNAEKLEENNDEVTIRIEVVNSGKGISPEQQEKLFSDYDQADLTIDKQSGDTGSGLAISKRNIELMQGKIWIESQPGKGAKFIFALNMKKGEKIVVPATAESTPAPVPRIKATDLHLQGQTILAAEDMDFHREVLSMYLKNTGVAIDYAVNGKQAVEMFKANNEKYCLIIMDIRMPEMNGDEATRIIRALDLKKAKEIPIIAMTADAFKEDVEKCMSAGMNDHISKPIVPKTIYAKLKQHLGL

SEQ ID NO: 95314 - protein, 511 aa, Unknown
  Obtained from environmental sample
  DOMAIN (158)...(223): His Kinase A (phosphoacceptor) domain
  misc_feature (1)..(511): Xaa is any amino acid
MAGELKKIIVVDDMPDNLSALRNTLKEIYQIYPCPSAVKMFDLLEHVQPDLILLDVEMPDMDGYEAIKKLKSIDRFNEIPVIFLTSMSDPQSEIEGLELGALDYIRKPFVTPLLIQRIKTHLAILEQQEENKHLLELKTEEVKLREAAELEAENASRAKSDFLSHMSHEIRSPLNAVIGMINIANDEKDIEAIKLYLGKADNAAKHVLGVINDILDMSKIETNKLELSYSEFDFAKMMTSIVDVISIRAQEKHMQVVVNMNPNIPTFVISDELRLSQVITNLMTNAIKFTPEKGTVTLSAEKTEEKDGEITLKITVADSGIGISPEQQQKLFNAYNQADNTISGKFGGTGLGLVISKQIIELMKGTIWIESELGNGAKFIFTINVKKGTVKEGQATASASPLVIKATDLDFKAFTILAAEDMDFNREVLAKYLEKTGVTIDFAENGKIALDKFKENPDKYNLILMDINMPEMNGDEAAIQIRAYEKESNRKQIPIIAMTADVFKEDVKSVC

SEQ ID NO: 95315 - protein, 156 aa, Unknown
  Obtained from environmental sample
  DOMAIN (4)...(127): NusA N-terminal domain
  misc_feature (1)..(156): Xaa is any amino acid
LATDMSQAIRQLQQDRGISEELILKTIENTLLAAYKQRYGDADNAVVKFDEENMEVSIFAQKMIVEQDEIYDPVKEIEINEAKEIDPEAEVGDEILVEVDPKQFDRGAVQSAKQTAHQSIREIQKDSLYSEYKDKVGEIVIGYYQRERNGSIYVDL

SEQ ID NO: 95316 - protein, 156 aa, Unknown
  Obtained from environmental sample
  DOMAIN (18)...(150): Uncharacterised BCR, YhbC family COG0779
  misc_feature (1)..(156): Xaa is any amino acid
MRYIAGEMEAETAEIRLSLQAVLDGLGLRLVELTVSRHRGSVQIRAVIYNGSSVGTDDCSRAHRAITPRLELAFPGLDIYLEVSSPGINRQIKDGAEFACYINRGVRCYRTDISDWTAGILESASEKGIVLKTKDGDVNLDFEIIAKAKLDPSQEV

SEQ ID NO: 95317 - protein, 705 aa, Unknown
  Obtained from environmental sample
  DOMAIN (114)...(180): His Kinase A (phosphoacceptor) domain
  misc_feature (1)..(705): Xaa is any amino acid
VECNQEVVRLFGLSNKQEFINSVFDLFPEYQSSGESSRNRFNKNLSEAFEEGYCRFEWMHQKPDGEPIPTEVTFVRVKFKGEYAVAAYVRDLRELKTMIAEMRRAEIAEESNKAKSEFLAKMSHEIRTPMNAILGITEIQLQDVNLPNSIKEALERIYNSGDLLLGIINDILDLSKIEAGKLELFPVQYEVSSLIYDTVKLNILRYENKPIEFALEVNENLPSALIGDELRLKQILNNLISNAFKYTHEGRINMQLSTEKGGNDSEVILVLVISDTGQGMTAEQVRRLGDKFSRFNTEVNRKTEGTGLGMNITQNLIQLMSGDMKIESTPGMGSTFTVRLPQKLTGEPPIGKELAENLMKLNIKNTSKFRNTQIIQEFMPYGRVLVVDDVESNLYVARGLLAPYGLSIDISISGFEAVDKIKAGNNYDIIFMDHMMPRMDGIEATKLIRSLGYTGAIVALTANALAGQEEMFLKNGFDDFISKPIDIRQLNNSLNKLIRDKKPSEVVEEARLQKDKLFAEVAHKEVTTAQLAEFFVRDAIKAAAVLDAIAKNNCRRTDDLSLFVINVHAMKSALANVGETELSEFAKILEQAGRNNNINLILSELPIFLDALYNVIGRFRQKEEENINEEETINMDIERHYLLEKMLVIKNACESMDKKTAKTVLAELKEKAWPRQVKEQLGVISELLLHSDFEEAAEAAGNFNI

SEQ ID NO: 95318 - protein, 884 aa, Unknown
  Obtained from environmental sample
  DOMAIN (452)...(565): PAS fold
  misc_feature (1)..(884): Xaa is any amino acid
LFARPLKNGWYFAVVAYSEEYYKSIWNIAGVFIVLGVALASILSAILLSIIAGRRKAEERTRVMLDSIPIVANFWDKNHQNIDCSQEALKLFGLTSKTEYIEKFFDLSPEYQPDGRVSKEKALYYISKAFNEGYCRMDWLHRRLTGELIPCEITLIRAKYENDYIVCGYTRDLRELKAMMNKLREADECTQVLFDATPLSCFMIDNHFKILECNDEIIRLFGLNDKQVFLDRMNELLPEFQPSGDTSTDKLIYYISETFEVGYRRFEWIFQKLDGEKIPTDVILVRVKYRGIYAVAGYIMDLREIKTMMGKIKEAEERVMMMLDATPLGITMWNEELNLLDFNYEMARVVGIYSKQEYREKFVQTLPEYQPDGRKSMERLTEFIACTFKDGNARMNWSHNSIDGDALYFEAIAVRLMYKDKPVVVVYCRDMREINAAIAKMREADECTQVLFDATPLSCFMIDNRFNIVECNQEIVRLFGLSNKQEYINKVFDLFPEYQSTGESSRDRYNKYLYEAFEEGYCRFEWIHQKPDGEPIPTEVTFVRVKFKGEYAVAGYIRDLRELKTMIAEMRRAEIAEESNKAKSEFLAKMSHEIRTPMNAILGITEIQLQDVNLPNSIKEALERIYNSGDLLLGIINDILDLSKIEAGKLELFPVQYEVSSLIYDTVKLNILRYENKPIEFALEVNENLPSSLIGDELRLKQILNNLISNAFKYTHEGRINMHLTTEKGGGDYEVILVLVISDTGQGMTAEQVRKLGDKFSRFNTEVNRKTEGTGLGMNITQNLIQLMNGDMKIESTPGMGSTFTVRLPQKLNGSPPIGKELADNLMKLNIKNTSKFRNTQIIQEFMPYGRVLVVDDVESNLYVARGLLAPYGLSIDISISGLK

SEQ ID NO: 95319 - protein, 552 aa, Unknown
  Obtained from environmental sample
  misc_feature (1)..(552): Xaa is any amino acid
MGNRERGAIFCQSLRDFPCPVTLGKIAPSFGLHRYKQGLRFVPPDDEGFTLRGDKQRLVYKGRRRSHRITILGDTTFEYDCILEREPENNVISLRMEGAENYDFFRQPDFVKESFLKGSYAVYKKETLVGEGTGKLCHIHRPEVIDARGRRCWGELSVVSNELRITIPEQWLSEAKYPVVVDPTVGTTTVGSQYRWRPSAGDPLTTLMFEVEIPVNRFLVTDAINGSCTGYAYVNSDDSEAAGRPVLYSDNSNKPQTRKSLNENLMDLRVTSSKPKGWRTATFTSNGSIASGTYIWYGIFCEYFWFPRFDTGARCYSDFWDAYTSIPNTYPIYNVNWYDDLLLSMYFTFTSAQNYQRKLTQGVSLSDSRTITGNYKRKTTQTVQAEAIPKRELTIFKNIRETINNFDIATRMLSFFTTIQETLGSFDLAKKTLSIVTQIQDTLGSFDLAARIHSVLASIKDAFSCFELSSISFLLFSNIHDDLNATDTLYHLRNIIRRHLDNVGVRSEEKAGFFYSRAISETALAVSSIARGLFLFIRRSRYGLIPRGLPRL

SEQ ID NO: 95320 - protein, 676 aa, Unknown
  Obtained from environmental sample
  misc_feature (1)..(676): Xaa is any amino acid
MITLERMRLVNWHNFEDDVIEIGNRCLLAGDNGSGKSTVIDAIQYVMAANLRMARFNSAADERRGGGRDLMGYVRCKLGSESTEYRRGDTITHVMLEWKTSDGNFACGVCIEAYKDNHHTEHFWIGEIDPKNSIGAISVRNEKNEPLIFRQFKNVLAERKFYDYPTKQQYVKDLTNKLGVFKRQPDVNPYLDALTRSIGFKPLDSIDQFVCDFILEENPVSIQDMKQNLENYKEADRQAKGAIAKIGVLKKICAKAAEWRNYDGLIIKQEYLKLSIELENEKQKKDNAARQLVETQNKLDFTNREIAALNQKRLDSEQELRALDQSLASNDAHRLYEEIRARIERIQHDLAYKKEQAEKYRSLKSQCETLLNRKLTEDFDGEEAALAGEAKKYQNERYVAERKKDEAQDLLRDIRSELADLERGILRYPDAPRELRAALEKAGIEAFFLAEAAEITAPDWADAVEGWLNTQRFAILLDPVHFQKAIEVYNRLPRSVAGAFIPNIEKMRDAKAKLGSLAEIVKAEGYARIYIDYTLGKVMRSELTNLKTYDSAVTKECMTYMNHTASRIKEDIYLRHYLGRAALDKRKKDLAAEAERVEAELLTAEREEREARGHEDCCNRVIRYLPELKYLFPSIAGAELLANQLAAAEEELAAIDTQSFKELENKRDELVKYLEL

SEQ ID NO: 95321 - protein, 406 aa, Unknown
  Obtained from environmental sample
  DOMAIN (70)...(139): HAMP domain
  misc_feature (1)..(406): Xaa is any amino acid
GFFDLAEGKFTTLGLSNDKSAALACMENELTPITTETMKAIANLKASLETMCKELYDNNNTTQHSINTMQTIIMIIAFIISVFFGNFIANMIVKEVRALDVMIARVANGDLTVEASSHTKDELGQMQESMTDMVRGLKNLITSVSRGIDSVASGSAQLSASAEEMSSTTEQIAKSADTQRTGAERMAAAMTELSASIDEMARENQSSLGQLDEALQATEHGNQAGASTKSAMEEITQTTGRIAKAISVIQEIANQTNLLSLNAAIEAAKAGEQGKGFAVVAEEVRKLAERSAASAKEIAKYNIAARKSVKRGDEMVTNTVALLEKIRTNLDLFAAQTRGSVAATKEQAKTGSEVAKQVEKNASESASIASATHQMMTSTQEVTRTAAELAALASDLQTKLQRFRLG

SEQ ID NO: 95322 - protein, 265 aa, Unknown
  Obtained from environmental sample
  DOMAIN (6)...(189): Thiamine monophosphate synthase/TENI
  misc_feature (1)..(265): Xaa is any amino acid
DPIADANQVISLSDQVARFAAAGFPLVQFRGKPRSPKEQWVELRSALAKARENGGWPLIVVNDRSDLAVLAFTDGLAPWGLHLGQTDLPASVAAKLPGLGGLHFGTSTHNPCEWSTVDPACDHAGVGPFRATTTKRDHDETIGIVGLQKGCAALKCQGVTPIAIGGLTMDDAAACFAAGAESLAMSKALSPSEPHGHLHNLTECLWQAQKTKYTHKPALGKKNGVAIVGGSGAGKTTLATVLAKRMRIEGIDLDERIAQKTGTSI

SEQ ID NO: 95323 - protein, 269 aa, Unknown
  Obtained from environmental sample
  misc_feature (1)..(269): Xaa is any amino acid
MQSQLIELKYPEYPFTPILGWSISRHEVFDKCKRQYFYQYYSKYVKEAPQYKISKLKGLTSVPLEIGNAVHDCMEALLNRLQKSDSSIDEEKFFRFADEKLKEYFSTKSFMEIYYKQEESLDIDAAGEKVRACLSNFISGPCYSWLYMKAMTNRTGWMIEPAGYGETRLGGMKAYCKMDFLFPVGEEVYILDWKTGAKDQAKHAAQLMGYAAAANSNFSIPWNMIFPKIVYLYPKYDELEIRFGENDLADYLQTIREQTQAMYALCGNV

SEQ ID NO: 95324 - protein, 446 aa, Unknown
  Obtained from environmental sample
  DOMAIN (274)...(441): Stage II sporulation protein E (SpoIIE)
  misc_feature (1)..(446): Xaa is any amino acid
ERDCEDRAAILPDLVDFDRAILFKVNAEKFRLEPSNWVGIDDSEAERLTVPLGFDGGDITDAIFLNKHIFVDEPDRDSDIFSRELRSRSYIVAPLLRKPTRKCYEIKGCEKKSCRCYGSVNPYCWSTGHICGDDNCVSEDDKRRACITCQAFSAKGVFWLDRKNNGTPITSDDITFLTNIITLAGLVFDNFSMMNALDEANHGLTTANEKLRKVNCELEIAQTNIRLDLEHARSIQQKLLPQDIMTSSKHYDIGSRYLAANSVGGDYYDLFNISDDTYGVIVADVSGHGVASALIMSMFKILLKIYSRKETSPQKTLEHINDIFISEIATEHFVTVFYAIVNTTTQKIRYSSAGHCPVIYMKKQTGSNIMLKTDGLFLGVFPEMLLREKETDYIRGEHRMILYTDGLTEAVNAKSDMYGTERLQNMAAHTLSLSPKRGGFRNTRAP

SEQ ID NO: 95325 - protein, 284 aa, Unknown
  Obtained from environmental sample
  DOMAIN (76)...(279): Binding-protein-dependent transport system inner membrane component
  misc_feature (1)..(284): Xaa is any amino acid
MEKLNHGHSAIAKGQTTRVLIYVFLVVTTFTMLIPFAWMLSSSLKFNKDVFTFPMQWIPKEPRWANYSIIWTKIPLGKFILNTFKLAIIITALQLLSSSFAAYAFAKLRFPGRRGLFLGYIATIAVPWQAYMVPQFIMMSAMGLNNTHMAMICLQAFSAFGVFMMKQFYESVPDELREAARIDGLSEYGIWWKIMLPLSKPAISTLIIITFVNTWNDFLGPMIYLTRTDLKTIQIGLRSFISQYSSEYGLIMAGSVVALIPVLVVFLSLQRYFIQGIASTGIKG

SEQ ID NO: 95326 - protein, 228 aa, Unknown
  Obtained from environmental sample
  DOMAIN (10)...(74): Heavy-metal-associated domain
  misc_feature (1)..(228): Xaa is any amino acid
METMELLTKTFRIDGMTCVNCRNRIEKKLKSTAGIEDTAVNYNTGTATVTYNNTVITFDEIKAVIKQLDYKVLDGKEKNQLPQIAGTLVLFIALYMLFRMFSTSSLATAFPAAQTGMGYGMVLIIGLLTSVHCIAMCGGINLSQTLNRESGVGSRVSGSGETAPVSTYSMLLPSVLYNTGRVISYTAVGVAVGALGSVLTVSGRFQGAIMLIAGIFMLIMGINMLGLF

SEQ ID NO: 95327 - protein, 371 aa, Unknown
  Obtained from environmental sample
  DOMAIN (326)...(370): Bacterial regulatory helix-turn-helix proteins, AraC family
  misc_feature (1)..(371): Xaa is any amino acid
MHGGDFLLEPDHCTVILPWPTLSGQEASRNPVSSRDHVLVLSDPSFLPTNFFSLPQIRDTGKNRQGKTAFIAWNASGASQGDLVKAASLRRKSEFSGVPFLCYGMPAGSGDPIDSAASLIEAVEFALKSPKKGTILFIGYKYPDGDFELLLSPSAAPGKKQNSANAVFEKTYIESMDTFGETVAEVTPLLIVFNSLDVEGAAAVRRHPLTMTVPVIMISGRVDSTVNVNSLSQLSRLIICHRAIVSSPEFRARIMAIVNGAEILPPHTGVLVKKAILNFDKHAKTHISRWKLADSVNVSEDYLTRIFHKEMGLPLWDYLNRYRIFLSAELLQQTNETIQEVANRCGFQDQAYFCRVFKKIYGVSPGQMRKK

SEQ ID NO: 95328 - protein, 274 aa, Unknown
  Obtained from environmental sample
  misc_feature (1)..(274): Xaa is any amino acid
MLWQDMSEINTELRNSILCIPPYQHCITEEFIGKMYKKKNNEKLLVNNITNIILSPWQRAYQMEYRYKKTKIFKSFIPVIEYGVFSSVLTDWVCAYLTLLPVVEASLRRWMVEENMSLKSLHKFYYTFGKYSRKYIEGLDDEREYIAKEYIRYLKHGFRVLFMSFEECHKKNFKEIFNRNLALHKLEGTMDTQETLRNVTRILLLMDVISELYLMQESDDLWQTCVSADPEQDVNFQLRWHLYEKKASIRTGHNDFLIVQNALVGKSSIERKRS

SEQ ID NO: 95329 - protein, 132 aa, Unknown
  Obtained from environmental sample
  misc_feature (1)..(132): Xaa is any amino acid
MQVKFSEKENIKTNGFVRDPTGDKKAEIESGILQKYKGRLLVIASNECALHCRFCFRKNLEKKKIQNLPAKLHKILKEDKSIKEVILSGGDPLMLKSNELQAIFKAIPKNVKIRIHTRLPVALPSRFTPTLL

SEQ ID NO: 95330 - protein, 237 aa, Unknown
  Obtained from environmental sample
  DOMAIN (42)...(184): Phosphoribosyl transferase domain
  misc_feature (1)..(237): Xaa is any amino acid
LRDVQPGEFLTINKDGMHSESLIKKERKSHCIFEFIYFARPDSKIFEQSADKIRRKMGKKLAEESPVDADIIIPCPDSSTTAALGYAQESGIQFEIGLLRNHYVGRTFIDPSQNVREQKVKLKFNTIKGVLKDRRVCLVDDSIVRGTTLKILCKMIRNAGAKEVHIRVASPPVEHPCNYGMDFPSPAELIATALAPAEVAKMLGVDSLGYLSVKGMRECTGQPDDFCCACFDDIYPE

SEQ ID NO: 95331 - protein, 265 aa, Unknown
  Obtained from environmental sample
  DOMAIN (151)...(198): DNA gyrase C-terminal domain, beta-propeller
  misc_feature (1)..(265): Xaa is any amino acid
LDDEKVLYSVIHAELTEVMNRFGDERRTRIVADEGEIDELDLIDDETCVVTMTHLDYIKRVPASAYKAQNRGGKGVIGMSTRDEDVVKAVFTVSAHDDMLFFTDLGKAYRVKAREIPMSGRGAKGTPVVNLLSLGGGERVTSIIPVRDYTEGAVIMLTKDGIIKKTALSQFKHVKKMGILAINVKDGDMLKAAFRADGAQELLIATVMGRGLRFRADSVREMSRHAAGVKSIKLLEGDSIAGAIIATETNGEKLLIVSENGYGKC

SEQ ID NO: 95332 - protein, 216 aa, Unknown
  Obtained from environmental sample
  DOMAIN (44)...(206): GrpE
  misc_feature (1)..(216): Xaa is any amino acid
MLKQDTQSEKTNDNSAEIDESSTENTAVSQTEQDVSEQSAEKDAKADGAADKPLTPEEKIAELEAQLAETRDQLLRKAADFENFRKRMNQEKQNAIEFANQSLLLDIIPVIDDFERAIQSGEKAADLNTFIEGVKMIEKRLTGQLESKWGLKRFNSAGEPFDPNKHEALMMDKSPDVTEAVVQEDLVKGYLLKDRVIRPAKVKVLMPEATPSAASE

SEQ ID NO: 95333 - protein, 98 aa, Unknown
  Obtained from environmental sample
  misc_feature (1)..(98): Xaa is any amino acid
MGKIIGIDLGTTNSCVAVLEGGEPVVIQNSEGGRTTPSIVGFTSKGERVVGAPAKNQMITNPENTVYSIKRFMGRRFSEVSNEMKLVPYRVAEQGDDV

SEQ ID NO: 95334 - protein, 227 aa, Unknown
  Obtained from environmental sample
  DOMAIN (13)...(216): Binding-protein-dependent transport system inner membrane component
  misc_feature (1)..(227): Xaa is any amino acid
MFNYDVIFRTGAIPHAFFISVARTVVNLGTSVFFTAMIAYALSRREFVLLKPFTLVLILSMYINAGLIPTFLLIKNLGMYGSFWVYIVPGIVNAFNFVVMRTYMRTIPESIIESARIDGYGDFYIFMRIVFPLCLPVLATIGLFVAVGSWNAWFDTMIYNAGKVNLHTLQYKLMEYLQSSQSQSKTSGDAGAMALAAAAGSGSGMVTPMSIRAAITVIAAAPILMIY

SEQ ID NO: 95335 - protein, 218 aa, Unknown
  Obtained from environmental sample
  DOMAIN (1)...(214): Binding-protein-dependent transport system inner membrane component
  misc_feature (1)..(218): Xaa is any amino acid
TSLGFVTAIGFALLLNEVRKILFKRVIQTISYLPHFLSWVIVTGLVSSMLTPDGGAVNNALMALGLIKEPVHWLAEKNYFWGIIGATYVWKEVGWNTIIYLAAIAGIDPNLYEAAAIDGCNRFQKMWRITLPCIKPTIIILLIMSVGHILDAGFELQYLLRNGPVMDVSDTIDVYVLIYGLKNFSLGSAAGMIKNIVNISLIFIANEIAKRAGEERLI

SEQ ID NO: 95336 - protein, 95 aa, Unknown
  Obtained from environmental sample
  misc_feature (1)..(95): Xaa is any amino acid
MLFSILAGVKFAFLFLIVGLLSIAYNRFLKGLPLVGNFTVAFLSTTPVIIPIINFGLPQRELSILVFFAFMLNFMREITKDIEDMEGDKSQNLKT

SEQ ID NO: 95337 - protein, 164 aa, Unknown
  Obtained from environmental sample
  DOMAIN (1)...(108): Resolvase, N terminal domain
  misc_feature (1)..(164): Xaa is any amino acid
IDHGVSGTKEPEKRQLGKLMEKLKDGDLIIASELSRLGRSMYMIMRILEYCMKNGIKVITVKDNYELVDNIQSKVLAFAFSIAAEIERDMISRRTKEALSRCKLNGIKLGRKPGKAVKVKLTGHEEEIRDMLRKGKNNVEIGKWFGVHKKTVRIFIRERLSQLE

SEQ ID NO: 95338 - protein, 274 aa, Unknown
  Obtained from environmental sample
  misc_feature (1)..(274): Xaa is any amino acid
MEIKDDFYLLKKIPNVLRARGFRLYLSNGKRLVDLWLNGGAAILGHTPPNLLREMKNTASRGLYAPFPHFTEDRFIKALSKFFPEYSFRLYAAPPPELVSLFNCGAAVLWRPYINAELPFTVEDTPILVPVLPCIHTWRNNIPAGLCVTAAQTKNAEKSLFEQLPASDILSPVLLAMAVRGIYDLLAYPQRGKPVLPRTTKALKNNKNWQRRGIYLYLNKEPSPETWRILFRQFLDAGFLLPPVPSHPVILPGELSPGEDAKLANILSANIVYY

SEQ ID NO: 95339 - protein, 317 aa, Unknown
  Obtained from environmental sample
  DOMAIN (61)...(188): GTPase of unknown function
  misc_feature (1)..(317): Xaa is any amino acid
VLVEVLAAAEIYLDYSEDEFLSPDEESAGTLPNKTLAEKAAKRLKILSELWSRERIYAEGALAVLAGMPNAGKSSLFNYLIREDRSIVTDTPGTTRDWIEAVISLDDIPLRLADTAGLRKMDASGSKNVDEAERIGVERSIELLEKADLVLYVVDGIKGLTEEDREFLVKHSKMQKEKPLITLWNKADIANPSPSVFPDEIIKAQFLPVSAKTGEGIPELLRLMVSLLEKSPISSFSSSTEDQLLEAAGPGNIRQKELIDLAVGEIEEALVMARQGKSLDLIAPLIRSAVNALGEITGEVSNADILKVMFSRFCVGK

SEQ ID NO: 95340 - protein, 402 aa, Unknown
  Obtained from environmental sample
  misc_feature (1)..(402): Xaa is any amino acid
MTLYAKWRESEEEIEIEPGDPYIRSVEIEVISPITGAVPNTTAKAVPAGNVGYTCGKVEWTPTVSNVFDKNVVYTATVTLTAKKNYTFENLDTATINGNSVTIPHNITTTVTLSYEFPATSEKIITNINVKTDPGNMTYTHNQTLDLTGLKITLTFKDNTTQDVNLGEYGISAEPADNAKLSYSKHNSTRVKVMVGDFSAYTINTLTLQKAIPTIPPPSAALITYGMKLSDAELTSTIASTPPGYFAWEDSTIMPTVINQGYSVVFTPEDSEDRENYNYTSIGWIYNNSKIVNDINITVAPKHITVTPNEGQIKLTTQNDPVFTYKTSEDLINGNYFEGSLSRDSLNNNEGEYNILKGNLSAGSNYVIDFTDGVKFYITTVVAKIGDKEYPTLNAAIADAAN

SEQ ID NO: 95341 - protein, 227 aa, Unknown
  Obtained from environmental sample
  misc_feature (1)..(227): Xaa is any amino acid
MRTQFSKIAFLAGFALAMSFPLSCSGDDGGGDNHGTGTPSSSDNGGSSSSGVSSSGGSSSSVSSSGGGGSSSSDVSSSSSVLDDSSSSSVGGDIPIAGCPGSVTGSNTVACGGKTYATVEIGGKTWMAENLKYNAVGSKCGDESTGTLKDDNTSACDTYGRLYDWSTAMALPSKCNSTLSTSDAGCAIKTPNHQGICPDGWHIPSNAEWDALYRFADGTSGTDSPYD

SEQ ID NO: 95342 - protein, 86 aa, Unknown
  Obtained from environmental sample
  misc_feature (1)..(86): Xaa is any amino acid
CLQVDSRGSHFLIPAYGAQGGAASDAALLLKNGNGGVVNASRSIITAWQKEDGGKEADNAFAASCARRAVIKMRDDILSEVKSGKN

SEQ ID NO: 95343 - protein, 451 aa, Unknown
  Obtained from environmental sample
  DOMAIN (307)...(357): Flagellin hook IN motif
  misc_feature (1)..(451): Xaa is any amino acid
VERIERIRDELLDKRIVAQASGEGYWAVRDRYIQEMGQFYLETGANSVRSKMDSFWAGWDELSQNASNMESRHVVLQRGKTLIDGIHNHFNNLKRLQTQVDEDVQINVERVNEITRQIAMLNKDITRIKAIGDNPNDLMDRRDLLVDKLSSIIDVTVNQLDHDEFMVHTSGHVLVQGQNARQFDMRKDMDTEGYAHIYWHDTKDQIVFTKGSLGALLELRDVTIEDEIQSLDNMTMNFTDLINEIHNAAYGANGTTGNNFFSEYPFVTNVNGNYDRSGDGVFDSSYIYRINGQNKLESQAQPGFEGIITLSGADGDINVPYYPTDTVTDIITRINNSGAEVVARLNREGKLSLKGTPAETIEGRRENPDFVIRHVEDSGHFLVGYAGVLLASGAEGAFSWDRADAVASLRGGAEDYALAPVAHPSGWIEVNPALLKDQSSVAAGFGYNGRA

SEQ ID NO: 95344 - protein, 280 aa, Unknown
  Obtained from environmental sample
  DOMAIN (27)...(77): Flagellin hook IN motif
  misc_feature (1)..(280): Xaa is any amino acid
VFDSSYIYRINGQNSLESQAQPGFEGVITLSGAEGDINVPYYPTDTVMDIITRINNSGAEVVARLNREGKFSLKGTPAEMIDGRRENPDFVIRHVEDSGHFLVGYAGVLLASGAEGAYSWDRADAVTSLRGGAQDYALAPVAHPSGWIEVNPALLKDPTSVAAGFGYNGRAANPGNGDAAAEMALIRNSPVMVGKLATFDDYFADSVGRIGLLGEQAASALETENKIMKYLTDWRSSISGVNINEELSNMLRYQQGFNAAARFITTVNSMYDTIINRMGV

SEQ ID NO: 95345 - protein, 406 aa, Unknown
  Obtained from environmental sample
  DOMAIN (28)...(163): Bacterial flagellin N-terminus
  misc_feature (1)..(406): Xaa is any amino acid
MKRISSDMSTVDMQFHLKRKDEAISNIQNKIGSNNRLNQLRDDPIAASHAVRYESFLTRLDRFETNTKYAMEHFSNTYDYLNEANAILQRVRELAVTGANGVYSQDEHKIMAVEVDELLRELVAISNKTGPDTKQAFAGDKVFTEPFRVIEGRVDGGDETMIVRVEYRGAGATRKAEINDRTFIELDLGGDDAFWAERMKIFSSTDATDYRVQQAGAFYIDGVEIQAAPGDTLPAIVAKINDSAAPVKAYIDPDSRGLVLEGTTPHLMRAEDKEGGATVLRDLGIINGNMQNNAPNWSNTARVHGGSIFDMVIRLRDGMLRGDSEFIGSQGIAGMDLAVSNIAVKMADVGSRQERSEMAWQRINREIPDITNMLSRETGLDLADAATELRMLQLAHQASYRRRQKL

SEQ ID NO: 95346 - protein, 65 aa, Unknown
  Obtained from environmental sample
  misc_feature (1)..(65): Xaa is any amino acid
MVNMAGEDCVALGSDFDGISAAPEGVTGSDFYPVLEGELKSRGYTDTRIEKIFNKNFLRVFKEWE

SEQ ID NO: 95347 - protein, 397 aa, Unknown
  Obtained from environmental sample
  DOMAIN (87)...(239): Peptidase family S49
  misc_feature (1)..(397): Xaa is any amino acid
VSVRRKFLILAILCLISFPAFSQAYLELNLNPAYSGNPFAKTKQPLDVFRVIERASNDKSIKGIVLNIASVPKDKCYLWELRSALEQFKANGKKICAYISNANIDVYCLATVADKIVMDDLGNLNIMGYAIGRGYARHALDKLGIGVRELRYFEYKSAGETFTRDSMSEADRRQYNDYLDDTFNLTRDTLKKARNWTDEKFNAVLNKGFLYSARSAREDGLVDYAGRRDVMYQALMEIEGTFVGSFKLYGASDSSIMGFNNAYSLPKARSFFKKRPPLVAVVYANGETSMRQGMEAVKLAKIIIELGQKTEVKAIVIKVNSPGGSAEAADLVDNAVRYAKQFKPVVVSMGQVAASGGYWVSMNASHIVANPYSMTGSIGVIGNWFYDKGLTANLGLT

SEQ ID NO: 95348 - protein, 449 aa, Unknown
  Obtained from environmental sample
  misc_feature (1)..(449): Xaa is any amino acid
MAVFGKKEGGLMDVIRCDEESYLIWKWRPAGADVNETKKENAIRWGSSLRVKDGEVAVFVYKQKDGAMQDFIEGPFDETIKTANFPILASIVGIAFGGGTPFQAEIYFINLAGIIQIKFGVPYFDVFDPRFLDFAVPVAVRGTISFKIADFKAFIKLHRLINFDLEAFKSQILDAVKKYVKGVVTNIPSENGIPVIQLERKILQINEIIEAYLKPRLQNDFGVLVSALDIGAIEADKESEGYQSLMSVTKDITAQTTQTQAAVNVKNMMDMQQINADNMEATLAIQREEMQHAQRMQTDAANFAVHQLNQQTDVAKAGAEALGQMGAGGAINMGAGGGMNPAAMMTGMAMGGAMGQQMANMMGNMTQGINQPPAGVMPPPPPIVQYNIAVNGQSTGPYTFDQLKQMAAQGQFTPQSLIWKQGMSGWSTAGTVAELLPIFAQTTPPPVPQ

SEQ ID NO: 95349 - protein, 189 aa, Unknown
  Obtained from environmental sample
  DOMAIN (6)...(147): Ketopantoate reductase PanE/ApbA
  misc_feature (1)..(189): Xaa is any amino acid
MKINSALIAGAGAIGLCVAETIYKYDPHCVSILAKGERLERYRKNGLWVNGEKLDFRFSYGEKADFIIIAAKFHHLNEIIEDIGPSITGDTIILSLLNGISSEEIISEKLGVRLPPLAMVLGTDAFHEGGKTSYTQKGFIHFGDAEGKNGEREESIAEFFTRCGAAFVLEPNMKRKLWYKYMINVGANQ

SEQ ID NO: 95350 - protein, 203 aa, Unknown
  Obtained from environmental sample
  misc_feature (1)..(203): Xaa is any amino acid
MKIVEKYSHLNGLEFLLVHKHGLWKEIENVIKIVDAEKCKTKVSKEKTMKGVLLYSPIEMNNAFKKELSKYHWEESRVSYWVTKDEKLIRKTLTMPPDIQKQEIESQGEIAIRSYNQTDFVKNRVALEVQFGKYAFVAYDLFVKHLAFYVGDHIDVGVEILPMKTLQSQMSSGPSYYEGELYNVVRQGRGVPAVPLVIIGVEP

SEQ ID NO: 95351 - protein, 126 aa, Unknown
  Obtained from environmental sample
  DOMAIN (1)...(123): NADH-ubiquinone/plastoquinone oxidoreductase chain 6
  misc_feature (1)..(126): Xaa is any amino acid
MALVLNMLSLAGIYTLAHSTFLGVLQILVYAGAVMMLIVFVIMVLNGARETRLPRMDKLGAYSIFAVFCGALLLLAAVYNANLQENPEAVAGSVAMISEHLFDTSYRISMNIPGGYFILFELVGFI

SEQ ID NO: 95352 - protein, 379 aa, Unknown
  Obtained from environmental sample
  misc_feature (1)..(379): Xaa is any amino acid
MGWDAFGLPAEQYAIQTGTHPATTTQKNCDTFRKQIKGLGLSYDWEKEINTTDPKYYKWTQWIFSKLYNTWFDAEQNKGRPISELPKGENIEEKRLAYYANAQVWWCRKCKTVCANEEVLADGSHEKCGTFEVEHRNLKQWLLRIPLYAERLLSGLENLDWPAGIKDMQRNWIGKSKGAEVDFAVPAGKLRVYTTRPDTLFGATYMVIAPEHPQTASLTTPEQKEKVEAYVKAAALKSELDRTELSKEKTGVFIGSYAINPVNGKEIPIWVADYVLTGYGTGAIMAVPAHDTRDFEFAQKFDIPVICIMEPDNSCPPELKEKVLSGEACWTSDGKYICSSNDELNLNGLSKKEGIAKITEWLEKKQIGKATTNYKIRDW

SEQ ID NO: 95353 - protein, 471 aa, Unknown
  Obtained from environmental sample
  misc_feature (1)..(471): Xaa is any amino acid
AIRGAFDDEYSPIGYAVDETGQYYFEYRIYQKDDLQNHDTLDWEKYYLGTSTLRTVTWTIYLTNNRNSTTHATAPGTILPDGVYWIDIRVYDRGNTKYEEGTFAFTVDALDPVLGETITVTPTSAVNIANDILTVFDKPFTLKGTAADGNFRWLKIVVDGKDQSNGTVTGISSTTTPTVPVVDSSGNTVQVPNYDWTWTIPQAVFDNDTLYPEGTRTVTITAYDLANKSVYTQFTFVKDKSPPKVAYNNIAATGGSRITDDVAVIRGSFNDDYTLIGADKTKGTGADADKYFYEYRIYRAAQSPAPGVDTDPTWEKSFFADNGLKSVGFNIPLTGSTAVKRFWNGTVGGQSTNIADIPDGEWTLEIKVADRIGNATLISDSGCKVNFYVDRKAPDLNVSKSDGNESFYSNLSPDSPLNTGNLFVLTATVTDGDYDKVTVKVNDWPEETITGGTYNQTSGVLSGWTWSLSKT

SEQ ID NO: 95354 - protein, 289 aa, Unknown
  Obtained from environmental sample
  DOMAIN (3)...(111): Type I restriction modification DNA specificity domain
  misc_feature (1)..(289): Xaa is any amino acid
AYEEYLKYQKPLSDRTIMVSINGTIGNVALYNGEKCILGKSACYFNVNEDVDKNFIKYIVTDNDFQNYISQFANGTTIKNVSLEVMRDYPFSLPPLLTQRAIAEVLSSLDDKIDLLTRQNATLEALVQTYFRQWFVEKASEEWETMRLGDILESIESGSRPKGGIDPNLLDGVPSLGAESINGIGVYDFSKTKYVTREFFSNMRRGIVKSHDVLIYKDGAYVGKKGMFGNEFPFTEFAVNEHVFILRSNARASQIFLYFLLQEEELAQLNSNSAQPGLNQQAMNAYEIV

SEQ ID NO: 95355 - protein, 151 aa, Unknown
  Obtained from environmental sample
  DOMAIN (9)...(148): Chorismate synthase
  misc_feature (1)..(151): Xaa is any amino acid
MSSQYGKKLRLSIFGQSHSPAIGVNVDGLPAGIKIDIDELKAFLKRRAPGQNDISTVRKEDDAPEILSGLAGGVTCGAPLAIIIRSEDARSADYRELRDIPRPSHADYAAHVKYGGYQDVAGGGHFSGRLTAPLCAAGGVCLQVLRGLGIH

SEQ ID NO: 95356 - protein, 61 aa, Unknown
  Obtained from environmental sample
  DOMAIN (7)...(61): Shikimate dehydrogenase substrate binding domain
  misc_feature (1)..(61): Xaa is any amino acid
MKKSFGLLGEKLSHSFSPLIHRQLGDYDYLLYEVPPGSLDSFMTESRFDGINVTIPYKQAV

SEQ ID NO: 95357 - protein, 381 aa, Unknown
  Obtained from environmental sample
  DOMAIN (7)...(85): Chorismate mutase type II
  misc_feature (1)..(381): Xaa is any amino acid
MDLQDYRQQIDKVDDELLTLFKERMCISRQISQYKKEHNLPVLDAAREREKLVDVCGKAGEEIRSYAHILYTTIFELSRAYQWGFMNAESDLNRIINEAVEHTDRLFPQHALAACQGVEGAYSQIACDRLFANPNILYFTGFDGVFSAIRDGLCQYGVLPLENSTAGSVNMIYDLMMRYSFKIVRSVRLKIDHNLLAKAGVKKEDIREIFSHEQAIQQCAGYFKGFGKGVKITTVANTAEAAKMVAESERNDIAALSSRACCDLYNLKCVESSVQDRGNNYTRFICISKNLEIYPGADRTSIMLTTAHKPGSLYKVLGQIFTLGVNVVKLESRPIPDRDFEFMFYFDLETSVYSKEFSQLMCELENICEEFHYLGSYTEIV

SEQ ID NO: 95358 - protein, 390 aa, Unknown
  Obtained from environmental sample
  DOMAIN (179)...(353): von Willebrand factor type A domain
  misc_feature (1)..(390): Xaa is any amino acid
MRTVHFAKIAGIVLLPVFLLSCFMAAGDAGESSGGGGYGWNSGPPSYPYPSRPDGNDYDTDYDSKEEFDPGSFDSIKDNPFKRVQDYPLSTFSIDVDTAGYSITRGYIEYGQLPPKSAIRIEELINYFDYDYAPPPPDEEKPFAVHNEVGVCPWNAEHLLARIAIKGKEFPVGERPRVNLVFLLDVSGSMDAPNRLPLVKSSMKMLVNELKGTDKIAICVYAGAAGTVLQPTSCDNKEKIIAALNGLKADGSTAGGEGILLAYNLAEQNYNPLAVNRVILCTDGDFNVGVTNRGELTDLITEKAKTGVYLTVLGFGMDNFNDGMLKQLSTKGNGNYGYIDTIEESKKILVEQLSGTLVTIANDVKIQIDFNPATVGAYRLIGYENRVMRN

SEQ ID NO: 95359 - protein, 259 aa, Unknown
  Obtained from environmental sample
  DOMAIN (33)...(212): Mur ligase middle domain
  misc_feature (1)..(259): Xaa is any amino acid
MIIVCTVVIIFIAFLAAERALIRYARKQFALVIHVNGTRGKSTVTRMLHALLRNQGMAVFAKTTGSKARFLLPDGTEKPVWRFGPANVREQRNMMILGAFSGKPKKRALVFECNAVEEELQRVSMKWLKPDITVITNVRKDHIHELGTPEQAAAAFAEAIPDNSVLVTSEGNFKDTWETAAAQKKLRFFYIAPKEAEKRAFPENAACVLGVADYLGIDRTRALNSITEYEPDAGAFGLYSWKTNSKSVFFADARAANDV

SEQ ID NO: 95360 - protein, 148 aa, Unknown
  Obtained from environmental sample
  misc_feature (1)..(148): Xaa is any amino acid
IFPAILLIVTTHPSEFAASLNIIGVPYTAAYSVSLTLRYIPDIQRDFETITQAQQARGLELSKKASWFKRLKRTAPLLLPLIFSSLDRIGVISRAMELRGFGKNARRTWYSEKRFSRRDKLVLVISALFFAAGIWLTFRGGSRFYSPF

SEQ ID NO: 95361 - protein, 232 aa, Unknown
  Obtained from environmental sample
  DOMAIN (9)...(232): Fumarate hydratase (Fumerase)
  misc_feature (1)..(232): Xaa is any amino acid
MKEINDRQIIDLVEKLCIDANCYLNKDIEQELSKRLESEESPLGKNVIKTIIENAKVAREDKVPICQDTGMAVVFVELGTGVRFSGDLEEAINEGVRQGYKKGYLRNSVVRDPIDRPNTNDNTPAVIHYSVTTGDKIKISVAPKGFGSENMSALAMLKPSDGIEGIKSFIVNTVSKAGANPCPPIIVGVGVGGTMEKCALLCKKALLRPVGSCNADAFWDSVEKECLEKINL

SEQ ID NO: 95362 - protein, 271 aa, Unknown
  Obtained from environmental sample
  DOMAIN (52)...(120): POTRA domain, FtsQ-type
  misc_feature (1)..(271): Xaa is any amino acid
MSIEYYYEASDTVIAKKKSNEKIEKGLKRLLIIAVIILAAELIWLFGVSPFIPFSSVEVHGFSGLSRPQILSIAGIDDSSSFFSTNVNVIKEKLSSHILVESAVVIKRFPDKLSIFLNPRQPAAVTLANINSKQVVIYIDRQGVFYKIESGDSREKTDIPVISGIENPRLNMRLPSALVPLVENLDKISMSSPELLSAISEIRIERKAWDGYDLVLFPVHSGIRVRVENNFTEDTLRYMLLMLNVFGTDDKRPQEIDFRSGIGSYKIEELS

SEQ ID NO: 95363 - protein, 421 aa, Unknown
  Obtained from environmental sample
  DOMAIN (209)...(381): Cell division protein FtsA
  misc_feature (1)..(421): Xaa is any amino acid
MSNGIIASLDIGSTYVRVIVCERDAGGRLKIIGSGCRPSTGLRKGVVVNIEATVHAIEAAIEDAEMMSGLEVNDCWTGIGGNHINGINSRGVVGVTGKKRDTREREIGQEDIDRVIEAAKAVVIPTDRQILEVIPQNFKVDDQKGIRNPMDMLGVRLESEVHIITCSVTGGQNLIKCVNRAGFRVNELILQTLAAGRAVLTQEEIDLGVALVDLGGGTTDMLVYVEGAPYSTYTIPAGGTQVTSDISIIKNISVDNSEKIKIDAGCCWDTMLDDDETVIVPGVGGRPPITIPRSQILTIIKPRMEEIFKLIKQHLDSLNLPRPLGGGVVLTGGGAQLSGVVDLANNILKLPARIGSPIPSQDLTGLVEEYRTPSYATVIGLALEGNRRAGVDSGERGERYGEKKNEALIGKLISWLKEEFA

SEQ ID NO: 95364 - protein, 86 aa, Unknown
  Obtained from environmental sample
  misc_feature (1)..(86): Xaa is any amino acid
MSEKEKFITLIEKFIALTAVRLSDDVMARLEEMRKAEDSPLQKSIYDSYFENLALAEKLNRSCCQDTGMLQFFIKAGTASLIGHTL

SEQ ID NO: 95365 - protein, 237 aa, Unknown
  Obtained from environmental sample
  DOMAIN (1)...(236): Domain of unknown function (DUF323)
  misc_feature (1)..(237): Xaa is any amino acid
MGSPAYETGRDQDEDQHQVTISGFYMGRYEVMQKEYQRIMGTNPSNFKGDYLPVENVSWYDAIEYCNRRSQREGLTPAYTIDKKQRDPNNKNHYDTVKWTVTWNKNANGYRLPTEAEWEYACRAGTTSAYNTGANISDDTGWYDANSGGKTRPAGQKTANDWGLYDMHGNVVEWCWDWYGAYSSGAQTDPAGPSAGDNRVKRGGCWLDNASSARSVGRSSFHPNDGSYYIGFRLVRP

SEQ ID NO: 95366 - protein, 318 aa, Unknown
  Obtained from environmental sample
  misc_feature (1)..(318): Xaa is any amino acid
LARDCVSGELTAPSAAWRGVTFAPLRASMTLPHRAVFVMGLCAAEFPGTNEAPSWDLLPSKRIVGDSDRVRDNRFAFLELIHAAKERLILSYRARDMQKDEELQPSSVVSELEEYLIGQGVVDGAGNSRKCSARREIPWVVHETLNKAKEAGRKHGSWDKEQRILAAESVKERVRHRHDLSVNRDLPPRADTPIKTTDIWALKKFLSNPFEYRLSMTLGTRDDDDAGDMTATDEPLDSGYKISALKKQVWIKILNALFTTGAADIDTTAVDAANDVYDGHIDSGQAPEGHICRMDRNNLIDWAKECAAASVRLLDNDM

SEQ ID NO: 95367 - protein, 307 aa, Unknown
  Obtained from environmental sample
  misc_feature (1)..(307): Xaa is any amino acid
VALGPYTEKAAGELKKRIREGIAAQISEYRGDPEKRVLTAHLEDCLNNMHEAFIGTIHSVCLRLLQTWPFETGVHFDTAMIEDDNEGADAALRASMRTDWEDESGGLPQGLKALEERGVRLEKDKHIKLIIKTALKIMDGDGAELDDAPAGWMELEAAIDKINNAADAESEDLTRKLLYAFINRAAKKLAARYDAYKRENGLVSYDDMLRLMRDAVGSGDGEMLKRLRKKLRYGIIDEFQDTSPIQWDIFRKIFLEDADGTKIYIVGDPKQSIYSFQGADINSYISAKNAVAARNGTVYSLKNNFRS

SEQ ID NO: 95368 - protein, 214 aa, Unknown
  Obtained from environmental sample
  DOMAIN (1)...(150): RNA pseudouridylate synthase
  misc_feature (1)..(214): Xaa is any amino acid
LIAINKPAGLAVHGHDSLDDMVRSYLAEKLPASLSFKPGPLHRLDKPSSGIVVFSSSIEGARLFTSLMREHKVRKTYLAIVEGELKSEEIWQDELVRNKEIKKTFVSPNTDGGKTAITKAVPLAADGNYTLIKTEIATGRTHQIRAQAAFHGYPLAGDKKYGGKKFGKGSGFFLHAWKLEFLEYTITAPLNGIYLPKSISSNLQRTLKAFCGSF

SEQ ID NO: 95369 - protein, 462 aa, Unknown
  Obtained from environmental sample
  misc_feature (1)..(462): Xaa is any amino acid
LFLRVRRDRERPKDIVFLDVDDNAIAYNGVFPWPRSITADALLRLKEYGARAAIFDIEYIDRGPQGVDTIYLNQGLPADFGRSFSEINSAASDIFSALSSRRLSRDDINEYSLAFSNLVRTEQNSLFTKAQSIARDNDQYLVQASALFGKSWATLNLRLKPLEGEQAERRPMAEERFSYPIAARANANKGKFIDVLPALPAFAAAVKGAGFTNVEIDRDGTRRRIDLAQNIYDHWYLQLAFAPLIDYMGSPEIELGNRKLLIKNAKMPGSKDISIPLDGNGRMLLDWSREEYKDSYDHISFYEFSLLEDLEAELEQYSRAVGDTDIPFFAQFDSSLSRIPFIAAELASLFDDIREYRLAALENCSDEYFRDYIDRRDKTRGLIRELLAIDPGARIRAMRSDLAESHPEFAAQISDEAEYIMSLAEALKVDLDRYESITELIKNKVKDKFCILGRVDTGTTDI

SEQ ID NO: 95370 - protein, 307 aa, Unknown
  Obtained from environmental sample
  misc_feature (1)..(307): Xaa is any amino acid
ATEVFEEIEQRRVDPGLLERVEGNNFRTRIYPIPAGGTRTISIGYEEELALEKGLLYYRLPMAYADSIKKFSVKASVWNSSQKPLVPESGNELSFDVSGDNYVASFTRENYRPSQALNFALPAPTNIPQVIMQSAQGSHYFFASVAPRMQAQKKQWDNDLAIIWDVSLSGSQRNLQREMEMLDVIFAEKKDAKASLYFLNNTFKKVAKGNWKELKSILEKAVYDGGTDFSKINLKEIEGNEILFFSDGISTLSNADFIEDTKVNRPMHCIVSSPKSDYSAMKLIAGKTRGKFINVNALSPEKLKDEC

SEQ ID NO: 95371 - protein, 281 aa, Unknown
  Obtained from environmental sample
  misc_feature (1)..(281): Xaa is any amino acid
TGIRGVHLVDEACPPASLLRFALLNREAGLPLVFWGNIRFEKAFTPDVAAILAAGGLMGVSAGIEVATEKGLQRIGKGVDLQGIVDICAAFKEAKILIHAYCIYGYWDQDEQEIADSAEVLRQFFAEGLLDSAFWHQFTLTKHSRVYAEKQKGMYPLLKPDSDPLCGKTAKSKGKIFALNDLSFAGEKKFGRYADPLNRLLSEWMRGDTSWPDNGELLKPKVVPDLIETLAADCLRRQDKAHKTLPSALSKKSCVIFLASNAIVRSVAKRLELRWYWHFRD

SEQ ID NO: 95372 - protein, 391 aa, Unknown
  Obtained from environmental sample
  DOMAIN (162)...(195): Tetratricopeptide repeat
  misc_feature (1)..(391): Xaa is any amino acid
EFSKEAPDAPHDKPSDPRDPDVPLNISEVSKIGYRLLRENKLRDAIDCFANILKIDEDNNYALVGMGDATRKRGSCREAAVFYRRCLEHHPGNNYALFGLADCYKALNQYHKAIEIWEQYLLHDDKNITVLTRVADAYRKVRDFKNSRAIYLRVLEMEEANPYAIIGLGHLYYDFKEYKDALFYWEKMLKLNPANVDIRVLTSIGNCHRKLKTFAEGIPYFEKALQKETDNFYAVFGLADCYRGLNQVEKSLSYWLRILEQDPRNKMILTRAGDAYRNLKDFDNAKTFYEKALNIEFDTYAVMGLALVTKEQGKYDEAIISFKRLIQQDSKNYRLYYELADCYVKTGDKRSAVETLETFQRLGIKNQKITEMLESLNEPHKGEKSNTANTQ

SEQ ID NO: 95373 - protein, 99 aa, Unknown
  Obtained from environmental sample
  misc_feature (1)..(99): Xaa is any amino acid
MISLSGLTLTEIEELLPTLPRFRAAQIFKWIAKGVNSLEEMTNIPVSLRGELSADFRLYSSKVDSVHEDGETRKYVLSLEDGAKIESVLLNDGKNRLTA

SEQ ID NO: 95374 - protein, 124 aa, Unknown
  Obtained from environmental sample
  misc_feature (1)..(124): Xaa is any amino acid
ISGPGLPLPEEGVYGTRPGRVSGEGYSSVLIEGFKEETVKWTETDFRFTAKGKTVYAFLMKTPQNRCSVIRSFKAEEKITSVRLLGFGSVPFNWNYGVLTVKLPEQLPTPYLNCLAIELSEKTG

SEQ ID NO: 95375 - protein, 453 aa, Unknown
  Obtained from environmental sample
  DOMAIN (317)...(384): ACT domain
  misc_feature (1)..(453): Xaa is any amino acid
MIVMKFGGSSVANADRLHHVTKIVKAHLDKKPILVLSAMGDTTDHLLEAGETALKNGIVQVEKIEELHLKTITEMELGDGAFGGINSILTELRNLLMGISLIRELTGKTKDYLVSFGERLSVRIAAACFNSMGIKAKAVDAWDAGFVSDSNHTSAELAEESWHLIPEKLLPPVEEGILQVVTGFIAKDKEGNITTLGRGGSDFTAAMIAAACGAAELQIWKDVDGILTADPRIVSGARVVDTITYEAAAEMAYYGAQVLHPRAMQPCMKTGTPVLVKNSYNPEAPGTRIVSSIVPSFEGKRSPIQSITSRKNITLVDIISSRMVGQHGFLAEVFACFARHSVSVDMVATSEVSISLTLDAFHDLTELKKDLSRIAGVEIKTGKAIVSIIGDVGRSSEILSRSFKICKLLGVQVQMVSQGASKINISFIVDDNEATDVIKGLHADFFDEFKPAG

SEQ ID NO: 95376 - protein, 258 aa, Unknown
  Obtained from environmental sample
  misc_feature (1)..(258): Xaa is any amino acid
MEAKLAEMQADYQKARAAVDPEILKLCEEAAEVAFQEFKSVHGIHPVELIKKLGERCKEDPYAIDPNSPIFQKAAELKAQLQAVQKETVETIKSVIPPKAPEHQKKLRDNALQAVYRWVAAPDAENSQKCMDTGNECPDTPAGLLSLCAFWAYGDLLPMGEQTVPTPPGLAANGLCQTLLLCALHPGGTRKLKERYLEYFRLGVEVLTGADNWESSLSAGKPPHEESFSETAPKAKAAPVGSADQKTGYKRWKPGNTL

SEQ ID NO: 95377 - protein, 67 aa, Unknown
  Obtained from environmental sample
  misc_feature (1)..(67): Xaa is any amino acid
MELPYTYWEGEGGWLVGYLNEYPDHWTQGKNIAELEEMLLDLYINFQEEAKRAPKQVKKTGVLRIPA

SEQ ID NO: 95378 - protein, 385 aa, Unknown
  Obtained from environmental sample
  DOMAIN (306)...(385): Helicase conserved C-terminal domain
  misc_feature (1)..(385): Xaa is any amino acid
VNSFQYIAVCGYLVYTGQIMSDGADSFTSLGIEELLTDKLKERSIEKPTAVQSLVIPRLLAGKDTVFRSATGTGKTFAYLLPALQRVACEGGSLLICAPTLELCSQIKAEVDFLTQSLPASCRNTALLIGSVKIEKQIENLRKAKPVVIVGNPGRLLVLAKMKKLRVNNLRFLILDEADRLTAPECLEETKELLAIIESVTKRSSSREPANSVQSRLCAAACSATVGKKTSAQLGSLFESAEIVECADHEILRERIEHWALFSEKRRKAQMLRSLLSALQGKSKKARVKALVFTSRGDEADLILSRLLYHHVSAAGLFGKVNKKPQASAERREALDSFREGRVVVLVSTDLAARGLDIPDITHVIALDVPADGEVYIHRCGRTGR

SEQ ID NO: 95379 - protein, 771 aa, Unknown
  Obtained from environmental sample
  DOMAIN (144)...(225): Cache domain
  misc_feature (1)..(771): Xaa is any amino acid
MQILFVAIAFGLMVFASYWFVSDLERKHLQRDVKNAISQTEANIIADLKEPETILAGFSETVRGFILRGDNEKRVQEYIFFINNYMHDNEKNRLLGVLSFYGYFDIFGKKYFTESLDWIPPEGYDMESRPWYIAAVEANGDIGVTAPYKNLRMGDLSVITFSRRIFNNEGEALGIICLDIKLDRVSQHAIKTQFAENGYGFLLSDSRDIIAHPEPSVIGTNFRNVRSTIASYEDELVENGYVNEVIATDYRGIKSIVFLERLENGWYMGVVTPRDKYYSSTRSMALFLTVMGALLSTGLIAILLVMFNELNKENEKSLAITKKHADAEAANAAKSAFLAKVSHEIRTPMNAILGITEIQLRNGSLPNDTRNALDRIYNSGYLLLGIINDILDLSKIEAGKLELSPVNYDVPSLINDTVHLNVMRYDSKPIEFDLQVDGNIPTTLFGDELRIKQILNNLLSNAFKYTNSGKVTMSVTCEAKQGEDNVIILVFRVTDTGQGMTAEQLNKLFEEYTRFNTEANRKTVGTGLGMAITKYLVRMMNGTISVESEPGKGSVFTVRIPQGTVDGSGVLDRELAENLQQFRLGKAEQMKKAPQIIREYMPYGKVLIVDDVGTNLYVAKGLLAPYSLTVETVRSGFEAIDKIKDGAVYDIIFMDHFMPEMDGIVTTKKMRELGYTRPIVALTANALAGQAEMFMANGFDDFISKPIDIRQLNAVLNKLVRDKYPAETIESARLQKDSGNFVNGTIANGASRPSINPELAKMFSWTLKSRR

SEQ ID NO: 95380 - protein, 779 aa, Unknown
  Obtained from environmental sample
  DOMAIN (683)...(779): Response regulator receiver domain
  misc_feature (1)..(779): Xaa is any amino acid
MAIFLTALGAALAAILITILSRIFTEKNKADERMRLMFDSMPLGANLHNRNYKYFDCNASAVNMFGLSGKQEYFEKFFQLSPEYQPDGELSSNKMAVVTDKVFAEGYHRFEWMHQNLNGEPIPCEVTLVRVEHNHESMVAAYMRDLREIKEADERARIMFDATPLGANFWSQDYRVIDCNQESLRLFDISSKQEFIDRFFDLSPEYQPNGETTFEEGIKYVKKAFEEGYNRFEWTHQKLNGEPIPCEITLIRVKYKDGNIVVGYTRDLREQKAMLAEIYRESEKSRAMAHWYNSILNAIPLPISVTDADTKWTFINTAVEKFFGMTFEDAIGKPCSNWGASICNTPDCGIAYAKRGLKQTYFSEGDSSYQVDVTILKDLNGTTMGYIEVVQDITNLKLMAKKQADAEAANLAKSAFLAKVSHEVRTPMNAILGITEIQLQDEMLPAKTQEALGEIYNSGYLLLGIINDILDLSKIEAGKLELVPVNYDVPSLINDTVHLNVMRYDSKPIEFSLQVDENLPTTLFGDELRIKQILNNLLSNAFKYTNSGKVTLSVVCEAQQEKAAGIMLVFRVIDTGQGMTAEQINKLFDEYTRFNTEANRTTVGTGLGMAITKYLVQMMDGAISVESDPGKGSVFTVKLPQGTVDGAGVLGRELTENLKQFRLGRAEQMKKAPQIIREYMPYGRVLVVDDVETNLYVAKGLLAPYGLSVETVGSGFEAIEKIKNNVVYDIIFMDHFMPEMDGIVTTKKLRELGYTRPVVALTANALAGQAEMFAANGFD

SEQ ID NO: 95381 - protein, 170 aa, Unknown
  Obtained from environmental sample
  DOMAIN (3)...(74): Protein of unknown function DUF58
  misc_feature (1)..(170): Xaa is any amino acid
VDRHDILTRITTFPLFARSLAEDLLSGDYRSVFKGQGMEFDEVRHYERGDDVRSIDWNVSARFGTPYVKMYREEREMTVCIILDNSPSMHTPGGSLSKSPGSDVNRYEQAVLAAALIAFSAEQAGQRLSMIFFDQEISKIIPPRKGRSHTMAVISAAIEARPEEKGSGLE

SEQ ID NO: 95382 - protein, 316 aa, Unknown
  Obtained from environmental sample
  DOMAIN (200)...(309): FliG C-terminal domain
  misc_feature (1)..(316): Xaa is any amino acid
ATGVKILGELESKQVEEISREIATIKGVDKEEAEEIIAEFQSLLSGVYRFSGPSFGGVETARRMLHEALGAEKGEALLQKTIHGLPQNIFGFLEEFTPEQIVFLLKDESPVTSALILARLSPEVSAKTLAKFPPALKPEILMKIAHQSEVMPEVLEQVAGAIRERARHLGSGKDDIEIDGMQALTAILKQGDYTFGDRIINELQTDSPEISKKLKDRLYTLDDVLEAFDKPLAEKLATMTEQDIAILLKGRSPEFCEKILSNVSSRRRDLIREEGDIIGPVSKRESLEAASDFLAWFRLARANGELALKSDEDWVV

SEQ ID NO: 95383 - protein, 436 aa, Unknown
  Obtained from environmental sample
  DOMAIN (48)...(310): Peptidase M16C associated
  misc_feature (1)..(436): Xaa is any amino acid
HGSRPWESLLLVPSIEKIKQNLAEDSRYFESLIQKYLLDNPHRALVTVEPKEDFLPEQEARLAEKLARTEQGFSEADRRRIIDKANALEKLQSEGDSPESLAAIPHLSRKDLSPEPEIVPRRIEDLMGLPALCHDIYTNGISYIDLAFPLDILPWEDYQWIPFFTRAVVSVGLPGMDYAEVSSLLARTVGGLSVIPHSGTPAGGGSPFVKFPSGKFNLIGRDWLICRVKCLDEKTAASLDLVLRLMSEADFSDLRRIHDLVMEMKNGARSSLAPGGHHYASSRANRYASASTRTEETWNGLTQLFFVHRLAEMDTAEIAAKLNNLRDAIASGGLIANLAGSAEALKTNGGLIAQRFKGFGPPKKPAAGKTAPGVTPEDTVSVPEVFSSPSLQVGFAAMRMRAAEYDTLAHTAEIVLAHQLSTGALWENIRMKGALR

SEQ ID NO: 95384 - protein, 291 aa, Unknown
  Obtained from environmental sample
  DOMAIN (6)...(291): Protein of unknown function (DUF1016)
  misc_feature (1)..(291): Xaa is any amino acid
TKAYIAEIKQILREARNKAYKAVNYAMVEAYWLIGKRIVEEIQQGEHRANFGDQVIKNISKALTAEFGRGFSERSIRQYRQFYQMFPKFSIQRSLIAVSEKPAKSKTNLAISDRRINPPALEYALNWTHIQRIMRVSNPEARSWYLRETVEQSWDVRTLDRNISTQYYERLLISQVKKPVIKEMKEKTGKYQKNKLEFIKNPSVLEFLGLPGNIGYSEKILEKAIINHLQQFILELGKGFAFVERQQLIRTDTSDYYIDMVFYNYILKCFVLIDLKTDRITHQDVRQMDMY

SEQ ID NO: 95385 - protein, 139 aa, Unknown
  Obtained from environmental sample
  DOMAIN (11)...(138): Protein of unknown function (DUF1016)
  misc_feature (1)..(139): Xaa is any amino acid
MLINNSDYFEILDDIKTKIKTAQYKAVLGANKELVELYWKIGKIIISNTKYGAKFIENLARDIKQDFPNIKGYSVRNLKYMRKFAEFVSDEGKVQTVSALLSWSHNTLLLDKIKTLDEYLWYAGQTIENGWSLSSLEYH

SEQ ID NO: 95386 - protein, 221 aa, Unknown
  Obtained from environmental sample
  misc_feature (1)..(221): Xaa is any amino acid
MSLGRVGTTGFIYQINYDYNTSGPEWAGDNGYFPLDKYPDGETYGKQSLNVWCPPKPSDAGITYDLGPDCAKWTNAGGAKDPEAAKRAVAAGVPAKKLHNYGFTMAGSGEFKYVAGNGDIFEFIGDDDMWIFIDGELVTDLGGTHLAAPAKINIDQYAQGRWENGSKHAINFYYADRQTDGSNLKLKMALTDLSSSRFGAPRILKAKTIQNQDGTSTTTIY

SEQ ID NO: 95387 - protein, 268 aa, Unknown
  Obtained from environmental sample
  misc_feature (1)..(268): Xaa is any amino acid
MYDSTVQRYYDLIYAGADESAIELALKSMDDAQNSVTLTKRALDDASGALNSAINDMGRAESAFYANSGEIRQTSIAEAERQVMLAKYAADDAQRAYDRAVEGLNRAKRIYDTNSDDARRKDINDSKKGVEAAGRLADDAERLYNRAVDGRNRAADEAVQAALQHYSDAQTNLTEAQTALERAETTLDIAKRALTTQTDDTRKSLNLELQRADLDVANADIDLRAAEASLAAALNAHSGVSLISDYSGVVISVEKSRGQFVAQGEKIA

SEQ ID NO: 95388 - protein, 435 aa, Unknown
  Obtained from environmental sample
  misc_feature (1)..(435): Xaa is any amino acid
NEFINLASAENLDAVVIASITHDGDDASLKMKWRGKTIVDLSRKFLDTNGAPRSARALLASFGGAASDDALPEDAHPAALLDSLERELASLRSGSRRGLQERFDGSIGSASVLFPWGGACQGTPECGMAALLPSLDKQSRTASILCFGYDPYLMERNPYDGAKGGIREALAKYACLGGDFRKARLSLQEYFQRPLSPESWGLPAAALLGALEAQIALGIPAIGGKDSMSGNYRDEIHGIDITVPPTLVAFAAGTTPARSIRSGALTGKTGSFIILLTQAESYPAKRANPALNEWDIFKANMDALASLGAIDCGAASCGAASCVLSAYPVVSGGIATSLALMAFGNNVGVETKSGAFTPGLSYQGSVLVEIDGMAFRENQKIAEILGASGCWEIAAVTIEEPVFRVTKEVENELQVAEVPLDVLRRAYEYPLARVY

SEQ ID NO: 95389 - protein, 285 aa, Unknown
  Obtained from environmental sample
  misc_feature (1)..(285): Xaa is any amino acid
YDNKTGAVTVEGELLYGTPEDTDQLFSVLVNSLLYTMPPDVSPPATAAADPVPAPVQPDPVQPTPVQPAPVQQEPVWTAPVQQEPVWTTPVQQEPVRPAPALAEPVWTAPDLAEQVTDDDWRNNLLYLGLGVRATYNSIFNKGTSQSDLYKSIKIPISVQGGLSVDFHFLDFMSLGTGFEVHYDGVKVSNKDTYYSIIIGVPVLIKLCFNPGSDFMLEPYIGPYFNFKFNGYFTPALVAGRVGLQYSIKAGPGAVFLDGGYTMDILPFFYSSYSKANTKFNRQYF

SEQ ID NO: 95390 - protein, 353 aa, Unknown
  Obtained from environmental sample
  misc_feature (1)..(353): Xaa is any amino acid
LLFFDEIQSCQSALAKLRYFYEKYTELHVAAAGSLLEFALEEIPSFGVGRIRSLFMYPFGFDEFLTALNEEELSDAVKAASPEKPLADPIHQQLLGRMKTFLICGGMPEAVSQYVRKRDLLDGELVLNDLITVLKTDFAKYRKRTPLLLLNEVFESVMRQTEGKFVYERAAPGTASATVRQALELLIMAGLVQPVTHTAANGIPLGAEANRKYRRMIPCDTGLFLHTFGLRSEILPSADFSAVNRGSLAEIFTGLELLKAASCFTPQELFYWQRSASPDSAKGNAQVDFLVQKGANIIPIEVKSGTQGSMQSLRLFMKEKHIERGIRTSLENFGHYEDIDIYPLYAIGNLVRG

SEQ ID NO: 95391 - protein, 462 aa, Unknown
  Obtained from environmental sample
  DOMAIN (6)...(232): DEAD/DEAH box helicase
  misc_feature (1)..(462): Xaa is any amino acid
ASRYPRPYDQGILVAEAGTGTGKSLAYLVPAALHALENNCRVIVSTHTRNLQDQLITKDLPGVAALCGGKLRYSKLKGRGNYLCRNRFYKMLRGEIGTFSQRERNAALPLIVWSQRTESGDIEEQTFFSPKWFFKVWNLISADSLDCSGRKCPYFTTCFLQKARQLAQSSHIVVINHALFYSDVCSETSFLGATGSIIFDEAHHLESSGHQHLRTELDTNRVTAFADRLQNVLHIAPNFKASVNVDGFEKDMKRHLKHIRKCAQDMMSEVDNWAAFALPGAKTEYQITVNEETFGQMLTPAVLDIALGELQDTFHEFRQIISAAREKDKVDELRDEVQACAEQTSQMRADLQYLTAAKTEDHVFWAEGNHEKKWAKLCGVPLDISELLAQIWERCGGGIVFTSATLAAQGSMEYMSRAIGLDRFANRTDSVILPSPYGADQTLFCAFRNCPEPDATEFAAFA

SEQ ID NO: 95392 - protein, 187 aa, Unknown
  Obtained from environmental sample
  DOMAIN (7)...(187): CobQ/CobB/MinD/ParA nucleotide binding domain
  misc_feature (1)..(187): Xaa is any amino acid
LTPAPRLTISGLQGGAGKTLLSLGLARALAQDGLRLKPFKKGPDYIDAAWLGLAAGRPATNLDLFFLSPQELRALFLYAFTLPGSGGKAADFALIEGNRGLFDGRDLEGSCSTAALARTLQSPILLSLDCTKMTRTAAALVQGILGFEADLPIAGVVLNKVGSERHSALIRRAIEHYCPVPVLGALP

SEQ ID NO: 95393 - protein, 233 aa, Unknown
  Obtained from environmental sample
  DOMAIN (104)...(174): Sigma-70 factor, region 1.1
  misc_feature (1)..(233): Xaa is any amino acid
MSDNRKLPLGAKSKTVPPGKNKKPETAAKAGQVKKNAPKKTAPEKNTPEKKTEQPRASTENSGEGLVVKAAAMLAAPSAALPAAMPGAETAGNGGAAGTVTISGSAILDPAVLKLVEYAKERKTLSFEEISDYLPEHISDTEKIEPVLALLEANNVQITVDDNSGEDDVDPESGKSSPPGKKRAANSDKEASLVDDPIRMYLREIGRENLLTAEQEIELSRQMEEGENIIKNV

SEQ ID NO: 95394 - protein, 421 aa, Unknown
  Obtained from environmental sample
  DOMAIN (18)...(421): tRNA synthetases class I (I, L, M and V)
  misc_feature (1)..(421): Xaa is any amino acid
LKAIELAKAYDPKSFEGRIYSLWKERGAFKPEAAQDAGANGDAATPFVIVIPPPNVTGVLHLGHGLNNSLQDIVIRYHRMRGGPVLWVPGTDHAGIATQNMVAEKLLEERGISRRELGREKFLEETWKFKHEKHARITEQLARIGASVDWDRERFTLDEGLARAVKEVFVTLYERDLLYKGEYLINWCTKCGTALADDEVKHEDKPGKMYHLRYYFANTEGDAARNAAVNGEAPSSEGAHESSYVELATTRPETLLGDTAVAVHPEDDRYAGLKGKTVRLPLTDRDIPVVFDAYVDRAFGTGVVKITPAHDPNDWEVAKRHNLPILNILNPDGTLNNEVPAKYRGMSVNKAREAVLEDLKSGGWFIKEEKITHAVGQCYRCETIIEPFLSEQWFVRMKPLAEKALASWKRGELVFYPRKWE

SEQ ID NO: 95395 - protein, 363 aa, Unknown
  Obtained from environmental sample
  DOMAIN (134)...(251): CBS domain pair
  misc_feature (1)..(363): Xaa is any amino acid
MLKELLTPEIVQLIRERQWTDMRDALVIWPPAEVADLIGSIDEPTRVLLLRFLPRYYEAEVFAELTPGMQNDLLKELTNREVRGLLSELNPDDRTALIDEMPAEVTRRLLGLLSPEDLAETRHLLGYPEGSVGRVMTPCFVEIRPDMTAAEALEHIREHGSESETINVVYVVDADGKLLDEISLRHLILAPPEKSVESIMDGKLVTLSGYTDQEEAVAVIKKYNYLALPVVDSAGMLIGIVTIDDLMDVAEAEVTEDFQKLGAVSVQVDGEGPIENIREAAVSILFRSRIGWLVLLVLVNILSGFEMSFFTDTIAATVALVFFLPLLVGSGGNAGSQSATLLVRALATGNVKMGDLSRMFVKE

SEQ ID NO: 95396 - protein, 345 aa, Unknown
  Obtained from environmental sample
  DOMAIN (156)...(301): Carbohydrate binding domain
  misc_feature (1)..(345): Xaa is any amino acid
MRNPQPATCGTISIKKHFEEWTKQTTEKNGQSPAKYIYDKTYESKFLAEAQGGTGWLDASWIKFSRTGECGFDVPAGNYTLQTAASPSEGGSVRRDPVASYYPSGATVTVTAVPAAGWQFAKWGEDATGTASSATVTIDKNKIVVAKFIPVIDPNKNLVTNGTFTSTDAWTFNKGSSYGNSDGSFSVANNKATIVVTSVGSNVWEPQFVQNGITLVEGMSYRLTFDAYASATREIGMTIQMAGGEYTTYFEDKNVSLTTSPKTYEYEFEMKAASDESGRIGFNFGQATGTITLSNVKLNYIASETGIANNRRVKPSTAAKPTLRAAQSSSGVKVSFKASESGTAT

SEQ ID NO: 95397 - protein, 361 aa, Unknown
  Obtained from environmental sample
  DOMAIN (95)...(160): His Kinase A (phosphoacceptor) domain
  misc_feature (1)..(361): Xaa is any amino acid
ARAPPARTEATVLRSFGVVSAFVTPVSVNNIFWGFALLEDRRNERFFDEDCVDIMRSAAFLCANTVMRTEMERTLANTNALLKVALRKATEASKAKGEFLSNMSHEMRTPLNAITGMTAIGKKAKEPERKDYAFSKIQDASTHLLGVINDVLDMSKIEANMLELSPIEFNFEKMLQKIVAVLNFRIDERGQKFTVRIDGAIPKTLIADDQRLAQVVTNLISNAIKFTPENGVIALEASFIGEKDGVCTIQISVSDTGIGISEEQQRHLFNSFQQAESSTTRKYGGTGLGLAISKSIVEMMNGKIWIESEIGKGSTFTFTVEAQRGTTKERLGLLSPEVNWSNIRIMAVDDDPDTLTYFRDI

SEQ ID NO: 95398 - protein, 465 aa, Unknown
  Obtained from environmental sample
  misc_feature (1)..(465): Xaa is any amino acid
SPRPQPQNRLGVRDVTLTCKSDLLANGTVLIDTPGFGSTHLHNTQTTLDLLVECDAALFLLSADPPMTQTEMEFLRQVKERIPKLYFILNKVDLLSAPELQEVEGFIRGILCGELGFPPDVTLYRTCAVKGERAEAGTKEGDSAWEQSGLGAIKREVLDFMVREKYFTLSEALSDKYKEIVCDIRARLEKKLSDITAPITAAQQELNAITGAIQSLSIELESQTKRCAEERDAMTNKLFVLTKESKERCASSIKKTLAATISGRYLPAEAAGIAAATLPKTAADAGIGLLAAMVESANKAIRTAALHHALELANLQKRHVELLKGGGLIRQDAEVFVEQAEIAMPNNAKIFETTAWSTPPAKTTDIFKKKTVRLEAIRSFYQPLCDDCAISNIDKAAKHARILCNGAWEKLQIAIRASYREMIDYLRQLHKARQERLYRIQEGIKEEAAFLKEKIRECPVPFGKV

SEQ ID NO: 95399 - protein, 218 aa, Unknown
  Obtained from environmental sample
  misc_feature (1)..(218): Xaa is any amino acid
MGDIRKTHPVASSVMYAIVIVFTVLAIYPIFWLLIQSFKTTQEYMLESKLALPKEWFFNNYPISWKTGKFGLLIINSVIYTSITVVSIIFLSFMAGFAFAKLPSKLTPVLHGSFIIGILLTLQSILVPLFLMINAVNLYNTRLGVLIPYIGIGLPMGVYLSTEYIKSIPSSLIESARLDGAKYLRVFRSIIMPMSAPVAATVAILGITGTWNEFMLIN

SEQ ID NO: 95400 - protein, 300 aa, Unknown
  Obtained from environmental sample
  DOMAIN (123)...(235): DNA mismatch repair protein, C-terminal domain
  misc_feature (1)..(300): Xaa is any amino acid
ETYGFRGEALPSIAGVTRFEMQSADDDGHGYRLRSEFGVIKGVEPAPRAKGTTVTVRDIFAQLPARRRFLKSAETENAHVWATLTRLALATPAVRWVVRPARSMELTLPAAQDLKQRIVLLSGDRMSRLVPFADGEEPWRMHGYISPPDLCYRDRNHLYLFVNGRPVRDRLMLSALSSGWDGFFQKGTFPAVILFLEIPAEAVDVNVHPTKSEVRFREPQRVFPWISRATREAWGAAKGELPSFFAAPSRSFYGGADAPPAGGSDAAAPQQHDRPYSHYTPYGGQGDTREAVKSMWDAFL

SEQ ID NO: 95401 - protein, 327 aa, Unknown
  Obtained from environmental sample
  misc_feature (1)..(327): Xaa is any amino acid
MWFLTAAVLCAVSVTVGCSAKAEAQPVNQPRITQEARPDAGQGAVVYMTDKITPEGLLAVYNALGLEANGKVAVKISTGEPGNPHFLSPLLIKNLVQKVNGTIVECNTAYGGRRASAAAHYQVAKDHGFAAIAPVVIMDEKSEINIPVIGGKHLKEDIVGARFNEFNFHIVLSHFKGHGMGGFGGALKNMSIGYASAAGKSWIHSAGKSRSGFNGVQNNFLESMAEAAKAVADANKGRMLYINVMNHLSVDCDCNGRPAAPTMADIGILASLDPVALDQACVDLVYKAKDGKDLIARIESRNGLLTITHAEEIGLGTKTYRLVRIDG

SEQ ID NO: 95402 - protein, 448 aa, Unknown
  Obtained from environmental sample
  DOMAIN (170)...(413): Methyl-accepting chemotaxis protein (MCP) signaling domain
  misc_feature (1)..(448): Xaa is any amino acid
VSVDLPSLKVGNDSGVTWTIMLPSSDNYLLREIDEITMFVLLLSLIALIVAAVIVYFTLHYTTKPIVHVAETLKDISEGEGDLTRHIDVNSKDEIGDLAHYFNKTLEKIKNLVLIIKREAAGLQTIGNDLASNMTETAAAVNEITANIQSIKGRVINQSASVTQTNATMEQVIANINKLNDHVENQSSNISKASSAIEEMVANVGSVTQTLVRNVDNVNTLKEASEVGRGGLQGVVTDIKEIAHESEDLLKINAVMKDIASQTNLLSMNAAIEAAHAGEAGRGFAVVADEIRKLAESSGEQSKTIGAVLKKIKEAIDKIAHSTENVLNEFEAIDSSVKTVVEQEDNIRNAMEEQGEGSRQILDGVSNVNEITRQVKGGSAEMLEGSREVINESHNLETVTQEITGGMNEMASGAEQVNIAVHHVNEICVKNRERIGSLMQEVSRFKVA

SEQ ID NO: 95403 - protein, 231 aa, Unknown
  Obtained from environmental sample
  misc_feature (1)..(231): Xaa is any amino acid
SVAFAYNQLSKVTINDNVTSIGSGAFGYNQLTEIYIPKNITDIESSTFAFNRLEEVDIPYGVTAIRSDAFTDNNLSKVTIPASVTFIGNGAFGNNKLTEIELDKLDKLEYLSGFNNNELTEIDIPNTVMIIGSSAFAYNELEEIIISNTVTEIGNRAFAYNKLSEITISDKVKSIGIQAFIGNPLTSITIGADVTLGSSAFGNGFENFYYSNGRKKGIYIFAGEWTYNAIP

SEQ ID NO: 95404 - protein, 495 aa, Unknown
  Obtained from environmental sample
  DOMAIN (444)...(477): Tetratricopeptide repeat
  misc_feature (1)..(495): Xaa is any amino acid
AYLSDTSLTLGLKKESCIAWVDMPDYVFEDHIIEAKIRLETLGNYAAAGVIFHIMDEGSYYLALVSNKGYFRLDVVKDNSPKTLIAWTDIPHFDKINFNLKIVTCGTYLIFLVNNKWLGEVNDDSAEYGALGFVMASYESDEKKKTDKKKPDSESEELSNENNEYVCKAHLDYISVDSRTKYVEDTFKKLTNDININAEGRLRLAETFAVMGEPAKALDQISRAWKRRDEVIRTVSASSEVRTKRELLLAARMSFRLGQYSKAEEFIDAILDQWADSPEGKVAHTEKIKILNELNKFAELNDFIVNNPFKIEKDLDYYILLAKCRWELKNYADSAEAWDMAFAMKTDNGVYAVNAANAHEMAGNNDAALERYIAAGKLFINQDNMPELAALVQKLSVLGKDSWEAHALAGKWAFSIEDYDRCAKEFEISHKIRCALRPRPKADPALYYLWGLVFYIKGKIGTAIRLIKRAVSLAPDYDLFRKKLKELIKISEKKK

SEQ ID NO: 95405 - protein, 178 aa, Unknown
  Obtained from environmental sample
  misc_feature (1)..(178): Xaa is any amino acid
MKIKFKLSIVVIAIMAAVTAGITSLLLWQSSKNTLQLSLRGQEQLANSQAEFLKGQEDGYIRALTTLANVMGDFETVKPEERRDKYDDLLKSALNEEPMMVVLYTVWKPDAIDGMDKKYIGRTGSGPNGQYAIAWSKETGSIKKRATADIDNAIKHITGPNAFKDLINEPVMRNINGV

SEQ ID NO: 95406 - protein, 268 aa, Unknown
  Obtained from environmental sample
  DOMAIN (164)...(237): Pyridine nucleotide-disulphide oxidoreductase
  misc_feature (1)..(268): Xaa is any amino acid
MRTAKLTAPRKIELMSEDIPAIKDPREVLVQVKAAGICGTDLHIFQGERADVQLPRVMGHELSGVVAETGSAVRRRKAGDRVVLDPVIACGTCAVCEKGRRNVCPSVKCFGVQVDGGFQDYIAVHEDMLHGIPDNVNFEQAALAEPFSIAVNIAARLEVKPGDRAVIIGSGTIGLVCAQIFRNLGARILAGDVEDSKLEIAKKCGAGRIVNTKKEDLKRAVLDYYPDSADVVLDAVGMTSLFALSVDLAAPTARVAVIGFDAEPAGMP

SEQ ID NO: 95407 - protein, 450 aa, Unknown
  Obtained from environmental sample
  misc_feature (1)..(450): Xaa is any amino acid
KTWAWLQDCWNNATEKGGIEGKFFSYPGSQAVYQSDAIYSSFFLVYSNRIYQATPSLDLFYERQEPNGAIRAAYDINTGKPVAERDNSECLGIPLFAWAEYNIYHKSANKKRVKDVLAVLDKYTAWIDKTFKKSNGLYRVPLAVTGITNSPREGTYYALDFNAMMAINALYLSAMADILNDKDSSFQYKKQYFALKTRINALMWDPQDGFYHDIDKNEKKLPVKTIAGYWPLLAEIPNDEKAEKIIAKLSDPNYFGAPHPFPSLSLSDKNFDENGRGYHGSVYPHLTFMVIKGLERYQRWDLARECAIRHLYFMLDSMSPDGNHHRGNLWEAYMPTKEGPAKWPGKPDFPRSQYLSYDALSTICLTIENIVGLFISLPRKTVDWVIPNLEIMGIENLSLKKNMITILSHRSGRGWEIHMESEKLYYFTINILGKKKKTLPIPSGKCSMLI

SEQ ID NO: 95408 - protein, 265 aa, Unknown
  Obtained from environmental sample
  misc_feature (1)..(265): Xaa is any amino acid
MKKVCLVVQDKHQDEALAKLREAGIVHIEMSKPAPEKFTDVMERKTQTENAIGLIRQYKLPKTKPAPQPQSGAWERRKVTGPRRGRRSSDLMGIEEQEPYSVDAVNAPDRPELVKLMNGLATERKNMEERVVFLSRELTRVRAWGDFAPDDIKTLNENGVIVYPYEVSPGVFKNIPKDIRYIKINEDKSATRLLVFDKEIPDAPPFKLPEKSISKIETELAELTFKLNELNERIKNFADRRPVLEKEMAEINSKLNFELAKAELH

SEQ ID NO: 95409 - protein, 169 aa, Unknown
  Obtained from environmental sample
  misc_feature (1)..(169): Xaa is any amino acid
RQIVETAKKEAAELAARAKKDAERSEKAGKAALEQASRNLVLVFKGEIQALLDQLVSQQLKTSYDNDVLKAALPEILKAWAAKGDSLALLLPKASLDKLEGFFKDKLSAQLKKGLELKSDNSFSGGFRIAQKDGSAYYDFSAESVAEMLSAYLNPQLAEILKDSAKKEV

SEQ ID NO: 95410 - protein, 492 aa, Unknown
  Obtained from environmental sample
  misc_feature (1)..(492): Xaa is any amino acid
MKKVYIGVAAACVLLIVILATGLWKKVLYPNKEEDLNTRIIMPREAASFQGALAARETGRDESITTKIPMDNGEVVIAVLNLDSEEGITEEQFVVYRYVHDAAKPLYIACIGYDEQSKKYKRRWDAPTSSTRSETISLFMQDLIGDRNNCIIVTGMNNKYEHTMTIFRRDSSLPKEQPYKKIAELQIDGSIVIQETSRSLAYQQGITNGQSFNIAAYGHDNSSANIMDQLETIYSYSTSTNQYERANVSRIPGVQIEQRKVKEILSGAPGVFENFTHDLWYYVNPSGTIDTKQYIFFDPASREIIFVGDEAQQVFQWQHSTPTRYGLYIRSQNISITTLLRFIDIELETIDSIKLRVFEDVRLKIIVNTSWDGTYRRAGAVKTEKPKSSIKSSINALYDSSLGKLRFYDSGAYTLTTGNTSKNGRYVFYKVDENDLLELRPDDAVNEAHEGRMVYKVEAIGNSAFILSRVRLGTTGIQNTMEPPIMLSPIEN

SEQ ID NO: 95411 - protein, 892 aa, Unknown
  Obtained from environmental sample
  DOMAIN (243)...(338): Alpha-2-macroglobulin family
  misc_feature (1)..(892): Xaa is any amino acid
RTALTELSFYVTVSGGYWNMSNPSELRLTPDQEMYNPGDTAKVLLQSTLPEGRYLITVEREGIFTEEVRHFTEPVSVIDIPIARNYVRVVYVAVSSYSVRSGPPTHEYGSPDLDKPKGYFGVTPIRVNPRARAFSVKVESNKKTYRPGEEVTMTLTASKDGKPLPNAELTLMAVDRGVLDLINYHVPDPISYFYNESLFRLMVAGGDSRSWLMDPVTYSVKNLAGGDAEGGGKIEERKDFNPTAVFEPMLITDDSGKVTCKFKLPDNITTYRVTVFGVRGDIFALKESEIAAQNRINVREVLPRRTRERDTAEAGVLITNLDSTSHTLSVRLDIGPPLPNDDSSGMKKITGQAFVDGISERRITVKSGENAVVYFDVAAVKEGNVTLNFTVNSTVLNEKLIRELVIEHPYVMETVTTTGTVDKDSESEGIVIPSFADNGVGSLSVTLDATRLSLLDSAVTYLFRYPYGCMEQRSAAVMPLVIFGEYLDALDLRNEVANPRKVVENELKSWAKVQLSNGGFPYWPSGTRADFYVSLRIAHIIAIAKSKKMNVPSSLNTAELNSYLSREYQELQKWRSSSSSYYYQSYLQSYMLYVQSLLGEKVDPSRLAEILSRDNVDPSVLAFVGMTYRALRQNTDAANTAQRLRNLVRMTTRGADITDPLDKFRYSYYGGMVEQLALTLQFFVDQYPGDDINTRLLYSLLESKRSGRGYWESTAVTIRVLSAVDALIRAENLTNLDVNGTVTLAGTELLKGAFKGLGAKPVTETLDFTGPVLSGLPRDNLQSLNFARRGRGNIYYTVSLRYAIPFELQTFRDEGIGVFMSIYDINTNEEIRGTSLQNGKTYRARVRVSTNRDRNYLALRVPVPSGAEILDATFVTTASYGDRGGTSGDGQT

SEQ ID NO: 95412 - protein, 201 aa, Unknown
  Obtained from environmental sample
  DOMAIN (1)...(125): Glycosyl hydrolases family 2, sugar binding domain
  misc_feature (1)..(201): Xaa is any amino acid
MSDTNLNGTWKMIWDPENKGVTSRWFAEIPSKAKNVEIPHFWEENTAATAFYYKKFSLTAKDKRCLLKFEQASVYAVVWVNGKYVDDHFGSSTSFEFDISQFAKANHENLLCVKISSVSPSGTFELMAGGDPIPAEQMPLGLPWKRYPFAGLTGKVSITSGERALLTAMEIATNADHGRINVKLSFNNPRNYGQNENFARN

SEQ ID NO: 95413 - protein, 98 aa, Unknown
  Obtained from environmental sample
  misc_feature (1)..(98): Xaa is any amino acid
MDLLTEGVKALLKSDKDIERLLCGRFEEVISLLDCYKNEIELFNSSYGLVGTNNTKELIIRHILDSLAPLGILFRLLGETENPKIADIGSGAGLPGIP

SEQ ID NO: 95414 - protein, 408 aa, Unknown
  Obtained from environmental sample
  DOMAIN (138)...(271): Fic protein family
  misc_feature (1)..(408): Xaa is any amino acid
LKNILKIDKSPVILYIGDVKNTLEHISFIKNWKLSKRAVNLLGQCYAYIDSMLNIPIRPDYHRELLTVSLNKGALATTAIEGNTLTEEELAQIRSGKDLASSKKYQQREVENIIDAFNIILKELVREKSATVISPELIKRFNGMVGKDIGEAFNGNPGQLRRRNVTVGAYRPPSFEEVENLVEKLCDWLMREFHYGHEQNFDEAVIEAVVTHVYIAWIHPFLDGNGRTARLLEFYLLLRAGVPSIASHILSNHYNNTRTEYYRQLQNASETGNLSAFIQYALEGFRDGLENTIKIIHRDQVELTWNNYVHDVIEKMEDEGKTQKICRRLKQLAYYIPSDRFYSMDEIKIINPKIAKEYMKLNWITLRRDLDMLVEKELLIIDKNKFCANYKLLNSFYSEASVQIIRHY

SEQ ID NO: 95415 - protein, 85 aa, Unknown
  Obtained from environmental sample
  DOMAIN (3)...(84): Sigma 54 modulation protein / S30EA ribosomal protein
  misc_feature (1)..(85): Xaa is any amino acid
MNDDVRDYLNKKIERIHNAESMIVDLLITIKKEKDFDAEATVNFRWGVSIHVKEADFDITAAIDKMMDKLELKIIKEKEKVKEKR

SEQ ID NO: 95416 - protein, 284 aa, Unknown
  Obtained from environmental sample
  misc_feature (1)..(284): Xaa is any amino acid
ESFVAGYFWSGNFLDVSGANKCDMIYLDTYPGMGIRDRNIENVFPTLAHEMQHMMNYVTRRIISSGNNFTSMDIWIDEGLSSAAEYIVCDGKYSKDRIDWYNENGESKAKIKGLIDQGNNFFVWGNHENENPYAVLDDYATVYLFFQWLRLQKGNGVYRDIISSNNSNYQAIEDATGEDWDTLLKSWMAANYINSSTGVYGYKGDIQAITIHTVPAGKTKISLYPGEGVYSLTDAGDTIPSQDININKNIKYAGLNKTAAEVSDSAVFAAGRLLTLYINPVLYG

SEQ ID NO: 95417 - protein, 520 aa, Unknown
  Obtained from environmental sample
  DOMAIN (5)...(519): tRNA synthetases class II (A)
  misc_feature (1)..(520): Xaa is any amino acid
MTADELRSKYINFFVSKGHAQIQGKSLLPENDPTVLFTTAGMHPLVPYLLGQEHPAGKRLVNFQKCIRTGDIDSVGDASHLTFFQMLGNWSLGDYFKEEAIKMSFEFLTSPQWLNIPVEKLGVTVFKGEGDVPRDDESAAIWKQLGIPENRIAYLPREDNWWGPAGTTGPCGPDTEMFYYIGDAPCGPDCKPGCSCKKWLEIWNDVFMQYNKNAEGDYEPLTRKCVDTGMGIERTVTVLNGKKSVYDTDIFAPVIAAIEAASNGCKYGQDNDKDYSIRIIADHVRSATFILGDPKAVSPSNVGAGYVLRRLIRRAVRHGRKLNNEKFSLSPIAQVVVEQLKGAYPELEQNRAFIISELDKEETKFLETLQKGEHEFEKLLPNLLKDPRKIMSGRLAFKLYDTYGFPIELTEELAAESGMKVNKEEFDEAFQKHQELSRSQSGSFKGGLGDQGEMAVKYHTATHLLHKALRTVLGDHVAQKGSNITAERLRFDFAHDAPMTAEQVKKVQDIVNEQIEKDYS

SEQ ID NO: 95418 - protein, 290 aa, Unknown
  Obtained from environmental sample
  DOMAIN (17)...(171): 3'-5' exonuclease
  misc_feature (1)..(290): Xaa is any amino acid
LPHLASASNDSSGALPGLFGETDLPDSLLDFKGDPDKLWKELAPYLDSRNLPLPGVRAVLAPLFADPSVAKYGQNIKHDIKVLARHGFAVNGIAHDSMVLSFILGSANRHSLDDLSVKHLNIKPISFESLVGKGKGQKRFDQAKFEQAVDYAAEDADLTLQLVEKLAPQLKDEKLARLYREVDLPLVTVLADLEATGIRIDLDVLAELAVRFNAEKAKAEASAFELAGETFNLASPAQLGRILYEKLGLPVLQRTAKTKAPSTDEDVLQELSAREDGEIARVLLRHRQMS

SEQ ID NO: 95419 - protein, 317 aa, Unknown
  Obtained from environmental sample
  DOMAIN (118)...(242): HD domain
  misc_feature (1)..(317): Xaa is any amino acid
VTSKLDNNGESDLTLRREDIDYYEVYLRELDKNRLHEQELAFLRVELEKFKNEAAKAYLLSKERHKDSALMSAQAVKTINDLHKKIKELDGAKKTLREAYKDTINRLAVASEYKDNETGNHILRMSRYSVYLANLYGQTPDQVEEMEFTSPMHDVGKIGIKDNILFKNGKLTDAEFNEMKKHTTIGAAILNNPKSPIIECARQIALFHHEKWNGHGYPHGIKGEDIPINARIVAICDTFDALTSKRPYKMPYPIDVSCDIIAKGRGEDFDPDLVDLFLKNIEGFVKIKDNVDEENDDEDIVRANFSWSERDKENGKA

SEQ ID NO: 95420 - protein, 239 aa, Unknown
  Obtained from environmental sample
  DOMAIN (49)...(118): HAMP domain
  misc_feature (1)..(239): Xaa is any amino acid
MKIRSTAVPVILFAALIILLTLAPFVILNGNVGGVGPSGEYFHERPNVAAAVPVACFLLIALCTLGFSRYLHGKISKISALADAVAAGDLSKRLDVGNLDGFAAMEQRLNAMLSSVEEMNKRAVEDMNAAEFANRSKSEFLSRMSHEIRSPMNAIIGMTQIARASASPDKVQDCLAKIDGASKHLLALINDVLDMSKIEANKFELLNAEFSLDASLKQIFDMMNVKAEEKKQILSLTID

SEQ ID NO: 95421 - protein, 345 aa, Unknown
  Obtained from environmental sample
  DOMAIN (58)...(343): Enolase, C-terminal TIM barrel domain
  misc_feature (1)..(345): Xaa is any amino acid
MDPFQQVEIDELMINLDGTENKSKLGANAILGASMATAVAAAKACNQPLYRYLGGAGAHILPVPMMNILNGGQHADFCIDIQEFMVLPVGAPSFRECLRWGAEIYHSLKSVLKSKKLSTGVGDEGGFAPTLQSNEEALNLIAEAAKKAGYEPGKDVFLGLDCASSEFYENGKYNIDKGTKSGPELIDYYVGLTQRHPLLSIEDGCDESDWPNWSVLTEKLNKTTQLVGDDLFVTNTKILAKGISEGVANAILIKLNQIGTVTETLRAVDMAHKAGYKAIISHRSGETEDTFIADLVVATGAGQIKTGAPCRTDRVAKYNRLLQIEWELGKAAKFAGRDAFGRRLK

SEQ ID NO: 95422 - protein, 285 aa, Unknown
  Obtained from environmental sample
  DOMAIN (5)...(245): Indole-3-glycerol phosphate synthase
  misc_feature (1)..(285): Xaa is any amino acid
VQIFKALDTEIKKQKGPSNAKRLHKEHKSLKEALTQSRITIIAEISGGNPQHGKVRQAFRPSTHAKSLLDNGAKILSIATDPFLYASSDKHLPEVRAVVDCPLIRRDFIFEEYQIEESKILGADAIYLSAAMLEPDRLATLSSLAASKNLDVVVEVTSEEDIETALEVEAQIICVVGRDIESWEASWGKTILLLKSIPKKCLKIAEAGITSLKQLRELESMGVHGAIIGDVLLNEFYPGKRLGQLLAGQEPAKKAVKKEPPSDEPPKRKQSKLTSTKPSTSSPSK

SEQ ID NO: 95423 - protein, 89 aa, Unknown
  Obtained from environmental sample
  misc_feature (1)..(89): Xaa is any amino acid
VRKVFFSFELDDVSRAMVVRNSWVTQGKEAAGFIDKAEFEKVERQGDTAIQNWIDRQIDGTSVTVVLVGEKTLSSRWVRYEINKSMNAE

SEQ ID NO: 95424 - protein, 325 aa, Unknown
  Obtained from environmental sample
  misc_feature (1)..(325): Xaa is any amino acid
VCPIGWHLPTREEWGDLAKFAGGTGEYGTEGAAAKKLKSKIGWLGTGNGTDNYGFSALPGGHRHQYQQDFIIDGRGMWWTSTEGEYNGEAYRRDMISTDDIVYEISSDIAHGFSVRCVEGETTQPPQTEEDSTFIDDRDNQVYKKVKIDGKTWMAQNLNYKPDNGNSWCLANSEDSCAKYGKLYTWESANDVCPTGWHLPTREEWGDLAKFAGGTGEYGAEGAAAVKLKSKSGWNDKGVDGNGTDDFGFTALPGGHYNRVRSDFIIDGRGMWWTASDASGDLVYRREMTVDGANVSEIENVKVHGFSVRCVENQTAKSLKSKKSF

SEQ ID NO: 95425 - protein, 490 aa, Unknown
  Obtained from environmental sample
  DOMAIN (24)...(49): Tetratricopeptide repeat
  misc_feature (1)..(490): Xaa is any amino acid
MAEEDWYAAAEYLIETLRINPAHADATSALAECYYELGEFDQALVWVRRARSLSRTDTSLTNLEASILVALGRLDEASVIVNQVLQREPYNKEALFTAAELDIARGRAGDAVLRYRSAVNRYPDDRRLLVSLALVLGSLGDVDSARAYIERALLAHGGDYRVHYYAAYLASQAGRLADAVAHVQNSLYYRPGFTPAKFLLASLRYRQGQYEEAARLADELIFLNRDDSLSWYLKGVSFIRLGRFTEAQSVLSTAANINGDDEFIRTALEELLISRTRIEDSARSRWASWHFARARSFRISNQLEQALFEYRRGLRLNPYAGDRREYAELLRLQGYPARYLEELKFMQNLGLADTALNDAVESYTALLSNALFRRWDVDPVMISKPHWKLAVFSLASQSTFYHADAGAGASSYIKDLLVHERNILPMDVELRQPSFSAAFRTAREIGADYFLVLSVSETKGIFQSRASCLWRVPDPRRLSLTLSAPAPTAC

SEQ ID NO: 95426 - protein, 510 aa, Unknown
  Obtained from environmental sample
  DOMAIN (240)...(305): His Kinase A (phosphoacceptor) domain
  misc_feature (1)..(510): Xaa is any amino acid
MAIEEIAAYRGSTLSTSVFWINDKDKMFCMDNNDPYAVDPEAPENGWYNKTLYKTRTYNFDIHYNPALKMTKLWINAPVLNKERTSPLGIVGVAIDITAFVKRLYEQYKGRAELYYFNADGEITGAHNVDIVVNKEHIEKFLGVAGVGVQTRALRLKEGEIITYDSPSGEVAIGPVPALGWYAVAIMPDTISDYKNPVAVVFLLMLLLIALIIVIFNIFIAGFLKSLRRTMDSLETSARYKSEFLAMMSHEIRTPMNAILGMAELAMREKELPRAQEHVLTIRKSGMNLLSIINDILDFSKIESGKMDIVPADYHFMSLIKDVTSIISIKAAESQLEFRVDIDNNIPVALVGDEVRIRQIILNILSNAVKYTSKGFVALTVKSQQLDDETVNITIEVADSGRGIKQEDIGKLFKDFVQIDLVKNKGIEGTGLGLAITRSLVKAMSGAINVKSKYGKGSVFTVILPQKISKQAEFTDETTTAVFTAPTAKALVVDDVHTNLVVAQGLLSFY

SEQ ID NO: 95427 - protein, 832 aa, Unknown
  Obtained from environmental sample
  misc_feature (1)..(832): Xaa is any amino acid
FDNEIEFDLEVFEEGIESDKITIPGFNDLTIGSTPLSEKLTLLEAKDEEDALMYKITAELRKKSTVNDNSGTAYGGSDKLLVGDDVIAVVGIELEDGYYIPALEATTAAAKRAYIEQFLPPGGSAKVNWSATSLYDVDPTNGTMIFRIPLGKVPQPKITFFPSGNSGATGDVNEPIIYGSDNTAFNRTIFGTITGPKIKAGVKLGATDVTDYAFSPSTPVGFPLASDGATPVSITSLTVNGSLDADGNPTSNAEEIVYEAGRTFAVAFTGDVNKIAAKTYIPTITYKNDALGIGGGEPWRLYVDTKELDVTQFAPANIIGPGDDGSGWPLLIGATLPKATFDAAVKAENLVGGHATTGDSLLSVVVTYAAREPNLAATPAESWSFVDQTYGSSLVKIGYYGLKFTVVPKANFKFPTMTEAQVLEFAKSYVGATNGFKVVSATLTNNQLVFTYRTGEVVKPNLAQGIDYAAVDGDGNNLLKVIRFTYGDTSAATITAKKLYGVGASEGIAVFRDTSSLAQKFTKVNISIQIPGTTPGTYNTDATFGSSDNTIKTASSNFIMPGSTTYTIPESMLGIPAGTYPGAKIRVTNADIGLADSILGLTFVVDKQVIKNVPQDALVTVPIPVIGASKTSDVYSYTNKPIVSADGVTNPYYTVSLNWEDVEGPTFTESTNSAVARIKLVANPNYKFSTNATTELPSGCAAGSACAPPYTATNFVLNGENYDSDAGTLLGLPVTDLANDIAGGDSILIKRDFSSTKPKVQITGTPINFKKIGPSGSVDFSIPFLGRTPTGMPQNASEGLGQSAAVAGFTPSSPCANWSEGVAGRCADSLAG

SEQ ID NO: 95428 - protein, 95 aa, Unknown
  Obtained from environmental sample
  DOMAIN (5)...(95): Ribosomal protein L23
  misc_feature (1)..(95): Xaa is any amino acid
MIQYEDILIEPVLSEKANHLREEGKYVFKVAQSATKPQIKEAVRKLFNVHPISCTTMVVGGKPKRQRYRQGYTSTWKKAIVKLPKDEKIAIFEGV

SEQ ID NO: 95429 - protein, 64 aa, Unknown
  Obtained from environmental sample
  DOMAIN (1)...(54): Ribosomal protein S19
  misc_feature (1)..(64): Xaa is any amino acid
MIKTYSRCSTIIPEMVGGTISVYNGKTWIPVYVTENLVGHKLGEFAPTRIFRGHAGSDKKAAAK

SEQ ID NO: 95430 - protein, 95 aa, Unknown; identical to SEQ ID NO: 95428
  Obtained from environmental sample
  DOMAIN (5)...(95): Ribosomal protein L23
  misc_feature (1)..(95): Xaa is any amino acid

SEQ ID NO: 95431 - protein, 93 aa, Unknown; identical to SEQ ID NO: 93479
  Obtained from environmental sample
  DOMAIN (3)...(83): Ribosomal protein S19
  misc_feature (1)..(93): Xaa is any amino acid

SEQ ID NO: 95432 - protein, 74 aa, Unknown
  Obtained from environmental sample
  DOMAIN (2)...(59): Ribosomal L29 protein
  misc_feature (1)..(74): Xaa is any amino acid
MKNSFKNLSFPELKAKREELKKKYMEFRFKNIIGHVDNPLQRRTMRRQIARLNTLIRAHEIAERKNAKSVAEVK

SEQ ID NO: 95433 - protein, 90 aa, Unknown
  Obtained from environmental sample
  DOMAIN (17)...(85): Ribosomal protein S17
  misc_feature (1)..(90): Xaa is any amino acid
MADKTAAALSGKKEFIGLVKSNKMDKTIVVTIETLTLHPLYKKYIKRAKKVKAHDEKNEAKIGDRVRVIECRPISKEKCWKLVEIIERAK

SEQ ID NO: 95434 - protein, 92 aa, Unknown
  Obtained from environmental sample
  misc_feature (1)..(92): Xaa is any amino acid
MDTSKLLEILRITLPVFAMLALGNVLSRAKKMDEGHQAFLNWLVYYISLPALIFVGMATQPIRNLLHADFIWTTLASMLLIMILFIVIALCM

SEQ ID NO: 95435 - protein, 429 aa, Unknown
  Obtained from environmental sample
  DOMAIN (1)...(258): Cellulase (glycosyl hydrolase family 5)
  misc_feature (1)..(429): Xaa is any amino acid
MSFFWSMAGEGRDYYNADVVNWLADDWKVNVVRAAMGVDENWGAGSTGYLAGDKSGTVSNKQRVFDVVDAAIAKGIYVIIDWHSHTAHQNTAKAKEFFEEMATKYGDKPNVLYEVFNEPQNGGMGVNAATFWANTVKPYMETVVAAIRAIDPANIIIIGTPSWCQDVDVAAANPVNGANLAYVQHFYSYSHKEPLRVKARAALNTSNKAVFVSEFGVCKSDGKTPLDTAEATKWLNFLDSNYVSWVNWSVSYKDEGASALKPSVKKFDGNWTVDDLTESGAYIRGKLIAAAQKEDNEWNTATFVTDLVIPNTQQTGGSAAIAPVSAQSNSFSVGPIPASKSKGGVKFFWQGKAVAGGSLFIYDALGNTVKNIRINEISASNPSKRTIGAWDLTDAKSRRVKTGSYFVKGKVIVQNGSVANVSSIIVVGN

SEQ ID NO: 95436 - protein, 231 aa, Unknown
  Obtained from environmental sample
  DOMAIN (3)...(225): haloacid dehalogenase-like hydrolase
  misc_feature (1)..(231): Xaa is any amino acid
LGCGVRRYAPELGIDPALVVLNGAEVYASSDPGAQRVYYAPLELSYAEYLIDYCKDKPVALNYYHGDKLYSAQTDKNAEWTDLYHRQTGVSYNFIDKKFSAVDNLPPSKMLFVGDEAYLDEQEAVFQAKWGAGGGNSVYVCRTWNHYLEFMNPKATKGIGLAALCDALGVRMAEAAAYGDAENDIPMLTAVGCGVAMKNAAPAVKEAAGRVTGMTNEDDWVAMEWDERFAV

SEQ ID NO: 95437 - protein, 59 aa, Unknown
  Obtained from environmental sample
  misc_feature (1)..(59): Xaa is any amino acid
ISSNMPYVSEIVPLLIIKKLMQFDYLGASAIGVTMLIIAFVMMLVTNILQKYMLKGRSS

SEQ ID NO: 95438 - protein, 318 aa, Unknown
  Obtained from environmental sample
  misc_feature (1)..(318): Xaa is any amino acid
MSDQNEIIEDDKSRYEKTPEEATSLDGPAALPGVFNRKKTLVIICIGLAFFVMLAVIINTVKSSQKSKSGAGDEYAASRSNSSFLNSLRDSALRDNNRKSEPEPDQPEGAEKYIVEEPSLPPVSFNKPAENNPPARSPPAQVPVYQPPPVQPQYQIPSSYPSPQQQPQDSHYRSSLVPNVQGSLFSGSGNTAAARQNVQGSSQQTASPASYDDYLDRLNQRAAGYQTLGNPAQNNPQSGQNSRNFYESSNPSEAIYDSRFLGANALWVGTMIPGILETAINTDLPGHVLARVTQNVYDSQTGKFLLIPQGTLLVARYN

SEQ ID NO: 95439 - protein, 203 aa, Unknown
  Obtained from environmental sample
  misc_feature (1)..(203): Xaa is any amino acid
VMRVRKKFSTAIDELGYGDHRIKLEQGGEKTPVRALKFRLKGGEDETLITDIGEKKLGIKAFKALYFKRWPIETKYNQIKNRLEIENFSGRLVDNIRQDFYATMVLTNLTSDFAGEAQVIIEKEQRGKRKKYRYKVNMNHAIGVLKDRLILTLCEENSEKRREMFDEITDMLKKRIIPIRPNRSFPRNIPRNVKFHHNQKSNC

SEQ ID NO: 95440 - protein, 245 aa, Unknown
  Obtained from environmental sample
  misc_feature (1)..(245): Xaa is any amino acid
MAGVELVLGIDVEEEGLFRGVYAGTKPSVRNVAELVRLYPLLEEFDLPVTLLCTHGVFADLPACRSLAEICARHRVEIGAHLHHWNTPPAGPGNGPGQGYESPGRVPDSVLAARLANLFAAGRAFWGRPLTSFRMGKWDLHRRHWPLLAEAGVLVDASVRPLHYAPHGPDHFDAPADPYVVDVQGHAMLEVPLSCIPLCACVRRLSPSRRAGGSARGRLAASVQKWGALALLPVYHPVVDDAGRY

SEQ ID NO: 95441 - protein, 598 aa, Unknown
  Obtained from environmental sample
  DOMAIN (205)...(424): Methyl-accepting chemotaxis protein (MCP) signaling domain
  misc_feature (1)..(598): Xaa is any amino acid
MDKALGDIGKEILTRAKSNENQFFNVPGGVASLTRVPSLNWHIAAILPLTMASALNSGMTILFLVMMAVIAVIFVISYLFITGLIKPMNYMVQTLDKIAEDWDLTRRLEFKHQDEIGTVGEFFNRTFERIRILVETIKYKTDGLNHTSYELSANMNKTSEVVQQIAVNLDNMENLVVKQENGAMIAGEAVGAIKENIDSLNKMIEQQAASVDKSSSAIEEMTANIHSVTQTLIENGKNVAVLTEASENGKTGLQTVAQEILEIAHDSEGLLQINSLMNNIASQTNLLSMNAAIEAAHAGEAGKGFAVVADEIRKLAETSGKQSKTTATMLKKIKASIDNITKSSADVQARFGAIDSSVKTVSEHEQNIRNAMEEQEIGGRQILESIGRLRDITYSVKKGSDDMEQSGETLVEETDEFIKISKETVDGMNEIMAGINQINVSINHVNEMSIENNNNFESVKQETQKFNVTDDNEKKKILMVDDDEIHLEMVESVLQTDYDIVTAKSGKEALGLFYQGLVPNLILLDLIMPDMDGWNTYTRIKAIGGLYNTPIAFFTSSDDPKDKQHAREMGAVDYIKKPYERNDLLFRVGRIMKQGVAA

SEQ ID NO: 95442 - protein, 306 aa, Unknown
  Obtained from environmental sample
  DOMAIN (1)...(46): S4 domain
  misc_feature (1)..(306): Xaa is any amino acid
LDVFLTDALGGPSRSGVQRIIADGHVSVNGKPTVKKNVNVAAGDVVTVGDGAEAAVRTCYDDAPLPQDIPLDILHEDDYIAVINKPAGLVVHPGRGNADGTVVNALLHRFGAGNVSSGYDNYRPGIVHRLDKDTSGALIVAKTDAAHAAFAELFLSRAINKVYTGFCVGPRPLEHEVIDLPLAASQREPVKRTVDKRKGKPAVTEYELKDFICGIALMEFTLHTGRTHQIRVHCGYKGFPIVGDDLYGGTREAVLKIPPMERPFAYSIFKCFERQALHALSLSFIHPLTHENVKVTAPYPDDFNRS

SEQ ID NO: 95443 - protein, 413 aa, Unknown
  Obtained from environmental sample
  DOMAIN (1)...(413): Protein of unknown function (DUF935)
  misc_feature (1)..(413): Xaa is any amino acid
MKKPDTKTLTSQLITDNVLGSFLNYMPNPDDIVPGTLSSYDTYRQMRTDPRIKSLLNKLKTAALNFPIHITQPEGCPDKVFAFVKNFDLWGKTYQKLKRIYSGLDYGFSVSELVWRYEDGLYIPDNIITRKPERFVFDRNWKLYLNEFGARKPLDQPYKWLEYHHDPDDENPYGTSVLKCVYWAYMFKKAGYEYWLQATEKFSVKTILALFTADGDDKRIQDTAKRIAAELLAIESGSAAAVGGVNSIHEVGMSGELIGFASLVDACDTQISYGLTGQTIATSKTEGGSLALGEVQADLFYEDAKGIALEGQALIQRIINWAVEINGYGNVVPPLAEVDTERKASFDQVMKAIEHGVAVSRDAMYNRYGLPRPHDDEDTFIKETPASLTLSDSNKSENGKKKALQPKPMIRIM

SEQ ID NO: 95444 - protein, 462 aa, Unknown
  Obtained from environmental sample
  DOMAIN (395)...(462): UvrC Helix-hairpin-helix N-terminal
  misc_feature (1)..(462): Xaa is any amino acid
AELQAADAPTEPGVYIMKNDSGEIIYIGKAKSLKNRLKSYFSGEKDIKTATLMRKVRSIETIIVPSEFEAFLLENTLIKQHSPKYNIDLKDGKTYPVVRITNEEYPRVFRTRRIIQDNSLYFGPFPNSQALALMLEIVDKLFPLRKCKKMKKDGPCMYYHIKRCMAPCCKKVNVEDYRFNVQKIQELLSGKIDTLIIDLTAKMHEAAKALQFEQAAKIRNSIKTIENITEDSAVEDLNPEDRDYITWASEGVLATFTVFSMRGGKMTGRDLFRARSAADEWESLEIFITTYYDSTRPPPAKIYIQNNITQRRRTFGSQGAEDAEEDEENDKNENNIEKGELIKNWFREKFGYEPELLSGEEKHHGAILAMAKQNAAEDLRKRLKERGAGPALDELLRVLNLQTKPERIEGFDISHLDGKHPVASLISFKNGVPDRKNYRYFKLRTVIGIVDDFAAMREAVLR

SEQ ID NO: 95445 - protein, 414 aa, Unknown
  Obtained from environmental sample
  misc_feature (1)..(414): Xaa is any amino acid
NRTSLYPGTSAPILNTDDVFVVDAVPASDANETTFRVVSNTGTATAIPTISLPSGTTFLNAGYPLSLTISAATVTSGTIVPSNNAGDTPPAVVSNLAHGSKDVPVTFTAVCASPTTATNTELYTFKMLAVAEYRFQLMNLPTSAGSYGIDVQVITYKPGTDGENANDPQNINITQNSTQFTRYYRGVGIFDPDDAVNGSTKIISRYNNGRNVFSYDGSGSFGTANTSDKQIGNATTPVISKVYNVRIYPSEIEQIADVRRTLNGLAGKPAAGWFSGTGYNLYPTNATANFAAGTFEDDVNTLQVQYMGTTVPTIGVPSSIITSTGDEYDYDLVRSTLTNTTSIQTSTLTFTPTGGGSDSAVFKIRVIPLTKYSVIYMNGATGTVLIDPPATTFPSGQLMINATPGTPKDGSRGT

SEQ ID NO: 95446 - protein, 480 aa, Unknown
  Obtained from environmental sample
  DOMAIN (262)...(423): Protein of unknown function DUF115
  misc_feature (1)..(480): Xaa is any amino acid
AVSVWEKNAEVLKNQYTGLLEDITQEEFITTEVCCPADSLEFHGGKKDSRTKTPCNSVPPVVNSSLLDTTLTPDDIKIITASSGDPSLCVKGISIHSGRDPAREGLRIAQSAAGNGPVVILGFGLGYAACAAAQAVEKGRPIIIVEKHRKLLVKAFETRDFSSFLSNNRIIFVVGGTGEGITNALNIADGFISAGEKSEPVVIRSKPLIEMDKEWYGVVEEKLRTWSMRDDVNSATLKRFGKRWVRNLSRNISAIRDYAGISRLAGLAAGINEGIAAGVTEGAPVFLAAAGPSLDKVRPFLLEIHKRCVTVAVDTSFRFFTDNGIQPDFVLVVDPQFWNSRHLDRCPCGNTALIAESAVYPPVLRLPFKNIFLCGSLFPLGSFVEKRVDPKGALGAGGSVSTTAWDFARTLGSKEIWIAGLDLAFPGLKTHFRGAVFETRSNTASNRFNPAETWVVRALRDGYPFKAPCAQGGQVLTDRR

SEQ ID NO: 95447 - protein, 541 aa, Unknown
  Obtained from environmental sample
  DOMAIN (128)...(265): GSPII_E N-terminal domain
  misc_feature (1)..(541): Xaa is any amino acid
GSDFEEVADLVTSSGIDKPFRFYTGDLAKYHNLDCELVMVVIGAGADIDKYAKRIGELRRHGRAVTFVCVAHDKDRAVVESGKDKLGADDIIFLPMAQEWFADVLNKYISGGRRAVVAGGPPKLGDLLVKNGLITEKNLADALEHQKKTGQRLGDALIDLGLITEEQKIFCLASQLNVQIAAARQYASIDLNVVALIPEHMAKRFCCLALEKNDKELVVVMTDVLDLKMLDTIRDAADMLIVPVLGKKEDIETLIERCYRDISSRNEAAQFAESIEKEEVEAVKKKEEDIDLEQATAAGAELGVVKLVNILIANAVRDKASDIHIEPQENEVVVRYRIDGDMRKVMSPPMRSHHAIVARIKILSNLNIAERRLPQDGRMMVKIGSREIDIRVSILPTIFGEKAVLRILDKEAFEKGTSNLGFTPYDEKIFKAQISKPYGIIIVTGPTGSGKSTTLYSALQNVKDVTKNVVTVEDPVEFHMEGVNQVHVNTAIGLTFGSALRAILRQDPDVVLIGEIRDNETADIAIKMALTGHLVFSTLHT

SEQ ID NO: 95448 - protein, 165 aa, Unknown
  Obtained from environmental sample
  DOMAIN (111)...(160): Sigma-70, region 4
  misc_feature (1)..(165): Xaa is any amino acid
MTEAEFRQLFNSAFPVLYKVACRITNSGEAAEDLCQDAFFRLHEKNMVFPNQEEAKYWLIRVVKNAALNYAKRKQRERKAYQRAFKENTRQEETGEAQLVKKETRQEVLEALDKLPENLRIVLILKEYSEMNYREIGRALGINEGNVKVRVFRARERLTALLHGI

SEQ ID NO: 95449 - protein, 675 aa, Unknown
  Obtained from environmental sample
  DOMAIN (464)...(613): GAF domain
  misc_feature (1)..(675): Xaa is any amino acid
LISQILLSLVILAVAISIGTVTTQYRVSKRGTHARYASQAEIAAQLAASFVSAKEVDFYLKTLEIDDNYHRLLDTLKSIQTLSGMTYVFVSQITDGGEFFVFDTDPEEDSHMALGSFSDWEESGIDSSLVPVLSAGKKPAPYISETEWGFFLTAREPIYRHDGTTAGYAGANFYMGTVLADQANSFHINIIVTIFVFLTSLVMYFLIVYKLVAAPLRTLTVNVGKLSSGEVLPLVLASRENEFSLLEDTFSDMSKRNAYSNKITDVLNKTAIIFLSQRDGTFDDTMTHGLKLFCDALNLDTVSIWRNFHESDGLHVSQIYRWNRESGGTTKPQPGLEDITYAELAPQWEYLLAVGKFINSPARLLPEAAMLKSFGIASVFVEPLLINNVFWGFALFGDHRDERYFDEDSMGVMRSAALLCANTVVMHEKTQNERKTNEILERRMKYTHALNRMLEIFVSGAEGSTDAIMGNGLWSVMDVTSLDRLLVFRARNPHNNDVNERKAGEIYRWDRDRQGTAPVDDALKTLPVTTALKRWLGAMMNDECVSLRRSEFTEDEAAFLSPRGVKSILIVPVFAERNLWGVTTFHDNAEERDFDDECIAMLRSTARLCVNMLQRTEMENVLSNAEKNARELKIEADKINYDALTGIYSRRYFDEGMKRIINSLSRSDCLLSLLM

SEQ ID NO: 95450 - protein, 98 aa, Unknown
  Obtained from environmental sample
  misc_feature (1)..(98): Xaa is any amino acid
THNRKTVAGAGTLLGVTMEESGVTKMISVRLENEDLAIAEESPPQQGLWDSDGNFEEEDVENEEGRQLPTGVNDPKKVSEEQLRPIRAKVKQPTEEAK

SEQ ID NO: 95451 - protein, 97 aa, Unknown
  Obtained from environmental sample
  misc_feature (1)..(97): Xaa is any amino acid
MIKRYLLLYFFVLTIPLCLALLVWQSNRYQNLVKELDRLEHSQTEWIESNKRLIAGIGEYSSPERIENVAKSKLDLQKIPPEYFLQVKITGGKGHGH

SEQ ID NO: 95452 - protein, 472 aa, Unknown
  Obtained from environmental sample
  misc_feature (1)..(472): Xaa is any amino acid
MDAELIAYIKEKYPQVICAIATCWEEGPKAYRTCNNSWYTLFDGGPWNPWIPSRQNTHAPAANESEDSGIVAIPHLSRDLLACFDGNGSNFGTHPQNVLRGMIYKGGEYPYLFNLIDQYRHLEKYNGGEAYNMVFVGPGWMNKAGRWEVPFELSVKSYEDCLAYYGKLKKEGHCVDMTMAEYAGYFRTKKSYTTPECALWKDILYGSNKQLFWYCDPFMRACVDMNQGGALIDLRPYAAKINWPVGIGTKHVQDASYPFLVQSMYRAGYFTHYAGEGTIRSLKIHYNGEEADLCLCRTKAKFSQNGKTRSLTLDPVEIVFSDLTLTLQTVYDFEEGSSAIKTTRKILSMSKPAETEFEEYITACYGTTEYPEDMTCVTLTVRNADGGADGDAVDGKVINYNYKCREIKSADAVCVSAEIGAINTRVDFEPSGNTEGYVREGYAFSPMFTLGLKKKIGEGGEFVSWLRLKKAK

SEQ ID NO: 95453 - protein, 310 aa, Unknown
  Obtained from environmental sample
  DOMAIN (5)...(310): Glycosyl hydrolase family 53
  misc_feature (1)..(310): Xaa is any amino acid
MIEIGMDVSTLEETERLGGKFYEDGKEAPFYDILKKHGVTSIRLRLWNNPFDERGENYGAGGCDIETVLRAARRAVKNGMNWMLDFHYSDFWADPARQLIPKAWRGFSLEQLEKAVYEYTKETLARCKNEALYPRYVQIGNEITNGMLWPAGRVDYDNVSGEPVNYSNLTRLLKAGVAAVRESGDVKIIFHLEKSCDNARYRQWFDAVTTEGVNYDIIGVSYYPHWHGTMQKVKHNLEDISERYNKDVMVVETAYPFTDKHYADIPGVSLVITDRISLSDPPPYPHSIEGQSLFLRDLVNMVKSIKRCKG

SEQ ID NO: 95454 - protein, 371 aa, Unknown
  Obtained from environmental sample
  DOMAIN (3)...(367): Glycosyl hydrolase family 53
  misc_feature (1)..(371): Xaa is any amino acid
MMETGMDVSTLEETERLGGKFYERGKPAPLLDILKRHGVTSVRLRLWNDPFDEKGETYGAGGCDIETVIRTARRVTENGMNWMLDFHYSDIWADPARQLTPKAWRSFTLEQLEKAVYEYTKKTLAHCKDEALYPAYVQIGNEITNGLLWPVGKAEYDKVSGDPVSYGNMTRLLKAGAAAARESGNVKIILHLEKSGDNARYRQWFDAVTTAGIDYDIIGVSYYPHWHGTMRALKYNLEDVSARYNKDVMVVETAYPFTNEYYSDIPGVSLVISDKIKSPLGSPPPYPHSVEGQSLFLRDLVKMAKSVKRCKGLYYWEPGWLPLDGSTWAAESARKYIGEEHKAGGNEWANQCLFDYKGNLLPAINELDGLQ

SEQ ID NO: 95455 - protein, 277 aa, Unknown
  Obtained from environmental sample
  DOMAIN (5)...(275): Beta-galactosidase
  misc_feature (1)..(277): Xaa is any amino acid
LHGGDYNPEQWLKWKDTVWKEDMRLAKLAGVNTLSVGIFAWAALEPSEGEYRFDWLDEIMDMMAENNMAAVLATPSGARPAWMAQKYPEVLRVNAYRQKNLYGERHNHCMSSPVYREKTALINTRLAERYKEHPALAVWHISNEYSGECHCPLCQENFRSYLKKRFGGLDALNEAWWNSFWSHTYTDWSQVESPGPLGEVNVHGLNLEWRRFCTEQIVDFYLNETVPLKKFTPNVPCTTNLMTGVSGVDNFRLARALDVDSWDSYPQWTGTEKDIET

SEQ ID NO: 95456 - protein, 361 aa, Unknown
  Obtained from environmental sample
  DOMAIN (104)...(317): Methyl-accepting chemotaxis protein (MCP) signaling domain
  misc_feature (1)..(361): Xaa is any amino acid
NIKSKDEIGGLAKDVNFTLGKIKDLIVVIKRQANVLKEIGNDLASNMTETAAAVNEITSNIQSIKSRVINQSASVTETNATMEQVIVNINKLNGHVDNQSRNVSQASSAIEEMVANINSVTNTLVNNATNVNTLIEASEVGKTGLQEVASDIHEISRESEGLLEINTVMENIASQTNLLSMNAAIEAAHAGEAGKGFAVVADEIRKLAESSSEQSKTIGTVLKKIAESINKITGSTNNVLDKFEAIDSGVKTVSQQEENIRNAMEEQEQGSKQVLQGVGHLNEITRQVKNGSEEMLEGSQEVMKESRNLEKVTQEITGGMNEMAAGADQVNIAVNRVNEISVKNREGIANLMKEVSRFKIE

SEQ ID NO: 95457 - protein, 81 aa, Unknown
  Obtained from environmental sample
  misc_feature (1)..(81): Xaa is any amino acid
MDTITVCMGSSCFGKGNSANADFITRFIEEHNLQDSVEVSGCLCSNACARGPNIKINDKLISGVSEQTIEEIIVKELGLQL

SEQ ID NO: 95458 - protein, 252 aa, Unknown
  Obtained from environmental sample
  DOMAIN (5)...(218): Phosphotransferase enzyme family
  misc_feature (1)..(252): Xaa is any amino acid
MDNYKLEKIIAVRTAKTIYRDGSKVIKLMGEEYPASDILSEALNLAAVGETTLKVPRLVEVTKINGKWAIVWEYVEGTTLDKLMEKNKDKEQQYLERFVDIQLDMHRHSATRLPRLTEKMERKIKASGLDATARYELLGRLAGMPKHTKLCHGDFNPSNVIINDRDEAYIIDWSHAAQGNASADAAQTYLLFWLTGNITLADKYLTLFCEKSDTAKQYVEKWLSIVAASRLPKAKPEEKEFLLHWANVVEYE

SEQ ID NO: 95459 - protein, 671 aa, Unknown
  Obtained from environmental sample
  DOMAIN (468)...(662): Methyl-accepting chemotaxis protein (MCP) signaling domain
  misc_feature (1)..(671): Xaa is any amino acid
MKIKIKLSLIVIAIVVVVAGSIAIILLQKASKIILEDSLESIGYMGDEQARFWEGRENRYFEVIRTIAAIAGDFKDTAPSERRDRNDDILLAALNSQPNIIRIAAVYKPDALDGMDSRFIGRLGSTPTGQYSMTWSRETGEIKGSANLDILGTMTYLNGPNARKDRVEDPIPLKVQGKDTFVFRLGVPVINNLTNEVVGSVTCLLTIDGAQPRVEETIKAKEEIVAMSMYTNTGFIIASYVPERVGKNLLDVDSIYGEYIKDAYQAVVEGKDFQCESYSQVLKTDVSIDLTSFQIGDSDVRWTIMIGASEGYILQDVKDMTYFTVILTAIALVLAVIIVYFTLNSTTKPIVTVADTLKDISEGEGDLTRSIAVRSKDEIGDLAKYFNKTLEKIKGLIIIIKNEAKGLSSIGNDLASNMSETAAAINEITANIQSIKGRVISQSASVTETHATMEQVVANIDKLNGHVENQSNNISQASSAIEEMVANIHSVTETLVKNATNVNTLKEASEVGRTGLQEVADDIQEIARESEGLLEINSVMENIASQTNLLSMNAAIEAAHAGESGKGFAVVADEIRKLAESSGEQSRTIGIVLKKIKNSIDKITHSTDNVLTKFEAIDSSVRIVAEQEGNIRSAMEEQETGSRQILEGIGNVNEITRHVKNGSNKMLEGSK

SEQ ID NO: 95460 - protein, 427 aa, Unknown
  Obtained from environmental sample
  DOMAIN (171)...(384): Methyl-accepting chemotaxis protein (MCP) signaling domain
  misc_feature (1)..(427): Xaa is any amino acid
GILLNDIIIENNKLGEMSKRIIMAVIIAAIIISFFLSLIITSNITKPILKVAGALEIVAEGDMTHSVDVDTKDEIGDLARDFNNTMKKIRNLVKNVKREADVLSEIGNDLASNMNQTAAAVNEITANIQSIEDRVINQSASVSETHATMEQVVVNINKLNSHVENQSRNVSQASSAIEEMVANINSVTDTLVKNSSNVKILTEASEVGKTGLQEVVTDIQEIARESEGLLQINAVMENIASQTNLLSMNAAIEAAHAGDAGKGFAVVADEIRKLAENSSEQSKIIGGVLKKIKSSMDKVILSTGNVLKKFEAIDSNVNIVSEQEENILSAMEEQGKGSKQILEVVSNVNEITKQVKGGSNEMLEGANEVIQESDNLEKTTQEITGGMNEMASGAEQINTAVHHVNEISSKNRAGIDTLMREVSKFKV

SEQ ID NO: 95461 - protein, 253 aa, Unknown
  Obtained from environmental sample
  DOMAIN (13)...(233): Pyruvate flavodoxin/ferredoxin oxidoreductase, thiamine diP-binding domain
  misc_feature (1)..(253): Xaa is any amino acid
MTRLVRGNEAVVYGALLAGCQSYYGYPITPASEIAHTAAYYFPQLGRTFLQAESEIAAINMVYGAAAAGERTMTASSGPGISLKSEGLSYLAGAELPAVVVNVMRAGPGLGNIGPEQSDYNQMVKGGGHGNYHLIVLAPNSAQEMCDMTILAFDLADRYRTPVAVLADGVIGQMMEAVKFPKPCDTSPAKPWAVRGDAATRPNCHTSIYLDFEELEAHNRKLIMKYAEIEAREQRWQGLMLDDAEVVIVAYGV

SEQ ID NO: 95462 - protein, 266 aa, Unknown
  Obtained from environmental sample
  DOMAIN (215)...(261): RNA-metabolising metallo-beta-lactamase
  misc_feature (1)..(266): Xaa is any amino acid
VRFGFSGDIGRENIPLIHDPDILDNLDFLVMETTYGNRLHSQKFSDAEDALANAITNAINQQAGTILIPAFSVGRIQLLVYILHKLRDRGVIRDVPIFVDSPLGLHATEIFQKHLEILDREVHRFYIDRKIDPFNFNGLHYIRSLDDSMKLKDKSVQPRIIISSSGMMEGGRILYHLTNHIEDPRTTLLFVGYPAQNTLARYISDGEKEVKIFGEPFKVRCKVEKLDSFSAHADKSGLEKYLSFSSPHNLKKLFLVHGESDSAQEF

SEQ ID NO: 95463 - protein, 169 aa, Unknown
  Obtained from environmental sample
  DOMAIN (9)...(168): Class II Aldolase and Adducin N-terminal domain
  misc_feature (1)..(169): Xaa is any amino acid
MDIYKTLREEAFEANREIKRRGLAIYTWGNASAFDSAKGVFAIKPSGVEYDELKPELMVLVDLEGAVVEGGLKPSSDTKTHLVLYREFKGIRGIAHTHSPYAVAWAQAGKPVPVFGTTHADHCAYEIPCTNFMNPQDVKNNYELETGNLIVNTFKNGNLDCLQITMTLV

SEQ ID NO: 95464 - protein, 582 aa, Unknown
  Obtained from environmental sample
  DOMAIN (30)...(257): Caspase domain
  misc_feature (1)..(582): Xaa is any amino acid
MKSSPSVKVFLITLGLLLYAPAVSQASGPRYALVIGNGGYRHVDSLANTVNDATGIAKKLTGLGYSVEVLFDSDLAGMTRAVSAWIRQLSTDRASEGFFWYAGHGIQVAGENYLLPVDINAEDEAGIVYGSYPLGRLLLSLEQTARNKLNVVVLDACRDNPFKNLPGGSRGLSRGFTTVEHPPQDIFVMFSTSPGTTAADGDNGQNSPFAEAFLKYMDSDEILPVMAGLVTRETMRLTGGKQRPYQNGSIVSELYYSLSSSAIAPASAPAPARELPAGSNAASLSTAPSGVPPVGNPPSVAVPSPAMAAIPAGSFFMGSPVIELDRDPFGETRHRVSMSAFYIASKELSVGEFRRFVEDTGYVTTAENDGGAQAYDEAKNEWVFRAGANWRNPGFRQGDDHPVVCVSWFDAVKYCNWLSVKEGLKPAYTIADQTVNWDKRANGYRLPTDAEWEYACRAGTTTPLSTGESISTSQANYNGSIAHNYGNIGLFRKATVSAGSFPANAWGIYDMHGNVWEWCWDYYSNPNTTQLSNPTGPASGTHRINRGGGWSSPGKLLRSAVRASDFPETAGSNLGFRIAKNK

SEQ ID NO: 95465 - protein, 265 aa, Unknown
  Obtained from environmental sample
  misc_feature (1)..(265): Xaa is any amino acid
MEFPRIDLSHYRESRRYPIGGYVTLFSREDKQKPALITRIVKKSLAEGKPVVIGMNTPDSFIEAKNVWEPTENPGRFYGGHAMCVVGYDDDKSAFELLNSWGRKWGNGGFIWVPYKSFVDFVMESYEMIENLAIYSDTVKYEGFSRIEILGRGAPRPAALVFSPEGYYKTAESFTEGTQFRFVVGAGESAYVYSFAVSRPSRDNNFYSPILLFPQTGISPLLNYRDSAVILPGEDKTLALDAEAGAEFLIRFTRNSPLTYRPLCG

SEQ ID NO: 95466 - protein, 447 aa, Unknown
  Obtained from environmental sample
  DOMAIN (29)...(216): ABC transporter
  misc_feature (1)..(447): Xaa is any amino acid
VLAIEMLNISQVFPGVIANDNVNLRVRNGEIPPLLGENGAGKSTLMSMLFGLYEPSSGVIKIRGEEVKIRSPNDATNLRIGMVHQHFKLVHNFTVTENIVLGMEPHDKLGNLDLGSAEKRVAQLSEIYGLAVDPAVKIENISVGMQQRVEILKILYRDADILIFDEPTAVLTPQEIDELLSIFRRLKAEGKTIVFITHKLKEIKAAADRCTVLRRGKCIDTVKVDEANEEDLAEKMVGRAVNFKIDKGPAKLGNTVLSIRNLTVLGSRGIPMVRDLSLDVRAGEVVGVAGIDGNGQSELVAAIAGLLPVKAGKIFLKGKDISTWTIRSRNESGIGLVPEDRHKHGLVLDFRLDENLILKSYRLLPFTNRMGFLNFNVILKHAESLIGDFDIRAGSGPATPARSMSGGNQQKVVIAREIDLSPDLLIVSQPTRGLDVGAIEYILLSDH

SEQ ID NO: 95467 - protein, 67 aa, Unknown
  Obtained from environmental sample
  misc_feature (1)..(67): Xaa is any amino acid
LNTYSCLIIKERDKGKAVLLVSFELDEILGLCDRIAAVSKGQVVGIVDAEGADERQIGAMMGGIARG

SEQ ID NO: 95468 - protein, 290 aa, Unknown
  Obtained from environmental sample
  misc_feature (1)..(290): Xaa is any amino acid
MRLGLVQIFEAITGETENVLPGSIDADSKARNDSQGELFGEFENKPEYFSNINETDIAIAAGMHMKTGIDFSVLRPEILSLFELSRDAFGAIVYAWMSELPVTEQIVRFGKKILASQNTVSNENKLRGKLEADQRKAAQIAATDRGDFDVQAVREAAYKAWHEVHRLMGLLRFCPDEKGVYTAHCEPDHFVLPALGPHFMDRFGETPWAIIDNKRRLSLCCETGRTGASGKTLVFSAGAENESSFGKGQTGEWENLWKHYHKIINNESRNNPDLQKRFMPTRYWKYLTEL

SEQ ID NO: 95469 - protein, 413 aa, Unknown
  Obtained from environmental sample
  DOMAIN (149)...(369): Methyl-accepting chemotaxis protein (MCP) signaling domain
  misc_feature (1)..(413): Xaa is any amino acid
MIRFVIVFVIILLALAVVITLLVANGIVKPILGVTATLKDISEGEGDLTRTVAITSKDEVGDLATYFNKTLEKIKGLVLIIKKQTNVLSDIGNDLSSNMTETAAAINQITANIQSIKNRVINQSASVTETNATMEQVIANINKLNNHVENQSRNVSQASSAIEEMVANISSVTSTLVSNAVNVNSLKEASEVGRAGLQEVATNIQEISRESEGLLEINAVMENIASQTNLLSMNAAIEAAHAGEAGKGFAVVADEIRKLAESSGEQSKTISTVLKKIAESINKITSSTDNVLARFELIDSGVKTVSQQEENIRNAMEEQGQGSKQVLQSASSLSGLTQQVKSGSEEMLNGSQEVMHESQNLEGVTQEITGGMNEMASGADQVNVAVHNVNELTNRTREGINSLLKEVSRFKVE

SEQ ID NO: 95470 - protein, 79 aa, Unknown
  Obtained from environmental sample
  DOMAIN (8)...(65): Protein of unknown function (DUF433)
  misc_feature (1)..(79): Xaa is any amino acid
MNELRAHIVVDPEIRFGKPCIKGTRITVGDILQWLSTGMTEQEIIADYPELEETHIRAALAFAAERDAMTKVITHETVA

SEQ ID NO: 95471 - protein, 246 aa, Unknown
  Obtained from environmental sample
  DOMAIN (59)...(231): Glycosyl transferases group 1
  misc_feature (1)..(246): Xaa is any amino acid
MPELTSGIGLSARMWFYRRAYKKSRKIFTVSKFSKSRIQHHLGIKKPVIVTHSAIQPMFLAYRANIQNIQKTQTIVFVGNIKKHKGLDILIDAFILAKNEGLPHKLFVIGAKENFRTSDNTVLKKIEALGGEAVTFTGFISDEQVMEYLSKAALLVQPSLYEGFCLPPLEALVLGTHALISDIPVLKEIYAGYPVTFFRNGDSSDLKEKMMGLLFNKKPSSPILSDDLLLKYTFDKTASVILKELK

SEQ ID NO: 95472 - protein, 205 aa, Unknown
  Obtained from environmental sample
  misc_feature (1)..(205): Xaa is any amino acid
MKVAIIHYWLVNMRGGEKMLEALLEMFPEADIYTHVYNPKAVSPLIKNRRVFTSRVNRLPFAKKLYQLYMPFMPNALIDFNLQQYDLVISSEAGPAKGVVANPGAYHLCYCHSPMRYLWDMYHEYFRRTNPLVRFFMKRLVPRLRLWDISSANLVDRFVTNSHYVAKRIRRVYNREAEVVYGPAAIEQYLNAERKPSDYYLSSGR

SEQ ID NO: 95473 - protein, 201 aa, Unknown
  Obtained from environmental sample
  DOMAIN (59)...(168): NlpC/P60 family
  misc_feature (1)..(201): Xaa is any amino acid
MMKPLFISVFILVSAGLFAAPLESNFVKAPASSASQAEKEQAYMDARNRVIKAAAKYENVPYRHGGVTKSGVDCSGFVYASFKDALGVSTPRSSTGLYTWAEIIPLEKAQPGDLLFFKTTGGSTISHVGIYLGNRRFIHSASAGPNTGVIYSTLDEKYWSRAYAASGRVFPKPRDTTPFWQARKDRPLRPPPAAGAISPPS

SEQ ID NO: 95474 - protein, 500 aa, Unknown
  Obtained from environmental sample
  misc_feature (1)..(500): Xaa is any amino acid
GHKLVLMNISTYTVKPKLPAVLKPLEEIACNLWLSWNYDAIQLFIRLDYDTWLKSQQSPMRTLGMVSQERLAQTAKDDSYLAALKEIYDRFQRYKKGETWYRGSHKDVVAYFSMEYGMDVSLPIYSGGLGILSGDHMKTSSDMGLPLVGIGLLYRQGYFTQMLNADGYQQESYPENDWYNMPVERKNGKDGQPLKISVDLAGRQAIAQIWEAKVGRSSLYLLDTNIEENAPDFRNITASLYGGDKETRMQQEILLGIGGIRALRALGINPAATHMNEGHAAFLGLERIREIMEEKGFTFEEAREAVWPSNIFTTHTPVPAGNERFEIPMMEKYFRSWPQVLGISWKDFLGLGRIYPGDERETFCMTVLALKMAAYANGVAKLHGVVSRDMWKGIWPGLPLNEIPIGHVTNGVHSRTWISSGMIDLLDRYFGPSFLDKPTDLQIWERMDRISDEELWRTHERRREKLVAFVRERINAQYVRTGAARLKQAEDALSPYALTL

SEQ ID NO: 95475 - protein, 620 aa, Unknown
  Obtained from environmental sample
  DOMAIN (401)...(615): Methyl-accepting chemotaxis protein (MCP) signaling domain
  misc_feature (1)..(620): Xaa is any amino acid
LSNIFNFYESIALADRREQFEDNIDGIFEDMPDLVRMGTVWKPNAIDGQDSRYIGRVGSTETGQFAYTVTREFGTTQAIANQDVPGIMAILNGPNSKVVSMGDPVPMKNQGRDTFCVRITVPIINKRLNEAVGAILCQLDISIIQPTIERTIKVNDEVTSVVIYSNNGFILANYLPEFIGKQIDTEGQYGKSMNAVKDAIRKGEEWQGEEYDPDLHTNMVMGIANIPIGQSPVTWSIMIGTTEDYIMRDVNKMTVFTVILASVALVVSIIIVYLVVTAVTKPIINVTYNLRDIAEGEGDLTNELHIDSKDEVGELAKYFNRTIGSIASLIKRIKYKVNALTNTGHELEANMEKTAKSVEMIEKNFEGMKSKMSKQDESAAAADKAVKTIKDNISNLGRLIESQSESINTSSSAVEQMTANIHSVTRTLIENSKNVTELTGASENGKIGLQGVAEKIKEIAHDSEGLLEINSVMNKIASQTNLLSMNAAIEAAHAGEIGKGFAVVADEIRKLAETSGQQSKTTATMLKKIKASIDSITVSSDEVLSRFQVIDNGVKTVSTHELNIRNAMEEQEVGGKQILESIEQLKEISVAVKKGAEDMMASGDQVSQQTTEFITISNEA

SEQ ID NO: 95476 - protein, 143 aa, Unknown
  Obtained from environmental sample
  misc_feature (1)..(143): Xaa is any amino acid
MPDLSQVIDEQLPQPVRLDRYVSENLRILSRSQIKARSLTAKVNGKEVKNSRLVKKGDLLELRWQDCPPVNIIPQDIPLEIIYEDDNCVVVNKAQGMVVHPGAGNRQDTLANALYFRRLNRDGAESGADTDNVRPGIVHRLDK

SEQ ID NO: 95477 - protein, 277 aa, Unknown
  Obtained from environmental sample
  misc_feature (1)..(277): Xaa is any amino acid
MNIRQVSAINLDPEIVDCIVFWSKNPKPMIDKFQLIKDYKYYFQFTLNPYDSDIEAGLPPKPEIIETFKKLSDIIGPQKVIWRYDPILINSKYNTAYHIDKFEKTANVLKGYTEKVIISFIDFYKKIAENIKLLEIIEISMEEKKTIAQKFSEIAKNNNFSIDTCAEDIDLSEYGISHARCIDDRLISKITGYNLLVEKDKNQRPECGCVKSIDIGEYNTCPNGCVYCYANYSNNIVKKNIKKHIQSSPLLTGDICPDDIIKERKVTSEKILFPLLA

SEQ ID NO: 95478 - protein, 90 aa, Unknown
  Obtained from environmental sample
  misc_feature (1)..(90): Xaa is any amino acid
MPLRMLHYISEIYNRLYDKKDLYKKEKISIPKPVFIVLYNGEEDIEDFQEYLLSDLYKDFDISKDPLYLELKVQVRNINKGHSVEMPVAS

SEQ ID NO: 95479 - protein, 64 aa, Unknown
  Obtained from environmental sample
  misc_feature (1)..(64): Xaa is any amino acid
IEAAPDSDQAKVYTQLAERIAAHEESKTPSPLELDELRTWAASWSDKLLALETGVVVGGERAGI

SEQ ID NO: 95480 - protein, 437 aa, Unknown
  Obtained from environmental sample
  misc_feature (1)..(437): Xaa is any amino acid
MRRNLFLKLIVTISLTTLLANCGLGSDVETLRQRALEANSKITVAAIKGVTAPVTGETPVTSITENVQYTGTVTWSPSHSTFAPLTVYTATITLTPKAGYTLRGVAANFFKVAGAKSVSNAANSGVITAVFPSTAAIVINTAAIAGVTPPIAGGTPVASITATAQYTGTVTWSPSHSTFAALTVYTATITLMARAGYTLAGVAANFFTVAGARTVGNDANSGVVTAEFPATTPSGASVINKAAIEGVTVPATGGTPVTAVTGNDQYTGTVSWNGSPAVFAASTVYTATITITPKTGYTLQGVAANFFTVAGATKVSNSANSGVVTAEFPATPPHAASVINKAAIEGVTVPATGGTPVTVITGNDQYTGTVSWNGSPAVFAASTVYTATITITPKTGYTLQGVAANFFTVAGAKTASNSANSGVVTAEFPQTSPPAIT

SEQ ID NO: 95481 - protein, 399 aa, Unknown
  Obtained from environmental sample
  DOMAIN (76)...(154): Bacterial Ig-like domain (group 2)
  misc_feature (1)..(399): Xaa is any amino acid
LKTGATASLTVTVSPANASDKTVTWNSNKTNIVTVNEDGLITAKAVGYSIITASAKDDSGVSSLGIKVTVTDAPILVETIIINGGNNVILTEGQTRKLSLSVLPAVAGNKNVTWSSGDPQKVEVNQSGDIKALSGGTAVITAAAQDGSGVSGTITVTVTVEEPGDYMTPQEIFASLKGQKVTTNGWADQANSGAGLSYANPASLTLIDDASYPAAKDKYQAFINANVTNANINSSTGVISGGNVINEQKFIIISGDIDLSNGRINDIDKSFYDKFNTASPYGRVNGDIVLNIGSNTTIIGINNARIMFGGIRINNRSNVIIRNITFYDAHGSTEADTKYNPDSKASIDSLVVQGNSDGVWVDHCKFTDGTCNDMIRNYNHDGAFDIPKGKNITVSWCEF

SEQ ID NO: 95482 - protein, 365 aa, Unknown
  Obtained from environmental sample
  DOMAIN (171)...(365): Pectate lyase
  misc_feature (1)..(365): Xaa is any amino acid
RFGKNHESEGWLESLYVKWNILDGAGSYNVYYKGGSDAGWTIIDDPLIREYDSYFRADILGLAAGNYQVKVMPVNKDENEYGTEAVTPLIEVLPHDRSGFAFSPASPNKTSSGAYNDNGTLKTGAQVIYLTAANAKTIELTVKESDKKTTLCVGIGDILAKRQKGYDSTPLAIRIIGVITAADMSSQLNSLSLLDFKGNKRGNIANITVEGVGNDATAYGWGIHIRSYYNLEVRNLGFMMFPDDGVSLEVDNQNIWVHNNDFFYGKDGGGDKDKGDGSLDSKTSGYTTMSYNHFWDSGKCNLLGNGVEPAEYLTYHHNWYDHSDSRHPRVRFHSVHVYNNYYDGVAKYGIGATRNSSVFAEGNYF

SEQ ID NO: 95483 - protein, 531 aa, Unknown
  Obtained from environmental sample
  DOMAIN (5)...(527): Protein of unknown function (DUF1703)
  misc_feature (1)..(531): Xaa is any amino acid
VATNTATQRFLPVGIQDFRKIREKGYIYVDKTPQIYPLITGIEGAFFLSRPRRFGKSLLCSTLGAIFEGRRELFGEIAGRPALAIDGLDWEWKKHPVIYLDLYAGDYSEGKPVLNTVLQNKLENSARRYKVAPRGQTAPVQFENLIVDLHEHTGEKIVVIIDEYDCPLTDTLLNPTIHIQLRDVLKAFYGVLKSCDAHLRFIFLTGISKFSQVSIFSALNQISDLTFNPRYADLCGMTQEELEANFGPEINGVLESTGCSREEYMDKLRRFYNGYRFSEKILKVYNPFGLLNHFHEGGKFRPYWYRSGTPTLLTDLINERNFDFANLSNTQVGYEDFDTFDIENLGLEPLLYQTGYLTITDYDEKEKYFTLDYPNIEVRSAFAKSLATRCLKTPSNWSYSSCKKLMAALNGGDVDAAMEAVKLFMTKIPYDLFQKRENFFQSVIYVVFAMLGLDCRTEERIAAGRIDMVVETRGFVYCFEFKLDGTAEAALAQIDSKEYAIPWTGRGKKVFKVGVNFDFEKKNSGEVGCLR

SEQ ID NO: 95484 - protein, 395 aa, Unknown
  Obtained from environmental sample
  misc_feature (1)..(395): Xaa is any amino acid
MEADSGSSIKIPGQQTVSRTGYTFDGWNTNASGTGTTYTANWFYTVNGDVTLYAKWTSTSTTNTTYTLTTSVSPSGGGTVSRSPNQTSYTSGTSVTVTATAASGYTFTGWSGASTSTSSSVTITMNGDKTLTANFKQQPTYTLTTRVSPFNGGSVSRSPDQTSYTSGASVTVTATAASGYTFTGWSGESTAKSSSVTITMNGDKTLTANFTQRSGNYDVSLSCGNRACKTVNIAGQTWMAENLNYQMTESWCYGNSADSCAKYGRLYTWDAAKAACPAGWHLPTRVEWADLTIAVGGTGTYGTGGMAGKVLKSASGWGSNSSYNGTDAYGFSALPGGHNRGQNLELGHSGYWWTAPEEGPRNFTYYRYMSYDIDYVGEDNNSNIFHAYSVRCLQD

SEQ ID NO: 95485 - protein, 842 aa, Unknown
  Obtained from environmental sample
  DOMAIN (672)...(757): Hpt domain
  misc_feature (1)..(842): Xaa is any amino acid
MFDAMPLGASYHDANLKTIDCNEGMVKLYGLSSKKEFIDKFNELYPEYQPDGSLSKKKLADNINQAFVDGYLCKEWMSQNLKNEPIPCEVTLVRVKHYDDFIIAAYMRDLREIKAAVTEMNESIQAFNLLENMLNNLNTMIYVNVPQTGEILFINNYMKKHFKVEGDYLGKYCYKLFLKGRDKMCEFCPCPKLTENPKGIIEWEMLNPVTKRIYRNTSRFMEWSDGRTVHIQNSIDVNELIMAKEKAIHANNAKSNFLAKMSHEIRTPMNAILGITEIQLQNKNIPDYIQEALGKINNSGYLLLGIINNILDMSKIESGKLELSVAGYDVPSLINDTVHINVVLYDNKQIDLTLDVDGNIPSRLLGDELRIKQIINNLLSNAYKYTDEGEISMSISAEYQEDPSMVTLVFRIADTGQGMTKEQLNKLFDEFTRFNTDVNSKVEGTGLGLSITKQLVVLMGGKIDVESELGKGSVFTVRLPQKIDGDGVLGKEMAEKLRNFRSADLSQTEKKAQIVCEYMPYGKVLVVDDVDTNLYVAQGLMSPYGLNIETAKSGFEMIEKIKSGTVYDIIFLDHFMPKMDGIEAAKIIREMGYTNPIIALTANAIVGQAEVFTKNGFDGFISKPIDIRELNATLNKLVRDKYPAEAVEAARLKASTAPQRTVKQVDPASDLGLRAIFARDAESVMARLKSILDNSFRRNDDITQYVIDVHSMKSACANMGEEDASAFARRLEIAGQAKDIQLLASETPVFMEKLRGVIDKLKPKEEANAPENFENDLTFLSEKMLVIKTACENYDDVTANSALKELEQKKWSRSIKNYINALAMHLLHGDFEKAANIANDYL

SEQ ID NO: 95486 - protein, 199 aa, Unknown
  Obtained from environmental sample
  misc_feature (1)..(199): Xaa is any amino acid
TYTYGGSGGYGPTPTPPTNAGEYTLQISVPDTSTHYTGNERYTFTISKANPAYTAPTGLTATEGQTLASVALTTGWQWVTPTALVGTVGTQTHKATYTPTDQTNYNTLTIDLSVQVKSVETPIFSNRENPVIGRIGVQTINNTILLSNLPKNTRVEVYNLQGKRIYSANPVNPQILTIGVQTGVYVVKIGKQVMRVAVR

SEQ ID NO: 95487 - protein, 302 aa, Unknown
  Obtained from environmental sample
  DOMAIN (1)...(36): WD domain, G-beta repeat
  misc_feature (1)..(302): Xaa is any amino acid
LRHHEGHTYWVKSVAFSPDGTQVLSGSWDKTVKLWDTTNGQEIRTFMGHTSEVHSVAFSPDGKQALSGSYDKTVKLWDATNGKEIRTFGGHTSAVESVAFSPDGKQILSGSYDDTVKLWDANTGKEIRTFKGHTDRVTSVAFSPDGKQVLSGSVDKTVKLWDTTSGRELRTFSGHTEWVTSVAFSPDGKQALSGSWDKTVKLWDAASGRELRTFLGHTERVTSVAFSPDGKQALSGSWDKTVKLWDAASGREFKTFSGHKNSVFSVAFSPDGKQALSGSGDKTVKLWNTASGRLIRTFSGHK

SEQ ID NO: 95488 - protein, 94 aa, Unknown
  Obtained from environmental sample
  misc_feature (1)..(94): Xaa is any amino acid
VFEPAVNYFYPTLRLTAKEKLPSGRYKKIYEKDPKTPFQRLDESADLSDECKEELRRRKAGLNPVELKHALDGARDRLLKLSVIQSTIPSGKVS

SEQ ID NO: 95489 - protein, 91 aa, Unknown
  Obtained from environmental sample
  misc_feature (1)..(91): Xaa is any amino acid
MSKLEFRQLTDSLLSDPFSIEEYIKADGFSSLKKVTAMKSEDVISEISKAKLLGRGGAAYPGGKKWEHLLHIKETPKYIVCNADEGEPGTF

SEQ ID NO: 95490 - protein, 729 aa, Unknown
  Obtained from environmental sample
  DOMAIN (194)...(280): Glycosyltransferase 36 associated family
  misc_feature (1)..(729): Xaa is any amino acid
MEYGHFDAKAREYVITRPDTPAPWANYLGSPAYGAIISNNAGGYSFVKSGAAGRLIRYRFNEQDRPGRYIYLRDDESGDYWSASWQPVGKDLDQYRFICRHGTGYTIMEAEYTGLRSEASYYVPMDAAHEVWRLKLTNTGIAARKVSVYGFVEFTCESFYEQDQVNLQYTQFITRTYFKDQFILQTINENCLNAVNESRVETRFFGLAGAPVTSYCGDRATFLGSYRDYGNPVSVEKGHLDGTLNYNLNPCGALHTALTLAPGESVSLAFLLGQKREADAKALIARYEDSGLPDKEINELKTYWHGKLANLKVETPDENFNHMVNTWNAYQCFITFNWSRAASLIYCGQRNGYGYRDTVQDIQGIIHLDPEMALEKLKFMISGQVSHGGALPLVKYDHNPGHEDKPEDASYRTGTGHPSYRADDALWLFPTVWKYITETGNTALLDEEIPYADSGVDTVYGHLNKAIDFSLNHLGIHGLPAGLHADWNDCLRLGANGVSVFVAFQLYYAFEIMLRCALHKGDTAMETRMNELKHKFGAIIEERCWNTDRFVRGITEHDEVVGKPGDPEASLWLNPQSWAIISGFVPQERGRAVMDLVYQQLNTRYGARLMAPSYRRHAFDGALALLFNPSTKENGGIFLQTQGWLILAEALLGRGGRAFEYYLESCPAAQNPIAQTRLMEPYVYSQFTESVDSPFEGRSHVHWLTGTASTVMVGCVEGILGLRPDITAC

SEQ ID NO: 95491 - protein, 355 aa, Unknown
  Obtained from environmental sample
  DOMAIN (208)...(234): PBS lyase HEAT-like repeat
  misc_feature (1)..(355): Xaa is any amino acid
MRAIEEREDEENETVLAAIDYLGKLKVVSAAPVFKELLESGEKRFMNAAFRALGQVSGNDRDEAAEYLIDFYENRDAGSENQREIIAAAGATGSPKAVPFLAGLAGDNETRPVLRMAALEAIAKIGDPVGLDAVLACVSSKDPNIRAAAVTALGPFSGAAVDKAILDAFRDSFYKTRIAAAQASRQRKLVDAVPYLKFRAERDDVPTVKEEAIRALGAIGNSDALGILEELFTTRRNNDRVRIAAGEMLMQDAPDRFLDAFIKELDEAKQKNQTSLYNGLLKIIGGTKCPGLEPITRRLILDRGVIEKSIALDMAANNNLTALAPEIRTLAADKNEGLSRKAKQTLEKLGMRNEE

SEQ ID NO: 95492 - protein, 66 aa, Unknown
  Obtained from environmental sample
  DOMAIN (4)...(63): Ribosomal protein L35
  misc_feature (1)..(66): Xaa is any amino acid
MPKMKTKKSAAKRFSFTGTGKVKYKKQNLRHILTKKSAKRKRNLRHAGILSDDNVPAIRKQMLPYG

SEQ ID NO: 95493 - protein, 424 aa, Unknown
  Obtained from environmental sample
  misc_feature (1)..(424): Xaa is any amino acid
KTTVTALSAAIDRNASGREKAEFILNYMHKNVLKSYSLYQTRLDTMLSNGRYNCVSSAVLYAILCKSAGINTSGVMTKDHAFVMVHFNGQDIDVETTNSFGFDPGNRKEFHDSSGKTTGFAYVPPQNYRDRQTINQIELVSLILNNRVSDFERSNNFAASVPLAVDRAALLLGDSYMLTSSVSTSEFLFIDPRKDLMDRLINYGAVLLKSNKEEECIRWAVFASSTYPDNNRWQELFLAAINNRISSFIKERKISDARIFLENQKTHINEANYSQLDALITDADILNRANNFKTTDEGDEILADIEKARSSGRLNEKRAAELLTYTIQKAALALCAPPLRDWRAAIRYLENAISKYGANRELEQSIRTYKGNLAADYHNRFAAEWNKKNFDEAERILNEGLAEFPNDRQLLSDKQIISKQTGTR

SEQ ID NO: 95494 - protein, 127 aa, Unknown
  Obtained from environmental sample
  DOMAIN (2)...(127): Dihydrofolate reductase
  misc_feature (1)..(127): Xaa is any amino acid
VLISLIAAVAENGLIGKDNKLPWHLPADLHFFKKTTLGHPIIMGRKNFESIGKVLPGRTNIVLTRNANFAEVENLKVAHSLEEAFEIARETGTDECFVIGGAEIYKEALPFCQKLYITKVHGIFEGN

SEQ ID NO: 95495 - protein, 236 aa, Unknown
  Obtained from environmental sample
  DOMAIN (18)...(216): Metallo-beta-lactamase superfamily
  misc_feature (1)..(236): Xaa is any amino acid
MELTFLGRGAGFNPLEGSTSAYFLDKGELFLIDSGESVFDTLVEKKILDSVSALNIFITHTHSDHVGSLGSLLLYASVAKKFKTNIITDENMAYLPQIRALLEIYGLPERMYRFANVSEFDNRYSQFNSVRYIKTFHCDELETCAILFETSSGLVFYSGDMKDPAPLLALVKSGQRIDKIYMDSNNDPEPNPYHLRLKEIYDIVPPELRPRVYCMHFNSSRCMDDAVAVGFKVVEI

SEQ ID NO: 95496 - protein, 291 aa, Unknown
  Obtained from environmental sample
  misc_feature (1)..(291): Xaa is any amino acid
EIKTTFGMATFGDIVRSALEGLGNGSIAPPRPKLLLVDEYQDTSLAQDVFLGALGAERIVRVGDAKQAIYGFRGSSPELFQEHVRAAGDRAYRLTANYRSAPPIVDTVNTFVNDVWPAKDPFFTDFGAEQTPQAKGSCPVGAVFAASASKGTDLPGLSRWIAALSSEPGWEKTLGESQTADSRQTRALLLRQRTNLPALLMRLKRNGVQPYVLAKSGFWDSPGVRLLMAALEAYAHPSRPLPRMVLLRHFAGLSDLELHQMDRAKGIGSLDIESAPAEKRPRIAWLQSLKL

SEQ ID NO: 95497 - protein, 392 aa, Unknown
  Obtained from environmental sample
  DOMAIN (15)...(338): Aminotransferase class-III
  misc_feature (1)..(392): Xaa is any amino acid
MNDAFMNTYHRLPVILAKGDGAWVTDINGKKYLDFSSGIAVNCLGHAYPPLVKAISDQAAKLNHTCNYFLSDITGAFAEKLVAACAGAGMKKVFLANSGAEANEGACKVARKYSLAKYGPGRHTIVTLRGSFHGRTITTLSATGQDDFHKHFGPFTEGFVYVQGGDIDALEKALDPKTTAGFLLEAIQGESGILPQTPEYIAAAVKLCAERDILLMFDEVQTGVGRTGNFLACEGYGVKPDVVTIAKGLSGGIPSGAFLAGEKAADVLQTGDHGSTFGGNPIAAAAGLVVLETVTNPGFMKEIARKGQKMKDAVAGWNHPKITAIRGVGLMLGVDITVEAWPILEALISRAQNTDAGLLLLSAGKQTLRFLPPYIVSDGEIEQGLEMLRGVL

SEQ ID NO: 95498 - protein, 58 aa, Unknown
  Obtained from environmental sample
  misc_feature (1)..(58): Xaa is any amino acid
MNDAFMNTYHRLPVILAKGEGAWVTDINGKKYLDFTSGIAVNCLGHAYPPLVKAISDQ

SEQ ID NO: 95499 - protein, 199 aa, Unknown
  Obtained from environmental sample
  DOMAIN (6)...(149): Resolvase, N terminal domain
  misc_feature (1)..(199): Xaa is any amino acid
MKQHIEYGYARKTSKDKEAEEQLTALRKVGVLPENLFLEQAAEKEKLKQLTGCIQPGDVLIIKNLSQLGYSCQEILNEWKALTRIFDAHIRVLDMGLLDTSIKRKQINGSFISDFFVQIMCFAAQLEQAYIRHSKQAEGIARAKLQGRHMGRPRIPKPLDFDETYDQWRVGIISAEEAMTRLSLKRSTFERFVKERKQE

SEQ ID NO: 95500 - protein, 62 aa, Unknown
  Obtained from environmental sample
  misc_feature (1)..(62): Xaa is any amino acid
MRQLENKVAVVTGASRGIGKAIANAYAREGAYVALVCRGAPDETIRDIENAGRKYRAFHHDF

SEQ ID NO: 95501 - protein, 212 aa, Unknown
  Obtained from environmental sample
  DOMAIN (37)...(174): Zinc-binding dehydrogenase
  misc_feature (1)..(212): Xaa is any amino acid
VIRHVYKTPESVSPKLAAFIEPIGISVHSMRHGGYRPGDRVVVFGAGGIGLAVALTLRQYGAGDLLMFEPNPLRLETARALGLNALPFGSDVVNEISGKMDGGADCVFDCAGHQSVIDVLPDAVRINGRIVIVAGYKIPPQMDFQKGMMREFTIQFVRNCTRRDFEIACSLTGREPGYEKLVNYALPVEEAQKGFDLLSAPGDAVKVMFRFE

SEQ ID NO: 95502 - protein, 430 aa, Unknown
  Obtained from environmental sample
  DOMAIN (3)...(134): Enolase, N-terminal domain
  misc_feature (1)..(430): Xaa is any amino acid
MAKIKNVVGRQILDSRGNPTVEVEITLDTGFVARAAVPSGASTGEYEACELRDNNKKVYGGLGVLKAVAAVNGPIARLLKGKDPLKQAALDDAMIRLDGTKNKSKLGANAILGASMAITVAGASVSKLPLWKYIGKLHGNKSKFILPTPMANIVNGGKHADNKIDFQEFMIMPVGAKSFSEGLRWITEIFHTLKKLLKKDRQATSVGDEGGFAPNLTNDQALEYIMKAIKEAGYKPGTQIGIALDCASSEFFDEGGRKGYKFWKSEPDRLHSAQEMVDKYANWIAKYPIISIEDGLDQNDWQGYVDFTKRLGAKTQLVGDDFFVTNPERLAKGIKMKAANAILIKVNQIGTVTETLDAIKMAQKAGYGVIASHRSGETEDSFIADLAVGTGAGQIKTGSLSRTDRICKYNQLLRIEAQIGKKAVYQGKIK

SEQ ID NO: 95503 - protein, 120 aa, Unknown
  Obtained from environmental sample
  misc_feature (1)..(120): Xaa is any amino acid
MLNSKKVLVLLGARQVGKTTLLKEIFEREKNVEWLSGDEQSTNEFFRDISAVRLKNYFKGKKFLVIDEAQNIEDIGIKLKLIADNIENLQVIATGSSAFEIANKTNEPLTGRKWEYKMYP

SEQ ID NO: 95504 - protein, 295 aa, Unknown
  Obtained from environmental sample
  DOMAIN (1)...(179): Protein of unknown function DUF115
  misc_feature (1)..(295): Xaa is any amino acid
VYIRNALRNLSLLPHFQSIANLSFGSSPLLVLGAGPSLDETLDVLERHFSANIHCPDKRSFKIICVDTCLGALKDRNIVPDLVVILESQFWNLKDFTGCKDWNVNSAIDLSAYPASARVLSGEGFIFMTPWTSLRIFERLKSSGLCPLSVSPLGSVGLTAAEVARHISNGKIIFSGLDFSFTADKYHARSTPGHRSRLNVQTRMKGIANAAAFDTASFTAVSKSGVYVKSSPIMRNYRDLFEQEFASDPRLFDITGTGLPLGIKTLSNEEAISVLSGHAEHNTRKDEGVQVQEKS

SEQ ID NO: 95505 - protein, 770 aa, Unknown
  Obtained from environmental sample
  DOMAIN (4)...(352): tRNA synthetases class I (I, L, M and V)
  misc_feature (1)..(770): Xaa is any amino acid
RAHSLLAFNTNRLFPYFKDAPASFRTFLGDFVTTEDGTGIVHTAPGFGEDDARVLKGTGIPVICPVDAECRFTEEVSDFKGLFVKDADKAIMEKLKAEGKLVKREQILHSYPHCWRCGHPLIYRAVGSWFVSVEKIKQDMIDANSKIYWVPEHIKEGRFGKWLEGARDWAISRNRYWGNPLPIWRCPDCEKIICIGSRAELKELSGVYPDDLHKHFVDDIAIPCSCGAKMTRIPEVLDCWFESGAMTYAQNHYPFENKEFFESHFPADFISESLDQTRGWFYTLTVLAAALFKKPAFRNCIVSGMVLASDGKKMSKLLKNYTDPVDVINAYGADAVRLFLVHSALIKADDLRYSDEGVREVLKSIIIPLWNAYSFFVTYANIDGITAEGAPDRPGNPLDQWILSEAENMAEKVGSALDAYDLSRAIDPILEFMDFLNNWYIRRSRRRFWRAVEKEGNDIDKTEAYGTLYEVLKKLITVAAPFMPFTTDAIWQNLRREDDPESVHLSDFPKPRENRRDRSLEFRMASVQRAVSMGRALRSQYNIKVRQPLRMAELVTRNPDEKNALLEMAEIIREELNVKNVSFRDNEEDLVEYAVKANFRVLGKELGKDMSAAAARIETLSQNEIRGLLEGASLSLDIELGGGRTRAVEITADKLDIRRNEKANLRILNEGTLTVGLDTELTPELSMEGDIRDLIRGVQNSRKEMGLLVTDRIKLTVFGPEKLKKAWDSLGAGVAEETLAVQTVWAKTEGQIPLEAGEETWLVKIEKNEQ

SEQ ID NO: 95506 - protein, 989 aa, Unknown
  Obtained from environmental sample
  DOMAIN (208)...(394): Peptidase M16 inactive domain
  misc_feature (1)..(989): Xaa is any amino acid
MSKPNTELKKGQILDSGFVILDIVDMDEMKAVGVWAKHEKSGAEVFHVLNDDSENLFSFTFKTFPQDNTGVAHILEHSVLCGSQNYPLKDAFIVLAQGSLQTFLNAMTFPDKTVYPASSTNEHDYFNLMSVYGDAVFRPLLPEWTFMQEGHRYEYQDGKLTITGVVYNEMKGAYSSLDSFASTWSVKAVLPGTPYAFDSGGDPQEIPELSWEGLKNFHLKRYSPANCKVFLAGNIPTEKQLSFLNEQFFSKIDGGKECAPVNKTERWKEPKEFTIPCPAEGEAKSTIFLSWLCPDVTEIDECFALGVLSEILLGHDGSPLTRKLIESGYGEDITPVSGFESEIREALFVAGLKGVSGDTQQMGRKVEKLIMDELNRLVTEGIPPEEIEAAVLSVEFAHREIRRSSGPFSLVWMRRSLHTWLHGCKPWEGLLILPLLTKLKENISSDKRFFEKLIKKYYLDNPHRALVILEPKEDFLQKQDEKFSQKLADTDKNLSKEERQKIIEKAKELEKTQSEADSPQALAAIPHLSRNDLAVEDEIIPRRHEDLRGVPALCQDLFTNGITYISLAFPADILSEEDYLWLPFFSKAVNSVGLPGMDYGELSSLLARTVGGFHAILHTGAAVPGSDNFRKTASGLIDLAGRDLLIFNLKCLDEKISPSLDLALRLISETDFSDHDRITDLVLEMKTEFSSGLAPTGHSFAATRAGSGNSINRRTNEIWGGISQLEFVHRLAGYDAATVASKLKYILEKITGAGLIANITGLAHKTAGEEISQRFARFGAPKPRPALSRAPAALEKAEVFASSSLQIGFAARAMKSAAFYTKEEMEEILLAHQLSTGTFWEDIRMKGGAYGAFAQSDSLNNCVAFATYRDPNPLRSLETFSAILNNSAYGECDEDALVKNIIGCYAKEIYPKTSQLKGQMDFARFLLGLDENYRKNRIERLVSISTADIKAAFSAMGKRDVTGSVIIAGTKAAEQAAKALGTDVQVLPV

SEQ ID NO: 95507 - protein, 318 aa, Unknown
  Obtained from environmental sample
  DOMAIN (127)...(318): Glycosyl hydrolase family 3 C terminal domain
  misc_feature (1)..(318): Xaa is any amino acid
MHQNKELLTDLLKDEMKFKGFVVSDWSAIKQLTGGSYKMQIANAINAGVDMCMATDGRDNWINFISNLTKLVEEGTVPMSRINDAVIRILLFKQSIGLFENPLTPHAGEIGTEENRAAARALVSDSLVLLRNEGNAMKKLSESKKILVAGQGANDIGMQCGGWTITWQGSNGKITKGTTILEGIQAATKDKIAVSYAEDGNVAGSFDAVIAVIGETPYAETEGDRSGNISIRSKDMEMLKNVYKYRCPVIVLMLSGRPMNIGDEYKKWSAFIAAWLPGTEGAGVADVLFGGKSFVGRTPYTWRKTIKGEVLYPFGAGL

SEQ ID NO: 95508 - protein, 447 aa, Unknown
  Obtained from environmental sample
  misc_feature (1)..(447): Xaa is any amino acid
AEGDPAIADRYIQWVEQMIKAGQWTQARSALERAADYADVSSDISYLLALARLNTNESRGSVLQAVGKAILVGRWTHYSEAQARLLEARQLIAMRRYSAAIDSLSIFQPVAVETADAAILRLTALKGLVNGGAVSYLTEFRRRMSEAMNRYSRDTRVLRLLFDYANYAYADGREPNRDDIRIMELVLERLPFLLPTDPELAWIAAPFINDIEKARSLLADYLDGSSKPNPASLVPALNLGLLDDIDAVEELFAAGNPTGNAAAVCVVDKDILVNVWKLLRSEGGRNHLARKLQVFSGVITEDEDHDGYAESRSVYKQGTIEEYHFDADQDRIEDVTIIFNSGNPQWARMPALPAVVYWESYPAVQRTVLESGLYLPAPGGFRFAPIGFTEICASDTTPGLLYPRREPLQQNITRRMLVSFAVSVQQPSMEFPGGLEHIYLENGIPIN

SEQ ID NO: 95509 - protein, 461 aa, Unknown
  Obtained from environmental sample
  misc_feature (1)..(461): Xaa is any amino acid
LLGVILDSSVNHIGDGAFQNNKLSGIIFGNSVNHIGNNAFQNNKLSGVIFENSVNHIGDGAFQNNELISVMIGNNVNYIGDAAFQNNELTGITIPNSVTHIGDRAFSGNKLTKVTIGNKVTNIGNRAFSGNKLTGVIIPNSVNKIGDEAFEGNQLTAITIGSGVTGIWKDDFWSSDRLTSITLDVNNPNFSSVDGILYNKAKTEFILIPKNLTGNINIPGGIINIKERSFESKNITGVIIGNGITGIGEGAFSDCKRLAGVTIPNSVSAIGENAFSGCIGLTRITFPNNTGFTSIASNAFSGCSKLTSVTIPNSVTVIGENAFHGCTSLVSVTIGSSVARIEENAFSETRLIGIILPNSVIYVGKYAFYSDSLISVRFEKKDIEIDNPAFPADSLPNAYKSGGVGTYTRASGGNNWATTATAARDEKESNAISKYNNLLNKATAPFSESIGIQNKPPPNNR

SEQ ID NO: 95510 - protein, 193 aa, Unknown
  Obtained from environmental sample
  misc_feature (1)..(193): Xaa is any amino acid
KDMTSVRPTGRTVRGNEYWVEPYGGKNLIARSAEAIQLEALDYKTNASWCEIAMMTEYNCFPLLTLDYYGKGNLYILNVPNDFGDLYSLPREVTGYINKVFANGGPYIQSNPRICMFMYDNDIIGIYSQKPYADDVEIILPGKYSMVRDIETGEEIALFSDSVKERFFDEPEVPLKTARVNIFGGTYRFFRLT

SEQ ID NO: 95511 - protein, 135 aa, Unknown
  Obtained from environmental sample
  DOMAIN (1)...(134): Pantoate-beta-alanine ligase
  misc_feature (1)..(135): Xaa is any amino acid
VWEKDFQQLHVIRKMVFDLNFPVKVIGVKTIREKNGLAMSSRNEYMSLKEREAASSIYAGLMEAKKMYERGIDSVAKLKSIVEKKIKQAGGKIQYVEIANKNDLQPIKTKVSKNAVILLACHFGKTRLIDHLEFF

SEQ ID NO: 95512 - protein, 290 aa, Unknown
  Obtained from environmental sample
  DOMAIN (56)...(191): ThiF family
  misc_feature (1)..(290): Xaa is any amino acid
KERYEKTPTPEPLLPTPQGPRVEAEKTFNTTVAPLLPDFFQRLALLTGPDVLNKLKQTNVLIFGVGGVGSWCAEALVRSGVGKIGIVDFDTVNASNVNRQVQATSGTIGHSKVEVLRQRLLEINPDCEVSVWAKNFSHETAVEFDIEKADYAIDAIDTFPHKLDLIEYFFNAGVTFFSSMGMALKIDPTHIKTASIWESRGCALARLVRQGLRRRGFTGDFTVVYSDEPPINAGQNPAGSNPIGQIIDNGDMADKKRINGSCVTVTAPAGMALASLVLRDIVGQNPMEKR

SEQ ID NO: 95513 - protein, 485 aa, Unknown
  Obtained from environmental sample
  DOMAIN (280)...(359): OB-fold nucleic acid binding domain
  misc_feature (1)..(485): Xaa is any amino acid
MGKKKKEIIAKERAPFIEGAVKQGFTEKKAGEIYDILAPFAGYGFNKSHAAAYAIVAYQTAFLKANFPVEFMAANLTNEIHSGDKNKLSECISEARRMGIEVDPPNVNHSGKLFTVMDGRIIFGFLGIKGVGEASSDEIVRVRQDSPYKNFMDFLERVDIKVVGKKVIELLIQTGAFDSFGITRETLTGNLERAVEYAQNKKEDKLTGQNSLFDDSTDVKYADFEFEKFEAMSRAERLNMEKQLIGFYFSGHPMDEYREIWQKIVKVDLSKIEELKTGNCILVGIIKNIKTIVTSKGSRMAFATLTDFNGEIDVTFFARSWEKCQNYIETDKVVILQGKIDYQKDKDKYTFLAENYINRQDIDLTIQEAEEFERKLEPHRNTWVYMADLKSSWIKTAKKGSYTIIGYLKSLREHRDAKGNDMAFGTLQDFEGEIDLVFFNKTYAGCRSILKIDEIIALKGNIDPENERDMQRVSFKVSSIADLRS

SEQ ID NO: 95514 - protein, 528 aa, Unknown
  Obtained from environmental sample
  DOMAIN (8)...(426): Glycosyl hydrolase family 57
  misc_feature (1)..(528): Xaa is any amino acid
MEFRYAISLVLEAHLPFVREFQKDDDLSLIGEESRFFEYVNETLLPLLETLYRLEIDHIPFRLAIAVSPILIHLLTDEHLQKKYLAYTDKQIEFGRQELERTANNDELNKLAQRYYNITVDRRIAYTERYEKNLLKAFDFYRRKGKVEILASCATHAFLPFISHNGESLQAQMEIPISGYRRHFAGVPQGFWLPELGWSPALEPYLRAYNFSYTIVDSHGLLFANPSPCKGTFFPVKTPNGTFVLARDLYAAREMEKIAGDEIYRNNDRDAGYELPPETVNAFLSAEGERHRTGYKYWSRINGNGNYNPQTACNHAAEQAKMFIRSTTARLEEASKHMEEPPISLYANNAGFFGNIWREGPQFIEALFRMAQGYRDLQFVTPSSYIFSCKLNSLQVVAPEFSSFGVNGYAETWLDTSNDWIYRHLIRSMERMTELAERFPDDTGLKERALNQAAREILLAQSSDWPWLLHRQESTEFARNNAENALRNFTTIYEALGSNYISTEWLTTLERRHNIFPNINYRVFRRKK

SEQ ID NO: 95515 - protein, 368 aa, Unknown
  Obtained from environmental sample
  misc_feature (1)..(368): Xaa is any amino acid
MKRLFLLLLLIPSFVFAEGLYSPTWGFSLDLPEYYEYSEGDGKDRFSFKGPEGAVFDLVVYNGVYANIKEMAEDVTKRLGSKGDIDYFKYNGKQAAVLELNFGDKLNGWGTCVELAGTKGSRPPLLLSLAYGPAAKSELTLFHFSALDSIAPSNAEILYPGMITEYSYPRGEQIITPIASSGVTAAICKDDAEAAQVFIEREFKILSTYVNTPAWQNAWIRYYRSIYRDSYTRVKNIAEALIRKWGRGNERAFAQKALAFVQGFKYERNHEGSDFLNLISTACEGGGDCDSRAMLWAIILNYADIRAAMMISPEYSHAMGLADVAGAGARFEAYETNWLVAETTAKIDIGLIDKEQADPKNWFGILFE

SEQ ID NO: 95516 - protein, 296 aa, Unknown
  Obtained from environmental sample
  misc_feature (1)..(296): Xaa is any amino acid
MPETTWPYPVLRLKRGKEELLSKRHPWIFSGALMEPPSAPLVRIADYSGNVMACGTASNLNPLAARIFRFEDRPLDELFFRERFESALAMRCALGLDGPDLGCRWVFGEADGLPGLVIDRFGAALCVQVGTAGLEALRPTWLPILQDLGARNGIKTFVERSQAGRKEEGLTPENRILKGSLPGPVTIREGTAKLSVDLLKGQKTGFFLDQREHRLALGRISSGKRVLNAFGYTGGASIHAGLCGALEVTTLDISAAALDVCENDWAANGLDPARHTRLQGDAFDLMRQLPVKHYDC

SEQ ID NO: 95517 - protein, 310 aa, Unknown
  Obtained from environmental sample
  DOMAIN (148)...(261): MMPL family
  misc_feature (1)..(310): Xaa is any amino acid
MRKLYNYPWLIVAVIAVITVFFSFQLPRAKLDNNNLRFVPLDDPALETSRRIDEMFGSSFFILIGLQRQYGTVFDREFIDRIQEYSAVVENIPYVKEVTSLVSAEYICSKEDSIVVEKLVGENFSGTASEIAELKRRLLSWDMYERALFSDDFTATQILIPLSITSDEAGSSEVSETFMRIRDIARETFAGYATVYVTGMPVIAATINEAMNADLKLLLPLVILVVLAVLFFSFRGLTPVALPLLTVVIAVIWSVGAMPLFGVKLSVISTVLPVILVAVGSAYGIHIVTHYLHGRSTKPMNNREHRELVL

SEQ ID NO: 95518 - protein, 156 aa, Unknown
  Obtained from environmental sample
  DOMAIN (111)...(138): NHL repeat
  misc_feature (1)..(156): Xaa is any amino acid
MKKNKFIALAFLFFVTVPASSEPTNYTYNYDFWGEYVASPDAYRVSAYILGTSLGIDNFRDPQGLFIRENRIYICDSGNDRILLLEVDDSGNHILVKTVTSVFINGVESHFKFPSDIFESRDGFLYIADTNNNRILKLDNDWNYVFSITRPDDESL

SEQ ID NO: 95519 - protein, 283 aa, Unknown
  Obtained from environmental sample
  DOMAIN (1)...(156): CTP synthase N-terminus
  misc_feature (1)..(283): Xaa is any amino acid
IKDFIYAGGKNSRADVLITEIGGTTGDIESQPFLEAIRQISLETDRKDCLFIHVTLVPYLKCSGEHKSKPTQHSVKELRAMGISPNIIIARADEPISGDIKGKIALFCNVKNDCVIENITASSLYEVPLMLHQNGLDQVVCRELEIDAPPPDLSEWRTMTQKIAAREKEINIAIVGKYVRLYDAYLSIIESLNHAGYETLANVKIRWINSENLTSENVKETLDGIDGMIIPGGFGDRGIEGKITACRYARENKLPYLGICLGMQIAVIEFARHVCALTGAHSG

SEQ ID NO: 95520 - protein, 175 aa, Unknown
  Obtained from environmental sample
  DOMAIN (14)...(110): ParB-like nuclease domain
  misc_feature (1)..(175): Xaa is any amino acid
MEQKEYESPVYNVKAIPVEKLRANEYNPNKVAPPEMELLYRSIKEDGYTMPIVVYHRKEEDVYEIVDGFHRYSVILIYKDIYEREKGLLPCSIIEKPISGRIASTIRHNRARGSHNIDLMSNIVAELVEMGKSDNWISKHLGMSKDEILRLKQVTGLATLFKDQEFSKSWEVEYN

SEQ ID NO: 95521 - protein, 377 aa, Unknown
  Obtained from environmental sample
  misc_feature (1)..(377): Xaa is any amino acid
ITKKVGILFVDLEGQYEVTIDYVKKTLAKNRDLFDVYWCCLPLNLRNSLSVFEPFWTCWDLDNREKWVREYPDYPCITEKNCPFQFFRKNMEFEEFIREFGAWYAGGEQTACLVGIRSDESFNRFRTVAFKDKNMLENYRWTTKIFKDKELYYCYPIYDWSNKDIWVGNYKLEWEYNKLYDLFYKAGLTLDKMRICQPYGDDQRIGLNMFRAIEPETWAKVVNRVSGANFGNIYCGTKVLGYRKVKLPAGHTWESYTKLLLATLPKAVSIGYKKKFTKFIKHWQSTGSAINSSWIPEEATFSGKFSTRGKKNLPLVIYKKIPDKLPFWVESKKIGPSWRRMAICILKNDQLCRSLSFSQTKKQRERIQSMFEKYSLI

SEQ ID NO: 95522 - protein, 268 aa, Unknown
  Obtained from environmental sample
  misc_feature (1)..(268): Xaa is any amino acid
MTLYARWENNAPPSLIDVTFDANGGTYTGGGTTQVIQVYENEMVYPPSPGRNDGYVVSGWNKQRDGTGAAFDRNEPVTAAFTVYAQWKKPEDMPVKDRWNVWQDSSSTATLNNYSIGNDGLCTLTVGGVPEKQGQDNIWRAWTVTAQYVYTAKAGKTYVYKFEAWTESGTRDLHVQYYEDNDAAVYIGETIPITITRKTYTVYGQEIPKGGVQNISFQCADQLGTVNIKILEIKEITQGKLTITNFSGNSDLSQNNYIRGDAWNSDGE

SEQ ID NO: 95523 - protein, 90 aa, Unknown
  Obtained from environmental sample
  misc_feature (1)..(90): Xaa is any amino acid
IGFGKTQKENLALISNIKALCQTEFSVLLGVSRKSFISKIEGLENSNRLVPSIVFGIMAVQKGVKILRVHDVLETKEALAALFTFSAEIQ

SEQ ID NO: 95524 - protein, 261 aa, Unknown
  Obtained from environmental sample
  misc_feature (1)..(261): Xaa is any amino acid
MSDFTCPQCKTTAPAADFERQLWVCGKCGYHSRIGWQDRLRITVDEGSFNEFDSGMESGNPISFPGYEDKVREAQESCGTREAVVTGRCTIQGYPAVVCVMDSRFMMASMGSVVGEKITRAVEYATANRMPVIIFSASGGARMQEGIFSLMQMAKTSGAIARHGKQGQLYISVVCDPTTGGVTASFAMLGDIIIAEPGVTIGFAGKRVIQDTIGATLPEKFQTAEFIFEHGFTDLIVSRQEMPATLARLIRMHGYKKEGGK

SEQ ID NO: 95525 - protein, 287 aa, Unknown
  Obtained from environmental sample
  DOMAIN (270)...(286): KWG Leptospira
  misc_feature (1)..(287): Xaa is any amino acid
MQFYISSYVKSQSDQEDKLAAAMSAMITIHYEIGYWLCLLLSLAVVCFVLFCPQQEQQEAVYDAGEKERKFRIPKIKIGKKVIIGCSILALVVIVRIFIPSFIGGGGTEIVPIKGEYGEYQYINIPQKGKIVINPQFEQAYTFRDGLAVVKTSGKDGKWGYIDKKGKYIITPMFDYVQNFSEGVAWVQMENQPPMLINKKGRMLLQIDSLIAAYPFNNDIAGIKVYSQGQELAMFIDKKGKPVATTVAGENTGLIISDGLYSFQDKSNEKWGYKNKNGEIVINAQFD

SEQ ID NO: 95526 - protein, 191 aa, Unknown
  Obtained from environmental sample
  misc_feature (1)..(191): Xaa is any amino acid
MFIFYLLALAAIALAQEQQVKTLAAQFDSVNTLVRDNNIDKAQALKKLQDILPELQTAYNKLKPDEAKKEKWIFPIEGYSSKNIGGTRGEGYIPSGYDYFDGNKHGGHPAHDIFIHDKNQDCKDDRTGRFVNVRSVSNGIVVALEKQWDKASSLRGGKYIYIYSTNDNALFYYAHNNEVLVNIGQVISKGD

SEQ ID NO: 95527 - protein, 499 aa, Unknown
  Obtained from environmental sample
  misc_feature (1)..(499): Xaa is any amino acid
GRIVPYKFFDGQYRQGGFDYSYGGKGSKAEIDKTETYKSAPTLRITLDPNDYSGSSICLYNETFDLSKHLLDGAVEFYIKGANGGEQVIFGFLDDDGKGKKTQSKLSLNKYVQITKDWQPVKIPLIDFPDRGMYWDDTKKMEIPANIDWSRIAEFRISTDKGTNPQGFKVWVANVEIVKGSVPVSKPKPKVTYWDEKVEIIDGPKDPAKLDGKAKALAPNGIFYENDLKGFGYVYGGKTAWREQESKTSGNPRVLAFYMDDNDYSGASLSLGEGKFIDLSKVRDKGGIYFWVKGKQGGEKVAFGILDNQGNDIKSQTKTNIHDWIQGQTISKDWKLVKIPLKKLPNAGKAWDAIKQAEVTKNVQWNKIQEIRFSVGKADNRRDGKPDDPVTIYVDQVTFTENVDWVDPDLKWNSFKSTAPDFVLHDFENKPGWESSIGPKSKVSFKIDKGKLDGNSLNINYMLGDWVDVVYDFEKQKAKKENTDWTKHWGIMFDVRGIL

SEQ ID NO: 95528 - protein, 99 aa, Unknown
  Obtained from environmental sample
  misc_feature (1)..(99): Xaa is any amino acid
MKVIYKITYPNGKIYVGKDSTGDILRYFGSPDRAYLEEDFTWEQLQNITLRKEILFFSEDISESELTKKENEFIVKCCANNPAKGYNILPKFIPQDRDG

SEQ ID NO: 95529 - protein, 396 aa, Unknown
  Obtained from environmental sample
  DOMAIN (35)...(395): AMP-binding enzyme
  misc_feature (1)..(396): Xaa is any amino acid
MKYIEETLGEVLREKARIQPDHDFLVYADRDLRFTYAEFDKRVDNLAKGLLSMGLKKGDHLGIWATNVPDWNTILFACARLGVVSVTVNTGYKLHELEYLMKQADLACICIIDGFKDSDYVSMVNELVPELKTAPRGNLHSEKFPFLKYVVYIGQQKHRGMYSFSEILLLGQHSYEKEFRLIEASLDRNDVVNMQYTSGTTGFPKGVMLTHRNILNNGLGIGDNQRLSNKDIVCLPVPLFHCFGLVLGMMAILTHGSTAAMVEWFDPLIVLATVQKEKCTALYGVPTMFIAVLNHPMFKMFDLSSLRTGIMAGSPCPIEAMRKVIDLMHMSEVTICYGLTESSPVMTQTHFDDTIEVKVETVGRALDGVEVTIRDAETGEECTDGVHGEFCCRGYS

SEQ ID NO: 95530 - protein, 221 aa, Unknown
  Obtained from environmental sample
  DOMAIN (1)...(134): AICARFT/IMPCHase bienzyme
  misc_feature (1)..(221): Xaa is any amino acid
VAFNVKLDKAVALRLGELFLEVVVAPDFDDDALEVLKKKKNLRVIRMKKAPKEKHEYVAVDGGILVQQSDRTLLEKWEVVTKTAPQECDLKDMVFGMRAVTFVKSNAILIVKEQSATGIGGGQVNRIWPTKQSLERSADALKAASEETADTGGSPWNDNLPARVLASDAFFPFADIVEAAAKAGIKSIIQPGGSVNDKLSIEACDNHGIAMVFTGTRHFKH

SEQ ID NO: 95531 - protein, 766 aa, Unknown
  Obtained from environmental sample
  DOMAIN (217)...(474): BadF/BadG/BcrA/BcrD ATPase family
  misc_feature (1)..(766): Xaa is any amino acid
MNGSCAGGTGAFIDEIAALLRTPVEKFDSLAAGGTQVYDISGRCGVFAKTDIQPLLNQGAILQDIALSTFHAIAKQTIGGLAQGLEIRPPVVFEGGPMTFNPTLIRVFAQRLGLRDSDIILPKKAELFIAYGTALAINENFLEQDGDHDRNFSPEAALTSLAMYREIVLGNTSLQNINYFSNEAEKESFYARHKMQAINRDISSHGIQRGDTLRVYLGVDAGSTTTKFVLIDEDENVIDSFYNPNKGEPLKVIRQALLDMYDKYTAAGVDLEIIAIGTTGYGELLFDKALGADYHTVETVAHAAAAQKYIPDVSFILDIGGQDMKAISISNGIVTNIIVNEACSSGCGSFLETFAETLNIPVNKIAETAFNAKNPAKLGSRCTVFMNSTIITEQKNGKQADDIMAGLCRAIVENVFTKVVRIANPARLGNKIVVQGGTLRNDAVLRAFEQYLGKSVVRAPFPGEMGAIGIALLTKREISEKGYSSPHGPNDRTRFIGFEALKTFEYKQEANLLCPFCANSCNRTLLRFSNGQTWVIGNRCERGEVVGDPNDPAVREQVKNITGLMNAAPDMIKLRNELLFKDYKYTQLLPSKDITIGLPRVLDFWRSIPFWKVFWSALGYKIKVSRKSSRLLYEKGLQYISSDTVCFPAKLVHGHIQDLIESKVDRIFFPQINRLPADNPEKTGTFTCPVLKGYPLSIRCSDNPEQKHNIPLDSPICHWFSERDIRFQLSRYMQETFKIPKKVTLAAIKQGNKAMAEFYGAMAENE

SEQ ID NO: 95532 - protein, 79 aa, Unknown
  Obtained from environmental sample
  misc_feature (1)..(79): Xaa is any amino acid
NSAADDLIFTASYNYIKKEVGENDGLVSEYSARWGNNITKVEGGISHGQIVDIMLKDPFDMKIPNIYLRIVNDLSHKGF

SEQ ID NO: 95533 - protein, 115 aa, Unknown
  Obtained from environmental sample
  misc_feature (1)..(115): Xaa is any amino acid
MQALFDGLTLAAPLKAYGDVNPICLQRFGADPWGLVYKDRVYVYMTGDTFSLSSGTNLLPDLSNLGPNTYSNINTIRVVSSSDLVNWTEHPEIKAAGITGGGKAGDKLMGSCRDL

SEQ ID NO: 95534 - protein, 414 aa, Unknown
  Obtained from environmental sample
  DOMAIN (282)...(307): Tetratricopeptide repeat
  misc_feature (1)..(414): Xaa is any amino acid
MYLDEDWSDLPELLENVQELLELGLIDDARDMLDKYQPVFQDYWEYHYLYSRVYAEQNMPREAVSRLIAGLRLERDNVDCLLGLFYAFAMMNMVRRGGRFLLEAHRLYPDNEPVYSALIWYYTEINEPEMAVACFERAKALNSNNPDTYRNGGLAFDRLGRVEEAAACYKAALQISPNFEEVRDLYADHLIFTGKTDKAIALFEEALRESPKNVRHMSKLIYCLSQRGDFNRAEALAKHTVSLYPNSPTGYLDLAYVNLNIGRIDEAVENADKAISVAPIDAEGYRVKAIACSERGDHEAAEALFERSVALDPENTDAMRDYYQHLRIAGKHERMIDTVNTVIKLEYPHCTEDYWFLADFYRERRQNANAFRCLRLAYDTMPAEKELLPPMIEILLEQGHTKYSLPIFANYVQR

SEQ ID NO: 95535 - protein, 304 aa, Unknown
  Obtained from environmental sample
  misc_feature (1)..(304): Xaa is any amino acid
MPLHYNWPNYYELTVDKSDDLYVRAGGNYYFSYGNTLYICLNTNVKSIEVHRDFMKKAVASHPDAVWKIALFHHDIYGTGDHAGTAYQDAQKMQSDWSPFLDEFGIDLAINGHDHVYGRSMFIKGNRIQSDQMPANLDPLGTNIVKPNAGVYVLPQGIQYMALSGSATEKMYAPEAQEWVAYTPGFIGVPEYSVMTIDGATLNFVTYRTDTDAVTDSITLRKTATRADLEKLIPDCEAVKQTVNITGGWYVFQNAIAAAKAALSGSPANINAAYVALYNAYYALTVNTNKAPLKSLIDDVKNEL

SEQ ID NO: 95536 - protein, 1131 aa, Unknown
  Obtained from environmental sample
  DOMAIN (656)...(861): DEAD/H associated
  misc_feature (1)..(1131): Xaa is any amino acid
MLPITYIIGVSLMSLSRDILPESFHPVIRSWFTETYGKPTAVQAQAWPLIENGAHVLALAPTGSGKTLTAFLSAISRFCSSGTAYPQGTLYPADKLTVLYVSPLKALNEDIRRNLLKPLEAIRYRFEQAGLQFPDIKVETRSGDTSQSQRRRFYLHPPSILALTPESLAILLLNPKGRQALSNVKYLILDEIHAVLGNKRGAFLSCQIDRLSLIAGEFQRISLSATIRAPETAAAFVAGIDQNGQGRKISIVAPAAEKKIELTLSFNDREDNIGLVDKYGRRYTSIINYILNRISECSTILVFTESRRRAERLCYFINQEAALHEAALQKAGVSGAVAFTHHGSLSKELRQSVEKRLAAGNLPCVVATASLELGIDIGSVDEVILAGSPGSVSQALQRIGRSGHGVGMISRGFLFPFHGMDLLLATALKGAVEDRDIEEIRPIENPLDILAQMILALCIEKKRNIDELYKLLKGFYIFRNLNREAYLRTVRMLAGLSTNGDGKIRLRDVKPRIWLDNIAGEIGALDGSLLLLYSSGGVIANRGLYSLRLADGTKIGELDEEFVWERRLGDRFHFGGRGWRITAIEAESVQAAPLETSSDFMPFWKADTVFRSPRLTERVLAILDTYNGDITRAAPETAALASFLDSQRNAQGGLPLSGSNRITIEIIDNPENRGDLYAVVMHSFRGGAINYPLVLALAQELEETLKLRVESFSNDDSLLLLIPRPGVEGNVKQIEHIFRNAVTELNKSGGGGLCRGERLFRNRLEASGVFGASFREAAERSLLLPKAGFGKRTPLWITRQRSRRLFDAARGEEGFPVTAEAWRSCLVDLFDMEGFRELLGAINDNTVALSFFYSSIPSPFSRDMVRQETNTLMYEYDERKDIQGSGATLSDKVIQEALGDASLRPVIKLELANSFSARLRREEPGWAPDDQLSLYEWVKERIAIPLDEWETLRASLPEDLKQNFSQIQSNDRLVIVKRNDDAIPSMVHREWEEAWRSEPLPLLGPWLRYEGPTVLPRIAEVFGVSLAEAEDAVNALAEVDEVVCDVRLAGAVSPLICDSRNLEMLLRLSRRKQRPEISERPAALLVPFLALRQFTMSNAREQRTVNSEQRVKLIQSNEAAIKKIICLLRAC

SEQ ID NO: 95537 - protein, 364 aa, Unknown
  Obtained from environmental sample
  misc_feature (1)..(364): Xaa is any amino acid
MNIVKKFKQKINSEDGIPGEDMSPGELIKKAFVQLINNGFFDRPRDFWEIKDAINASTQQSVNSKDCAEAFWHEVWKGRLSSDSFEPLRRGIQFGFTIKGTETVELSPQSSLGSPRMPRIPRSLRDRWRDGAPVSGRWFSIVLDENTAQGQWLDDSLNEESRNRDRVRLLLAHWGILCCPLLEKISKGSSASGDPSPFTWSGLLPTIRRMELSGELVAGRFFAGINSLQFALPSIARELENAEAVDGIYWMNAVDPASPAGLDIEGLDPRLPDRQQSSRLYFRGAQLIAVSNRNGKEQHIFIAPDDSGISALIDLIKVPRTRKVLPENKIVIDTINNKTACHSEYARVFHDCGFIPDRGRMCFW

SEQ ID NO: 95538 - protein, 146 aa, Unknown
  Obtained from environmental sample
  misc_feature (1)..(146): Xaa is any amino acid
MRLLTRLDFDGLACGALLVHLGLVNEWEFVHPKDIQDGLISATGNDILANIPYIKGCNLWFDHHSSEGERLGTKTYFEGVSRKAPSCARVIYDYYGGDEKLGRFAEMVRYVDKVDSGNLSIQEIRHPHGWVLLGFLFDPRTGLDVS

SEQ ID NO: 95539 - protein, 147 aa, Unknown
  Obtained from environmental sample
  misc_feature (1)..(147): Xaa is any amino acid
MKEVGKLGNRFGELVEHLVAPNIKKKFNELGFCFTKAGMDVEISDPRNPQNDTEVDILLENGDIVVAVEVKSKPNDSDVNDHIQRMEILRRHADDKQDKRRYQGAIAGAVMSEAVRRYILKKGFYVIEQTGETVQITIPPGFKAREW

SEQ ID NO: 95540 - protein, 663 aa, Unknown
  Obtained from environmental sample
  DOMAIN (44)...(146): PAS fold
  misc_feature (1)..(663): Xaa is any amino acid
MGLLLAIFAAALLFMYKKNIKLAKTLEDERIRHRKKIYWLESILDAVNSPITVTNKDMEWTFVNKAVEQFLGVKREDIMGLKCNTWKANICNTPNCGITRLKNGYKETYFQQFGGEYHVLVSYLYNENGEVDGHVEVVYEDTAVIAREKKKFEELAHWYESILDAIPFFISVTDTDMKWTFINAALEKDLKLKRKDIIGKHCSYWGFDHCNTNDCSIVRAKRGLSQTYFKKGNASYQADVQILMDINGERMGYIKLVQNITMLEQMTKQQAEAEAAVRAKSAFLATMSHEMRTPLNAIIGMTTIGKSAAALERKDYCFSKIEDASQHLLGVINDILDISKIEAGKFELSPEEFSFEKMIQRVVNVVNFRVDEKRQKLTAHIDKEIPQTLVADDQRLVQVIINLLGNAVKFTPEEGSISLDARFAGEETGLCTIEISVSDTGIGISREQQEHLFYSFQQAEITTSRRFGGTGLGLAISKSIVEMMGGKIWLKSEPGKGSVFTFTVQAKKRGQADGLMKNSPGAENTAKEEEQDFTGLFAGRRILLVEDMEINREIVLALLEPTLLEIDCAENGTQAVHKFREAPEKYDLIFMDVQMPEMDGYEATQRIRTMDIPKAKSIPIIAMTANVFREDMEKCIEAGMNSHVGKPLDFDEVLGKLRFFLSL

SEQ ID NO: 95541 - protein, 65 aa, Unknown
  Obtained from environmental sample
  DOMAIN (1)...(60): Flagellar protein (FlbD)
  misc_feature (1)..(65): Xaa is any amino acid
MIKVSKLDGTEYYINPHQIECIEIRPDTALIMLSGKHHIVREEVDTVLGRIDEYRRRLSPYIVQE

SEQ ID NO: 95542 - protein, 307 aa, Unknown
  Obtained from environmental sample
  DOMAIN (6)...(135): Diacylglycerol kinase catalytic domain (presumed)
  misc_feature (1)..(307): Xaa is any amino acid
MANFTKLWIILNPTAGKGKAAKQYPKIERFLRENGHNFEILVTKGVGDALKMARDLPIGADDVTVAAGGDGTCNEVVNGLLTRPTQAPPVFGILPIGRGNDFSSTPGIPTDVEKALQLLITGNVKPLDAGFVKGGFFPDGRYFINGIGIGFDTKVGFEAAKLKIKSGITYAVGALITVIRYEPSPVLQIHYDDKEVLLPAVLVSVVNGRRMGGSFYMGPNALLDDGLLDICYVQHQKTRMDLLRIISHYTKGTQGECHGVTFDRGLHFHLKALEGGMAAHCDGETVCYEGKELEITCIPKALRLIEA

SEQ ID NO: 95543 - protein, 704 aa, Unknown
  Obtained from environmental sample
  misc_feature (1)..(704): Xaa is any amino acid
MLTAADGQPVCTWDSRGHKLHTEYDELRRPTRQWLNEGTLVGETIYGVSAANNSIGQPWKIHDQSGVIENVKFDFKGNLLESKRKFTQEYKQTIDWNANPALESEEFATITAYDALNRATSISTPHNDNVPASEIMSAYDEGGLLKTVKAKLRGSANETDFVTGIAYNPKGQRERITYGNGAATKYEYDENNFRLTRLFTTRSNGTDVLQDLNYTYDQIGNIAKITDNAQQTIFFNGQVVNPSQTFEYDALYRLTKATGREHTGNGADAEPEENGYHNAHASMPNDASALRSYTRQWEYDQVGNILELIHTANNGNWNRQYNYAAANNRLLSTTAGNSTVNYAYNQHGSMSSMPHLQAMEWDFMERLCHITKGTTEAYYSYDGSGQRTRKVVEKNNVVEERLYLGGFEIFRKKSGNILELERETLHIMDDVKRIALVETLTVNNGTAANSITQRYQLSNNIESAALELDETANIISYEEYYPYGDTSYQAGRSAAEVSQKRYRYTGKEKDEESGLYYMLARYYAGWLGRWTAVDPAGLVDGVNLYVYCRGNPLSRIDPSGMFDIKTGTIEEGDTLSGIVNQINKKYKSGFTIEDPDKIYAGNRITLPRLLLRDIDFQDNMQQKLRDAPGEIGQLLRTLWEKYEDKLIIFDVNAKEHSYRKINEVKGVFIALHDDASEWLDSFQAIFHEFFHNIDALVPEEASSV

SEQ ID NO: 95544 - protein, 164 aa, Unknown
  Obtained from environmental sample
  misc_feature (1)..(164): Xaa is any amino acid
VFKIISAKEAVGFIKDGDCIAVNSFLALSNPEELHDALHQRFLETGSPKNLRLFCSASIGGWDENRYADPYIRDGAVSEIVASHYRSSPVAMKKALSGEIEAYCLPLGLLSHSIRAAAAGKDWLLSEVGVGIYADPRIDTCALNEKSKRELLQVREIEGKDYLL

SEQ ID NO: 95545 - protein, 275 aa, Unknown
  Obtained from environmental sample
  DOMAIN (1)...(90): Uncharacterized protein family UPF0004
  misc_feature (1)..(275): Xaa is any amino acid
GCVKNQVDVENMMAHLNKEGWESVSEAENADLIIINSCGFIESAKRESINAVFEWRKLYPGKKILLAGCLAQRYAKELSKTMPEADGFFGVDNLAQITKIAANLVNGANCAILSHNTVPSAGERPLLSLPGSAYVKISEGCNNRCSYCAIPLIRGGLVSRTIPDILEECNTLLDRGIRELCIIGQDIGAFGTDAVKDSAAKLPELLEAISLLKEKGHFWVRLLYIHPDHFPLKILDLMEKDTRFLPYFDIPFQHSSSKILTAMNRHGNAETYLAL

SEQ ID NO: 95546 - protein, 236 aa, Unknown
  Obtained from environmental sample
  misc_feature (1)..(236): Xaa is any amino acid
ISGRKTGAFTIPDSVTSIESGAFYGCSGLSGVTIPNSVTGIGSFYQCTSLTAITVAAGNTAYSSQDGVLYDKDKTTLIRYPAGKTGSFTIPNNVTSIGEGAFSGCTGLTSVTISNSLTSIGANAFSDCANLASITISNSVTSIRDYAFSGCSSLASVIIPNSVQEIRENAFRGCTSLASITFQGTIDAYNIGSSTGNPVTPPITFYGDLIDKYLAEGIGTYTTTAPVNENSKWTKK

SEQ ID NO: 95547 - protein, 376 aa, Unknown
  Obtained from environmental sample
  misc_feature (1)..(376): Xaa is any amino acid
DNPDTWADSAQAHKDAYAAFDMLMPWPVGRYGDNYESTRNWMNNNFPAMKTLCEANKRSWAGNKPINIMGGIYTGGGWTNLGNPGGPNSPPKSKGQPMWNQIYLLLGGSYKPDTFYICMFDEYDESTAIMKAGSDYFDIPTDQWFLTLSTDGWWLSNDYYLRVAGEGIKVIKGQVTAEREINIPHSLGPLYYRNSFEKRDGWENLKNVSPQQQAQDEEIEGVRKKVPDLQLDPCLNNPGRLTNKGSGSVTLTTNAIVKSTGKSGGFVFRLAGNGNGIAYYKIGDVKINAATQLQLKYSLKPLNDAGRGVFVDILFSDNTLLSETNSGVIEQRGTADAWTDVTVTDIPAGKEITGVVVGYSGNGDFDAHVDDIIIEE

SEQ ID NO: 95548 - protein, 196 aa, Unknown
  Obtained from environmental sample
  DOMAIN (6)...(51): Protein of unknown function (DUF1573)
  misc_feature (1)..(196): Xaa is any amino acid
SVLKAQFKITNTGNEPLKITNVRPGCGCTVVSYDSVIAPGKSGFIKPEVNLKGFRAGQNSRGITVTSNASSSPLHLTIEFNVVTLPEPITLSENYLDFENAAKLTLILTSPKKDLKINDVVFKPQSDPNIPSWAANTPIKVKYTLTPTKNTRDDGQSTYNLDINTPGAGKESVLGNFEITTNHPNKKDITIGGRVK

SEQ ID NO: 95549 - protein, 245 aa, Unknown
  Obtained from environmental sample
  misc_feature (1)..(245): Xaa is any amino acid
MQTERSVSQPVVGRTPLPMRFVAVSFLMVFICAGFAAVFAEGGSGCTVKGVMGTVKVFGARSKADRNKIDTWPDARLNMALRESDIIATLAESEVRIETPNGSEVRLKENTVAEVAKLSGGTGTTKINVKEGSVVANVKKMISDKGSFELETPTSLAAIRGTTVELDSRNGAGTTVKTFDGTVQVTPKKGKPAAVGHYNMTEVAPGQKDAKARTVPSFYKQKTTKLLSEEDAAALTGFKRVILTM

SEQ ID NO: 95550 - protein, 63 aa, Unknown
  Obtained from environmental sample
  misc_feature (1)..(63): Xaa is any amino acid
VFENIIEQSAVLQLRDDILAKRNAPSMLFFGPSGSGKGSAALELARVLSCEEKGGVGLQMFLM

SEQ ID NO: 95551 - protein, 294 aa, Unknown
  Obtained from environmental sample
  misc_feature (1)..(294): Xaa is any amino acid
MKTKMIYRPVGNTGMSASVIGLGAEHLDNKPYEAVEKVINAALERGINIMDLFMPGEQVRLNIGKALARRRDKMLIQGHICSTDIKEQYDISRDLKTIKKYFENLLRCLNTDYIDFGMLFFVDSEKNFSDVFEGDALPYALELKKKGHIRALGASTHNPVIARKMVETGLVDILLFSLNPAFDMAPAETDVLDYLDKDKMMDYQKRLDPDRAALYRLCEQRGTAITVMKTLGAGKLLSPKHTPFSAPLTVPQCIHYALTRPAVVSALIGCSTAEQVEESRGLSERKRRGARLFR

SEQ ID NO: 95552 - protein, 285 aa, Unknown
  Obtained from environmental sample
  DOMAIN (35)...(285): Aminopeptidase I zinc metalloprotease (M18)
  misc_feature (1)..(285): Xaa is any amino acid
LLADKLFIALKNCWESIDAEAEKEVEDLAAAYRVMLDRGKTEREFTAESVALLEKQGFKAIDLFTGQSGKKKAFTPGTKVFEHIRGKALVCAVIGKKSVAEGINIVGAHVDSPRLDLKQNPVFEDNELALLDTHYYGGIKKYQWTAIPLAMHGVFIDSKGKKISVLIGEDDDDPVFTITDLLPHLAQDQMQKKAFEVVEGEDLDVLSGSRPYIDEKVKEKVKLRFLSILNEKYGLDEKDFASAEIEFVPAAKARDIGLDRSMIGAYGHDDRSCAYPALRALMEMP

SEQ ID NO: 95553 - protein, 313 aa, Unknown
  Obtained from environmental sample
  DOMAIN (10)...(305): M42 glutamyl aminopeptidase
  misc_feature (1)..(313): Xaa is any amino acid
IDSSGKKTSVSIGEEDDDPVFTITDLLPHLAQEQMQKKAFEVVDGEDLDVLSGSRPYDDEKAKEKVKLRFLSILNEKYGLDEKGFASAEIEFVPAVKARDLGLDRSMIGGYGHDDRSCAYPALRALMEIAGQKEAPEKTALCYLSDKEEIGSAGNTGAQSWGFENFVAALAGEDDLRRCFSNASMLSADVSPAFDPSYASVYDKRNSSYMGKGLVLTKYTGSRGKYGASDANAEFCARVQGLMDKNKIPWQFGEMGKVDKGGGGTIALHAAKYGIEVLDCGTPVLSMHSPFEVISKIDLYIAFKGYTAFLREI

SEQ ID NO: 95554 - protein, 87 aa, Unknown
  Obtained from environmental sample
  misc_feature (1)..(87): Xaa is any amino acid
MKRTVYNELLAWKFSKNRKPLILYGARQVGKTWLLNKFGKNEYKTTIYINFDKDIDARKYFERNLSPEYIIAGLEDYSKKKIVPGET

SEQ ID NO: 95555 - protein, 422 aa, Unknown
  Obtained from environmental sample
  DOMAIN (125)...(422): Methyl-accepting chemotaxis protein (MCP) signaling domain
  misc_feature (1)..(422): Xaa is any amino acid
MGSSGSSWSVMIAATESYILKEVKFLTKITIIIAAVAIVIAAIIVFLTLSATTAPIVDVANTLKDISEGEGDLTKSIPVKSDDEVGDLSRYFNKTIQKIRGLVLLIKQQAGVLSDIGNDLSSNMTETAAAINQITANIQSIKSRVINQSASVTETNATMEQVIANINKLNGHVEKMATNVASVTRTLMDNATNVKTLLEASESGKTGLHEVVTDIQEISRDSEGLLEINAVMQNIASQTNLLSMNAAIEAAHAGEAGKGFAVVADEIRKLAESSSEQSKTIGNVLKKIKESIDKVTKSTEIVTTRFESIDSSVRTVAEHEENILNAMERQREAEQMSGNASLTEITHLVKTGSEEMLVGSQEVMKESQNLEKVTQEITGGMNEMASGAEQMNNAVHNVNNISGKNRDAINTLMKEVSRFKVE

SEQ ID NO: 95556 - protein, 271 aa, Unknown
  Obtained from environmental sample
  DOMAIN (178)...(271): Peptidase family S41
  misc_feature (1)..(271): Xaa is any amino acid
MVGIYPFPFTGSSPDLAVRLGEYLANLTVQLRGQVAALKKTHPQQIYHAIANRVLGSLDAGSYYIYAAKAVKRDNIESNPAGIGITYRRVKDGLQITRVFAGSPAHVAGLFEGDVITHLDRKKTADMNLAQLEGLLYGKSNSLLRVGVVSYAHSRFKDMHLRRAEYGFSPVSMSVGEGVATIVVPGFVPGTAPLLREALESLKGVENLTGIIIDLRNNAGGLMEEGLAAADLFLDKGRLSVVRGRNTEVNKTHEASPNTALPKKTCGWRCW

SEQ ID NO: 95557 - protein, 210 aa, Unknown
  Obtained from environmental sample
  DOMAIN (1)...(142): Alanine dehydrogenase/PNT, C-terminal domain
  misc_feature (1)..(210): Xaa is any amino acid
GVPGVPHAEIVVLGAGVVGANAVKVAVGIGAHVTVVDIDVDKLEYLEDIYGSKISTLYSTPENIAEILPKADLVIGAVLIPGSSTPKLVQNKHLPTMKKGSVIVDVAIDQGGCTEASRVTYHDDPVYVQDGVVFYCVGNMPGAVSYTSTNALGNSTLRYGLSMAKLGVEAALKKDSGLLEGLNVYKGLLTYQGVAEAHGLQYTAAAEVIK

SEQ ID NO: 95558 - protein, 175 aa, Unknown
  Obtained from environmental sample
  DOMAIN (2)...(172): Glycosyl hydrolase family 1
  misc_feature (1)..(175): Xaa is any amino acid
MTFPKDFIWGTATAAYQVEGAAFEDGKGLGIWDVFCHRPNAIWQGHTGDIACDHYHRYIEDVGIMKDLGVNAYRMEIAWPRVVPEGTGAVNPKGIDFYDRLIDALLAAGIDPWVTLYHWNLPQTLQQRGGWMNPESSKWFADYAAVVVDKFSDRVSHWMTINEPQVIINHGLFTG

SEQ ID NO: 95559 - protein, 79 aa, Unknown
  Obtained from environmental sample
  DOMAIN (2)...(79): Response regulator receiver domain
  misc_feature (1)..(79): Xaa is any amino acid
MKIIFVVDDSDTSLSIAKKALEDQYRVLTMSSGERMFKFLEKITPDLIILDIQMPEMDGFEAIKILKSKPSYADIPRYV

SEQ ID NO: 95560 - protein, 342 aa, Unknown
  Obtained from environmental sample
  DOMAIN (153)...(290): HD domain
  misc_feature (1)..(342): Xaa is any amino acid
MKSIFIVDDSDTSLLLAKEALKEHYRVLTMSSAARLFKLMEKFIPDLILLDIEMPEMDGFETLQKLKSNNFYKDVPVIFLTNYREDSIESFGFELGVVDFISKPFSTPVLINRIKMQLDIDTLIHERTERIRRLQDGIMTVLANVIEERDRDTEGHNDRTAAFIKILIDAMTERGVYADEMKGWNMEKVILSSRLHDMGKIRIMDTILNKPGKLDEDEYERMKAHAEEGVKIIERMIEQTGDEELLSNAKLFAEYHHERWDGKGYPYGLKGTDIPLHGRIMAFVDAYDALITKRPYKNALTDEEVAKIISEESGKQFDPEIVKVFLEVQGRFKDVRGVSYSI

SEQ ID NO: 95561 - protein, 520 aa, Unknown
  Obtained from environmental sample
  DOMAIN (256)...(476): Methyl-accepting chemotaxis protein (MCP) signaling domain
  misc_feature (1)..(520): Xaa is any amino acid
MVMDTVKAREEISAMAIYSSNGFIVGSYIPDRVGKAMKDVDTAYAQYMDEAVKAVQNGDSFACNSYAPALKSNIEITIQSFPMGNSGRSWSVMIAATESYILKEVNFLTKITLIIAAIAIVIAAVIIYFVLQSTTNPIVKVADTLRDISEGEGDLTRTIAVSSKDEIGDLAKYFNKTLDKIKNLVLLIKKQAGLLKDIGNDLASNMTETAAAVNQITANIQSVKGRVINQSASVTQTNATMEQVIANINKLNGHVENQSRNVSQASSAIEEMVANVSSVTNTLVNNAANVQTLQEASEVGKTGLQEVAADIQEIARESEGLLEINAVMENIASQTNLLSMNAAIEAAHAGEAGKGFAVVADEIRKLAESSGEQSKTISTVLKKIAESIKKITGSTENVLNKFESIDSGVKTVSMQEENIRNAMEEQGEGSKQVLHGVGSLNELTQNVRSSSEEMLNGSQEVMRESQNLEKATQEITGGMNEMSSGAEQINVAVHQVNEISTKNREGIATLMKEVSRFKVE

SEQ ID NO: 95562 - protein, 309 aa, Unknown
  Obtained from environmental sample
  misc_feature (1)..(309): Xaa is any amino acid
MENIFLKPFFSSKNIKDNLIFINCTLGYNGNINILFAEKKYDHLKSRIIKYRLSIRNESDERVGYRIVKNFKIFPKTSQNYILYIPEENKLIKIKNKKINYTKALQIDSDKYCFICHSKYAFKKSIKKNCDIFDLNGKLLKKLDIGTGINDIQTNGKNELWVSYNDVGIYGANNGDNDHIERYGLNCFDVEGNIIYKYDSEPFIDSCDSINVYSDNELLINIYSGSVKSWFVLSNISDKKAEKIFEWRESTKFIAVLKNLIFIEKGEWKDDICSKFSLINIENYNEERIDYEFFNENNERLHCVHAQKD

SEQ ID NO: 95563 - protein, 319 aa, Unknown
  Obtained from environmental sample
  DOMAIN (1)...(313): Protein of unknown function (DUF1703)
  misc_feature (1)..(319): Xaa is any amino acid
VFSALNQLSDLTLDPRYADLCGLTQEELETNFGPEIDSVLESTGCIREEYMDNMRRFYNGYRFSKNPLTVYNPFGILNHFDQNGDFRPYWYRSGTPTLLTDLINSQNIDLTNLNNMQVGYDDFDAFDIEEMEPAPLLYQTGYLTITDYDEKEKCFTLDYPNIEVRSAFAKSLATRCLKTPSNWSYSSCKKLMAALNSGDVDAAMEAVKLFLTKIPYDLFQKRENFFQSVIYVIFAMLGLDCRTEERIATGRIDMVVETRGFVYCFEFKLDGTAEAALAQINSKEYATPWTGHGKKVFKVGVNFDFEKKNIRECASAATE

SEQ ID NO: 95564 - protein, 275 aa, Unknown
  Obtained from environmental sample
  DOMAIN (6)...(265): Bacterial extracellular solute-binding protein
  misc_feature (1)..(275): Xaa is any amino acid
MKIKLIAVFMGFVVLTGAFAGGNQDSAAGKTATPYKIEVGGSTSVTPLMELFAAEYQKIKPNIKVNINGTGSGDGIKNAGTVYQIGMSSRELTPAEQGQGLKETIVAIDGIAVIMNNNSPVSNLTIAQIKDIYTGTITDWSQITGNAKRGKIAVISREEGSGTRGAFEELVGFQGKLLAGANESTSTGAIKASIAQNSEAIGYISLGSVDNSVKAISVNGIAPTNENVKKGTYKIARPFIVLTGKNARPESSAFINWMLSPEGQAIVSKSWITIK

SEQ ID NO: 95565 - protein, 383 aa, Unknown
  Obtained from environmental sample
  DOMAIN (188)...(378): Binding-protein-dependent transport system inner membrane component
  misc_feature (1)..(383): Xaa is any amino acid
LFQKAGLRLSRAINRKHTDIFFKYLFSTVALFSVLALGAILFFVFAQGTMPFFTPTSSGIRLVAQRIDEITVNGITYIDHSTFIDIPKNTELISIRFPSEDETEMLDITVNEAEKDPQKKLTFSHNGDVDVTYPESYVYTVRWPAAISALEKRVHVLLPEPPYNIFSFLGGLEWHPTRDKVFGIFPMIAGTLLASFGAILLGVPIALLCALFMAEFLKPKPASILRAGVELLAGIPSVVYGFFGLMVIVPFVRNAFHVPSGNTLLSAVIVLALMILPTIITIAETSLRAVPISVKEASLSLGASKMQTAWRVVLPHANSGVIAGVILGISRAVGETMAVILVAGNSPQLTINPLASIRTLTSTIAMEMGYASGRHSEMFFQSA

SEQ ID NO: 95566 - protein, 794 aa, Unknown
  Obtained from environmental sample
  misc_feature (1)..(794): Xaa is any amino acid
AQERMAVVVAQKDANEFINFAAAENLDAVVIASITEDGDGASLKMKWRGKTIVDLSRKFLDTNGAPRSAQALLTAALGGDDANEALPGISDGAENVHPVVLLDCLERELMSLRTGSRRGLQERFDGSIGSASVLFPWGGAYQGTPECGMAALLPSLDKQSRTASILCFGYDPFLMERNPYDGAKGSIREALAKYACLGGDFRKARLSLQEYFQRPLSPESWGLPASALLGALEAQIALKIPAIGGKDSMSGNYRDPVRGVDITVPPTLAAFAAGTAPAASIRSGALTGETGNFIVLLAQGSRPSTAANPKLNEWDIFKANMDALAALGEMDRGATSCGATSCVCSAYPVVSGGIAASLALMAFGNNTGLEMKSGALALNLSYQGSVLVEIDGAAFRDNPRIAEILGQAGCWDIAAVTIEEPVFRVTKEVDNDLQAAEVPLAVLRRAYEYPLMKVYPQTGTVEEIGSRETGFGKEQGTGNREQGRKESTALSRVSETCDSAGAPKNATVCQIMREGFSLSGGRRNSTHSSSPLVLLPVFPGTNCEWDMERAFREAGARTRIVIFKNRNRDDIAESKREFAKAIGECQILALSGGFSAGDEPDGSGKFIANVLRSPVISDAVNNLLENRDGLILGICNGFQALIKLGLVPYGAYRRAEASMPTLTFNRVGRHVSRMVRTLVMPASSPWLALEKPGVVHVLPVSHGEGRLVINKAEGEALFKNAQVPFCYADENGRPTMREPDNPNGSDFAIEGLCSPDGRILGKMAHSERRGEYVHINIPGDKRQTIFEAGVRYFS

SEQ ID NO: 95567 - protein, 1010 aa, Unknown
  Obtained from environmental sample
  DOMAIN (375)...(528): AIR synthase related protein, C-terminal domain
  misc_feature (1)..(1010): Xaa is any amino acid
VFYDIDLKAGDLCFAIEYLPGQYDQRADSAEQCIELITGVRPRVRSAIVYILSPGEFPISDAAFEAVKKYLINPVDSREAAERPQTIEETEINPDDVPVLTGFITANDTELGAMADQYGLAMAIEDLIFCREWFSSINRDPTLAELRVLDTYWSDHCRHTTFNTVLDKITTGEGPFTPALKNALVLYEKLREELYGNDALSGHPRSLWDMAVIGAKVLRKRGAADDVDASKEINACTVKVNAEFSDGRSEPWLLLFKNETHNHPTEIEPFGGAATCLGGAIRDPLSGRAFVHQAMRVTGSADPRTSLDKTMPGKLPQIKIAREAAAGYSSYGNQIGLATGQVAEFYHNGFLAKRMELGAVIAAVPAEWVRREEPAPGDLVILVGGKTGRDGIGGATGSSKVHTGDSVQTAGAEVQKGNAVEERKLQRLFRNPQVTRLVKRCNDFGAGGVSVAVGELADGLDIDLDKVPKKYAGLDGVELAISESQERMAVVVAEKDAKEFIDFAAAENLDAVVIASITHNGKDASLKMKWRGKTVVDLSRKFLDTNGAPRSAQALLTANLRSDDVNKATPGLSDETEDVHPAVLLDNLERELISLRSGSRRGLQERFDGSIGSASVLFPWGGAYQGTPECGMAALLPSLGKQSRTASILCFGYDPFLMERNPYDGAKGSIREALAKYACLGGDFRKARLSLQEYFQRPLSPESWGLPASALLGALEAQIALGIPAIGGKDSMSGNYRDAAGGIDITVPPTLVAFAAGIAPAASIRSGALSGETGNVIVLLAQAESFPFKTANPACNEWDIFKANMDALASLGAIGCVRSAYPVVSGGVATSLALTAFGNSAGLEMKSRAFTIIDGSSYQGSVLVEIDGAAFRDNPRVGEILGGTGCWEIAAFTIEEPVFRVTKETDDEMQIAEVPLEVLRRAYEYPLTKVYPQIGTGEQGLGTGEGTIRNEELGIRNKEQQSSLFIPHSSLLIPNSLLTPHSLATPLVLLPVFPGTNCEWDMERAFREAG

SEQ ID NO: 95568 - protein, 620 aa, Unknown
  Obtained from environmental sample
  DOMAIN (50)...(163): MMPL family
  misc_feature (1)..(620): Xaa is any amino acid
SFDHVTQYITGDNDSIVVSDLVPEDFSGTDEEITELRRRIASWDLFRGSLVSDDLSATQILITLDAVTADFTRPEITRSIEEIRKIADQLFAGEAEVYFTGQPIINMIINKSMIADNILLIPLVVIVVLGMLFFSFRRFTFVILPFLTVIIAVVWAIGMAALFGIKLSVITTILPVILVAVGSAYGIHIVTHYMEDTRQKTLTVTEHRELVLGLVKKLIKPVFLAALTTMAGFISFCFTPIVPMREFGFCAAFGVISAFLVAVLFIPAMFLLRGPRVLKERHKKQTSGTFNNNVAGIFTGIAEKKVLVLVIAALAVVISLYGLSKVIIDNAVVEFFQKETDISRSDRFIREYFGGSKDLNLVVVADTTEELLHPGVLQAVDNLSAYLTGHVPAVGKVVGFTDIIKRINQVFNVDENPEGLQRTISSNAFGFSDNISGNDSGSFGFNDNDSDNGSGGFGGFGFSEDVAVTETPIQENIYNITQYNTADILRFLDNAAGKSPHLSGSELVRELKRLTNYDGMAYYEIPSNPRRYGKETPEELQRLIANYLVLLSGDDDSGYSNDPLEPTAIRTLVQMRTIGSKDTQVVIDTIKKFIAVNFPKNVRVIIGGGIVYEMAVTDLI

SEQ ID NO: 95569 - protein, 63 aa, Unknown
  Obtained from environmental sample
  misc_feature (1)..(63): Xaa is any amino acid
AFELKGWVRNTDSGDVETWAEGPREALDLFLAWLHRGPSYSRVDSVEKTDVASRGYRDFVVEH

SEQ ID NO: 95570 - protein, 268 aa, Unknown
  Obtained from environmental sample
  misc_feature (1)..(268): Xaa is any amino acid
MFTADNAEVIVSLRELIMEQRIAVETLRLNGPTIRLEVSRDGKKNWIFDEDAGKNPEASGGGMGIIGIENVQITNANAKFYDARSGARREVNVRRLSIRAPAGERMKFSFSALYDGVAYSFDGVGYYGDGDFLVNGLFKLNNALIGVVGRTKVGGSEKRVFSAKLNLSAPSLSDALAGIADVDLDDPVMANADVVFSDGFISIPRLEISYSNLDILGDAAVNLKGKRPDIRAQLHAPFLDIPTVFYPGWEAAYRERVRTGADAPPSNK

SEQ ID NO: 95571 - protein, 447 aa, Unknown
  Obtained from environmental sample
  DOMAIN (185)...(212): Phospholipase D Active site motif
  misc_feature (1)..(447): Xaa is any amino acid
DKAAYKLTWIFLILLFAFFGGIMYIFFYSQSNPKKLKRLLGRNIRDSREALRLPGNRLPDLIWAHPEFGTQAYYLQEFAGYPVYSNTRQEYFDSGEAFFHKVMEELEKAQRYIFLEFFILREGVMLNPIISILEKKATQGLDVRVMYDDLGCFMTLPADFRETLESKGIKCFLFNPFRPIISSLQNNRDHRKIISIDGKITFTGGLNLADEYINAVERFGHWKDAAIKIEGDGAWSLTLIFLQMWNLGFREKDDYPSFFPWKDNIIEHTENGVSEGFEAWGYVQPYADSPIDKENVGEHVYIQIINQAKKYVYINTPYLIVDDNLLSALILAAKSGVDIRIITPHRWDKWIVAITSRSYYRRLIQAGVKVYEYTSGFNHGKTFVSDDRIATVGTTNLDFRSLYLHFECGVVVYASETVAAVKEDFLRTLPSSQEITLKDCADKNSKA

SEQ ID NO: 95572 - protein, 152 aa, Unknown
  Obtained from environmental sample
  misc_feature (1)..(152): Xaa is any amino acid
VNWFSSNTAVATVNGGTVTAVSAGSATITVTTVDGNKTATCSVTVTTPTYTVQYNANGGTGTMANSTHTIGTSQALTANGFTRTGYLFVGWSLNSGGTGTIYYNSQSVTNLSSTHGVTVTLYAKWAEGNMYYGVTSTAALNALKGTGGSLNV

SEQ ID NO: 95573 - protein, 355 aa, Unknown
  Obtained from environmental sample
  DOMAIN (2)...(332): Glycosyl Hydrolase Family 88
  misc_feature (1)..(355): Xaa is any amino acid
ASIFLAGQKAGDEKFLRYVKEVYDSMIGPDGEIRTYREGEYNLDQINPGKTLFLLYAQYGEGKYRKAIEKLRNQLRAHPRTKAGGFWHKQIYPWQMWLDGLYMEAPFYAQYTKEFGNNEDLEDIALQFSLIESKARDPKTGLLYHAWDESMQQKWANPDTGCSPHFWGRALGWYCMALADTLDFLPPASVYAGTLKAIAGRLLAPLLKYRDADSGLWFQVLDRAGDPGNYTESSCSSMFIYFLYKMTRLQIATNNDVTRAAEKAYQGLVKHKLQEGPSGELHLGGICKVAGLGGTPYRDGSYEYYVNEPQAVDDFKGVGPFILASLENEGNREQGNREQGTGNRDNEQRAMSNEQ

SEQ ID NO: 95574 - protein, 428 aa, Unknown
  Obtained from environmental sample
  DOMAIN (349)...(425): Histidine kinase-, DNA gyrase B-, and HSP90-like ATPase
  misc_feature (1)..(428): Xaa is any amino acid
TAIFGVFCGVSIFVKYEMHGMSSLWIYSFPLLSIFTLGLPTGLIPALIILAAAIAGTFGGLARYQYTTSEAVILSGVYIFVMILTAVYEYVRTIKERWLARQDSYMNLVFDNSPDIIMLLDKNACLVHCAKVLRQKLNNKELDKIHKTSFEELFDGFTDWETLHQITAHFGRSINEKKTVIFERVLDFGVAGNERHYEIHFTPMYNNKGEFQGAFIFFHDMTEILEAKERAEQASRAKSNFLANMSHEIRTPMNAIIGMTAIAKESNDPARKDYCLSKIEGASVHLLGVINDILDMSKIEENKFELSYAEFELNAMIQRVVNIFEFRFSEKKIKFTMNLAPELPQRIITDDQRLAQVVTNLFSNAVKFTPEGGSITLSARRLPDAQRLSDARLEDKEQNFCTLEFAVTDTGIGIPQEQQGKLFASFVQ

SEQ ID NO: 95575 - protein, 95 aa, Unknown
  Obtained from environmental sample
  misc_feature (1)..(95): Xaa is any amino acid
MLGLFARKVGMTQVFDDAGNLLPVTVMRFDPNVVIAKKTKEADGYESVIVGINEEKKNRITKSRAGQFPKDISPKKRIRELRDFEKDVAVGDALE

SEQ ID NO: 95576 - protein, 170 aa, Unknown
  Obtained from environmental sample
  misc_feature (1)..(170): Xaa is any amino acid
MVEIKKFAGSDIEIAQAVYPEHALHIDKIAEKAGIPDEYIEHYGKYKAKVDYNFLQKKQEGLPSREGKLILVTAITPTPAGEGKTTTTVGVADGISRIGKKVMVALREPSLGPVFGVKGGAAGGGWAQIIPMEDINLHFTGDFHAIGAANNLLAALIDNHISRATASTSI

SEQ ID NO: 95577 - protein, 91 aa, Unknown
  Obtained from environmental sample
  DOMAIN (14)...(91): YgbB family
  misc_feature (1)..(91): Xaa is any amino acid
MGASSGFCVSVSAIGQDSHRFEPEGSPKPLILGGVTIPNCAGLEGNSDADVILHAVTNAISGISGQNILGKISDDLCRTGETDSRVYLEKA

SEQ ID NO: 95578 - protein, 505 aa, Unknown
  Obtained from environmental sample
  DOMAIN (246)...(373): GTPase of unknown function
  misc_feature (1)..(505): Xaa is any amino acid
MFVKYKMLSSTSPDYGDKDPIAALATALGESALAIVRTSGTNSSGKGAIDLLAEIFSRPQALLSAPENTVVYGWIVEPASEKKLDEVLVSVYRAPHSYTGEDSADISCHGGIAAVKAVMAALKKAGFREALKGEFTFRAFMNGKLDLTRAESVMELVAAKTGYGREQAVRRLSGVLEREISAIKETLVEVLAATEIYLDYSEDEFLSPDEESDGTLPNKALAEKAAERLKLLSELWSRERIYVEGALAVLAGMPNAGKSSLFNYLIREERSIVTDVPGTTRDWIEAVISLDDIPLRLADTAGLRKMDAPGSKEVDEAEKIGMERSMELLEKANLVLYVLDGVKGFTEEDRVVLVKYIEANKEKPLVVLWNKADIAPFQVSPDYKITEKIKAQFLPVSAKTGEGIPELLRLMTDLLKHSLQSSSSSSVSEDQLLQAAGPGSLRQKELIDSAMSEIEEALALAGQGESLDLIAPLIRSAINALGEITGEVSNADILKVMFNRFCVGK

SEQ ID NO: 95579 - protein, 341 aa, Unknown
  Obtained from environmental sample
  DOMAIN (245)...(338): FKBP-type peptidyl-prolyl cis-trans isomerase
  misc_feature (1)..(341): Xaa is any amino acid
MNGIGKFSLTAGIGGLLISCMAGTAKDASYGNGLFARINTDRGDIVVQLEFPKTPLTVCNFVALAEGKMNVTEGKPFYDGLVFHRVIPDFMIQGGDPQGNGRGGPGYSFPDEIVPSLKHDGPGILSMANAGPGTNGSQFFITHVATPWLDGKHSVFGKVVKGQDVVDAIQQGDKIEKVAIIRNGEAAANFKADQGVFDALVRNSESAAAAKAKVRQEEEIAEIARKYPNAMMNPSGLRYIVQKQGNGPKPSPGSTAVVNIKGSLVSGMVFANSDLSGGAEELPVGTGKILPGLDEAIMGMSKGEKRLAIVPPELGYGNRDINNIIPANSFLIFELELVDIR

SEQ ID NO: 95580 - protein, 297 aa, Unknown
  Obtained from environmental sample
  DOMAIN (27)...(201): Radical SAM superfamily
  misc_feature (1)..(297): Xaa is any amino acid
MGFGIKSYKDFLREVFPQCERVRKVSLNAGFSCPNLDGTVGKGGCYYCDNKSFSAVATSELSVLEQLEDGIKSAKNCGILAYFQSYTNTHAPVNKLREVFTPAMQHSRVVGISVGTRPDCLSEEVVNLLTELNKIKPIIVEIGVQSANDKTLKNINRNHTVECTRTAAALCKNAGLLITSHIIIGLPNEDMDDFVNTAKLIAECKFSAVKIHPLHIVKGTKFAEEYASGKIGLLSMEDYCKAAAEVIRIVQPNVAIERVSAEVRNGAATGGCPYWCGQREKIWKCINASLEAVAVAR

SEQ ID NO: 95581 - protein, 695 aa, Unknown
  Obtained from environmental sample
  DOMAIN (49)...(424): Dehydrogenase E1 component
  misc_feature (1)..(695): Xaa is any amino acid
MPKSILVHPEEVRKPQILKLKDIPVNQYKSDFRKESGLYGTQRLVQIWHDMVVIREFESMLNTFKTQGTWNGIEYHHKGPAHLSMGQEASSVGQCVNLDTDDYIFGSHRSHGEILAKCFSAVWQFTQNAEGEKRLEAVMKNFLNGETLGIAEKIPYNSIRDLAEDFVLYGTLGEIFARKAGFNRGLGGSMHAFFTPFGSMPNNAIVGGSADIAVGSALYKRINHKPGIVVANIGDASMGCGPVWEAMMLAAMDQYRTLWPESAKQISGAVCSGAPPILFNFFNNFYGMGGQTSGETMGYGVMARVGAGVNPDNMYSERVDGYNPLAVADAVARKKAILLDGRGPVLLDTLTYRISGHSPSDASSYRTPEEVKLWQEADSIEEYGAYLVENKAVSKPELDALRETIKAKLLEVVKLAVNDEVSPRLGGAFIESVMFSNRKIEKMDNREPELSEPVEKNHRVKALAAKARYGFDAEGKPLSKNKTFHYRDALFEAMLHRFTIDPTMAAWGEENRDWGGAFAVYRGLTELLPYNRLFNSPISEGAIVGAGVGYALSGGRAVVELMYCDFMGRAGDEIFNQASKWQSMSAGLLKMPLVVRVSVGNKYGAQHSQDWTAMTAHIPGLKSYFPATPYDAKGMLNLALRGTDPVIFFESQLLYDMSEQFEKNGVPEGYYEVPEGEPAVRKQGTDLTIATIGAT

SEQ ID NO: 95582 - protein, 403 aa, Unknown
  Obtained from environmental sample
  DOMAIN (5)...(241): Pyridine nucleotide-disulphide oxidoreductase
  misc_feature (1)..(403): Xaa is any amino acid
AFDWAAIQKWKTEVVAKLRGGIESRMKRFGVETVNGRGEIIAPPSGETPVKVKSITTDNKTAEHEGKTLLVCAGSVPALPPIPGAKGNPLVVDSAALLTIENVPKQLAIIGGGVIGVEFAGLFSALGCEVTVIEMMDEIVPFMDKEQAPILRRAMKGVDFKLGCKVEKIDGAAVYYTTKDAKAELRKADLILMAVGRRPVLDTWGAQAAGIDTGPRGVAVDDRMRTNIPRIWAAGDVTGKSLLAHCAYRMGEVAVADILATLDAGTGNKEQGAVNKTNRMRYNAIPWAVYGITEAAGVGLTEQEADAKGIAILKASLPMKVSGRFAAENTFSGAGAVKVIANAADRRILGIHAVGAYSPEFIWGGAALIEQEFRIDEVKQLIFPHPTVSELIRDAVWEIGSRE

SEQ ID NO: 95583 - protein, 91 aa, Unknown
  Obtained from environmental sample
  misc_feature (1)..(91): Xaa is any amino acid
MVFKRLFEVARISNFSDEELMDYESDMKRFSDHANALAYADEKGEARGLARGKKEGILQTAKNMLAKGYSVAEVIGITHLPRKEITALRRA

SEQ ID NO: 95584 - protein, 89 aa, Unknown
  Obtained from environmental sample
  DOMAIN (34)...(88): Helix-turn-helix
  misc_feature (1)..(89): Xaa is any amino acid
MTLAGHKVRRLNEDGEELFSAEEIFSDAHPGSRLYGLRVREGLTQKDMAIKLGVRQHHISEMEKGKRVIGLEMAKRISSMFDVSYKAFI

SEQ ID NO: 95585 - protein, 402 aa, Unknown
  Obtained from environmental sample
  DOMAIN (20)...(43): 4Fe-4S binding domain
  misc_feature (1)..(402): Xaa is any amino acid
ARESADVKGSKELAGLKYTLQVAPEDCSGCGLCVKVCPVNAKNKDSALKMEHQTPLRAPEAANWSFFLKLPETDPAKFKVATVKGSQFVRPLFEFSGACQGCGETAYVKLLTQLVGDRLYIANATGCSSIYGGNLPTTPYAQRADGRGPTWNNSLFEDNAEVAYGMRLSVDKFAEYAKELAKKVSESGSSDLKAVLGEILSADQSSNELIEAQRARVAKAKDLLKKGSDEASKELLSVIDYLVKKSIWALGGDGWAYDIGYGGLDHVLAAGKNVKILVLDTEVYSNTGGQASKSTPMGAVAKFAASGKPTKKKDMGMIAMSYGYIYVARVALGANQNQAIKAFAEADAYDGPAIILAYSHCISHGINMINGYDEQKKAVESGHWPLYRYNPALVDQGKNPWS

SEQ ID NO: 95586 - protein, 422 aa, Unknown
  Obtained from environmental sample
  DOMAIN (382)...(405): 4Fe-4S binding domain
  misc_feature (1)..(422): Xaa is any amino acid
AAALVAALPDTVKKIAVLDRTKEPGSLGEPLYEDIRTAIGESLEESGSKFKAMPKVVGGRYGLGSAEFTPGMVKAVFDELGKDKPKNHFIIGINDDVTKASLDFDHKFTIETHEVHRALFYGLGSDGTISANKNSMKIISDTTPFYTQGYFVYDSKKAGTMTTSHLRFGPKPIRSPYLITSAQFVACHNFTFMEKYDMLKNLEEGGNFLLTSEYDKDAVWDHLPGWVQKQIIDKKVNFYVIDAVKIATEVGLGNRVNTIMQTAFFEIAKVIDEKVAIDHIKHAIEKTYKKKGDDIVNMNIASIDGAIKGIQKVSYPSAPTKPVEERKVVSDDATPFVKDVTATIIRQEGENLPVSKMPADGSWPSATTQYEKRNLAEGFSIPVWVPEGCIQCGTCSLLCPHGCIRPKAYDPSKLSGAPATFK

SEQ ID NO: 95587 - protein, 623 aa, Unknown
  Obtained from environmental sample
  DOMAIN (3)...(70): Cache domain
  misc_feature (1)..(623): Xaa is any amino acid
LNVLTFSRFLYDDNNSPLGVVCLDFDLKTISSLIQNLDFSENSYEFLLDNKLEIISHPLYQAISDQKKNIENGLLEIMPDLAEGQNINAYKMKNYMNEDSVVFVRGISHGWHLGIVIPVKEYYANIIKTAVFLIIGGILLALLLCIMLYNIYSAKSEADKKTRQKSNFLATMSHEIRTPLNAILGMTEIQMQNADHPPATSEAFLKINNSGNLLLNIINDILDLSKIEAGKLELVPVKYEVARLINDIIQLNYIRYVSKPIEFKIFIDENIPAVLIGDDLRIKQILNNLLSNAFKYTDKGVVALSVNADCVGRGGVVLVSLIFEVSDTGQGMTSEQVNKLFDEYTRFNMEANRTTEGAGLGMTITRNLVDLMYGKLTVKSTVGEGSTFTVRLPQKTDIIGIEGVIGKEMAENLRQVNQTNSIQIKKTQIIHEYMPYGSILIVDDVETNLYVAKGLMLPYGLKIDLATSGFEAIDKIKGGSNYDIVFMDHMMPKMDGIEATKQLRKMNYTKPIVALTANALTGQAEVFLKNGFDDFISKPIDIHQLNRTLTRLIRDKQPPEVIEAANKEKAEMEKNKTSLSGFQQADEQLAKIFARDAEKAVSAIKKSIKKNLNDESDLQLYII

SEQ ID NO: 95588 - protein, 350 aa, Unknown
  Obtained from environmental sample
  DOMAIN (168)...(343): Predicted permease
  misc_feature (1)..(350): Xaa is any amino acid
MGTNLLQIMPRRQMSRSGQNMQMRITGFSKKDVQKLKAESSYAAAISGVANTSANVSGAISNTQVSIMGVEPDFLIARNYNVNAGIFFDDDDLKNRNMVAVLGRTTAKNLFGDAESALSQKIRIGTSYFTVIGLLESKGAGVGGNDQDDVIMVPLDTAITRISNTQSIGTIVISVKSKEYMDAAQKEVKSILCESRRIADEANADFDIMNQSDMIDMASATSKSLTTLLAAIAGVSLLVGGIGIMNIMLVSVTERTREIGIRMAIGGRKRDILFQFLTESVILSLMGGLLGIGMAFFACRILMTMGIPTAVNPLIVAISAFFAAFVGVIFGYYPALKAARLYPIDALRYE

SEQ ID NO: 95589 - protein, 472 aa, Unknown
  Obtained from environmental sample
  DOMAIN (15)...(379): RNA polymerase Rpb1, domain 5
  misc_feature (1)..(472): Xaa is any amino acid
CHKVMKEYKLEHGDKLITADGKRINRGDVIIKRGGEDIVSPEIAYALVLKKKEGETLYLIGQDQKIEIRNGSDFEAQKGTVVEANKNIATFDPFSDPIIAEASGIVKYEDIILGTTLKEETDEDTGNIEKRITEFQHESKQPRVFIVDDNNNQVASYHMPSGAYLQVDEGERIKAGRTIAKTLKESAKAMDITSGLPRVSELFEARKPKSPAVLAQVSGTVYFKDPVKGKRKISIVDNFGREFLHLIPMNKRLLVRDGDTVEAGELLCQGAINPHDVLYILGEGKLQRYLMDEIQNVYRLQGVSINDKHIGVIIRQMMRKVEIRFVGDTKFIYGSSVDKYRFHEENARVMAEGGQPAIAQPMFQGITKASLNIDSFLSAASFQETTRVLTNAAIAGSTDYLRGLKENIIIGHPIPAGTGMKRYHNVKLFDEDSQDLDEYMQEILNRRKEEAEAISGNENTQEEYNTVEDPED

SEQ ID NO: 95590 - protein, 426 aa, Unknown
  Obtained from environmental sample
  misc_feature (1)..(426): Xaa is any amino acid
MDFNLVKVSDGLSVCLLGREGSREEILPERMIIQDNLISLTFANGTELVFTAQNTGGSPEMRINAVFSDDVSGIELPFRPQSRTGIRYTGSGQFIVSAGKTDYTFGNSPIDNERRLLLIEAGGRQVSYRAIPETKGLTTQDFILPQAETAEAYNEAIKWWRDQNYSLWNRIVSTQDNEDLVIALIGEAFARGNYASAVAAIPQAFLNGNTRTYESSAYLGNLDQAYRSLSTSEREKLSRLTRQINEKSLEFLLEPKVFEYFAIRGNTNLFSSALELVRTISTDPSILAMDIIPGIFEGYSTWRTIHPDTENPFESLVEHCCQMISDLLRKTTDGGWVFVYNEGEDNPEFNLRLGKAILVYAEAAHNNLWAGIGRSLILSAISTAEENDESPSTELTSAKLYRILYPLDTYPRAMEISSSSGENWAW

SEQ ID NO: 95591 - protein, 69 aa, Unknown
  Obtained from environmental sample
  DOMAIN (5)...(69): Heavy-metal-associated domain
  misc_feature (1)..(69): Xaa is any amino acid
MEKTVLKVDGMSCEHCVRAVTNAVSGISGTQDVSVDLKSGTVSFSFDSGKAALDAVAAAITEEGFTVKR

SEQ ID NO: 95592 - protein, 218 aa, Unknown
  Obtained from environmental sample
  DOMAIN (31)...(218): Initiation factor 2 subunit family
  misc_feature (1)..(218): Xaa is any amino acid
MARLKTIEWQNDRVTLIDQTLLPNEVRYIDITDAAAMYEAIQVLRVRGAPAIGVAAAFGLYLGVRGFEGSAVGSFLDYVDERAAYLAASRPTAVNLFWALDRMKKFARAQAESCSDIDTLKKRILEEAISILEEDKRMCRAIGEHGFELIKDKDCILTHCNAGGLATSELGTALAPIYVGQERGVTFRVFADETRPLLQGARITALELSEAGIPVTVI

SEQ ID NO: 95593 - protein, 374 aa, Unknown
  Obtained from environmental sample
  DOMAIN (26)...(371): tRNA synthetases class II (D, K and N)
  misc_feature (1)..(374): Xaa is any amino acid
TVSVKSFTFLSKTLRPLPEKHHGLTDPELRLRRRYLDLITSQESRERFVCRTKIIRTIRNFLDDNGFTEIDTPVLTNKATGALARPFVTHNNALDIDVYLRIAPETYLKRAIAGGFDRVYEFARSFRNEGVDASHLPDFTLLEYYAAYWNYVDNMAFTEKLMKHLLTVIKGGLKLTYENTEIDFGGDWPRISFRDLILRDCGIDIDKLATKEELQKELDNRGIKFETDVNVAKAGRGTLIDLLYKKVSRPALINPIFIIHHPLDLSPLARSNDDNPTVVDRFQLVVNGWEVVNAYSELVDPIDQAARFRQQAAARAHGDTETMDIDNDFLLCMEYGMPPISGWGMGIDRIVALLTNAATLRDAVLFPLLRPENN

SEQ ID NO: 95594 - protein, 180 aa, Unknown
  Obtained from environmental sample
  DOMAIN (1)...(165): ABC transporter
  misc_feature (1)..(180): Xaa is any amino acid
GLDKCDGGTVPVGGKDLDKLSGSELAQYRNRHIGFVFQFHHLLPDFTAIENVLIPGLISGKSRKECTPHASDLLNIFGLSKRFHHYPTELSGGERQRVALARAMFNEPALVLADEPTGNLDRVNGERLLELFEKANKELNQTFLIATHNSRLSLGMNRVLYLDDGKIADTDKPTTVADEW

SEQ ID NO: 95595 - protein, 722 aa, Unknown
  Obtained from environmental sample
  DOMAIN (115)...(393): RNA polymerase Rpb2, domain 2
  misc_feature (1)..(722): Xaa is any amino acid
FLQREKVRKGEKPALQGLQEVFKSTFPIESPNGDMVLEYEYYTFDEENMKLTELECKQKGITYSIPLKAHVNLVFQQTGEIRMKDIYLGDIPLMTERGTFIINGAERVVVSQIHRSPGVIFSHEKGVFSSRIIPYRGSWLEFEIDQKRDLIYAKIDRKKRILGTIFLRTLGFSSREEIIRAFYKTDTLKIKEDHETKEKIFGKILAKAVLIKNDSPEGQKTGGQKSDGMRTDGMKTLYRAGEKLHPHNVEELLSNGIKSIEYIDFQAEGSLNSPMLLNCFEREDIKFVKEGSGGEPTKDEALMAVYSVLMPGESITVDQADKDLQGMFFTSRRYDLGKVGRYKLNKKFNLQPPLDDYTLTKTDIIETMKFLIKAYVGDEIFDDIDHLGNRRIRSVGELMANQMKTAFSRMERIAKERMSQKETDTIKPQELISIKPIVAAIKEFFGSSQLSQFMDQVNPLAELTHKRRLNALGPGGLSRERAGFEVRDVHYTHYGRMCPIETPEGPNIGLIVSLANYTRVNDYGFLETPYRKVVKGIATKDIEYLSAMDEDRYYIAQASAKLNNSGSFVDAQVPCRRQGDYTTRSPGDIEYMDVSPKQIISVSASLIPFLEHDDANRALMGSNMQRQAVPLVFTEAPRVGTGMEGKCAYDSGVLCKARRGGTVVNVSSQEVCIEPDDKDYTIPETNADGIDVYRLVKYQRTNQDTCYNQRPIVKLSEKIVKG

SEQ ID NO: 95596 - protein, 272 aa, Unknown
  Obtained from environmental sample
  DOMAIN (18)...(229): ABC-2 type transporter
  misc_feature (1)..(272): Xaa is any amino acid
MSSVALTRSRSRLFVEANTVVTVMAREITVYFKSPGTAIMSLAMPIIMMGMIGGNLMQNMAGGLGFNFGQFMLIGMLINMMFMITSMGLASLVDDHEIDFNQEMLVSPVSRYSLIIGKILGSAFAAVVSLAGTLIVGFAMGIALPLGKLLLILALSPLMCLAAGAFTMIVIGLIKDKKAANLAVMLITMPQMFLSGAIIPINDTNGVLLVLNRLMPMTYCLDLARAVIYAGTPEYGKIVMFNPAVNFAAIAALTLVGLIVGTFLFAWSERNR

SEQ ID NO: 95597 - protein, 68 aa, Unknown
  Obtained from environmental sample
  misc_feature (1)..(68): Xaa is any amino acid
MSKSSIAETFAGYSRLLLNFISRRVNRFEDAEDILQDVFCQFAKASDMINPIENAAAWLYRAARNKII

SEQ ID NO: 95598 - protein, 272 aa, Unknown
  Obtained from environmental sample
  DOMAIN (18)...(229): ABC-2 type transporter
  misc_feature (1)..(272): Xaa is any amino acid
MSGIALSRSRSRIFVEVNTVVTVMAREITVYFKSPATAVMSLAMPIIMMGMIGGNLMQNMAGGLSFNFGQFMLIGMLINMMFMITSMGLASLVDDHEIDFNQEMLVSPVSRYSLIIGKILGSAFAAIVSLAGTLIVGFAMGITLSVGKLLLILALSPLMCLAAGAFTMIVIGLIKDKKAANLAVMLVTMPQMFLSGAIIPINDTNGVLLVLNRLMPMTYCLDLARAVVYAGTPEYDKIVMFNPAVNFAAIAALTAVCLTVGTLLFAWSERNR

SEQ ID NO: 95599 - protein, 313 aa, Unknown
  Obtained from environmental sample
  DOMAIN (33)...(223): ABC transporter
  misc_feature (1)..(313): Xaa is any amino acid
MNNQVISVKDLTKRYKRADRAAVDGVSFSVRRGEFFAFLGANGAGKTTTISILTTTLSKSSGEVKIAGFDIDKEARKVREKIGIIFQQPSLDPQLTAEENIRFHACLYGMCGYRPSFKSMPAAYRDKVMELAAIVGLQDALFKPIKKLSGGMQRKLEIIRSLIHTPEVLFLDEPTQGLDAVSRRGLWEYINSARERYGTTVFLTTHYIDEAENVDTVCLINRGKIAACSSPDELKRKLLRHELVLDADDRTALTAELSDLGVPFTINGRVTVPFEGTAQGIISRLKTDLTVLRINEPSLEDAYIEFLNKERAA

SEQ ID NO: 95600 - protein, 871 aa, Unknown
  Obtained from environmental sample
  DOMAIN (1)...(89): Helicase associated domain (HA2)
  misc_feature (1)..(871): Xaa is any amino acid
YAQLKELGAIDDAKKLTRMGAEMAQLPFDPHISRMIIAGRRENALREVKIIAAALSIVDPRERPLEKQVEADAAHIKFVDKGSDFLTYVNLWDAYRNEWDTLKTQGSLRRFCKGHFLSFTRMREWHDVYRQLDETLSRMKGYEQNPAPASYDAVHRSLLTGLLANCAYLDKNGKYKAAGGKEVLIFPGSALAKKKCDWVVCHEIVETSRVFARTVAAVKPEWLEELAADFCKRTFEAPFFDAESGCVRAVERVMLFGLPLAVKKNALYSKAEPEAATEIFIRDGLVEENLVCHHKFYDHNKKLKQKILSYEAKLRTRGYYKGDVAIFDFYKKRLHIAASIHDLNKAIKAAGSDKFLYMREEDIIEESIPKEAHAYPDHVNIGNQNFALKYAFDPGNENDGVTLALPQKVLPFIAKETIGWLIPPLWPAQIKSLLQQLPRSQRKVFVPVGEAAQKLADNIVAPPATHESFAAELSSAIKRIYGIDIDPELLDSDKTDPHLDLKIEVRDEKNDVVAKGRSGELFKRMNDTAVVGGTDVNTSINDITGTSINTAAGSPWDGAFASYRKTGLVSWPGEDLNKPLDIGSNKGGFAVRGYPALVPTSGIIDGGINTDNDNCVDLVLFPSKIKSDIAHRYGVRKLLETTLMKDLAWTERDVSSFSKEVKVMCAPFASTDKFAARLYDMICESILDFDDAPRSKDGFDQLIIKIKESLRGIGFRVLSVFEESLRVFTDDATRLSSAKKKLPADIHKELANALNEFFTDILDGQITLEIFSQYPRYLKVFAAIIEKASFEPFKYRQKRAEVNQYVSVYNDLQKKNAKPENAHRSKRLLKELLLMIKEFEINQFAQHIKTLFPVSEQRLDKKVGEIKKLCS

SEQ ID NO: 95601 - protein, 334 aa, Unknown
  Obtained from environmental sample
  misc_feature (1)..(334): Xaa is any amino acid
MKKLLVIMLVLLVASMAFARGSSASGGSSGLIKVGIINLHPSESGYREASVKDFDRVFNAANGYEVLKANNNTLAEQLYSARQFITEGVEYLLIAGADSNGWTSVLTEAKNAGVKVLLFDRMLNVDPSLYEVAVVSDMRKEGETAVAWLKSLNLPQYNIIHIQGQIGSDAQIGRSGPLQEAIDANSSWRLVRRGTGGDTWSGDEAKKVVEAAIAARESFNVIYAENDGMAEGAMKALQAAGITHGVNGDVKIMGFDTNKYALRYVLNGDWNFSGQCSPFKADAIEGFIKKLQAGQSLGLTGDKKVIDEETYFANPNPGGKVITQADVDKYGLGD

SEQ ID NO: 95602 - protein, 442 aa, Unknown
  Obtained from environmental sample
  DOMAIN (1)...(269): Endonuclease/Exonuclease/phosphatase family
  misc_feature (1)..(442): Xaa is any amino acid
DADIIGLCEIENANTLNELAEALDRMGAPYPYAATADAPASATVTALLSKFPIIEKHALPVENSRSILEAAIARGGDTLRLFVNHWPSKRHKESARVAAAQTLRRRIDGLRDGADYIVMGDFNSNYDEYATFHSSGHDDTQGKTGINHTMKTVTADGARPNTPARFVCAGELPACGGCHYNPWLDVEEDARMSYVYKGAKNTIDNMLLPASLFDGEGYSYLRGSFQAFTWDGRLLKDGVPYRRQMYYKGKERYHKAEGYSDHLPITAKFVRSKLLSADSVNAPCAQINPNLAIGDFAASTDGWLNGDSRFSVERDGKHAKTGSHSLKISGLHESENHTAAKATLTSAPSQKFLTLNARGEGKLSIRLRRPQGKWIYHNAPDFAQKKTPKYNAWKSDKWTALKLPLPPQQQGVSDINNNDIEVEIRAGKGDKFLVWIDRVRLE

SEQ ID NO: 95603 - protein, 342 aa, Unknown
  Obtained from environmental sample
  DOMAIN (265)...(341): Beta-ketoacyl synthase, C-terminal domain
  misc_feature (1)..(342): Xaa is any amino acid
MNPPNGINEHGLERAVVTGLGTVSPMGNSVSGSWSALLSGVSAAAPITRFDCSHFKTRFACEVKGFDPAAYFDPKEARGMDLYTQYAGAAAAQAFGDAGLEAGAGDPFRQAVIFASGIGGINTLQEELFKFATSSGVPRFSPFMVPKMIGNIAAGAIALKYGFRGANYGTVSACASSSHALIDALNLIRLRKADVVIAGGSEAPINVTGVGGFGAMRALSTRNDDPAAASRPFDKDRDGFVLGEGAAALIVESLSHAKARGARIYAELAGGGMTADAFHSTLPHPEGIAVEKAMAFAMDDAGVNPEDIGYINLHATSTPAGDGPEIMAVGRLFQNSLNKLHV

SEQ ID NO: 95604 - protein, 287 aa, Unknown
  Obtained from environmental sample
  misc_feature (1)..(287): Xaa is any amino acid
LARGIKELCIIGQDIGSFGTDIASGLINLPQLLNSVSSIEGHFWVRLLYIHPDHFPVQILDIIEKDKRLLPYFDIPFQHASAKILAAMNRNGTAEKYLELIKTIRTRLPNAVIRSTFLLGFPGETEEDFKALLDFQEKAELDWLGCFTYSREEGTPSLSMKGQVPKKTAATRKQIIEERQIPITEKNMDHFTGQTLEVLVEEQIDSPAAEEIFWLGRLYCQAPDIDGAAVIAGAAEINPQLGDIVPCKVIASRGFDLEARLLLTPSSHSAIINHARSGSPLSSTAQS

SEQ ID NO: 95605 - protein, 566 aa, Unknown
  Obtained from environmental sample
  DOMAIN (56)...(487): AMP-binding enzyme
  misc_feature (1)..(566): Xaa is any amino acid
MSVPYTEKPWEFLKDYRGKVFSGEWPTLPEMFKITVSRFPHRACFTIYEPNRISLDYTEALKVIEAVARWLHSNGIRRGDRVVVTGKNAPEWTVAYLAILFAGGVVVPIDYQLKNEEIDLLIKASGARMIFVDEERYEYYSSKAGLDKVLSLKKGIGTYIYDLDGPGAEIEQAVETDTAAILFTSGTMGIPKGVILTHRNLVSDCYLAQGTPLIVLHTDVFYAILPIHHSYTMLAVFIETISTGAEVVFGKRMVTTQILKDLKEAKITMLLGVPMLFNKVLAGILRGLKSKGPIVYGLISFLMGISGLIKKVFKVNPGKKMFGFVLDKASLTTIRICICGGGPLAPSIFRKYNQLGIDFVQGYGLTETSPIITINPVEPYKETSVGRTCPRVDMKILDADERGIGEVIVRGPMVMKGYYNLPEETAAAFTSDGYLKTGDLGYMDSENYLYLTGRAKNMIVTEGGKNVYPEEIENEFQLFDEIEQVLIRGYVLDAKMKSEGIEALIYPNPEFKNEAGNKPSAEETKNRINAIIAEVNLRLLPYQKIGRIEILENPLEMTTTKKIKRG

SEQ ID NO: 95606 - protein, 257 aa, Unknown
  Obtained from environmental sample
  misc_feature (1)..(257): Xaa is any amino acid
MEENTSVFSARLEKVYNWMSQEGISLLMLEDAETRRDQNIRWLTGHPADALLFLSAEKKAILTAWDINLAKLYASQSPVTISSYNDFDRKPVKAIALIAKKFGIPAGAKIEIPSVTPYPVFLDYISELTDYDIICRENGAAAEISKLRAVKDEEEIAIIRKAAGITNDLIDQLEKNVVSGKIKTEADAALFIEVEARKRDCEGTSFGTLAAGPDRSFAIHAFPNWTIAAFGGQGLSILDFGVKFGGYCTDVTLTLPA

SEQ ID NO: 95607 - protein, 64 aa, Unknown
  Obtained from environmental sample
  misc_feature (1)..(64): Xaa is any amino acid
VIVDLLITINKEKNFNVEATVNFRWGVSIHVAEEDFDLTKAIDEMIDKLEVKITKEKEKMKEKR

SEQ ID NO: 95608 - protein, 395 aa, Unknown
  Obtained from environmental sample
  DOMAIN (21)...(178): Penicillin-binding Protein dimerisation domain
  misc_feature (1)..(395): Xaa is any amino acid
LLIHYALLMTRGVSSVARQNLNLPERGSILDRNGRFLAIQIRFADVSIWRPSIKDVDVLANEVAAILDMTPSEILEKINSSESNFLYLKRHIDDAMARNLGVLLEEKKIRGVMIQPIVGRIYPEKNLASQIVGFVGDRNEGIEYAFNNELSGVESHGKGSNVVLTIDTYIQYILQQISARTMEETKAEAVMFVAMDPRTGDILGSVSLPDFDPNNVRASDANGRMNRPAIWAFEPGSTLKVFSMAALLDSGAISDNSVFTCNGFYTTSRGAQIKCEGRHGRVTVREIIINSCNAGAAYASDNISASKFYQLLSDFGFGSRTGVGSPGETAGYLVRSENWSDRSKPTIAFGQEIAVSAYQILQASTAIANDGVLVPPRIVSKIVSADGKKETEWKG

SEQ ID NO: 95609 - protein, 85 aa, Unknown
  Obtained from environmental sample
  misc_feature (1)..(85): Xaa is any amino acid
MHGYLLDTHAAIWFFNGSDTLSKKADAIICDFSNPIYISIVSVWELAIKMSVGKLDFDGKTAGFISLAQKNEITILPIKPSHLAV

SEQ ID NO: 95610 - protein, 1572 aa, Unknown
  Obtained from environmental sample
  misc_feature (1)..(1572): Xaa is any amino acid
MKKISTLLIGICLLLTVIGCQNPFQIDDTHTNNGKGQFVLNIGNGAAGRTIMPDINQTIAAYSLQFSGAGTLTVDRTSANVGEAVSLQAGTYDLTVTAFTDTAKANPIARGTLTGIVITSGGTTSKSLVLGGIIETGATGTFKYTITFPAAVTATMTITPISEGGTAQQTKPLASRTQAAVTLNTGYYRVAFNLDNGSKAVSRENYLHIYKNMESVFTFTFTEGHFVTYIVSSDADDGDEVDPAPGSLRYAIKNAEENSTIVIKDTITEIKLKKRFYIDKSLNIEGNGVTITRDPSWTTNDGDSQFVYIRKGFDAESTTPQVRISRVHFTGGHSALGGAVCNYNGELWLESCIFSYNKAINGKGGAILNESDAMGLTVNGCTFYGNTSGMFDGNAIRSDANQGYFTLTGNVFFYGDVVVDWTASAFVYQYGSIEGTSGGYNVVDGEYAHTIDQMFRNVEPAATDILREEPFVTPVNFKVLAGSAATHVISSLPADYPETDFYGNVISHGANAGAVQAVANGFLLTTRSSNDALGFAVNTSSLNEDGLYSGSVTLTATAQDGGTFLYWLKDGVQAGSASPWNFTPTGHSSIQGVFAYRVNSTADTVAKGTLRYALTNIADGDYISIDPSLGGAIAIGTPLPVINRENITIEGNGGVLTRSGAMAVNAASQLLAVGDEGSVVIRRLHFKDGSATQGGAVKNNGSLRLESCIFSGNAGTGTAATDGGGAVYNSGTLTLKACTFYQNTATASGRGGAVYQPSGSLALTGCLFYANSGGTAIQYAAGTVTSGGFNVIDMTQSGGWTETQTDKTIAVPFISTTPAEYRLLKNSAASSLITPLPADYPAKDFYGDPITANAAAGAVQVPITSNGIAVVYSVNDPGRGSVSISGTPDEYGLYASPVTVSTAKTNTFDFIGWSVNGVMEETTVMTKTVSAHSAVQAVYGTVVTNYDDSGTGTLRAALAAGVANDYIFCKDVTPGVTTITLASVLPAINNRSVTIAGNGVTIVKGYATSTASRLLVINGSTAYTVRISRVWFKDGQLSTDNSGAAISCTSNLILESCIFSNNRIAGNDGYGGAITLANANVNLELYGCTFYGNQAPDGGGAINSTSTSTTRRWVLIGNVFNGNLATYYGDLRNTIRLSDYPVFVASGNVLDFSGSPFDSSQAKTVLGGTFLGKTSLKPIAGGDAVNMLASIPAGYPAKDFYGTAITAPAAAGAIQSTASGGYGLGLAQGAGGTAAITSGTPDAEGLYTGTVVVTGTPTTAPTEVIWWLVNGAKVESGNTLTLTMDGSKTVQPVFGLKVTSGADSGTGTLRWAVANIPAGSGFQSPTTIAVKVPEIQLDSQLSITKTNIIIDGNGAVIRPSASWSGTNSLLNVPSTNNPTVYIINTHFKDSQYGAITVNGSASASAVVPIYSCIFSGNQGRPVTAIGQGFVYIYHSTFYNNNAGSSSLLNQGASGGNYIIAGCLFYGNTASTLFSYIAATSLNPISTMYNVVDVPIGTGTGNTGWPASTSGSFNSSDNQTLSGLGVSGIPFNTSTFKPNNSKLKTGYTGTIWDLPAIDFYGEARNGTVGAVNY

SEQ ID NO: 95611 - protein, 247 aa, Unknown
  Obtained from environmental sample
  misc_feature (1)..(247): Xaa is any amino acid
LGGTNGYWWTATQDDIVGKAMGQACIEIRKASGISEYKSRMLSVRCLQDYYVAPSPSKGNNIANYKTVRIGNQVWMAENLDYNVNGSKCYNKETANCTTYGRLYSWAIAMALPDSCNSSYCGSKIKAKHRGICPSGWHIPSHDEWTTLMNFVGGASTAGTKLKSTSGWSSNGNGTDAYGFSALPGGYAYSGRFGFSDVGNVGYWCSATETKDIASYAYGRVMYYNSAGVDSGYSGKADLYSVRCVQD

SEQ ID NO: 95612 - protein, 286 aa, Unknown
  Obtained from environmental sample
  misc_feature (1)..(286): Xaa is any amino acid
MTAETVMAQGGAVLEECFDENCVIKVGAAIGADYIVRGTVSKFGNMLTVSVDVYETNDGNLVASSELVRSENIVELLDMTAEASANMYRKFVNPRSPPQRAAPKEPPPNYQTPIQPPPPQYQAPAPTPAAAVKQQTYQPPAPAPTPQPVNNDRKTYKTVVIGGKTWMAENLNYQASSGSWCPGNDNSNCDKYGRLYDFQTARTVCPAGFHLPSRQEWESLTAAAGGKSAAGKKLKARSGWHDNGNGTDDYGFSALPGGRLSSDGSFYSVGIYGFWWTATESNSGYA

SEQ ID NO: 95613 - protein, 385 aa, Unknown
  Obtained from environmental sample
  DOMAIN (4)...(309): AMP-binding enzyme
  misc_feature (1)..(385): Xaa is any amino acid
VDIHALEDIRKLPFTTKDDLRDNYPHNLRACAQDRIVEVHMSSGTTGKPVVNEYTIKDIDIWRECMSRTLAAAGCTRDDIVQNCYGYGLFTGGPGVHYGALNIGAEILPMSSGNTERQIMVMQDFGSTLLTCTPSYALYLAEEARDAGIDLHALPIKKGCFGAEPWSENMRRQIEACYGMKAYDIYGLTEIIGPGVSFECEAQNGLHVNEDMFYPEIINPDTGEPVPDGEKGELVFTTITREGTPLLRYRTRDITYLIREPCTCGRSTVRMHRLFGRTDDMLIIRGVNVFPSQIENALIEIEGVEPQYLIVVSRGKDHLDELELQVEVKMELFTDEVKNLEKLRDRIEHVMKSKLQISVRVKLVEPKTIERSIGKAKRVIDKRSI

SEQ ID NO: 95614 - protein, 129 aa, Unknown
  Obtained from environmental sample
  DOMAIN (1)...(129): Cobalamin adenosyltransferase
  misc_feature (1)..(129): Xaa is any amino acid
VECLGTLDELNAFLGDAKAALDSAAVAVADADADADADAYGVYISGIITGLQKDLFLVMGILAGMPVPEEGPDEERLNLLIDELEAGLPPFTSFVVPGAHPASAKLHIARTVCRRAEKRLTALNEETGS

SEQ ID NO: 95615 - protein, 450 aa, Unknown
  Obtained from environmental sample
  misc_feature (1)..(450): Xaa is any amino acid
LPTPTITRQPWQTRVISRKECTRLLQKYFAATDPKDRSVFRPQIISAYWEFLRSVATKSTGKLPEAKKFLLRFGILHPKLLNAEAKAFFSKLVTENELGQPIYYVDEWLRAVGTGSVSPSTTDEVQVANSNKQVKLRQLLEKAHGKLDGTRTMLKAKSQERIELEKALKSQVEFIMEHEFLDDCEGALLCYSDQQKRGFTDAQEIIRNMLKTDRELATLIKDYHQAEEDVEILRDKQNEDDDEAKVMDLQALNTEFDTIRQSVKMTVGRQGNHFPILTSEYFRCGPNDVAFRENIISMLTRIESIDKEAFCRIYKNKINRIVPYVVLLPCYGDTGICWEPFNKHNRATSRGRIFIPMYPKNLYIAVLSAVADLRWQVAKEKASFYWMEEGLTGNYYQWFVAQKLKGDVKDFFIQDYILWMTKEAEGIQKLEKEIRGTFWRHMPFAQEVKE

SEQ ID NO: 95616 - protein, 280 aa, Unknown
  Obtained from environmental sample
  DOMAIN (2)...(148): NAD-dependent glycerol-3-phosphate dehydrogenase N-terminus
  misc_feature (1)..(280): Xaa is any amino acid
EVLHENGHNLEFWTPSLTEAELLAKEREYKDKLPGIELPTEFKYSTEMFGVIKDSDMLVLTVPSQFMENVAQQLGQCPAPEKIPIVVNATKGISEHSLKRMSEIILSHVQWLSEEEIAVLSGPTHAEEIAREVYSAIVAASKNEVCAKIVQEAFSNKTLRVYTSQDVVGVELCGSIKNIIAIAGGIIDGLGIGVGDNTKAALITRGQAEICRLGEVLGASPRTFSGLAGIGDLIVTCMSHHSRNRFVGEQIGKGKTLNEILAHIKMVAEGVSTARSTYAL

SEQ ID NO: 95617 - protein, 398 aa, Unknown
  Obtained from environmental sample
  DOMAIN (1)...(336): Serine hydroxymethyltransferase
  misc_feature (1)..(398): Xaa is any amino acid
SLQLFGAEYANVQPHCGADANLLAYWAILSTRIESPALEKWGETNLYKLDDAQWKELRASLGNQRLLGLDYYSGGHLTHGYRNNLSGRMFDIHSYSVSEKDGLLDYDQIERQACEVRPLILLTGYSAYPRKINFKRMREIADKVGAVFMVDMAHFAGLVAGKVFTGEYDPVPWAHIVTSTTHKTLRGPRSGIVLSKSEFAEALDKGCPLTMGGPLPHVIAAKAISFREAASPDFKQYAQKIVNNCQALAASCIKNGLEVLTGGTDNHLLLVNIHKAGLTGRQAESALQDCNITVNRNSLPRDPNGPWYTSGLRLGTAAVTSLGMGEAEMAEIGALIADVTKATTQLPDNKEPSKNSKVKYSIDAGAKSEIISRVKSLMDRFPVYPELDLELMKKAFVI

SEQ ID NO: 95618 - protein, 210 aa, Unknown
  Obtained from environmental sample
  misc_feature (1)..(210): Xaa is any amino acid
CCFFKKDLTENLEKTPYVLRPDNLNPQAPGTGSRIYKTGAQSGTEKIAVAVLLGQSGFGRLHSANPFIRLPVLLERLRQETPYVIIDFHAQATAEKKTLFFIADGSCSAVIGSHTRVQTADETILPKGTAVISDAGRTGSSESVGGCETASRIQEYLSGIPEWTKDSWDKPELQGVYIDIAPDGKAKTIERVRIRLGTGDQGSGIGECCS

SEQ ID NO: 95619 - protein, 454 aa, Unknown
  Obtained from environmental sample
  DOMAIN (64)...(279): Methyl-accepting chemotaxis protein (MCP) signaling domain
  misc_feature (1)..(454): Xaa is any amino acid
KRADNTGYELSSNMAKTSKSVDQISADFEGMKSAMGRQEESAAEADRAVKVIEASIESLHRLIEDQSKSINTSSSAIEVMTTNIHSVRNTLIENGKNVNELAAASENGKSGLQTVAEKIREISRDSEGLLEINAAIDTIASQTNLLSMNAAIEAAHAGEAGKGFAVVADEIRKLAESSSEQSKTTATMLKKIKASIDSITESSNEVLSGFEVIDSGVKTVSRHEENIRNAMEEQETGGKQILESMDRLKEISVSVKKGAQDMLASGEKLNRQTEEFINISNETMAGMNRIVNGAMREIKAAVVTVDEMSGENSRNFEELKSESQKFKADLSGGKKKIIVVDDEETVLTLTKAMLESRYDVTTVSSGKAALGLFFQGYTPALVLLDLNMPEMGGWDTFIRIRDLSKLHKTPIAIYTTSDDPGDRAKAKEMGAVDFIKKPCKKEELLNRIQGIINK

SEQ ID NO: 95620 - protein, 312 aa, Unknown
  Obtained from environmental sample
  misc_feature (1)..(312): Xaa is any amino acid
MLKAGKKSTAALSVLSAFIIILVSASAVRADAEFDNLYSTRKYKEALAYAEEKLPYNKRDPQLWIKIGHINEALGFIEKALACYMVAWRSMPDDYNALYGIARVYNKMEQPEDAAAMAERALKVNFTADVSWEYAKACIALKRPADAKRALEKVISTDSSNVIANRELGNIYYSGGEYANAIPLMKRSYKEKADGEVAFRIGRSYAESGVPDSALIYLKIAIDRKSNVSEASRFMARARFGQKKYAEVVSGYAGVSQDTMDAMDFYMLGFAKEKTNDAAGAAAAYKSAVSMFGNDKRKEALLARANLARSQL

SEQ ID NO: 95621 - protein, 224 aa, Unknown
  Obtained from environmental sample
  DOMAIN (3)...(224): Protein of unknown function (DUF1015)
  misc_feature (1)..(224): Xaa is any amino acid
MFSIHPFRALRPKPELAAEISSLPYDVMNREEAAKMAEGKPNSYLRVTRSEIELPEIKDPHCKEVYDRAKHNLKRMEKEGVVFQDEKPYFYVYRQIMEGREQYGLVACVKTEDYLKGSIKKHELTRAEKEEDRLRHILVTGAQTGPAFLTYRDKGQFALIKPITKKAPVYDFTTEDGIGHTVWVIDDDALIERLRISFSSLPCTYIADGHHRSAAGARAAEKEQ

SEQ ID NO: 95622 - protein, 529 aa, Unknown
  Obtained from environmental sample
  DOMAIN (243)...(408): MatE
  misc_feature (1)..(529): Xaa is any amino acid
MGDKNQAGPHPVSLIRHGSLLSLLTLVSRVLGLLREMTKASLLGTSALSDAFSVAFMLPNLFRRLFAEGSVSAAFIPTFKEYLLENDQKKNREFLSCIFTFLTFLVTLTVMAGILLAPFLIRFFGMEDFDETVLLTRIMFPFLGFISIAALFQGILNSLHIFTPSGLAPILLNIVTIVCAYALSPFTKNPARAMACGILIGGFLEAAIQLPFVLKNGQRFFITGLKKAFNNPGTRKVLKLIGPTIIGMAAYQLNDLVSTALAGNAGEGIVSSLQYSLRLQELILGVFAVSIGTVLLPDFAEYAKSGRWDIFNRRLSSGMNIIAFITIPITFFSLSQGRSLIALLFQTRSFNEESARLTLAAFRFHMPGLYFIALNRILAPAFYAQSDAKSPTIAGIFSFVVNMALAAILAFPFKGSGIAFALSFASAVNTAALLFFLRRNREITLGRTLISALGYAVKLILFSALSLVPVLLLSPRLSELFSGRGRIISFGIPLFINAFAFAGTGLFLLVVTRDKRFLSMIRMIKGNRE

SEQ ID NO: 95623 - protein, 271 aa, Unknown
  Obtained from environmental sample
  DOMAIN (63)...(262): Mechanosensitive ion channel
  misc_feature (1)..(271): Xaa is any amino acid
MNLKIFELLELQPASILLFARNLVAAILILVVGRILSKGAQRLIRKAGSSDLRVDETVTSVLRGIVRYGIFIVSVIMVLNVFGVNTTSLLAVLGAAGVAVGLALKDTLGNIASGIIILLMGSYRKGDFIEFGSFMGTVKDINLFTTILETPDGIHISAPNSCIWGAPLRNYTRNGKRRMELSVGISYSDSVDTAFQVMKDIIAAEPRLLKDPTPQVILQSLESSSVIITVRAWASLKDYWDIYWELNKTIKAKIEAAGLHIPFPHVQIVRD

SEQ ID NO: 95624 - protein, 541 aa, Unknown
  Obtained from environmental sample
  misc_feature (1)..(541): Xaa is any amino acid
IFDIGLLYPTKSASFSGTLRYYYFDQFKTDFPLKNELGGNFSIAKEFFPQFSLGAGINFGAGTDTRTLSADLGLLHNLGDLGFLKNFTWALVLRNMGISWAPTWFTPWLGFTFDFLRIEGKDGKPTPLVLNFAADVGVPSVIFPENINVIVKTGITVTVLDKLTLSLLWPGAGGYNMRESKEGNNGHFQWFPSVGMGVNFLIPSGGKRQSGEYRLSERRPSDGDITFDAAFKPLYYDVYATGAGITWYAPYRDDLPPNIIIDYPETQYISPNYDGKQDNLLFPVRIADDHYVTSWIMTIKDSNGNTVRTYQNKDRRFEMMDARDIYGRYYLEKKGVDVPSTMRWDGVFNTGEIGPDGKYYFSISASDENGNTGYSPSYEVIIKNNPPQVTIDDISLNDRVFDPSSGNRRTINIVPHGTIEDKWESGIYDAEGKLIRTFEPNSGSPQPQTWDGRTDSGAFAPDGAYTFKISATDIAGNTGSAVMSNIVVDTKTVGALLTASAYAIAPKIGQTAELVHFSDRLNRTDGVHSWKLEIKDDKGAT

SEQ ID NO: 95625 - protein, 357 aa, Unknown
  Obtained from environmental sample
  DOMAIN (1)...(187): Domain of unknown function (DUF404)
  misc_feature (1)..(357): Xaa is any amino acid
VPEEFVYISKGYMPECAGIVPPKGVYSHISGIDLVQAKNGSWYILEDNLRIPSGASYPLIARELCRIANPDVYSIHDVRDNRNYSEMLRETMDFVNRGGLNVILTPGRYNAAYFEHSYLSERTGALLVKASELVVDNSVLYMKDYLGMKTRVGAVYRRISDEYLDPMTFLAESLIGVPHIMDAYRAGNVAIINAPGNGVADDKGIYYFVPKMIKYYLGEEPILQNAPTYLPYYENDLKFTLENIERLVIKDVSEAGGYGVVFGSELSKEKLAELKALIIKEPRRFISQEVIDFIDLDIMDENGNAVPRKADLRAFVLTDNATHMWASGLTRFSRVVGSFIVNSSQGGGFKDTWVLSR

SEQ ID NO: 95626 - protein, 354 aa, Unknown
  Obtained from environmental sample
  DOMAIN (171)...(308): HD domain
  misc_feature (1)..(354): Xaa is any amino acid
MENEKKLVILVDDNLANLKIGNNFLEEKYTVATAPSAAKMFGLLKNNTPAIILLDIDMPEMDGYEAIKILKSNPETKNIPVIFLTAKNESEDELEGLSLGAIDYITKPFNPALLLKRIEVHLLVKGQREELQYFNENLQKMVEEKTQSILDMQNALLKTMAELVECRDDITGGHIERTQRGIKILLEEIEKSGVYREETKGWDVDLLLQSSQLHDVGKISISDNILKKPEKLTDDEFNQMKKHASFGEQIIERIEALTKESDFLHYAKIFAASHHERWDGSGYPRGLKRDAIPLLGRIMAIADVYDALTSVRPYKKAFPHEEAVRIITENGGTQFDPALVEVFVKNSWAVYGCY

SEQ ID NO: 95627 - protein, 682 aa, Unknown
  Obtained from environmental sample
  DOMAIN (240)...(502): Glycosyl hydrolases family 38 N-terminal domain
  misc_feature (1)..(682): Xaa is any amino acid
MLIAKAEYRIEQYLSFLKKNRYRELSSLDFETFETSETYRTPPENASWEKINVPYGYGKPWHCSWFRASFTAPVQNKYPMYLRVIPNADSLVFIDGKPAGAFNPVHKKILIKADGKSHTLHIESYAGHYYPGCHPFQGRQVILTLGRHIDDYPNTFAGGGLVEKIEPVYGLYYDALCLFNLARMLDDNSLRKARIISGLYDALMDIHYSSTGTVLEEEAAAARKKILLLLEAKNGSTVPEIYLIGHAHIDHAWLWHIGETERKIARTYINMIRLAEEYPEFIFIQTQSAQLEIVKREYPEIFEAVKEAYRKGNWEPNGGMWVEADCNIPGGESLVRQFLVGKKAVKEMLGYEGDTLWLPDVFGYAAALPQILSLCRIKYFVTSKINWNDTTRFPHNTFIWRGIDGTGIKTHFINSWATGYNGMVNPAELAETWNNVQHKELQSASIKPIGEGDGGGGTARGDLEAARRLANLEGAPKAGWKKVSDALENIFAESAHWPEWRGELYLELHRGTYTTQGAIKRYNRKLEFTMRNAEFLSSVAMLENGVPYPHERLLKNWKLLLTNQFHDIIPGSSIGRVYDEAKETYCNIEADLADLSKTVLQELSGSKDTASGGIRFYNDLGWEREDPANFPADLVKGASALKAYGDNSEAIYPVQRYINLDGKETAISCPRLPPLGWITLSA

SEQ ID NO: 95628 - protein, 726 aa, Unknown
  Obtained from environmental sample
  DOMAIN (1)...(183): Glycosyl hydrolases family 38 N-terminal domain
  misc_feature (1)..(726): Xaa is any amino acid
MWVEADCNISGGESLVRQFLVGKKAVKEILGYEGDTLWLPDVFGYAATLPQILSLCGIEYFVTSKINWNDTTRFPYNTFIWRGIDGTGVKTHYINSWVTGYNGKVNPAELAETWNNVQHKELQSASIKPIGEGDGGGGTARGDLEAARRLANLEGAPKAGWKKVSNALESIFAESPHWPEWRGELYLELHRGTYTTQGAVKRYNRKLEFALRNAEFLSSLDMLENGTPYPHERLLSNWKLLLTNQFHDIIPGSSIGRVYDEAKETYRNIEADLTELSKAALQKLSGCADAAVSGGLRFYNDLGWERDDPISFQADLIKGAAALKVLGDDSETVFPLQRYIDLDGKEMAVCCPRLPPLGWITLRATEFTASSCFTFRGNNLKTPFYEVGFNEAGRITSLFDIEGDRELVAPGGVLNGFVSAQDVPVLWEAWDIEADWTRYLTEETRLLSTEIAASGPVCFRIRRKYKIGEASILSQDTVFYAENPRIDFETLVDWREKQRLLKTQFDTAINTAQIRCEVQFGHLLRNTHKNLPQDRARFEFCAHKWVSLEEEGGGIALLNDCKYGHDAEGSRVRLTLLRSPVAPDPDADTGEHRFTYALLPFTGCFGESGIVRTGYELNDPARVEPAFGSLASAEPAEYSLFRIDGQSVIVETVKAPEASATGKRLVIRLYESLGGPARTVLRFNRPILSAAETDMLEGNPRELPVSGKDLFLEFRAFEIKTVLVSF

SEQ ID NO: 95629 - protein, 175 aa, Unknown
  Obtained from environmental sample
  misc_feature (1)..(175): Xaa is any amino acid
MLFIKNAMIKTMAGEDIKNGCILVDNGKIQAIWPNIAQPEEATVIDAGGRLTTPGLIDGHSHIGMWGEGSGWETSDGNECVDPVTPQLRAIDSLNPRDEAFANAVKGGVTTVGTGPGSANAIGGTFSAIKLIGSRIDNMILKQDFAMKIAFGENPKGVYDDQHKSPTTRMAIAAL

SEQ ID NO: 95630 - protein, 249 aa, Unknown
  Obtained from environmental sample
  misc_feature (1)..(249): Xaa is any amino acid
MSSIYEAKEEMHQIEAQLYPNHLAGGENTYLAKNTKEKTINVEAICAAMRNRGGYDGSHDEAVKTVNHFFKEMMYQLCDGFSVNTGWFTVTVHIGGLFHSVKEIFDPKKNPVSFKFHALKAMKNLTSLIEVIINGHIEETAYISEYNDMEDSEGSNLFEPGHVCEILGRRIKIEGLPTETGLWMVPVQDPAKAVKINRVVSNTPSRIEFIPVDTGYSENRLEIRTRFSGSTTPLTALRIVTSQFVISEA

SEQ ID NO: 95631 - protein, 417 aa, Unknown
  Obtained from environmental sample
  DOMAIN (1)...(416): Phosphoenolpyruvate carboxykinase
  misc_feature (1)..(417): Xaa is any amino acid
PDVNKKYISHFPDTYEIWSYGSGYGGNALLGKKCLALRIASVLARDEGWLAEHMLILKLTNPQGKVKYITGALPSACGKTNLAMLIPTLPGWKVETIGDDIAWMKFGKDGQLYAINPEAGFFGVAPGTSDQSNKSAMDSIKKNTIFTNTGLTEDGDIWWEQIGYPAPGDTITNWKGEKKPAPKTDKAVKGEEIAHPNARFTVPASQCPVIASEWEDPKGVPISAFLFGGRRATTIPLVNQSKDWIHGVFMGSITGSEITAAALDLKAGDVRRDPFAMLPFCGYHMGDYFSHWLKLGKNAKDKGDGDKLPKIFFVNWFRKNAEGKFMWPGYGENSRVLAWIFDRCDGIDNYIETPIGNLPKPGSIEPPAGVSPEAMAELIKIDVEGWKKEISDVRGKHYAKFGDKLPKDLLTQLDIME

SEQ ID NO: 95632 - protein, 86 aa, Unknown
  Obtained from environmental sample
  misc_feature (1)..(86): Xaa is any amino acid
MEIKRAAEFGDNIREKLGELYVNAFYDDVLKYFSKNKTKLIKIFACSFLLECFYVAIMDNEIIGMVACMGKGDVCIKLDFKTIVNI

SEQ ID NO: 95633 - protein, 259 aa, Unknown
  Obtained from environmental sample
  misc_feature (1)..(259): Xaa is any amino acid
MDSEFKILPLYSKPLITILSYYDSELAGKNFLDMLQASLDTKQLQIMKGYFSMIFSKAKSAKVLESANPIAEFEYRIDDRIKTLTTKFNLIEQSGAEPVIIGIIQDITKEKEYEKDLQIQREAQELEMKNMFDVLQIDPLVFNDFIEDTESNFNYINSILKDRSLTEKQVLTKFFQNIHAIKSNALILGLETFGNKLHTLEDDIKVISAYNKITVEDVLGLALKLESILKEKDEYVKITKKIEAFKTSNQVDTILIYSL

SEQ ID NO: 95634 - protein, 469 aa, Unknown
  Obtained from environmental sample
  misc_feature (1)..(469): Xaa is any amino acid
MKSRLLFTLCLLFTLTAAIYGQETPANAEQPPLSGQNEKQDGTSEENKSENEELAEEKEPAGGRLTPEERQRTELEIKSSTMPELAAWCRTLGLSEGGTKEELAKRVREYFGLPEPNNTDDGRKILVIESAQSTEYFTVDVIDEDYARLKGDVHLILHDKEDVHKIKADEVLFNRSRNIITAKGKVEYIKIKGDTTEIFRGENITVNIDDWDSVFLDGDSEKTLSDDNTAYRFEGTVISRSYDDVMILNNARISNANNEEALWSIGATKLWLLPGSDFAIFNMILKVGEIPVLYFPFFYYSADDLIFHPVVGYRTREGGFVQTSTYILGRPKADTTEKSSITRIMGNSADMEKEHNGIFLRSTGKKITNPDDTTLKLMADYYVNLGAYAGIDFSIPRVGILNAFDFSAGTGFSRTLSMVSGDYTPYAPKYDGSVEWNNSNLFSKTVPFRYRMKTQSSLRGKYGGLSWAI

SEQ ID NO: 95635 - protein, 266 aa, Unknown
  Obtained from environmental sample
  DOMAIN (112)...(265): PhoH-like protein
  misc_feature (1)..(266): Xaa is any amino acid
LEDGITIALDNRELLSGICGANDGNLKVIEGTLGGFITARGNEIHFESRDEAGIKRFRTMMDNLITAVNEGEQPSAEYIRALADDLPFSGTEEKGGSFFRDSMIQIPHGFNRVYPRTRNQALYIQGMRENEICFCIGPAGTGKTYLAIAHALQMLLSKKMRKLVLTRPVVEAGENLGFLPGDLAQKIDPYLKPLYDAMESLVPYEVIARMEETRSIEIAPLAYMRGRSLNDCMVILDEAQNTTKEQMKMFLTRIGSGGSSRVDLQA

SEQ ID NO: 95636 - protein, 732 aa, Unknown
  Obtained from environmental sample
  DOMAIN (57)...(304): 7TM-HD extracellular
  misc_feature (1)..(732): Xaa is any amino acid
MKRNVNIFMINSRKRIIPFFQYFRSGPVLFSFVLFIIAAFVIIISENNDSIIDISDFEAGKVADRDITSGFTISFIDEEATRTRTEAAAKHVNAVFRTSTEINKQILDSWNTFCEFTEKHAGSSKAQAIQAIETEYPGNFTNETLNTYLSAAGRSSFRGYGIETLNTLLNRGIFSFNRDDIRFFNPDIAELQHSSSALEKEYISYNNIITPSNVRGVLGDIINSMDAPDLFKSVAPDLLEPFIRENTFFSFSETQKRIEEAKDTITPVYRTIEKGNRIIRKGFIITEEEMEDLTVLHTSMPKRDPRSIIGVVLVMLMLYMLFNILCGRIVIGRKVNNSERYLLASFSGFYLIGAVLLFNFLPSHSNFPLSLLMPTALFVMLLAVLMGTRPAMIMALALPLGAYFTGAFDNYSYIFALISGIAASTVLHNAKDRMSLIKAGLVIAAVNTAAVIIILLLKQAVLYDYPALVFGAVLNGIVSGMLTLGFLPPLEHALNAVTPFRLMELSDLNAPILKKLFTAAPGTYSHSLMVANLAEQACQDIGANAMLARVGAYYHDIGKIDNPVYFIENQTEHNRHDEIAPRLSATVIRSHVKLGVEKALSLGLPKDVINIIAEHHGNSVISWFYNKAAEQEVDVSSEDFCYPGPPPRTRESAVVMLADITEAAVRTLDKPSAAKIDKFVQQLFDNKIEHGQLANSDLSFRELEIIKKAFVKVLAGYYHSRIEYPKQKEEAQ

SEQ ID NO: 95637 - protein, 157 aa, Unknown
  Obtained from environmental sample
  DOMAIN (43)...(137): Uncharacterized protein family UPF0054
  misc_feature (1)..(157): Xaa is any amino acid
MNHVTVNAEEVVLPKWSTSMCGFALKVLDEIKRDNWELSILFCGDKTITDLNRQYRGKNEPTDILSFNLGETIKDNDKTVFLPGDIVISLDTLKENARYFNAPEDEELRRLLIHGILHLDGMDHKTLDKLEPMLVLQEKILNKLKTEQIITEKGAVN

SEQ ID NO: 95638 - protein, 275 aa, Unknown
  Obtained from environmental sample
  DOMAIN (168)...(246): Transporter associated domain
  misc_feature (1)..(275): Xaa is any amino acid
LKAPFKINTQAIKELEEDQQQMIRGVVELSDTTVKEVMVPRTDTVFISADASKEELFTCLSENEHSRYPVYQDTVDQVVGILHVKDVLKALVKNNPINIRELARKPFFVPVSKHINDLLRELKRKKVHIAIVVDEYGGVSGIVSMEDIIEEIIGDIQDEFDQETEDVIELGKGVWLCDARVNLEALAEETNLDLPVDDFDTLGGFVFDLFGKIPVKNEKIDYKDYDFIIQEMDGSEVIKCGVRRQSHMLHYSLDLFTLSACEFVVTGMDTGEKLT

SEQ ID NO: 95639 - protein, 297 aa, Unknown
  Obtained from environmental sample
  misc_feature (1)..(297): Xaa is any amino acid
DVAAALRNIKIPVLRWPGGCFADEYHWKDGIGKDRKKMVNTHWGGVTEDNSFGTHEFLELCEQLGCEPYISGNLGSGTVQEMSEWIEYITFDGVSPMAGLRTDNGRAAPWKLKYFGVGNENWGCGGNMRAEYYADEYRRYQTYCRNYGDNKLYKIACGSGTEDYDWTEKLMKYCSPFMDAMSIHYYTVPGEWRDKGSATKFDSDKYYLTIEKARKINEIIDAHIAVMDRYDPKHKVDLVVDEWGTWFDVEEGTNPGFLYQQNTMRDALVAAVSLDIFNAHCNRIHMTNIAQTVNVSA

SEQ ID NO: 95640 - protein, 317 aa, Unknown
  Obtained from environmental sample
  DOMAIN (7)...(295): Branched-chain amino acid transport system / permease component
  misc_feature (1)..(317): Xaa is any amino acid
VSIIYFLVQQTMFFSIPLLIVALGGMFSERSGVINIALEGIMIIGGFTGILFISAVQQFIPGQPVLLLAVLISMISGVAISLLHAYASINMKADQIISGTAINMLAPAIAIYIARMIRTVQQIPFVNQFRIEKVPLLGDIPFIGDLFFRNAYITTFIGFIILGLSAAILYKTRFGLRLRSCGEHPQAADSAGINVYNMRYAGVMISGALAGLGGLVFIIPTSTQFNAEVSGYGFLALAVLIFGQWKPGRILSTAFFFGLMKAISSASSGIHFLSAISIPSVIYKIIPYVTTLVVLAFSSKSSQAPRAEGIPYDKGRR

SEQ ID NO: 95641 - protein, 224 aa, Unknown
  Obtained from environmental sample
  DOMAIN (9)...(111): DnaB-like helicase N terminal domain
  misc_feature (1)..(224): Xaa is any amino acid
MAESGRERIPPHNDDAERALIGAMLIDDNAIIIAQQYVRQEDFYSSRHRKIFDAVLNLYHKGTRPDLLTLSAELERSGKLDESGGYDYIASLTGAVPSSANAEYYAQVVQVCSLRRGLIQISGESGAKAFDETIDPKITLEETQQKLFYISDPQRIFRYKKVESIVKDIVSYLDEVYKTKAEFTGVPSGFSELDRLTSGFQPSELIIIGARPGMGKTRDCPFDG

SEQ ID NO: 95642 - protein, 163 aa, Unknown
  Obtained from environmental sample
  misc_feature (1)..(163): Xaa is any amino acid
MTSSLPRMRQTIPGLKEELDRLYLEINKPDFILSDPVQFPRRYKSVGDREIAAFLSATIAWGRRDMILKSAEKMFSLLGKSPYEFIMEGKFKKIAEDSRGSSIHRTFFESDLRYFCKGLKACYAKFGSLEKLFASAADVWEGINIFRETMAGGNKGLYSKHIS

SEQ ID NO: 95643 - protein, 482 aa, Unknown
  Obtained from environmental sample
  DOMAIN (126)...(310): Domain of unknown function (DUF1083)
  misc_feature (1)..(482): Xaa is any amino acid
EQPSRLKVVTADSAKITAPPPRSVISGCPAVYEIEPMIPVDSALLFVRHSRGQIDTLAVLSSPPYRATWNCAGVPDQDQTHMQFGYVLYRGDSMTVASPPMPHRWALLRGKQAAQLRPYRIKQLTSVDDFNVDCDTLKWSGIDGAGIVGGNTEATFKLLWTGVKLYFIAQVRDNSISGGDFVELHLDMHRDRAVFPGINHRSLRFSPRGRSIFFVGEFADGKYAQSDSITQLLKDEVEWKASVNSDGYIVEAAIPFSVLSDFDFPPSKIGFDVSIMDANGQEETFYSWAGAERFTRYSPSRWGTARLSDAAPGLKYVLIFALFISGFALIGFVIYLFFSHRQESKDIKAETKSVSPLTEAVVEQIEKQLSNADLRISDISKSVGTSAETIVVALMSDLGCTFEQQLAYKRVKYSQKLMREPKITIEEIAKRCGFADVDTYRKSYVAQMKVDPEVSRKAMLERIREDMEAEKEDDDDDVCRGK

SEQ ID NO: 95644 - protein, 289 aa, Unknown
  Obtained from environmental sample
  DOMAIN (5)...(286): Cytidylyltransferase family
  misc_feature (1)..(289): Xaa is any amino acid
MKKIIERLLVFIIGIPAVYALVILLPYYRNLALNIVTILFSAMGAVEFSYMLEKKNIFISKIESFILGAVVPLTFTLVLSLEVNPWILPILPMASAGWVLLSKVFSKSSEIESITAQIIGKFSLLVYPGLFICWLVIMSGWENPAATLLFLFVTFSSDSVAWLFGSLFGANNRGIIPVSPNKSIAGFIGGALGSVIVAVGAAFLFPNIFIYLNLEIPSGKLAIMAAILGFCTGIAASLGDLAESAIKRSCDSKDSGNLMLGRGGVLDSIDSIAVAAPVFFLLFNIFFRV

SEQ ID NO: 95645 - protein, 74 aa, Unknown
  Obtained from environmental sample
  DOMAIN (44)...(67): 4Fe-4S binding domain
  misc_feature (1)..(74): Xaa is any amino acid
MARKGKITIDRDMCKGCLLCIRSCPVKVLETDNELNSSGVYPVKAVNMDKCIACGNCYEVCPDVCIEVYELDGV

SEQ ID NO: 95646 - protein, 157 aa, Unknown
  Obtained from environmental sample
  misc_feature (1)..(157): Xaa is any amino acid
SEVLPQDKSAEVKKLQDTVLETHATKRNRLNNRRRFVAMVGDGINDAPALAQADIGIAIGSGTDVAMESADIVLMRSDLLDVPTAINLSKRTIRNIKQNLFWAFGYNVLGIPIAAGVLYLFGGPLLSPIFAAAAMSLSSVSVLTNALRLKRFKAKRD

SEQ ID NO: 95647 - protein, 90 aa, Unknown
  Obtained from environmental sample
  misc_feature (1)..(90): Xaa is any amino acid
MKYIYKTKGTCSTNIHFDINDNIVSNVSFENGCNGNLQAVSRLVDGMTVDEIKEKCKGIICVSRGISKGTSCADQLALAVEKAYKESASK

SEQ ID NO: 95648 - protein, 957 aa, Unknown
  Obtained from environmental sample
  DOMAIN (647)...(726): OB-fold nucleic acid binding domain
  misc_feature (1)..(957): Xaa is any amino acid
MGYTGYFLIVADFINYAKGKDIPVGPGRGSGAGSIVAYSLRITDIDPLKYGLLFERFLNPERISMPDFDIDFANEGREEVINYVTRTYGKERVAQIITFGTLGAKAVIKDVARVLGISISESEMITKLISFDPEITLEKAKEDEPRLRELEKDPRFTELFDIAGKLEGLNRHSSIHAAGIVIGKKPLIELVPLFQEREEKGGNVATQYSMNFLEECGLVKMDFLGLKNLDIIKHSKELIRQRGGKYSDFNIEDIPEDDKKTFKMLGEGKSHAVFQFASDGMQDILRQTKPTSIEDLTALNAMYRPGPMQFIPRFVECKNGKAPITYPDPSLEGILKETYGVIVYQEQVMEVARIIAGYSMGKADLLRRAMGKKKKEILDGEKIPFLEGAAKQGYSEQRAGAIFDMLVPFAGYGFNKSHAAAYSVLAYQTAYLKANFPAEYMAATLIVEIKSTDRLLYTIVETRKMGISVDPPHINYSDKLFTVVDGRIVYGFLGIKGVGDAPADEIVRARKDGHYKSFMDFLNRVDIKAVSKKVIDLLIQTGAFDDFNVSRETLAGNMEKAIEYAQKMKEDKQLGQSNLFDDSSDADMPDFKFTEFAPVSRAERLNLEKKLIGFYFSGHPLDEYKEIWQDVVSVNLGQVETYKTGNCVLVGIIKNIKQITTAKGGKMAFAALEDYNGEIEVTFFSGPWERCQNFIKDDSVVILKGKIDYQKDKDKYSFLADGVISKQEVTTVVKEVKELDEKNKLHKNTWLYMADLKSSYILQAKKGNYTVIGYLKSIRDFKDKKGNDMAFGTLQDFEGEIDLVFFSKVYAECRHLLKLDEMIALKGSIDPENELKPGKVSFKVSSMADLPFLSRSAAKKAAENEKLPTPNLVKSNERHLDEVHIRLHKGSSDNKDEMLELRDYLAENSGSNTIFIHIPVNDEEKIIRAASGLDMSGNGYVMEGLKQCRSVAEAWRK

SEQ ID NO: 95649 - protein, 95 aa, Unknown
  Obtained from environmental sample
  misc_feature (1)..(95): Xaa is any amino acid
KTWYSSDNGVTWTAVANSTTFYSIAYGNNKFFAVGYEGKIATSPDGTSWTAVTTTAFDIPEKGYTWGASINAIAFGNGTFVAGGSRGKMAYSTGN

SEQ ID NO: 95650 - protein, 369 aa, Unknown
  Obtained from environmental sample
  DOMAIN (211)...(311): HD domain
  misc_feature (1)..(369): Xaa is any amino acid
AGYTVKFSGYSALDFYFRLPALPFFWIETNADIAVLARCIDNLRFPGVDIADAAAETSCGTCYFRCLEIDEQSETSFPLLSLTYDWQTRRFQDPLGVYPLLQELHHCKFETCPNRSVFQSQIGNNRIVMEAALLLARYGFCAEAFAAAKEQSPPPGPEMQRVFLCCLLLSARPELGLELLKESGFLKEFWHELASLNDVDHSKEFHPEGNVWNHTLETFRYRKSAASGFDLRLSLALLLHDSGKPISASFANHRFEGHAELGAKAATRFLERLEFDPSLIQDIFYLVKNHMLPAALKRLPLTKTAEIMASPLFPTLMELYRCDESSSFKGLDGYYENSAAYQAYLKNVKNPYRSRDGKKIKSLAQKQKI

SEQ ID NO: 95651 - protein, 976 aa, Unknown
  Obtained from environmental sample
  DOMAIN (150)...(561): Alpha amylase, catalytic domain
  misc_feature (1)..(976): Xaa is any amino acid
MLSLANLNPAFKPFQFLFDDKDLVQHTVYPAAIEELKALFKDLPPFGPFGQNLWDMLRSPALASDTLSGQLEYMRQHWGMILGKFAARMLIGLDVIKEEEKPSFFGPGPSEVMSFSGLDEYERFSPDQDWMPKTVLMAKCTLVWLFQLSQKYGREINRLDQIPDEELDELARRGFTGLWLIGLWERSNASRTIKQWTGNPEAAASAYSLYDYDIAGELGGWGALCSLRDRCIIRGIRLGSDMVPNHTGIDSRWMVEHPDRFLQLPYPPFPTYNYNCGNLSGRDDITVQIEEHYFSRSDAAVVFKRIDNRSGEVRYIYHGNDGTSMPWNDTAQIDFLNPEAREAVIRTIIGVCQQFSIVRFDAAMTLAKRHIQRLWFPMPGHGGAIASRAEHALTNDEFNRRIPNEFWREVVDRCAAEAPHTLLLAEAFWMMEGYFVRTLGMHRVYNSAFMNMLKNEENAKYRLTIKNTLEFDPEVLKRFVNFMNNPDEETAVAQFGKGDKYFGICTLLVTMPGLPMFGHGQIEGFEEKYGMEYRRSYRDETPDWNLVNRHEWEIFPLMKKRHIFSGSVNFCLYDFFDPNGNVNENVFAYSNSAGDERALIFYNNSYYQTAGWIKRGAVAIPQKDGTFRQDSLCEAFGLHGENRFFTVLREQRSNLWYVRSSKDIAERGLFAALNGYETQVFLDIQEKEDSADAQAGSWETRWAVLNHELCGNGVRSLDETLLDIFLKEIYSPLREILSKSRYETLAKIFSEKPKKTIAPPLPTPHEFIESFREPLNQFAAATEKYLDGADGKFKPWENGGKKPGGKSKRKATANKDAFGDWSIFFENLMDLAKNQARKENKFAHGLKKKIAERPAMLLIALGYNTLAILRSTVNDNSGKEAAALALHWQLDRLLAECWESAGIPSDEAQRAAEIAMALLAHTGSSTPESCKTAKTPGEIAATMILENYNESDFRKILAVNRFEDVTWFNRKHLKKR

SEQ ID NO: 95652 - protein, 255 aa, Unknown
  Obtained from environmental sample
  DOMAIN (32)...(157): Miro-like protein
  misc_feature (1)..(255): Xaa is any amino acid
VGDLEQEIISRLDFSAVEEVAPLAEEEQQPIRIALLGKPNTGKSTLSNRLTSSNASIVSDIPGTTRDVVEGSFCWKSRDRRSHDFIILDTAGIRRKSKVTENIEYYSVNRAIKTIGQADIVILMIDAQEGLTEQDKKIAALAHDKGRGIIMALNKWDTMPKIKNTFEATVEKIHFFFAKMEYAPIVAVSAHDGSGVDKLLSTAVTMYGQLTTRVETGRLNQVLQRWLEEHPPPSGPRTRFNVKYAVQSSANPVTF

SEQ ID NO: 95653 - protein, 64 aa, Unknown
  Obtained from environmental sample
  misc_feature (1)..(64): Xaa is any amino acid
IKKASLIVVMVEAGEITSEDEEFIALLRRYQKRLIVAVNKTEGGRKEADSWRGWSYGFEKVFMI

SEQ ID NO: 95654 - protein, 403 aa, Unknown
  Obtained from environmental sample
  DOMAIN (100)...(293): ATPase family associated with various cellular activities (AAA)
  misc_feature (1)..(403): Xaa is any amino acid
VVRDKVRELKSRLEDARVAWERVYSRDHIQVDEDDIRRVVSQATGIPLMNLEEHESKRMLMMETELHKRVIGQDDAVQRIASAIRRSRAGVSSPRRPMGSFIFLGPTGVGKTLLAKRLAECLFGNEESLVRIDMSDFMEKHNTSRLVGAPPGYIGYEEGGILTEKIRRNPYRVILFDEIEKAHRDVFNLFLQVMEEGELRDNLGHTVSFRNTVIIMTSNAGVREISRDSRLGFASGSGQMSMEEIESQAMSELKRLFNPEFLNRVDDVVVFHPLSMEQIEAIFDIELRELSARLAEQNYRIHILPSARRFLIEKGWDPKFGGRPLRRTIQKELEDPLAQMLLVRNWPAGTVFNAGMSRSSRGSHEGKIKLIGKAPFIESENDEALAFEETVDDEELVMRDNGV

SEQ ID NO: 95655 - protein, 299 aa, Unknown
  Obtained from environmental sample
  DOMAIN (34)...(201): Glycosyl hydrolases family 2, sugar binding domain
  misc_feature (1)..(299): Xaa is any amino acid
EKPGNFQAGIHSTDYESEYLQIRLDASYLVNSTGRETESLNGGWNFAPDLYDTCRRNHWYKDERFDAAGKEFPLDYDWDGWERITVPSSWNLTKPELLYFEGSGVYTRTFKYIPHTKGERLLLVFEGAAYRTSVFLNGKIIGTHDGASTPFNADISGTVKTDNRIVVVTDARRSPLRIPTDNTDWFNYGGIYRDVYLVRLPPVFIKDWFVRLVPDGKFSTILADIEIADAAGINTGSNINGATFLEIPGLSIKQEIVVKNGKGTAAISALPELWSPENPKLYDVSFSFNANGFTDTVTD

SEQ ID NO: 95656 - protein, 232 aa, Unknown
  Obtained from environmental sample
  DOMAIN (1)...(231): Cytochrome oxidase subunit II
  misc_feature (1)..(232): Xaa is any amino acid
MDLEILWFVLIAVLWTGFFFLEGFDFGVSILQFFLGKTEKERGTYISAITPHWGGNEVWLLTAGGAMFAAFPKWYATFFSVLYLPLVLLLLALIVRGMCFEIRHRSHVQKLCHACDVALAVSSLFIALLTSVAVVNFATGIPIDSSGYFIGHFFDLVQPPALFGALLGLSLFLTNGALYLTLKIEGELQTRAYKISKIAVMVSLVLFALAAFLTWGRSLICFAPLILFASGC

SEQ ID NO: 95657 - protein, 80 aa, Unknown
  Obtained from environmental sample
  misc_feature (1)..(80): Xaa is any amino acid
NITGWLLAEVGRQPWIIYGLMPTDKAVSVGISRGEVIFSLLAFLAIYGILSAIMVYFMRQEIVRGCINKKITKKLTNTNT

SEQ ID NO: 95658 - protein, 102 aa, Unknown
  Obtained from environmental sample
  DOMAIN (4)...(93): Bacterial DNA-binding protein
  misc_feature (1)..(102): Xaa is any amino acid
MSNVTKRSLVEKVAIRTGLTQVDTKIVLDCFLEALSDSLVQGNGIEIRGFGRFKIREKKPRTARNPRTNEVIEVKAGIKPIFEPALQLKQRVNKSLAKKKKG

SEQ ID NO: 95659 - protein, 65 aa, Unknown
  Obtained from environmental sample
  misc_feature (1)..(65): Xaa is any amino acid
VDVLENAVNKALELATPGDRVALSPGCASFGMFLNEFDRGRKWKEAIKRASRRGAEDAEKMRNEE

SEQ ID NO: 95660 - protein, 563 aa, Unknown
  Obtained from environmental sample
  DOMAIN (35)...(113): Bacterial Ig-like domain (group 2)
  misc_feature (1)..(563): Xaa is any amino acid
MLSNNADNASPAEYFGAGILNVAKLAPRDDSNEIPVTGISLNPKSVSLHIDANEKFSASVLPGNATNQGIAWKSNNPRIAKVSRDGVITGVSPGNTIVTASSIDGSSRANAIVSVLANEEPVDLRKILLAIAPFIIFLLLLSRTNLSKPKRSRQFILPFIAVVYCIVAMLYANKINNWIVSCLAWLSYFSPNIAMNINKWLICIFNAVIAGGFLIIKNILLPIISMIWSRPGSLFNKTSGRFYEHNERMNAWVLKDEFGQAKTLWKGFFWFTVGISSVLLALSRVFPQWIFFRTPFYPVCGALVLGEIMFFLSGLTCQEMLSTIAGDDDEFYRVSNYGILRRVYHDLFGDRVLYDNTADNLYESTSFEMLDKLAESKNELDTVISKYFTDLKEKGLNIDSGFVRASIDMVNGKSVLLNTPFYRDMTGYIVLPLIRRLLSFEKALIIVGRDSAAGDVKNWAHNGIAAFCGTSDLWKTDILTEKETECDVAVLRFADVYNHKILKANGKFLKKTSFVLLIEPSRVVSTGQVGLSLIIDQLGKRDKNIVYCSCDRNCDGLVTRFPI

SEQ ID NO: 95661 - protein, 84 aa, Unknown
  Obtained from environmental sample
  misc_feature (1)..(84): Xaa is any amino acid
MSDTATVQKPSYKAGSLILARGREWVVEPSSPDDDFLKLRPLGGGNDEIQYIIPSLETMPIESAVFPPPDIKKPGTVLFRQTSA

SEQ ID NO: 95662 - protein, 214 aa, Unknown
  Obtained from environmental sample
  DOMAIN (6)...(89): B12 binding domain
  misc_feature (1)..(214): Xaa is any amino acid
MAGDYSEIFNEISELLQKGKARDIAASVQKALDAGAEPADILQNALMAGMNIIGGKFKRNEVFVPEVLIAARAMNKATEALKPALAKAGVQPVGQAIICTVKGDQHDIGKNLVKMMIEGKGIEVEDLGVDCDTQLVVDKVKEGKAKVLCLSALLTTTMGVQKDVIDALKDAGVRDKVKVMVGGAPVTQSFADEIGADAYTPDAASAAEVCRTFY

SEQ ID NO: 95663 - protein, 377 aa, Unknown
  Obtained from environmental sample
  DOMAIN (26)...(344): Initiation factor 2 subunit family
  misc_feature (1)..(377): Xaa is any amino acid
AKEPECRVVQIINQQALPFNFEILDLHTVEDVCRAIKDMYIRGAGLIGAAAAFGMYLAALKAGDNSFNDDMAAAARLLKNTRPTAGNLAWAVDRMAAVSYSGNLEQKREKARMTAQKIADEDAEYCRRIGQHGLELIKKIALGRKGEPVRVLTHCNAGWLAFVDYGTALSPVYAAFDEGIKVHVWVDETRPRNQGAFLTAWELGQHGVSHDLIPDNAGGHLMQHGMVDIVITGADRVTRQGDAANKIGTYLKALAAKENNVPFYVALPSSTFDFAMRDGLKEIPIEERDASEVRCIAGKTAEGKIETVQICPDSTTARNWGFDVTPARYISGLITERGICRADEKEILALYPEYAGVPQTKPPVDKLSGEGYVKYTT

SEQ ID NO: 95664 - protein, 552 aa, Unknown
  Obtained from environmental sample
  DOMAIN (96)...(327): Glycosyl hydrolase family 3 N terminal domain
  misc_feature (1)..(552): Xaa is any amino acid
VKKKLLGFLLLISLPVFSLSFNDPGDINELALRLTNEMSDEQALAQTFMLGWVGAEPSPLILDWIRSRNIGGVKIFGWNTEDTRKLAQTVGDLQKNALASGLGIPLFVATDQEGGLVRHVKGDTSETPGNMAIGASGRPMDAYWSGYYIGRELSLLGINMNFAPSVDLYTNRDSTLIGPRSFGSDPVQAGILGAAFAKGHKETGVIATAKHYPGHGDTDLDSHGVLPKIYASFDLLWDRELLPYRLLAKEDLPAIMSGHLAFPNTEAGATPASLSSWFLKDILREKIAYQGLIITDDLMMNGATEFAGSLSRAAKQALLAGNDIIMLSKTPSLNDPVWTYLVSSMKDEPEFRERVRDACRRVLALKLEYLRGEKKVPYIPDLKKIDDGLVDPEGTAFFLGLAARSVTLVNNRNVFPLSPEKAGRVLLAGNFSDFFSSGRKAFPGAVSYWYDTSQAVPDIVPYARNVDTVIFCLSNKAGTRIVQQLRPLNKRVIVFSVLSPAYLDDVSWVDGAVAVYSYAPESFIAGFSAILGRIKGEGRLPFALNMRPSSEN

SEQ ID NO: 95665 - protein, 428 aa, Unknown
  Obtained from environmental sample
  DOMAIN (53)...(123): Helicase conserved C-terminal domain
  misc_feature (1)..(428): Xaa is any amino acid
QRKAVIFTESTRTQRYVLDLLNAGGYGGQIVLLNGSNNDIISTRVYADWKDRHKDDDTISGSKTADMKAAIVEEFRDRATILIGTEAAAEGINLQFCSMVVNYDLPWNPQRVEQRIGRCHRYGQKYDVVVVNFVNQNNAADKRVYELLEEKFKLFSGVFGSSDEILGALERGIDFERTFYDIVQNCRTDEEINRAFDALQQQYAEILKEQKDQAILQVMEFFDEDVTAKLKNCETRTRASLTQFNRWKFNLFATYGATRVNDSSLAFDYHGKRYIPSWENAKAGGCAFLESNSPIYTDLRDAAKKLDADVCKIRFNHSALPLAEQTAFFQLGDMSGALSIDKLTYTYGKEGEKEEHLLISVVTDSGAEIDERLFERMMEIPATVIGVAIPDKRLNERKAALQADKRAEIDDANKTSLGPRLGELEAWR

SEQ ID NO: 95666 - protein, 367 aa, Unknown
  Obtained from environmental sample
  DOMAIN (27)...(365): Aminotransferase class I and II
  misc_feature (1)..(367): Xaa is any amino acid
MIPQFSQSAQGMRSSEIRRIMKLAGDPSLISFAGGSPGTSLLPVDIVDELYGALSTQAKRIALQYGATDGYQPLIAEIGRYLESKGIGMEGQGLIVTTGAQQAINLVAKVFVDPGDVVVTEYPSFIGALAAFKSYGAETVGVPMDGDGIIIPELLKTLDQLGKRAKILYLTPYFHNPAGIIYGADRKRQLLDALKGRDIILLEDDPYGELYFDAADRPLTTTMKSMPDRSVEICYTGSFAKIFGPGMRLGWLCASSEIIDKCQLAKQSMDACSPTFTQVLAAEYLSKNKMPAYLESLRAAYKRRAGIMLNSLKELMPGGVSWTTPRGGFYIWVTLPEYVNASDVFQKTFEGGAAFVIGSALIRREKR

SEQ ID NO: 95667 - protein, 247 aa, Unknown
  Obtained from environmental sample
  misc_feature (1)..(247): Xaa is any amino acid
LPAPMKLKLIYPRWNKLPGQTTFNLPPHGPVVFAAALPANVEITFTDENVQSLDFDEDCDLVAISMMLSTQVKRGWAIADEYRMRGKQVIFGGIAAMLHAEETIPHADSVFLGEAETRMEQIIADWSKGRLQQVYNFMPQQPPVESIGKARRDLYQRELYNHKGVQMVDLFHASRGCRFSCYPCAVSYLGGRSFRPRPLDKVIEELSAIENNRLFIVDNSLAQDKKWEMDLFREMIPLKKKWISHTI

SEQ ID NO: 95668 - protein, 155 aa, Unknown
  Obtained from environmental sample
  DOMAIN (12)...(136): FabA-like domain
  misc_feature (1)..(155): Xaa is any amino acid
LLIEKEELQTLIPHKGKMLLLNKIIDYDIEHSIRAQYTVTESCIFYDPALDGVPAWVGFEFMAQAISALTGIRKRAKGEKPKIGFILSIPSMRMEIPSFKNGSLVEVRVKESDCTDMIYIYEGEAFLENKKVMEGKLMVMEASDDKLKNLTGEQK

SEQ ID NO: 95669 - protein, 366 aa, Unknown
  Obtained from environmental sample
  DOMAIN (1)...(207): Beta-ketoacyl synthase, N-terminal domain
  misc_feature (1)..(366): Xaa is any amino acid
MRELPGANRKFHVGLIPGELPKVTALPESLIKEPAVYAAGTRIIRIIDAAIEQLRPNIEKAIAKYGPDKIGVCLGSCDNGSEGSLLAHKALLAQGAFPQDYNLRFQSASFPAEYIALKFGLSGAVFTIATACASGASAIIRGAELIRAGLCGAVIAGGADIVSDTVLAGFHSLEAVSDSITNPFSKNRKGINLGEGAAFFLLEAEEISPVELLGAGESADAYHMTAPGTDGAGPAKAMRAALADAELKAEQIGYINLHGTGTELNDKAEGLAIKTVFNEIPPISSTKPITGHTLGAAGALEAAICWMVLSEKMGLPVHCWDGVKDDEIPVFPSNEDGQKKPAICMSNSFAFGGCNVSLILGVTDNC

SEQ ID NO: 95670 - protein, 100 aa, Unknown
  Obtained from environmental sample
  misc_feature (1)..(100): Xaa is any amino acid
APEKCEDEKAKAKYWTEQSPELMDLVSKELEKIPNEDFCVKNIEAAFMKVCESSGVKLGSLAQPTRLVISGVGAGPGLWEIIESIGKDECVCRMGRAKNF

SEQ ID NO: 95671 - protein, 250 aa, Unknown
  Obtained from environmental sample
  misc_feature (1)..(250): Xaa is any amino acid
LTYTFPETDTKTVTGVAIKTQPANLTYTHGDILDLTGLAITLTHDDGTTEDVAAADFISKNITANPATGDSLIYSIHNGQPVEIIYGNITKNTGNLTVNKATPTAADFNINGTGIFTYNGNPGEVTITPKDGKSTGTRTVKYNNSTTAPSAVGTYNVTFDVAEEGDYNAANGLSAGTLTIEKATPTAADFNTSGTGTITYNGNPREVTITPKDGKSTGTTTIKYNSSTTAPSAVGTYTVTFDVAETDNFN

SEQ ID NO: 95672 - protein, 86 aa, Unknown
  Obtained from environmental sample
  misc_feature (1)..(86): Xaa is any amino acid
MKTIQGYVAPLPKDGDGRWQVAVVDGDVEYHVAPRGAGVDLAEHLSEQVEVQCAIIEEPGSPLRIQVRSYRLIDQDDDAWYEDDEA

SEQ ID NO: 95673 - protein, 276 aa, Unknown
  Obtained from environmental sample
  misc_feature (1)..(276): Xaa is any amino acid
GIHLSGHDGAGPNLETGDLEGILSLPGISDHLRLRLHLAASEDSRIAGLLDVGGNLATLPPAPLRLHLPFALAKNLEMHLQNARIELDADAVTLNAALTSGADRGASAPSARVPAHQPERPSLQGTAHLHRLSLPRWFEFARKLPAGIEAALNDISGELDFVLTPHSLAIPRLQAVLCGISVAGSGGVSDFAKPGIRIAMQTDAIDVNAIFPELLRKAPKAIDWPGPPPVRQDDSRAGPDYDIRLTAARAEIWKFTASQFAFRCMSLPKGSRLGFE

SEQ ID NO: 95674 - protein, 89 aa, Unknown
  Obtained from environmental sample
  DOMAIN (3)...(72): ACT domain
  misc_feature (1)..(89): Xaa is any amino acid
MNAIITVVGTDKVGIIAKVSAFLAERNINIEDISQTVLSGNFVMMMMINLSSCSKALEEIKKELASLGDTLNVSISLMHEKVFSAMHRI

SEQ ID NO: 95675 - protein, 392 aa, Unknown
  Obtained from environmental sample
  DOMAIN (74)...(107): Tetratricopeptide repeat
  misc_feature (1)..(392): Xaa is any amino acid
MDSTQALPHYVVGRIARDANQNEKAISSFREAARLDPSNAMYFHDLGRVLFIGKRYAEARDNFQSATKINPGYEPSWYNLGGTLRALNRADDALAAYRHAVAIKADYSAAHREIGRLLLAKGDTQGAIKSFTSALQSNPNDFNAMCELAAAHSQAKNYTEAETIFAKAIQINASDPQTNYNMAVVKLELKKNSEALSYAKLAVDANPSNAVYVYTLGLACEAIGAFEQSVSAYKKAASMDAKYLRPRINLGSIYLANGNYSEAISWLNEAYAIDSSNFEVNNNLGAVYAKQEIWSSSIVYYERALNIKQNDSIVRLNLARAYTGAGDLQKAQNAYQAVLRVAPDNWDAMYELGMTCVTLGQNADAKRYLQDLVSRNPNYSGKAEAERILRSL

SEQ ID NO: 95676 - protein, 444 aa, Unknown
  Obtained from environmental sample
  DOMAIN (331)...(414): Hpt domain
  misc_feature (1)..(444): Xaa is any amino acid
MARKKNLNFEYEEGEGGLPRCLYGDDVRLRQVLINLCANAVNFTSRGQVSLRVAADDGKLTFEISDTGVGIKPEDLKNVFALFMRADSVKNRDMTGTGLGLSIGKTFVEMMGGTINAESEYGAGATFTVVVPMIEGDESKIARPNVESGKISFSAPDAKVLVVDDNNLNLKVAYRLLGLYGIAADMASSGEEAIIAVQRTSYDLVFMDHMMPEMNGIQATAKIRALGGKYFKLPIVALTANATRGVQEIFLSSGLNDYMPKPIELDKLSEMLKRWIPIEKIDGALKDALYKIDEPSGAAAGGFWEELGRVADINAEVGKNRVAGIEEMYRETLGIFYDKTPRECKALSEYLDAGDMQNFAILAHGMKTSLLTIGAMGLADTALELEMAGKAGDKERCAEIAPGFIERLGGLHAELSPICNPDEDDSLKKARPKGDGAFLKEKLK

SEQ ID NO: 95677 - protein, 311 aa, Unknown
  Obtained from environmental sample
  DOMAIN (1)...(311): Protein of unknown function (DUF1703)
  misc_feature (1)..(311): Xaa is any amino acid
MKRRLPIGIQDFAKIREGGYNYVDKSTRIHRLISGSGSAFFLSRPRRFGKSLLCSTLGAVFENKRELFGGIAGHPALAIDSMEWEWKKHPVIRLDLNAGVYSNGIEALHSVLYSELQKEAEKQGIVLEHTDITYQFLYLIRNVYKKTGERSVVIIDEYDKPLLSTIDDPKLHVKIKNELLGFYSVLKSSDGYLKFVFLTGVGAISHVNAFSELNHLIDLTLDPRYADICGITQEEVERNFESEIKNILENNDKICETYFEELRRYYNGYRFSGKPLTVYNPFSLLNHFNKNGDFLPYWYETSTSSFLLNLI

SEQ ID NO: 95678 - protein, 244 aa, Unknown
  Obtained from environmental sample
  DOMAIN (1)...(244): AMP-binding enzyme
  misc_feature (1)..(244): Xaa is any amino acid
LIEAIARWLHSKGIRRGDRVAVTGKNAPEWTVAYLAILFAGGVVVPIDYQLRNEETELLIKTAGARILFVDEEKHEHFKTNSSKIEEIISLKKGVGTYIYDLDGPRAEIEQVTETDTAAILFTSGTMGIPKGVILTHKNLVSDCYLAQGTPLIVLHTDVFYAILPIHHSYTMLAVFIETISTGAEVVFGKRMVTSHILKDLKEAKITMLLGVPMLFNKVLAGILRGLKAKGPIVYGIISLLMGI

SEQ ID NO: 95679 - protein, 274 aa, Unknown
  Obtained from environmental sample
  DOMAIN (50)...(251): tRNA synthetases class I (E and Q), anti-codon binding domain
  misc_feature (1)..(274): Xaa is any amino acid
MPTIAGLRRRGYTPQAIRNFVSQIGIAKTDSMVDIAFLEYCLREDLNKRALRVMAVLKPLKLIIENWEEGKIEELEAVNNPEDPAAGSRRIKFSRELWIEREDFEETPPPKYFRLFPGNTVRLRYAYIVTCTGFDKDAAGNITAVRCIADLATKGGNANANAGAVKVKGTIHWVSAADAIPLEARLYDYLFSVERPMEVAAKPDGRPGEFTDNLNPDSLEVIPNAFGEPCLAKAQAGEVFQFERLGYFARDPDTEVAGGPCSTRPSACGTPGRR

SEQ ID NO: 95680 - protein, 362 aa, Unknown
  Obtained from environmental sample
  DOMAIN (117)...(185): Oligopeptidase F
  misc_feature (1)..(362): Xaa is any amino acid
MGEKTGIPARQDIPQADTWDLSKLFPDDAAWNDGLAAYEKMAERIPSFQGTLGKSAESLADFLDFSRDFGILGERLYYYADLRQTEDEGSSAARSMTGKIIMASAKARASGAWEGPEILAIPEKDMEQFLRHPRIADYVIYLQRTLRYRPHILSDKEERIVALIAEAEGTVSDAFSVLTNVDFNFGDIDTPEGKRPVSQSTWSVFMESQDRDLRRRAYEIFYNCFESHKTTLASLYAGSVKQDVIKARIRGFSSARAEALFPDNVNESVYDNLIATVGENLDALHRYYKLRKKALGLTELRHYDVYTPLVKSVKIKTSWNEAVDLVSAALAPLGDEYVGTLRAGLLGRWADRYENRGKRSGA

SEQ ID NO: 95681 - protein, 289 aa, Unknown
  Obtained from environmental sample
  DOMAIN (116)...(289): DNA gyrase B
  misc_feature (1)..(289): Xaa is any amino acid
GLHGVGVSVVNALAEWCEVFVHNNGKIHTQRYKIGIPEKPAHETDASTLPYSPRLERGTVVRWKADSSVFETTTHNYDALANRLRELAFLNKGLKITIRDERLSNPKVHEFKFEGGVKSFVEYLNENKTVLYREPIYLEGSRDDGKDGNIEIECAIQYNDGFNEIMFSFVNDINTREGGTHLIGFKAALTRTLNDFLKKSKQAKKLDETLSGDDVREGLTAVLSVKVPNPQFEGQTKGKLGNSEVKGIVESFIGEQLELFFDKNPDVINNILEKSRACGKSQNRRAPGA

SEQ ID NO: 95682 - protein, 487 aa, Unknown
  Obtained from environmental sample
  DOMAIN (1)...(391): Bacterial DNA polymerase III alpha subunit
  misc_feature (1)..(487): Xaa is any amino acid
MGFTGYFLIVADFINWARDNDISVGPGRGSGAGSIVAYALQITDIDPLKYGLLFERFLNPERISMPDFDVDFANEGRDDVIRYVTEKYGRDKVGQIITFGTLGAKAVIKDVARALGISIPESDMITKLIPRDPKITLQKAIDGEPKLTELAQDLRYTELFSLAGKLEGLNRHSSIHASGVVIGKSALYNFAPLFKDPKTGAISTQYDMNHLEKCGLVKMDFLGLKTLDVIKNTEELIRNRGGELANFSVEAVDENDKATFRMLGEGLSFEVFQFESDGMQDTLKRAKPDKIEDLIALNALYRPGPMANIPRYINSKNGRQAITYPDPSLEEALKDTYGVIVYQEQVMQVARIIAGYSMGQADLLRRAMGKKKKEIIDKEKIPFLEGAVRQGFSKTRAGEIYDMLVPFSDYGFNKSHAAGYSVLAYRTAYLKANFPAEFMAANLTNEIHSTDKDKLSECISEARKMGIAVDPPDINRSFKLFTIADGR

SEQ ID NO: 95683 - protein, 202 aa, Unknown
  Obtained from environmental sample
  DOMAIN (4)...(185): 5' nucleotidase, deoxy (Pyrimidine), cytosolic type C protein (NT5C)
  misc_feature (1)..(202): Xaa is any amino acid
MNDNIFILGVDLDGVVGDFYGAIRKIAAEWLDRPLETLTTEVTFGLDEWGLAEFGGYDRLHRFAVTQRNIFRDMEPIKNAAAILRKLSSQGIRIRIITHRLFLKFSHRTTITQTVDWLDNYDIPYWDICFMKDKGAVGAHVYIDDSPENITSLRKLGCKTIVFSNSTNRKLPGPRADNWPEVERLVLEAREEWKTGTMGLFH

SEQ ID NO: 95684 - protein, 285 aa, Unknown
  Obtained from environmental sample
  misc_feature (1)..(285): Xaa is any amino acid
MFGSVNDKTFEGLIKPKKGKSDGEIKIYYEGKDGTAYNKSETPPTNAGTYAVTFDVAAATGFSATKEPLSAGTLTIKSVTPTADDFNISGTGKFTYNGGTKAVIITPKEGKSDGRITIYYGGKKDAPPKEAGTYAVTFDVAATQGFNGAKELKAAEALTIVPAAIHYLIAGLLLVMAALIVFLSYYFSRKLFLREINNLRKNIDETIENIEQKYNEKYDSITNNIIDSPGSLSNTDDMRDKFGILEMSISGIKSEISILAELKIKLIYCTRVRNGRKHYKRQSRR

SEQ ID NO: 95685 - protein, 444 aa, Unknown
  Obtained from environmental sample
  misc_feature (1)..(444): Xaa is any amino acid
IPALGAKDAAGLLELIGRLSSGVAPESFFATGYTIPALGANIGGADLLQSLMKAAFSAAPNALLSLVKDIDTSNVMLGARLPPAEAARVVREITSVLPAQAAAKPDSVHDAGQLSPRVLATDIPKAQAAQTPGAAVPQIRTGYSELTEATVRALLGGGKADAAAVGERINALREAVERMPVASGGQGRDTAARDGGVSGSRAESNAASANTQSAVSRLSVPASGTNANAAAKAPDTFSHVNAQLAVHRASSVQSGDINTSAGSSGAKATDSFPAVNRGFAPPQPSAQTNRVGVAVSGGINQSISADNIRGVNINASGINTNSINPANNQNIRGDVDTGISNRQGTVDHSGGVGVNTNSNAKVADNSVGIGINARGINTGGINFTDNQNIRGDAGIGINNRQGAVDNSRGGDNSGGVGINTSNNTKTVDNSIGMSINAKDVNASG

SEQ ID NO: 95686 - protein, 396 aa, Unknown
  Obtained from environmental sample
  misc_feature (1)..(396): Xaa is any amino acid
MDNSVDTGINARSINTSGVGINTNNNTKSADSSVGVGINAKGVDNRPGVVDNSRSLNNSGSVGINTNSNNRPADNSIGMGINANSINTNDIKSTDNKNIRSDASIGANRPVSADRSSGTIVNAAGTTSVDVPAIKESCLSIVDALKSSAAPILRELAQRGEIGAGGAASLIGLVRDAVSSLDEALRPLVRSERPVPPEFYERVASGAGHRISAEAKNALFSQIGSAQALIRGVVEAAESVNAGPGVSRNVGTIAKDNTGINPNVNPTANPNVNAGINPPVNTYVNSVSNPSTNNINTGANANINVNPSANPNVNTDINPVVNSNVVSSNISTNVNTDTNTSANPNINTAVNANVSSGINTNANQIVNPNAGADVNTDNANANANINPNANINTVSN

SEQ ID NO: 95687 - protein, 642 aa, Unknown
  Obtained from environmental sample
  DOMAIN (362)...(416): Putative Ig domain
  misc_feature (1)..(642): Xaa is any amino acid
MKLIKKLLGITAIIAAVGFITLPLTGCPAESDDGTKTDDRGGKPNSGASSKTHITVADISITAPAKDATPATTTFNQPQERFTDGTVTWSPNDNPFKGGVAYTATVTLTAKSGYTFTGLIEANAKINGDPAVLTNNTGETVTLSRTFPKTSDKTVSGIAIDTQPTKLNYNHGDALDLTGLAVILTYVDTTTEKVAAANFTGKNIATDPGHGIPLERWTYKDFPVTIRYGNLTPLTTSNLTVNPIDITVSAITIDPIPEQTYTGSEIKPELNIEYSVLTGTSRELEEGEEKDYTLSYSNNVNVGTATVTITGIRDYTGSRTVEFEIKAPQGGKPVITTTSLPNGAGDRAYNQTLTATGDAPITWSVIEGTLPTGLELNGTTGVISGTPTNTDLVVINGSYQFYQLPPFTVKATNDAGSDAKQLSIIIVKTYTYASNLNNDMDRLPANSAVDPYPIAINFALNNDFGISTLHGKYVTIDFSENNFTSIPNSYFYNGATIVSITLPDSVNTIGNGTFSGCTNLTSITIPNNVTSIGQTAFRNCTSLTSVTIGNNVTSIGSGAFDTCTSLTSITIPNSVNSIIGNPFSSCTSLTSINVDVGNIAYSSQDGILYNKAKTDLLNIQHEKSEIHLSYRTALPPLGKLLF

SEQ ID NO: 95688 - protein, 88 aa, Unknown
  Obtained from environmental sample
  misc_feature (1)..(88): Xaa is any amino acid
MNTIKKARIAAKIKAFKNTDFSDAPELTAEQLAQLKPSHYRNMANYKPIKKTVNVRLDADVIEWLQGEGKGYQTRMNAILREAMLHSV

SEQ ID NO: 95689 - protein, 340 aa, Unknown
  Obtained from environmental sample
  DOMAIN (13)...(314): Cellulase (glycosyl hydrolase family 5)
  misc_feature (1)..(340): Xaa is any amino acid
MINVPFSRGFNFSKWFEARAFKDIDFNKFSEQDFIDVKSLDADVIRLPVAFHNFILDEKTHTLEPELLKYLDTVADWAQKHQIYLIIDNHSFHPVNPTDDNIDKILIPVWEQIARYFKDRGKYVLYEVLNEPHGITDERWGKIQQKTVEAIRKIDKEHPIIVGGTNYNSIEKLFKIPKYTDKNLIYTFHFYDPHIFTHQGATWNKPSLDPLSNLPFPAPENFNPQIHETFKGTWVEEFLKNYEQDSKFEKLSGTLERVVSFSKERKAPVFCGEFGVFMKQSPKEDRVKWYKFIREEFVKKNIPWICWDYFGGFGVFKTQFRGTFPADLDTDVIQALGLRI

SEQ ID NO: 95690 - protein, 66 aa, Unknown
  Obtained from environmental sample
  misc_feature (1)..(66): Xaa is any amino acid
MFDAKKTKDKIIDWLRDYFEKNGGDCSAVVGISGGKDSSTVAALCAQALGKERVYGVLMPQGQQHD

SEQ ID NO: 95691 - protein, 607 aa, Unknown
  Obtained from environmental sample
  DOMAIN (44)...(607): FHIPEP family
  misc_feature (1)..(607): Xaa is any amino acid
MADVARANVNAGSGAQKGLGLNNLLRLGPGGSLNGTLMGLAVLVVLAMFIVPLPTVILDALMALNFVISLLVLLIVLDNKKPTDISLFPTFLLVITIFGLALNISSTRLILTQGTRFDGRMIKAFATFVVGSSGTVGLVSGFVIFIAIIAVQKMVITKGATRISEVAARFMLDSLPGKQMAIDAEYSSGAIDQKEAASKKDALQRESDFYGAMDGASKFISGNVTFSIFIIVVDVLGGFIIGAFLQGESLTAALATYTSLSIGDGLLSQLPALLISAAMGIVVTRAAAPGDLGEQVSIQFSRNARAYWVSSVVLFGMAWLPGFPKYVLIPMSGLIGFCAYLIGQVQKKQASTNEMMAKTGEAAKKQRDDRGDVPQIETLDQLSLELGFGLIPLVDKAKGEELLERIQLMRRNIALEMGIVIPKIRIKDNIQLNSSEYCFKIRGVDVGKSIIRMGSYLCINPGTAKEELSGEKTTDPTFGLPALWIGEDRRDEAERAGYTIVDPPSIIATHLTEIIKRHAAELLGRQETQAIIDGLRKDYPAVVSEVELGRDGKSFTVGNIQKVLQGLLKEQVSIRNMVTILESIADFAPLTTDTRFLVEKARQALSS

SEQ ID NO: 95692 - protein, 317 aa, Unknown
  Obtained from environmental sample
  DOMAIN (1)...(300): FlhB HrpN YscU SpaS Family
  misc_feature (1)..(317): Xaa is any amino acid
VLPLGSQTCAEMLRFFFTRVNELDPLTDSFAAGIFINYFIRLALPILLVGIAAALFSNVVQTGFLFTTKPLEPDFSKVLPKFARYFQRIFSVEGLVNLGKSIVKMGLIGAVAFFIIQSKFRELANLQTAGLWSGITLVATLAAQLLVVTALLLLVISIPDIFFQRYQFKESLKMTREAFKEELKQDEGDPDVRNRLKSRYREMLSRNMLNAVPNADVVITNPTHYSVALQYDAARMNAPTVVAKGEDDLALRIREVAKENNVPVVSHPPLTRTLYQETEVGDQIPIRYWNVVALVVGKFFSFDQKQARRAETGRMGA

SEQ ID NO: 95693 - protein, 235 aa, Unknown
  Obtained from environmental sample
  DOMAIN (39)...(235): FHIPEP family
  misc_feature (1)..(235): Xaa is any amino acid
MADAARANVNVQGWSLNNLLKLDPGGGLSGSLMGLAVVVVLGMLIIPLPTVILDALMAMNLVISLLVLLIVLDNRRPTDFSIFPTILLVVTIFGLALNISSTRLILTQGTRFDGRMIKAFATFVVGSSGTVGLVSGFVIFIAIIAVQKMVITKGATRITEVAARFTLDSLPGKQMAIDAEYSSGAIDQKEAALKKDALQRESDFYGAMDGASKFISGNVTFAIFIIVVDVLGGFI

SEQ ID NO: 95694 - protein, 980 aa, Unknown
  Obtained from environmental sample
  DOMAIN (210)...(621): Alpha amylase, catalytic domain
  misc_feature (1)..(980): Xaa is any amino acid
MIRLEEKLGAGKTRDLMENFCGKFPPRDVYEGKTNIPGYLVGSDGGESCRNLSLEELLLLAIANLNPAFRQFLFLFDDSPLAKETVYPVAIDELKAHLSELPVFGPDGMNLWDLLRSPALASPDSLFGQLEYMRKRWGLLLGKYSGRLLTSLDIISEEEKPYFFGPGPTQVLDFSAYENEYEKFTPDQEWMPRTVLIAKSTLVWLFQLSQKYGKEFTRLDQIPDEELDELARRGFTGLWLIGLWERSQASKTIKQWTGNPEAAASAYSLYDYDIASELGGWGALANLRSRCMQRGIRLGSDMVPNHTGIDSRWVSEHPSRFLQLPYPPFPTYTYSCENLSGRNDVTVQIEDHYFSRSDAAVVFKRIDNNTGEVRYIYHGNDGTSMPWNDTAQIDFLNPEAREAVIRTIIGVCQQFSIVRFDAAMTLAKRHIQRLWYPAPGHGGAIASRAENAITTDEFNSRIPNEFWREVVDRCAAEAPHTLLLAEAFWMMEGYFVRTLGMHRVYNSAFMNMLKNEENEKYRSTIKNTLEFDPEVLKRFVNFMNNPDEETAVAQFGKGDKYFGICTLLVTMPGLPMFGHGQIEGFEEKYGMEYRRSYRDETPDWNLVNRHEWEIFPLMKKRHIFSGSANFCLYDFFDPNGHVNENVFAYSNSAGDEKALIFYNNCYYQTSGWIRRGAVAIPQKDGTFRQDFLHEAFGLHGESRFFTILREQRSNLWYVRSSKDIAERGLFAGLNGYETQVFMDIQEKEDLPDAQPGSWKTRWAVLNHELNGRGVRSLDETLLDIFLKEIYSPIREILSPDRMEKLSHFFSSQKKSIVSDPHDFVESFREPIKNFEAAAKKYLDGADGKFEPWGKSGLKSGGLISGEKKSGGKTKRKVNSSKDTFSEWSLFFENLLVLTKNQTGKEHVFARGLKKKITGQPSLLLMALGYKTLSLLRFIVDDNSGKAAASLALHWQLDRILAECWESGGRSFRRSQAGGGD

SEQ ID NO: 95695 - protein, 492 aa, Unknown
  Obtained from environmental sample
  misc_feature (1)..(492): Xaa is any amino acid
KTAIGAADRKALMEFHIRSEIRKEYGLEGSLFSLTGNVVLADIRQVRALAQKLNAKVDTVKNPERFIQAGKLNAMGLIDEILHYMVALYREQVQPDAFETAMNRLEQRLSAGKTRDLLENFCGKFPPKDVYEDKTNIPGYLVGSDGGESCRNLSLEELLLLAIANLNPAFRQFLFLFDDSPLAKETVYPVAIDELKAHFAELPVFGPDGMNLWDLLRAPALASPDSLFGQLEYMRKHWGLLLGKYSGRLLTSLDIINEEDKPYFFGPGPTQVLDFSAYENEYEKFSPDQEWMPRTVLMAKSTLVWLFQLSQKYGKEFTRLDQIPDEELDELARRGFTGLWLIGVWERSQASKTIKQWTGNPEAAASAYSLYDYDIASELGGWGSLANLRSRCMQRGIRLGSDMVPNHTGIDSLWVKEHPSRFLQLPYPPFPTYTYSCENLSGRGDITVQIEDHYFSRSDAAVVFKRIDNNSGEVRYIYHGNDGTSMPWNDTA

SEQ ID NO: 95696 - protein, 745 aa, Unknown
  Obtained from environmental sample
  DOMAIN (245)...(411): Radical SAM superfamily
  misc_feature (1)..(745): Xaa is any amino acid
MQLLEKLGKILPFVENPARYMGGEANSIIKNKSDVLASMALVFPDLYEIGMSNNGMRILYNAINKEADLFCEVAFAPWSDMAKLMLENAIPLYTHASFSEVKSFDALGITVQTELNFTNIPYILELANITAFAAHRNENEPIVIAGGPAMANPMPIADFFDCLCIGDGEILAPKALRIIGESKKAGKNKAEILEQIAKLEGFYVPAIHKEIKSVKRTYVEKLAKDLFPTKNLIANMPLVHDRFCVEVMRGCTQGCRFCQAGYWYRPTRELDADDVLDIAKEGLKATGDRQLGLLSLSTADYSPVEKMLDSFIEDPFFKNIDVSLPSLRVSSFGSSLANKVYVLKGGRSATLAPESGSERLRKFINKTITNADIEAATQSAFQNGFNKIKLYIMVGFPTETEEDIQDLIKLTERLLEIGLACNKKCQINLSVGIFIPKAWTPLQWASFVKKEKAIAHIKILRDKFYKHKNVKVSWNSWETAHLEAIYSRGGQNLAPLIYEAYKRGLVFESDSNHLNPSEWEKIRTDLNYSDTWLFEEINPDENLPWDIIDAGISKKFLQREWEKAHNPNAEPVPNCKWGKCVACGIPGNGKDTILGKIPQKHTITTIKATVHNCHYPYKIIFRKTKSSRFLPHQNTLSFFERAFVKLGIPIKFSEGFSPKPRIANTGALPLGLESLCEVISIELLEKLDLENKKAELVKSINEIFPQGLEIVSIEPLKIKLSAQVPKSTDYCMAGEYPSGLGKKKR

SEQ ID NO: 95697 - protein, 511 aa, Unknown
  Obtained from environmental sample
  DOMAIN (12)...(497): Protein of unknown function (DUF1703)
  misc_feature (1)..(511): Xaa is any amino acid
SRHYMLDPLRNMGKELMNLIERENYFVLHAARQSGKTTLLLELADKINAEGKYYALYCSLEGLQALTEPEKGIPEITKNIADCIKNQGLPPGFAKNADYSSISNVLNNSFVDYCRSLDKPLVIFFDEADCLGNGTLITFLRQLRSGFVSRARIPFVSSIALVGMRNIRDYKARIRPDSETLGSSSPFNIISEAMTISNFTCEGVAELYNQHTAATGQVFEKDATQFIFEQTQGQPWLVNAIAREAVEKICKSDYSIAITQDMAKQAIQNIILARGTHFDSLMERLKEERVRNVIQPLILGEEFAIDKSSDDYLYTRDLGIIRDSGDQTEPANPIYAELIVRTLNWTVQDTLKTKYKDYDVPHYLKGGKINVNALLKDFQSFWRENSEIWIQRYKENFYQYDEAAPHLVIQAFLQRVLNGGGHISREMALGKKRVDICVEWNNQKYPIELKLYKGAKTIKDSTEQILDYMDKVGSKEGWVVIFDRTPKKSWSKKLYVKEVKQSGKKITVFGC

SEQ ID NO: 95698 - protein, 64 aa, Unknown
  Obtained from environmental sample
  misc_feature (1)..(64): Xaa is any amino acid
MSKRVITFGELMLRLAPEGYLRFTQADRYAASYGGGEANVAVSLANFGVDVAFVSKMPENEIAR

SEQ ID NO: 95699 - protein, 264 aa, Unknown
  Obtained from environmental sample
  misc_feature (1)..(264): Xaa is any amino acid
ARDFTWALTARGMGKSWIPYAFTPAAGVSLDVFRIHGKAGKADPVKMNFAADFMAPTFQNLAGKIGLSFLIADIINVSGSTQFNVRESINGNAPSVIPSIGVSAIFKLKSGGQRIIGGALPSDGELAVDIAAKPLYNGIWAMGGGATWTVGVADKNPPVIVIDYPETAWISPNNDGKSDDLEFPISITDERYIMEWVFEISDEYSMPIRVYRNKEIRPETQGVQNFLTRLKSVNTGVEVPQSMRWDGTLDSGGIAPDGRYFFTV

SEQ ID NO: 95700 - protein, 302 aa, Unknown
  Obtained from environmental sample
  misc_feature (1)..(302): Xaa is any amino acid
GSPVRTSGYTGTPPRRIEWDGINNAGALSPDGLYTYELYSTDLAGNSGRSNMVTFEIDTRDTPVFITTDLRSFSPNGDGIKDTINLIPQIQETSGILNWKIEILNLGTAGSTSGGASGVRSFEGRDQAPSTTAWNGRTNAGTIAPEGSYVARLDLEYRSGNRPTSISMAFNLRTTPPQGDISVPYNVFAPNGNGNRDTLPIRVTTEGNDEWNMVISSNGNTAVRSWNWTGRAPAVSIIWDGKDEAGNIVDDGTYNITLSSTDDAGNSTRKNVNNIVVDARVPKIFLTASAQAIAPKPGQTEA

SEQ ID NO: 95701 - protein, 100 aa, Unknown
  Obtained from environmental sample
  DOMAIN (14)...(100): Rnf-Nqr subunit, membrane protein
  misc_feature (1)..(100): Xaa is any amino acid
MKTDSAVNRRQGGGRRLFRIFTNGLIRENPLLILMIGLCSSLAVTTSVDNGIGMGLSMTFVILMSEVVISIFRTLIPDSIRIPIFIIIIAAFTTVIDYVL

SEQ ID NO: 95702 - protein, 62 aa, Unknown
  Obtained from environmental sample
  misc_feature (1)..(62): Xaa is any amino acid
IESLVYALGVALGFMLSLLLLAGVRYRLRTSPVPPFLKGTPVLFAASALLSIAFMGFQGLVK

SEQ ID NO: 95703 - protein, 308 aa, Unknown
  Obtained from environmental sample
  DOMAIN (175)...(205): Putative Fe-S cluster
  misc_feature (1)..(308): Xaa is any amino acid
IDLSSFPEVEYTSPNPERAAGFSTPGGLMDTAERFIPGISRKIHKIEGIHTIYQYLVELSELLHTDEELSPLVDCLNCEKGCNGGPGTGNHNKPLPVLENPIRKRKAKLEGQLKPQKGDAGIKKYNQNLEKYWKKNLYNRTYKDLSGNNALKTPNEEELKAVFKRLKKFEKKDIYNCTSCGYQSCELMAKAIFNNLNKPENCAHYNIELLKEQTKTEELNRLLKEHINRTTGLIERISHTVHDLNETIEMQAQSVKDSSHKTASMIESLSSTSEVSRNKQNDIQELLDNATQGQKSMKGDILSVQSIS

SEQ ID NO: 95704 - protein, 424 aa, Unknown
  Obtained from environmental sample
  misc_feature (1)..(424): Xaa is any amino acid
LAKAAGGSEEAGKKLRSKRDWRDNGYIVGDDTYGFSALPGGGRNAEGAFSDALEVGRWWTATEGADCPTDYADCNAFTAGKAYSRYITLDYSNLMDNGSDQKYGYSVRCVVGESKAANIETDDISISVFGVDEEDFKKKYKSYESFIQHDEYAQRIAFVPNVRVKDFSWLSMGVMDDPDADEIVYEIKEVLYTVKELTPQKPLVVSWVEVGMMSAFGYSYRDRDGKIKYFMGQAANYGGDPEEYDGPPFTIYPFTPPLGADDIDYKFATVGGQDWFSENLRHKNGNSWCYDKDNANCEKYGRLYDWNSAKTACPKWSHLPTNEEWAKLIEAAGGKETAGKKLKSASGWHNDSNGSDEYGFSALPGGTRLADGKYGGTAGKFGYWWTATESGDRAYFRIMNYGNDEVRENTYSKDNAFAVRCLRD

SEQ ID NO: 95705 - protein, 153 aa, Unknown
  Obtained from environmental sample
  DOMAIN (49)...(153): tRNA synthetase class II core domain (G, H, P, S and T)
  misc_feature (1)..(153): Xaa is any amino acid
MKYSSAFIPTLREVPADAVIASHRLMFRAGLLRKLANGLFTYLPLGLRSFRKVEQIVREEMNAAGALEIKPTVVVPGELWKESGRWDSMGESMLRVKNRLDNDFVVSPTAEEVFTATVRDELSSYRQLPLTLYQINTKFRDEIRPRYGVMRGR

SEQ ID NO: 95706 - protein, 459 aa, Unknown
  Obtained from environmental sample
  DOMAIN (8)...(200): 7TM receptor with intracellular HD hydrolase
  misc_feature (1)..(459): Xaa is any amino acid
GASQKDPRGIIGLILLLALLYVLFILLQSKLVMNRDLSNSERCLLFVLVCLYLAGAGFAKNLVPAQSNFLVSLFFPTALMVMIPAVFMGPLLALVMALAFPLGACFAGFFDIPSYIFALISGIAASTVLRSAEKRMDLIKAGLAIAAVNALAVIVILLMRTSPIAEYPSMLLWAALNGIVSGMLILGILPPLEHALNAATTFRLIELSDLNAPVLRKLFTTAPGTYSHSIMVANLAEQACQDIGANALLARVGAYYHDIGKMENPEYFVENQTDYNPHDDMPPKLSATVIRSHVKLGVEKARQMGLPIDVIDIIAEHHGNSVITWFYSKALKQDNLKNPTVNMEDYRYPGNPPHSKESAVVMLADLSEAATRSISKPNAVKIEKFIKELIANKVDYGQLSQSELTFSDLEIIENAFVRVLAGYYHSRIEYPKIDLQAENNNNNNTNNNTASENGKAATE

SEQ ID NO: 95707 - protein, 249 aa, Unknown
  Obtained from environmental sample
  DOMAIN (170)...(248): Transporter associated domain
  misc_feature (1)..(249): Xaa is any amino acid
MKGHFSDLFRSKNIKNLEEDQQEMIRGVVELSGTTVKEVMVPRTDTVFLSVNASHDELFSIIIENGHSRFPVYEETIDKVIGILHIKDVLKAVVTNVPFDIRALVRKPYFVPVSKHIDDLLKEFRRKKVHIAVVVDEYGGVSGIACLEDILEEIVGDIQDEFDHEPEDILPVGEGTWLCDARVNLKDLAEETGLDFPADDFDTLGGFVFDLFGKIPVRYEKAVYQGTELIVHEMDGHKIKSVKIVGSGE

SEQ ID NO: 95708 - protein, 284 aa, Unknown
  Obtained from environmental sample
  DOMAIN (75)...(251): B3/4 domain
  misc_feature (1)..(284): Xaa is any amino acid
DYAIGKPLADYIPYDAVIEIEITPNRGDCLSVVGVAREVSARFGLPLKKPIGLPPAQGGDHVSAAVSVTVDEWSRCPRYMGRLVRDVVIGPSPEWMQRRLTLVGLRPINNVVDITNYILIEYGQPMHAFDYDAIENKKIMVKTAGDMGVSSFTTLDGVERKLVKDDLLICDGKRAVALAGVMGGAGSEIKEHTKNVFLECAFFEPGGIRKTSKRLGLSTDSSYRFERGVDPAQGLADALNRAAELMRVFASGNVAAGVIDTNPNPFPDKVITVRPSRAKRIWAQ

SEQ ID NO: 95709 - protein, 193 aa, Unknown
  Obtained from environmental sample
  DOMAIN (21)...(89): Aminoacyl tRNA synthetase class II, N-terminal domain
  misc_feature (1)..(193): Xaa is any amino acid
MEYNTVESLEALRKEAFADFGVIASEPDAENFRLKYLGKKGVLRDLVKSLGSMSEEERKTFGAAANALRREVEERFAEAPWQNKAEAADPGFDPTLPGYPFHTGSLHPLAKIRNEIVEILVSMGFSVAYGPDVESDYYNFQALNMPPLHPARDMQDTFYISDKSVLRTHTSPVQIRVMEGQKPPIRIIAPGRV

SEQ ID NO: 95710 - protein, 85 aa, Unknown
  Obtained from environmental sample
  DOMAIN (2)...(79): Ribosomal protein L20
  misc_feature (1)..(85): Xaa is any amino acid
GITQAKDAMYRAGVYAYRDRKQNKRNFRSLWIIRINAAARLNGTTYGKLISGLKTKGIELDRKSLAHLALHEPEAFAKLVVTISA

SEQ ID NO: 95711 - protein, 272 aa, Unknown
  Obtained from environmental sample
  DOMAIN (149)...(263): Response regulator receiver domain
  misc_feature (1)..(272): Xaa is any amino acid
GSDAEKIKASIDNITKSSNDVLERFGAIDSSVKTVSEHEQNILKTMREQETGGKQILESISKLRDITASVKKGSYDMEKSGETLVKETDEFIKTSQEAAEGMNEILTGINQIKVSVNHVNEMNHENNNNFESLKKETEKFNATVGNEKQKILVVDDDSIHLEMVEAVLSSEYDISTAKSGKEALGLFYQGLVPQLILLDLIMPDMDGWNTYTRIKAIGGLYDTPIAFFTSSDDPKDKQHAREMGAVDYIKKPYERNDLLFRVGRIMKQGAAA

SEQ ID NO: 95712 - protein, 764 aa, Unknown
  Obtained from environmental sample
  DOMAIN (375)...(589): Methyl-accepting chemotaxis protein (MCP) signaling domain
  misc_feature (1)..(764): Xaa is any amino acid
AVNSEIAIALKMATSPIIQRHFLNPADGELRKVAFEEIAAYRSAFKGNSVFWCGDIDKEFYFDDENNHYTLDAESPDNYWYKMTLYETEKYNFNINYNPDLQKTLLWINAPVFREGRPIGILGTSIDLSGFIDSLYAEFDPSMPFYLFNKASEITGARDHALVTGKKTIGDYFGTAGTSILKSAEQSAKAPQAFFLNNSEYVVGNIKSLDWHIAAILPITASDTLNNGMTVFFMIMLAVIAVILVISFIFISSLLKPMRYMVQTLDQIATDWDLTKRLEFRNHDEIGTVGEFFNRTFEKIRILVGTIKYKINGLNHTSFELSANMGKTSAAVQQISANLDNMENLMIKQENGAVEAGNAVGIIKTNIDSLKKMIEQQTDSVNVSSSAIEEMTANIHSVTQTLAENGRNVDVLVEASENGKTGLQLVAQEIQQIALDSEGLLEINSVMNNIASQTNLLSMNAAIEAAHAGEVGKGFAVVADEIRKLAESSSKQSKTTAAMLKKIKASIDSITKSSDDVLTRFGAIDSSVKTVSLHEQNILNAMEEQEKGGKQILESISRLRDITYSVKKGSDDMEQSGGTLVKETDAFIKISQETVQGMNEILTGINQINVSVNHVNEMSLENNKNFESLKNETEKFNDTVGNEKKKILMVDDDTIHLEMVDSVLRNEYDITTAKSGKEALGLFYQGLVPQLILLDLIMPGMDGWDTYSRIKAISGLHDTPIAFFTASSDPKDMQHAREMGAVDYIKKPYDKDDLLRRIGRIIKK

SEQ ID NO: 95713 - protein, 156 aa, Unknown
  Obtained from environmental sample
  misc_feature (1)..(156): Xaa is any amino acid
MSGHKLETIIAERPAKTIYRDGNKVIKLMGEEYPAPDVLSEAHNLAAVGETALKVPKLIEVTKIKGKWAIVWEYIDGTTLDQLMKKHKAKEEHYLERFVDIQLDMHRHQATRLPLLIEKMERKIKSSGLDATARYELLARLASMPKHSKLCHGDLT

SEQ ID NO: 95714 - protein, 120 aa, Unknown
  Obtained from environmental sample
  misc_feature (1)..(120): Xaa is any amino acid
NAGRDNELLAKRKQTDYSLDENDAELSRYPVELTERVLLDKKYAGYIEKEIRFAAKAAKMDAIKLDPNLDYASVMGLSTEAKEKLTAVKPLNVGQAARIPGVRQGDIALLIIMANKRNAK

SEQ ID NO: 95715 - protein, 449 aa, Unknown
  Obtained from environmental sample
  DOMAIN (1)...(163): 3'-5' exonuclease
  misc_feature (1)..(449): Xaa is any amino acid
DFETDSLDAWRSRPIGISLAVKPKEAFYVPVAPHDVSGTPSKFNDPEKVRSLLSPLFADKEMTIAAHNAKFDYKVSRGWGIDRWQCKIWDTMTAAWVVDPERNNYSLDSLVAYTFDCTPTKYMDIVPKGAAFDVVSLETATRYSGEDADFCIRLKHHLEPMLKKTESIALFENLEMPLLPILAEMEGEGIKIEPKALTSYGKELAVELDKIQSDTWKIVGHEFNLASTKQLQEVLYVERKLTPGKKTKTGYSTDAAALEELAREDPVPALILRHRTLSKLKSTYVDTLADMADSEGRLHTNFVQTGTATGRLSSREPNLQNIPVRAEEGRRIREAFIAKSGCVLISADYSQIELVVLAHLSQDENLISAFKEDRDVHARTASLIFGIDENEVKNEQRRMAKTINFGVIYGMSAFRLANELNISRTEAQNFINAYFNTYSGVRQFIENTI

SEQ ID NO: 95716 - protein, 238 aa, Unknown
  Obtained from environmental sample
  DOMAIN (22)...(215): 5'-3' exonuclease, N-terminal resolvase-like domain
  misc_feature (1)..(238): Xaa is any amino acid
LIVVARFAYLVLLYVMKSTDFPPLYLIDAYGLIYRSYFAFLTHPLRNNAGKNVSALFGFARTLISLIDDGAPCADNDGKSLDSPVKPLRLAAIFDSRTPTFRHKMYSEYKANRQKTPEDLHEQVPLVEEFLNALGVKCIKNDGFEADDIIATLAEKCRAEKRQCYILSSDKDLLQLVGGGIFELRPAEINRKNENAASPGPAWELIGHDEVKAEWGVEPPKVLDLLSLIGDSSDNVPG

SEQ ID NO: 95717 - protein, 270 aa, Unknown
  Obtained from environmental sample
  misc_feature (1)..(270): Xaa is any amino acid
MAQVLLYDKEKGQKFTFRKVIPGTGWHLPNSLANSSVDSRSFRFFFRIHNWLDADTVKLDINIDTDGKRPPLTVHLAYDMSSQNVTPMAVSLGFEKSQIMYAYKTLAPVRGDMILAGKRIVLKQENCSGFFYDCKGFFPYRMYTTICNASGFDEEKGRFGFHIAENQARDTNKNNENALWVNGKLTPLPPVRITATEGIGANWIIQDVEGMVDLTFTPKEPDNSGVKLMFTRADFNVFLGFYNGMLVNSEGEKITIKNLFGVGEKLYLRV

SEQ ID NO: 95718 - protein, 340 aa, Unknown
  Obtained from environmental sample
  DOMAIN (1)...(215): Methyl-accepting chemotaxis protein (MCP) signaling domain
  misc_feature (1)..(340): Xaa is any amino acid
VAEKIQEIAKDSEGLLEINSVMDNIAAQTNLLSMNAAIEAAHAGESGKGFAVVAGEIRKLAESSSNQSKTTATMLKKIKASIDSITASSNEVLSRFGVIDEKVKTVSSHEENIRNAMEEQEVGGKQILESMERLKEISVSVKEGALGMLESGNHLNRQTSELIISSTDVVNGMNEIVNGAMKEIKSAVTLVAEMSAENSKNFDELKAESSKFKVESGDEMKKIIVIDDDEPILVMAKTILGKDYDVTTVNSGKKALDLFFQGYVPNMALLDLSMPEMGGWDTFIRIRDISRLHKTPIAIFTSSEDPKDRARAQELGAVDYIKKPCKKEELLSKVGRIIQS

SEQ ID NO: 95719 - protein, 337 aa, Unknown
  Obtained from environmental sample
  DOMAIN (40)...(317): Glycosyl hydrolases family 18
  misc_feature (1)..(337): Xaa is any amino acid
LLSCKSHPPKVEIENTPEEIEELPIKLPLQGEPLRSSAFGEIWGYVVTGREDALSNTLPLSDIGYFAAEVDSYGKLVDIPKRSKIKFPGRVHLVVVCNSRSLTHFVLLPGSVHRKELIADLLEAAKEFDGLQIDFENIPKLDGDTFVSFLKDLRKGLPSGKMLTIALPARNKKISDDQYDYAKIKPHVDRILIMAYDEHWSGSKPGSVASMQWCKKVADYCLDTIGKEKLIMGLPFYGRAWGDYTPSRALIYTTTEKIIDEHKIKEIRRENGIPVFEYSKTVSIVVYYEDAYSICTRMEMYKKMGVASIGFWRVGQETAEVWDYINWKKSPASRFPY

SEQ ID NO: 95720 - protein, 179 aa, Unknown
  Obtained from environmental sample
  DOMAIN (90)...(157): Respiratory-chain NADH dehydrogenase, 30 Kd subunit
  misc_feature (1)..(179): Xaa is any amino acid
REKKEIKGTIGKISKTGEIAMDNAIKDERAVDECWIVEREKLVEVVKSLGYDVLIDIVGVDYLGMENHKVKRFAVIYCLKNTKNMARVRIKVQVEEQEKIPTLSKIYPIADWQEREVWDQFGIVFDEHPNLKRILNHVDFEGHPLRKDYPAKKRQWLSENDQMQDQLEKRLETLGYRVL

SEQ ID NO: 95721 - protein, 786 aa, Unknown
  Obtained from environmental sample
  DOMAIN (205)...(371): Radical SAM superfamily
  misc_feature (1)..(786): Xaa is any amino acid
AHFSDLYEIGMSNNGMRILYNAINKETDLFCEVAFAPWRDMAKLMREHNIPLYTHASFSEVKSFDALGITVQTELNFTNIPYILELANITAFAANRDENEPIVIAGGPAMANPMPIADFFDCLCIGDGEILAPKALRIIGEAKKAGKNKSEILEQIAKMEGFYVPAIHKEIKSVKRTYLEKLAKDLFPTKNLIANMPLVHDRFCVEVMRGCTQGCRFCQAGYWYRPTRELDADDVLDIAKEGLKATGDRQLGLLSLSTADYSPVEKMLDSFIEDPFFKNIDVSLPSLRVSSFGSSLANKVYELKGGRSATLAPESGSERLRKFINKTITNADIEAATQSAFQNGFNKIKLYIMVGFPTETEEDIQDLVKLTERLLEIGLACNKKCQINLSVGIFIPKAWTPLQWAPFVKKEKAIAHIKILRDKFYKHKNVKVSWNSWETAHLEAIYSRGGQNLAPLIYEAYKRGLVFESDSNHLNPSEWEKIRNALNYSDAWLFEEINQEENLPWDIIDAGISKKFLQREWEKAHNPNAEPVPNCKWGKCGACGIPGNGKDTILGKIPSVRATPVEGQPQGAAPTGVASAGIFPYKIIFRKTKSSRFLPHQNTLSFFERAFVKLDIPIKFSEGFSPKPRIANTGALPLGLESLCEIISIELLEKLDLENKKAELVKNINEIFPQGLEIVSIEPLQIKLSAQVPKSTDYCMAGEYPSGLVQKKEKNKLPEVLNHRGQSINLNEHIISITEAENALHITVKCNEQGTTASPFTIYSGLLNISEQEARALNIVKINVGY

SEQ ID NO: 95722 - protein, 263 aa, Unknown
  Obtained from environmental sample
  misc_feature (1)..(263): Xaa is any amino acid
GCLQFALPIEGVSSRIRNVILNKNISFEQIKEAFKRLFFHGVSTVKVNMIWTGLETHEDVDEFLGEICELVALRDEFCARTHVIFIFTSLVVMNDTPLQWCVRVLAGQHLRGEAFGSEYNRIMQAMEVAGFSLRRDRSQYGVIWNQILLDYGRVLTPVIKGVCKDPGFVSSLHTIHAPRYQKVLNVFNAHALPSPARVFGVERPFGYGFPLAVAQLSALDQRKDWYDRVMVRGESQPMCLCTHANRKVECYGCGLCETDEDVK

SEQ ID NO: 95723 - protein, 232 aa, Unknown
  Obtained from environmental sample
  misc_feature (1)..(232): Xaa is any amino acid
MERAIAHLNIIGFRAAVAALEDKTLLGRPYAIAGGKGGRAVVWDVSRAALDGGVKPGMALTLAERLVRDLAVIQPNPAACQKVNGLLETVIARYAPVWQNDGGGNLYLDITGTKKLFGPPADCTWRVSKEIDGEIGLKMAAAAATNKLTCKVASRAIRPVGFVDIHPGDEASFLANKKLALLPGMGPILMRTAAVAGFKEIGEIAALGKGEAISLFGRRGLLLRDFAHRIRG

SEQ ID NO: 95724 - protein, 383 aa, Unknown
  Obtained from environmental sample
  DOMAIN (71)...(225): DHH family
  misc_feature (1)..(383): Xaa is any amino acid
MKWEKKEISPESVKEISAKYGCDLLTASILVRRGFCTGDAIRFFLEDDLASLRNPFALDGMEDAVERILAAKDEGEKVLVFGDGDVDGITGTALLANYLESIGMDVTWRIPTGDESYGLSLEAVEEFAAKDGTLIITVDCGISRFSEIRRANELSIDVIVTDHHEPQEELPHALVIINPKLKDSTYQFRDLSGCGVAFKLVCALRFAQKSELYGQQICLLNTRAVNNAWVIEIAKMRNMVVVDTLIETIVPGIVSITETRLPAFLEGQQIFVWDASLHKQTFSKLFGKGVEVGMLDIAPQIGREIPQTAGISLLRIKELSKIAKYSDRELSELDVFVNLFTSYARLLEKKSFGSADDNADIQLAALGPLRTLCRCWTKTELSC

SEQ ID NO: 95725 - protein, 287 aa, Unknown
  Obtained from environmental sample
  DOMAIN (157)...(244): His Kinase A (phosphoacceptor) domain
  misc_feature (1)..(287): Xaa is any amino acid
MRQFIKRALQKADILKPEQVRNLLGLSAKEIDRLETVMDSLIRGVLVCDTSHKLILANKAARRFFSIVSYEQGRETIWSVIPEEPVAEFLAQTLLSTDVVEEREFYVDVNGIQRLLAVSVMPVVQDRQITGSVILIEDITERRNREAMLRRMESLASLTTLAAGVAHEIKNPLGALSIHVQLLQKAKDAQEKLCSAVHVPGETECEANKYFRQIDKYIKVLNEEIDRLNRIIVDFLFAVRPMPLESRRGSINEFIRELADFVSFELKEAHIECVLNLDDNLSPVDFD

SEQ ID NO: 95726 - protein, 422 aa, Unknown
  Obtained from environmental sample
  DOMAIN (137)...(282): ATPase family associated with various cellular activities (AAA)
  misc_feature (1)..(422): Xaa is any amino acid
GHEVATAANGNEAFKRFQKGDIDLVITDLWMPGLSGEELLEKILAESPGIPVIILTGHGTIEAAVKTMRAGAWDFLIKPVNLDYLSLLVKQALDNRELVLKHKRLLEELAHHKRFQTIIGTSAVMRKVYDTTSRAAPTKASILITGESGVGKELVADAIHELSPRKDKPLIKVHCAALAASLLESELFGHEKGAFTGAVARKRGRFELANEGTLFLDEIGEIDQNIQIKLLRVLQEKKFERVGGEETIETDVRIVAATNKDLKAEIEKGNFREDLYFRLNVVNIHVPPLRERKDDLPLLITAFLKEFAEENGKTIEGINDKARSCLYAYDWPGNIRELRNCMESAVVMSQGKLITVEDLPPGIRAGSEEGLIRIPLGTSMEEAEKIIIRETVSAQKGNQSKAADILGIGRKTLHRKLSGEDE

SEQ ID NO: 95727 - protein, 443 aa, Unknown
  Obtained from environmental sample
  DOMAIN (375)...(438): TRAM domain
  misc_feature (1)..(443): Xaa is any amino acid
MKYYFETYGCQMNSAESAALALACKERNWQEAENSEVADLVLLNTCSVRLTAEKRALGRIAHYAGLKKKHGRRFTLVVAGCMAQRLGEKLKEKYPAVDYVMGTFARSLFPLILQAAEKGEKAALDLTENAVFSFSNTHLEEGQFRSFIPIMHGCNNFCSYCIVPYVRGREVARDPHNIAEEMRLVGERGVREITLLGQNVNSYFWEKDKMNFSALLKFAADTAGKSGIKWIRFLSANPGNFSSETIRVMAENPVFCRHLHLPVQHGSNSILKAMNRGYTRERYLELVGEIRAAMPGITLSTDILAGFPGETEEDLEQTLQLMEEVKFLYAYMYHFNPREGTKAFDLPGRISDEIKRERLSRVIALQKKHTTGLLKSRIGSKETVLIEGISRKNADELITRTEKDEMAVVPGPASMIGSFAEVTLSALKGNTFISKELNLCQVV

SEQ ID NO: 95728 - protein, 242 aa, Unknown
  Obtained from environmental sample
  DOMAIN (167)...(236): PEGA domain
  misc_feature (1)..(242): Xaa is any amino acid
QDPFDDDFGGKPQKKIDEPLDDGGLGGDDNIFKSKKKGAPVAAIVVVVALIALAGGGYFFFMNKGGGSDADEAPASASAPVSTAGSQSSGEEGEIPIATIEVGTPKPDPYASAGKQDKDKKGDKPDPKQKPAPSPAPAPTPSYTPTPPPQPVYTPTPEPAPPPPPKVEQIRVTSNPSGAIVEVDDRRVGNTPYTFKPAAWGEIKIAVFTSGYEKLTKEVDFAGGTMDVHFPLSRAAAAPPPP

SEQ ID NO: 95729 - protein, 214 aa, Unknown
  Obtained from environmental sample
  DOMAIN (142)...(214): ACT domain
  misc_feature (1)..(214): Xaa is any amino acid
MKVSKIMTRNPVFTHPDLSLSDARSLMDREKVGHIPVLNKNNGLVGLITKVDLLKAGPSPATSLDVYEISYLLSKITVEKVMVKNVITVQENEVVEEAARIMADNGIGCLPVLNNSLLTGIITDTDIFHFFIDAYGARHKGIRITVNFKEKPGQFAAFAGAVAEKGGNIVASVSSEGDDVAHRRATFKITGISRAAVEEAAKKLDGGEIEDIRE

SEQ ID NO: 95730 - protein, 293 aa, Unknown
  Obtained from environmental sample
  misc_feature (1)..(293): Xaa is any amino acid
AIWVRAEISELHERDNDHAYFELVEKGAESDRIVAKIRAICWASTYRMLKPFFETAASCPLSEGMKVLVSCSIEYHELYGVSLIIRDIEPSYTVGDLAKQRIETIRRLRSEGVIDMNKSLEFPLLPQRIAVISSETAAGYGDFIHQLTSNSSNLVFYTKLFPATVQGDSAATSIINALDKIYEHSEQFDVVVIIRGGGATTDLHCFNSYDLASHCAQFPLPIIVGIGHLRDETVLDTVAFASLKTPTATAEYLLEKMEEQLDDLLYLERNLIAQADEQIKKNIAQLRKLVKFF

SEQ ID NO: 95731 - protein, 317 aa, Unknown
  Obtained from environmental sample
  DOMAIN (1)...(152): Protein of unknown function DUF115
  misc_feature (1)..(317): Xaa is any amino acid
MYGKMDIPVVITGSGPSLEAVLPRISAVRESVFILAASSSLQALAVGGITPDMVISTDGGGWALTHLYSFFRQPLPAGPGILALSLCAAIPSQCSAVPLLPMNDGSLWQSMALHATGIPSVLIPQRGTVTASALELALELSNGNIFLAGMDLSVCDIRSHARPNGFDHLFFGSATRLRPVYTQYFIRSGGIKSGGSLDVYAAWFRSRLASFPKRVFSLGNNHEVFDGIARVVPLSGKGNGRNKGRDYFEPVILADNPKGRVRRAQEAISAALGDPRYAPALKTELAPLLFPSQTDVSAQEITGALHDIAKRYYNEYA

SEQ ID NO: 95732 - protein, 93 aa, Unknown
  Obtained from environmental sample
  DOMAIN (20)...(88): Ribosomal protein S17
  misc_feature (1)..(93): Xaa is any amino acid
MSDEKIETVKSKSGKKEFVGIVKSDKMMKTIVVSIETMKLHPLYKKYVKRAKKVKAHDEKNEAKTGDRVRVIECRPLSKEKHWKLVEIIERAK

SEQ ID NO: 95733 - protein, 288 aa, Unknown
  Obtained from environmental sample
  DOMAIN (184)...(288): Response regulator receiver domain
  misc_feature (1)..(288): Xaa is any amino acid
KGMRGVGVGLAISRKLLEIMGGDIQVSSEYGKGSTFTITLPQKFRSREKLATVENPGEKSVIVFERRDIYANSIVCTIDNLGVNCDTAADETEFREKLLKKSYSFIFIAPTLYKDYKGIISELAASSKVVMLVDFGEAVPNEGCGMLFMPIHSISVANILNGITEVYSYNEGNALFVNFMAPEARILVVDDIKTNLTVVEGLLLPYGMKVDLRKSGIEAIKAVQANHYDLIFMDHWMPEMDGVETVRRIREVNSVVPIIALTANAISGVNDMFMQNGFNGVLVKPMTR

SEQ ID NO: 95734 - protein, 96 aa, Unknown
  Obtained from environmental sample
  DOMAIN (2)...(95): Sigma 54 modulation protein / S30EA ribosomal protein
  misc_feature (1)..(96): Xaa is any amino acid
MNTDIKAVHFTMHEDAKEYLNQKLERIHNAENMIVDLLVTIKKEKDFEAEATVNFRWGVSIHVKENDFELTPAIDKMIDKLESKIIKEKEKVKDKR

SEQ ID NO: 95735 - protein, 147 aa, Unknown
  Obtained from environmental sample
  misc_feature (1)..(147): Xaa is any amino acid
MGEFEMLPAQDRRDLYDNMLKAVLINNPNFARIFSIWKPNAMDGMDSRYIGRPGSTPTGQYAMTWGRDTGPIEVKPNLVLDEINAWMNSPDALKTRVENPTPFKNNGKDTFIVRIGVSITRSTTSEVVGHLCVLIDIAPIQAEVEKT

SEQ ID NO: 95736 - protein, 261 aa, Unknown
  Obtained from environmental sample
  DOMAIN (1)...(225): Protein tyrosine kinase
  misc_feature (1)..(261): Xaa is any amino acid
MREIQVLSTLPPHQNVISMLNVIEDPLALVMEYVPGRTSLRGVIKRHPSGLPIGLMANILRGLLEGVAHAHAYKVFHRDMKPENVLIRLADPHQEITHKCIKIVDFGISKVYADSAPLPEDGSKPLQTLTGAYTEAYAAPEQINGEATGAYTDIYQIGTIIYEMLSGSKPFTGKISEVIAGQCYSPPPPIARGGIPRPLMALMTTAMSKNPKDRYQDAEEMLHVFNDLGDLENMADQFDAEGTYTEESATIRAGIKQKHRP

SEQ ID NO: 95737 - protein, 118 aa, Unknown
  Obtained from environmental sample
  misc_feature (1)..(118): Xaa is any amino acid
KIKETDNVIIENNFDCMRGVHTPPFRALKKGMYPETNTLPKQHTPSLQGGVVDFAAFTSSSAVEGFVESAAQADLSKIKAVCIGEKTAQTAKFYGMDVYISARATIESMVEKIKELSL

SEQ ID NO: 95738 - protein, 143 aa, Unknown
  Obtained from environmental sample
  DOMAIN (1)...(142): Delta-aminolevulinic acid dehydratase
  misc_feature (1)..(143): Xaa is any amino acid
VNIRTRRLRGSNILRRMTRETRLSCDALVYPLFVREGKGIIEELSSLPGQTRYSPDTLAKGIEAAVNLGANTFLLFGIPQFKDEKGSGGYDDNGVIQQALRNIKTAFGKDVYLITDVCLCEYTSHGHCGLIVNEKIDNDATLP

SEQ ID NO: 95739 - protein, 134 aa, Unknown
  Obtained from environmental sample
  misc_feature (1)..(134): Xaa is any amino acid
MTNSLDSVFVSLKQAQAKLAEQNRASKDKALAAAAAAIDRDRTVILEANDRDVEQARNGGMKESLVDRLLLNDKRIDNIIEGIEIVIRQEDPIGKVQAGWTLPNGLQIEKVTVPIGVAAIIYESRPNVTADVPP

SEQ ID NO: 95740 - protein, 263 aa, Unknown
  Obtained from environmental sample
  DOMAIN (10)...(240): Amino acid kinase family
  misc_feature (1)..(263): Xaa is any amino acid
VISQLIANARKIIVKFGSNTLANNEGKINTELLFEFAQQTAALVHSGKQIVFVSSGAQVAGLSTMDKWARKKDIHYRQALCAVGQVELMGAWRHAFDQHGLHIAQILLTREDFNDSHRNLNMRNTIFTLVDEGIIPIINENDTVSVEEIKIGDNDTLAARSAILWSADLLILFSDIDGVYNKNPKEHDDAVLVEEVRDIDAAQKDISIGAANDFGTGGIATKLEAAKLALSYGIPAILANGGKPRSLETLAAGNQKGTVFLAS

SEQ ID NO: 95741 - protein, 396 aa, Unknown
  Obtained from environmental sample
  DOMAIN (93)...(169): Bacterial pre-peptidase C-terminal domain
  misc_feature (1)..(396): Xaa is any amino acid
SLGTLTSLYIQLYDSSGAAVESETNSSSNISRTVTNGQEYYIRIRPYSSYYSGTYQIGFTTSTTPPPVTLPTTGVTPLTENTWADGNIPTTGSTQWFKFTATASTQYIHVSLGTLTSLYIQLYDSSGAAVESETNSSSNISRTVTNGQEYYIRIRPYSSYYSGTYQIGFTTSTTPPSVTLPTTGVTPLTENTWADGNIPTTGSTQWFKFTATASTQYIHVSFGTLTDLYVQVYDSSWNTVGSESNLYSSNTFVSRNVNIGQEYYIRVRPYSNNYSGTYQITFNTTFYPLGIAAPIQLTVNTWNDGNIPTGGQQWFKFTATASTQIIHFSPGTLNTMYIFIYNSNGSVNKDYTYISGSTSISLNITSGQEYYIKVIPYINGGTYRIAINASSTAPSL

SEQ ID NO: 95742 - protein, 435 aa, Unknown
  Obtained from environmental sample
  DOMAIN (76)...(424): Bacterial extracellular solute-binding proteins, family 5 Middle
  misc_feature (1)..(435): Xaa is any amino acid
MKKLNSRFLLFFIPALVLHTACSGKKAGVQSASSLRYGYNSEPVTFDPLSPSNTADGRSLLFNVFEGLVKPDTEGALRPCIAESVAMEESGRVYNFQLRKGIRFHDGSQLTSNDVKYSLDTAKAAGFIGFEAIETIDINGEYSVKVTLLQPDPEFLPYLTVGIVKADSADRDKKAIGTGPYFIESYAVQRELVLKKFADYKRENAPKLEKITIMFFADSDALVRGLRADSIDGAGLPGNLAQQLSEEQFDIIPVYSAMVHLLALNNTASPLNDIRVRKAINYGIDIQQIIDTAFYGKGEPSGSPLIPGLKAYYETSLANPYPVDPEKALSLLKEAGYGEGGKKLTLEITVPTIYTMHMDTAQVIAEQLSKIGINVGIKLVDWATWLSDVYFGRKYQATIISLDSPNVSPRSFLTRYRSDNNGNFINYSSADFDRV

SEQ ID NO: 95743 - protein, 303 aa, Unknown
  Obtained from environmental sample
  DOMAIN (69)...(169): Phosphoglucomutase/phosphomannomutase, alpha/beta/alpha domain II
  misc_feature (1)..(303): Xaa is any amino acid
MRADVGIVISASHNPFSDNGIKFFDAQGFKLPDEVENEIAGMVLDAGWKWNYPAADKVGRAAKIDDAPGRYIVFTKSSFPAHLNLNGMRVVLDCANGANYKVAPLALEELGAEVVKMGVDPDGININRDCGSLYPDKVAAKVRELRADVGLALDGDADRLIVVDEQGAILDGDQLMALCVVEMMANGKLPGNKLVATVMSNMALEVFMRERGGVLLRTPVGDRYVVEEMLKVGAMFGGEQSGHLIFREYSTTGDGLLAALQILRVMREKEKPLSELAGQLTLYPQTMLNIRVAKKPPFDQVRI

SEQ ID NO: 95744 - protein, 317 aa, Unknown
  Obtained from environmental sample
  DOMAIN (107)...(256): Poly A polymerase family
  misc_feature (1)..(317): Xaa is any amino acid
LRFRYSEENGRLVKKAVVYTVDEHGISIDDVDKEAISIVHRLKEAGYDSYIVGGAVRDLLLKKKPKDFDIVSEAIPARIKKIFRNSRIIGRRFKLVHVYFGPRIFEVSTFRSLKNGLTSNTFGSINEDVLRRDFTMNALFYDPVQQTVVDYVGGIKDIRAKLVKPIIPLSKIFTDDPVRMIRAVKYGASTGFTLPFTLKWKIKKQSYLLSTISPSRLTEEIFKIIQSPQAARIVESLDSMGLYAYLQPEAARLMREPGSFRGRYLRSMTAMSKPEFKNLPGEALGALINDYLEDIIDWDRGIIENYRASYSAARNFV

SEQ ID NO: 95745 - protein, 383 aa, Unknown
  Obtained from environmental sample
  DOMAIN (26)...(173): Heptaprenyl diphosphate synthase component I
  misc_feature (1)..(383): Xaa is any amino acid
MLTDSDSTPPPLPADRAAIQKAIWLLAAVALNAVELAIPRLPFLPWLKPGFANIITILWIMKYGLGDALLYTALRVWISGFYFGFSLFTLSLSLSGGLLSTAAMFVIWATLGRRGLTGTAGTAIVGALFHNVGQLAVIYAMMSQNMGVLGQIPFMLCAAVVFGGLVGALTPGVGKILGFGADSVGTSGVSTDSINTNHSKTTVTAKSIIAATFAVSISLMFINNIYILIAAVATYSLVSLSLNRKTPSVLIYPARFYTLFLFVAFTNLFFSYGKRIDGIPFITEEGIIAFVEQSMRLWCWLQTVHILNRFDFHKSFIGLLYRFFPNKKDTLEAGMIALEHFPEVMKLSKPSKTYSFRMLITNPKTVLTEYVKIVTNRIAQIVK

SEQ ID NO: 95746 - protein, 130 aa, Unknown
  Obtained from environmental sample
  misc_feature (1)..(130): Xaa is any amino acid
VTTSFFGHPSVLQLTKAERENLTFQNGISNKQHGGRRFMPYAFTEQGVAMLASVLNSPKAVTVNINIMRAFVKLRHYVLSQSKDEQIAELRKLLMLYIEKNDKRVNDIIIALNNLIEQPPKNKKIGFNTD

SEQ ID NO: 95747 - protein, 227 aa, Unknown
  Obtained from environmental sample
  misc_feature (1)..(227): Xaa is any amino acid
MDKVIRITEYFADVETTKEHNGYFCSVGEALTVVILGSLCGLRNVSQISQWAANERIKGFLAGHFRIERIPCYYWMLCLLALIKPTSLNQCLTRRVQSLLPEGMKAMTVSFDGKTACSTGKMDAYDSPLHIISAHLAELGITLAGLKTDGKSNEIPAVRELIGMLEVAGCVIVADAMHCQKETAALVVGKQGGLPFKRQRQPACAEKRHRRVRAGRRFEKDHGHFHD

SEQ ID NO: 95748 - protein, 137 aa, Unknown
  Obtained from environmental sample
  DOMAIN (1)...(132): SpoU rRNA Methylase family
  misc_feature (1)..(137): Xaa is any amino acid
RSAAFFDVKYVVISERDSEARLTTGAYRVAEGGMEHVTVRSVRNTAAFLSDASKSLITIGTDTRARQRIENLQRIVQEKKKDGKNGIALVVGNEEIGLPEDVKGACSVLVRIPGTGLMDSLNVAQAATLFMHRVFEL

SEQ ID NO: 95749 - protein, 674 aa, Unknown
  Obtained from environmental sample
  DOMAIN (41)...(499): Amino acid permease
  misc_feature (1)..(674): Xaa is any amino acid
MQTANPTINQAPPPAPPPSEQNGGGGEAAAPDMKKFSTFEGVFLPTVLTIFGLVIFMRATFVTGHAGIYQALGILIAAKSMTTLTGLSISAIATNTEVKGGGVYYLISRSLGPEFGGAIALTIFLSQSLSIPFYLIGFAEATVLTFPELDIYFDLIAYAIFAATAVLSLRGAAVVVKAQYIVLAILVLAIIAFLVGAVIHFDFKTFAENAKPLEGSKYTFWMLFAIYFPAVTGILSGVNMSGDLKNPARSIPSGTLIAIGVAFLVYAAEITLCGGAIKRSDLTDRPYESLLHLWDPVTAFLVVPGVMAATLSSALGIILGAPRVLQSLAQDKILKPVNVFAKVTPEGEPRRALFVTIAISFAVIYIACRNGSGGGALNMVASVVSMFFLWTYGIINLAAFVESFSRNPSFRPRFKFFHWFGALVGAVACFAATLLINPTAALLAGACFVGIFFYVRKYVMSVSFGDARRGFIYSRTRDNLLTLSSLPAHSKNWRPTVVAFAGDPVSGLHMVKYADWLSSGRGILTIAALLRGDVSKMAEVRNGMVAAFEAFLSQNRIKAFPEVLVTPDYNTGISHFLQANSIGPIKPNLAIFGWPRDLSGAAPFMDSIKIAAKLNMSVGLIHGRELPDPNPRNRRNRRIDIWWRGMRNGSLMVILAHLMSLNSEWTSAKIRILR

SEQ ID NO: 95750 - protein, 67 aa, Unknown
  Obtained from environmental sample
  misc_feature (1)..(67): Xaa is any amino acid
MKINSGFTTKYLSVIAATLLFFIAFVTGSVLYRGFFSLQTFLNLFIDKSFLLVSAIGMSLVILPGGI

SEQ ID NO: 95751 - protein, 93 aa, Unknown
  Obtained from environmental sample
  misc_feature (1)..(93): Xaa is any amino acid
NSIITAADGSVSGYALRQQGGKKCAVAAFKTLNCKVFAAGDSFNDLAMIAEADSGCLFRAPEKIRKDNAHLFCADTYGELLERIDGFLTLTQP

SEQ ID NO: 95752 - protein, 268 aa, Unknown
  Obtained from environmental sample
  DOMAIN (68)...(257): Transposase DDE domain
  misc_feature (1)..(268): Xaa is any amino acid
MADDKTEYLIKDRLSFQRFLGLQLCDTVPDAKTIWHFREGLRTTRVLEAVFNRFVEKLEKQGIITRSGSIVDATFVDVPRQRNTKEENKEIKEGKTPEEWEKEENRHKKAQKDLDARWATKNKERHYGYKNHVKIDKKSKIITKYRTTSAEVHDSQELKDLIEKKKDKRLYGDSAYTGEKVQSCIPQRIQNRIHEKGYRNRPLTKTQERINRAKSKIRARVEHVFGAMTHYGGIFIRTIGLARAQTQVGLLNFTYNLARYAHIMGAKA

SEQ ID NO: 95753 - protein, 311 aa, Unknown
  Obtained from environmental sample
  misc_feature (1)..(311): Xaa is any amino acid
MKFKIKMSCMMIAIVAIAAGGIAVIELMQTSNISLRLSLRGLNYLAREQAQYWQGREESYIKQLTAIAEIMSEFETLPVHERRDQYDNMLRAILNNNPNFARIFSIWKPNAMDGMDSLSIGRPGSSPTGQYAMTWGRDTGPIEIKPNLVLDEINAWMNGPNALKTRVENPTPFKNNGKDTFIIRIGVPITRSTTSEVVGHLCVLIDIAPMQAVVEKTIKSHEEISGMTIYSGNGFIMGHTVPERVGKMLIDVDTIYGKYIQDADRAVREGKEFQCSSFSPVLNGVMRITMIPFQIGDSDMKWTIMMATSEK

SEQ ID NO: 95754 - protein, 561 aa, Unknown
  Obtained from environmental sample
  DOMAIN (314)...(491): Peptidase M16 inactive domain
  misc_feature (1)..(561): Xaa is any amino acid
MLRYGFTDSEIATAAEILVSDLQKMVQEKDRQHSQKYVNSLTDYYLKGGNYADIEWELNAVKRMLPHIKAKDINAVIKDYFASDDIQVFIFAPDSEQDSLPDEARIKQMIMESIKMNIAAPKSKAVEGGLLLSSPERGAIVSESTDADTGAIIWELSNGARVILKSTKNKNDEIIVHAMALGGTSSVPLEDDVSASLAIEMTQVSGLGPWSRPDLTLKLAGKQVSLSQFIYSYYRGFRGSSNTVDLKTFFEMIYLGFTDQRIDNEAVEAMLDQYRTSLALRSEDPHSVFSYEINRTIYSGHPHFKPLELDDLPKADIDTALAFIRKGQNPADYKFIFTGNLDLKTMKEYVETYLASIPRGKTWNTLTDLNVTRPGKVENIVYKGKEEQSTVYMVWFSKTPYSDELSAACQVLNEYLEIKLDDEIREKLGGVYSISSGVSVSPVPQGELSMQVYFSCDPKRARELQTAVIAVLNQAAGSIDRDTFAKAVEALKKEWEVSIQSNSYIAQSYANSSVLLGLPLSRLDRRPKLFDAVTHADIQRVCGQLLRSNGPAIVVLMPEKN

SEQ ID NO: 95755 - protein, 371 aa, Unknown
  Obtained from environmental sample
  misc_feature (1)..(371): Xaa is any amino acid
MISNRKNYRNAFAAASLLLMLTMTAAASTSITASVSADSAMVGDELLLDVVITGVPKGAKIIPPDTDKGFGDFSVLSWEDLAAQSANANSKTKGKDKERDSSRYQYRYGIAAYKPENCTIPSIRFLVNTVDGGGVDAVSSDNSGINVDSGVGFSVGYAVNNTSYDTLSTQPIPIRMLSAIPDDPPDSGGFALKDLKGQQSTGGADLWYLWIILGAALAVAAFILIRKYLNKKGAAADAPIVPLLPPYDEAMGAIDALDGKKYLERGMVREYVFELSEIFKRYIGRRYDTIAPELTTEEITAWLEFADISREMRMCAERFFRSSDQVKFAKWVPDRSCIDGYMKDVMMFIEATKPDPALPYERKTERMGVVQ

SEQ ID NO: 95756 - protein, 291 aa, Unknown
  Obtained from environmental sample
  DOMAIN (1)...(291): Periplasmic solute binding protein family
  misc_feature (1)..(291): Xaa is any amino acid
NAITRNADGKLNVTATNFPPYDFVRQITKDRVNLNLLLPPGAESHSFEPSPKDIITVQNSAVFIYVGGESDTWIDRILETMDTSKMIIIKMLDTVDAVEEEIVEGMEAEDEEGEEIAYDEHIWTSPQNAILIVKAINTALCEADPANADFYRKNTAAYIEDLAQLDAAFKGVIAGAKRKTIIFADRFPFRYFADAYGLKYFAAFPGCSTETEPSVATVAFLIDKVKAEKIPVVFHIELSNERMANTICGETGAKKLLFHACHNISKKDFDARLGYLDLMSVNVENLKEALR

SEQ ID NO: 95757 - protein, 160 aa, Unknown
  Obtained from environmental sample
  DOMAIN (10)...(160): ABC 3 transport family
  misc_feature (1)..(160): Xaa is any amino acid
MFNIFSEMFSYAFLVRAFIVGALVSICAALLGVSLVLKRYSMIGDGLSHVGFGSLAVATALNAAPLSVAIPIVIAAAFLLLRLSENSKIKGDAAIALISTGSLAVGVVIISQTTGMNTDVCNYLFGSILAMAKADVYLSIALSIVVLILFILFYNKLFVI

SEQ ID NO: 95758 - protein, 297 aa, Unknown
  Obtained from environmental sample
  DOMAIN (1)...(291): Protein of unknown function (DUF1703)
  misc_feature (1)..(297): Xaa is any amino acid
MKKLPVGKQIFEQVIKGGYQYVDKTGMIYELVTRGIDQIFLSRPRRFGKTFMCWTLDALFSGKRELFEGLAISKTDWAWESYPVVHLDMSKVETDRGTDGVIESLAWQTKKFAEEYDINLDGLTLPGIMLANIIIDTSKKHNKPVVVIVDEYDKPFLDFYNKPPMAQEVRDVMRSYYSQLKGNEPYIKFLFMTGISKFTKAGVFSTLNNLYDLSLDEKFGTLLGYTEKELVDYFGQYIEIGAKKLNMSANGLVDKLRDYYTDFVSTESIEYTARFLYLISLKGINSLIFGWTAETLR

SEQ ID NO: 95759 - protein, 133 aa, Unknown
  Obtained from environmental sample
  misc_feature (1)..(133): Xaa is any amino acid
VFALPENFGRNVRATGPYFLVGIALSALFQRFVPQEAFAKLFIGNRGFGVLMAAAIGVPLYVCGGGTIPLLRAWMDHGMTLGSASAFMITGQAMKITNLGAVKIVLGMKHFLLFLLYTALFAFISGVAIDLLF

SEQ ID NO: 95760 - protein, 233 aa, Unknown
  Obtained from environmental sample
  DOMAIN (10)...(233): ABC 3 transport family
  misc_feature (1)..(233): Xaa is any amino acid
MIAVLIKMFSYSFLIKAFTVGALVSICAALLGVSLVLKRYSMIGDGLSHVGFGSLAVATALHAAPLTVAIPIVVAAAFLLLRLSENSKIKGDAAIALISTGSLAVGVIIISQTTGMNTDVCNYLFGTILAMAKEDVYLSIALSVTVLILFILFYNKLFAITFDETFAKAAGIKTGLYNMLIALLTALTIVLGMRIMGAMLISSLIIFPALSSMRLFKKFKSVTICSSVISILC

SEQ ID NO: 95761 - protein, 310 aa, Unknown
  Obtained from environmental sample
  DOMAIN (67)...(246): Integrase core domain
  misc_feature (1)..(310): Xaa is any amino acid
MREHMGFLERPFRITEKDRELLLSVSPSTIDRVLKQEKKKLALKGKSGTKPGKLLKKQIPVRTYYADADKKPGFFEIDTVHHCGTSDSGEFCLTLTATDVYSGWVELRPTLNKAHKWVFQALLDIKSSLPFPLTGIDSDNGAEFINSALLKWCQDEHIQFTRARAYRKNDNCFVEQKNFTCVMNFVGYYRFCAAAERDALADVYRSLCPLLYFFMPTVKLISKTRVGTKIKKAYDKNIISPYQRLMASPDLSEEAKAELIRRFALYDPVKLQWEFRKAVDALVPHNKAVNLEGGKALRQLVGDISALHAV

SEQ ID NO: 95762 - protein, 262 aa, Unknown
  Obtained from environmental sample
  DOMAIN (1)...(262): Citrate lyase, alpha subunit (CitF)
  misc_feature (1)..(262): Xaa is any amino acid
MDVPVVFRSHGGRAYAIESGALPIDVAFLGVPSCDPSGNANGYSRDGDNRIRCGSLGYAKCDAQYARKTVIITNNVVDYPNVPFGIPESDVDYIVKVDEIGDPEGIMKGATRFTTNPKELVIAETAAEVIEASGRFADGFSFQTGTGGASLAVTRFLRDKMKAKGITASFALGGITGSIVELHEEGLIKKLLDVQSFDLVAADSLKNNRFHHQISAEYYASPKGEGAAVNQLDVVVLSALETDVDFNINVLTGNDGIIRGAI

SEQ ID NO: 95763 - protein, 166 aa, Unknown
  Obtained from environmental sample
  DOMAIN (6)...(166): HpcH/HpaI aldolase/citrate lyase family
  misc_feature (1)..(166): Xaa is any amino acid
MKQLRRTMLYVPGNNPAMIQDAGIYNADCIMFDLEDSVSINEKDSARFLVFQALNTISYPGKELVVRINDPRTELGLDDLHAIVSIGKAVIRLPKTESADDVRYCEGIIEAIERRTDLKMGSTRMMVAVENAAGVLNAEEIAFASKRLIGIALGAEDYVYGLKNKP

SEQ ID NO: 95764 - protein, 48 aa, Unknown
  Obtained from environmental sample
  misc_feature (1)..(48): Xaa is any amino acid
TNKIAKPLNITTVLVERESLRNTILDSGGDDQVVMDKTANAFRATPTV

SEQ ID NO: 95765 - protein, 259 aa, Unknown
  Obtained from environmental sample
  misc_feature (1)..(259): Xaa is any amino acid
VDAEAAGKQGGGTGDFGQYFRPRNRGPFKKNDIKPWLEKEWCIATPSAEYVQRMEDVLEVYKRPYDEKRPVVCIDETNRQLIGEIRTPRPVQPGQTALYDYEYERNGVANLFMMFEPLTGQREVMVTERRTMQDFARCLRYLAEERYADAEKIIVVMDNLNTHSLASLYTAFEPQEAFRLAQRFEIHYTPKHGSWLNMAELEIGVMSRQCLKRRIPTMEKMASEVQSWVTERNNLKTTVHWQFTTADARIKLMHLYPKF

SEQ ID NO: 95766 - protein, 425 aa, Unknown
  Obtained from environmental sample
  DOMAIN (91)...(173): PKD domain
  misc_feature (1)..(425): Xaa is any amino acid
MIEQIVGPRRIYAGEEFTLKCGTSGRAAVTKYVWRFDGAGDLLISKTDVPQVTTVIEKTGEFLVTCEIMGDKGTLAAQTVKIGVVLGGVSVSAGGPYKTTINKPVSMLGEAKSRKGQITRYEWHISNSGKPDYVMTENAAVSHTFTKSGDHKAIFTVRLADGSAASDTATVSVTSLRPTANAGADVVPKSDGKVWLIGMGSSPNGKIVKYEWDFDGDGVFDWSSESSGEVERVFKTYASPIFRVTDTEGNTAVDTMRVIICPKDMAAVGNGKFCVDKYEWPNQQGATPLTNVSWHEAAKACESVGKRLCAPDEWKRACRNGSKYKSLDGNSYPYGDEYVNTKCNTLGNPKSKNALMPAGSFNECVGALGVYDMSGNAAEWTSSTSAKAQALGGFYQSGAEESDCESGVALDKDKKYLYTGFRCCK

SEQ ID NO: 95767 - protein, 121 aa, Unknown
  Obtained from environmental sample
  misc_feature (1)..(121): Xaa is any amino acid
MKDILLAVINAKWIHPSLALRLLKANLGQLEDRCEIIEFALRQPLCEKTAPIIAAKPRILGLSVSIWNHLATLELLKKLREAWADEADKHVIILGGPEVSYLPQDSEIFQFADYCIRGEGE

SEQ ID NO: 95768 - protein, 199 aa, Unknown
  Obtained from environmental sample
  misc_feature (1)..(199): Xaa is any amino acid
MKRVFWSIVLFTGICAMLFTQNTGAGSGEKTYKIGDTGPAGGIIFYDKGHHAKEHAGDPVAWRYLEMAPAETEFGAPWGGYGVNIGGTSTAIGSGRGNTEIILEQLLILGETGFAAQLCDKLVYKGFTDWFLPSKDELDLIYKNLRQKNLARFGAKKSYWSSSQATDECAWYQRFDDGIQFNYGNYKYNQFDVRAIRAF

SEQ ID NO: 95769 - protein, 177 aa, Unknown
  Obtained from environmental sample
  misc_feature (1)..(177): Xaa is any amino acid
LTEAFVTDALLSASKTTDVTVHEKAILPVTALVFSPALLESCKTNVCGNFNKSWVCPPACESIEEQKKKIFSYKKLLVFTTTYTLEDSFDYEGMEEGRELHTLLILELRKILNVPVYGAGNCPTCKPCSFPSPCLSPEKRIDSVEAAGIDVTSLSKAANINYNNGQNTVTFFSIALF

SEQ ID NO: 95770 - protein, 80 aa, Unknown
  Obtained from environmental sample
  misc_feature (1)..(80): Xaa is any amino acid
TRLPGFGGGSFEDLTRIAMLNAPMWTELFIENNDVLLERIDQFEKSLDLLKTLIKGGQADELMKRLTVVRERRIEMSKKD

SEQ ID NO: 95771 - protein, 655 aa, Unknown
  Obtained from environmental sample
  DOMAIN (174)...(207): Tetratricopeptide repeat
  misc_feature (1)..(655): Xaa is any amino acid
KGSDNAAAKLVGEEAFKAKNWSEAVKYLAMVKGEERNPAFLEMVGKAAFENRDNSRAVDVYKTLSAMNPQNAEYVKMLYDIAGKMGARDDAVTHLRKYVSIKPQDAEMQKTLGDLLYERKDKPGALAAYKAALAVDPRIKGFYKRYVELMDGSGTPPEKIAAMEGAIAAGETDAQMLIKLGNIYREQKQPAKAVPLFEKAVKDNRNDVQLLAALAQSQEAAGMTSEAITTYEQYVLMDPKASKEHKTLGDLYSKQKKPAEASRAYKKYLERNPTDNSVALMVAKEAYNTKQYSDAVRYFAMVQGEESKKPEFIKMYGTAAFQANDNARALTVLKEIGTPLNKDPEVFKMLEEVSRRTGANDMAVNYLKQYAALRPQDIESNRKLGDALFDRKDEAGALTAYRAVLKADPNAKGFLKRYVGLVMKAGNEAEKMAAFAAAINANEADVGVYAQLGALHKSKGEFAKAASMYEQASKLDPRNADYLGELADCQLKSGNLGGASQNLQQAIMLNPKAVNEYKTLGDLYMQQNRKDQAVDAYKKFLDKASDSRVAQIVGDYSFEKKQYADAFKYLSMVKDNTSTDYYYALGRSAQESNNPKAAIDALEKFRIVSRGSKTPVPNRSDVIRALALAYEKEGDDNRAAAAIDEYLKGPPPVKD

SEQ ID NO: 95772 - protein, 769 aa, Unknown
  Obtained from environmental sample
  DOMAIN (90)...(233): GAF domain
  misc_feature (1)..(769): Xaa is any amino acid
IEMMRRALNGEKLVSEWTNCTSKGELIPFEITLVRVMYQGKFVVMGYQYDLRKTNAMSESIRQQGELLKIRLEQQELISELSRGFISSGDSEMLVREAIAKLGRYHNVSLVFVFSIDYERKATGLAYHWCADEDTPRTAISNLFVYLTSIFPEHLPDGDTLPIVVCNNTAENSEPVFQALHSIDVMAVIGAPLYVEGRLWGVVCVEQNYTPRHWTEREQEFVSVTASTIAGMIMRDIYTIKLKEALHKATEASKAKGEFLSNMSHEMRTPLNAITGMTAIGKNATDMERKDYALGKIQDASTHLLGLINDILDMSKIEANMLKLSAVEFSFEKILKRVVEMVNFRVDEKYQKFTVRIDKAIPGTLFGDDQRLVQVIINLLGNAIKFTPENGSISLDTRFLGEDGGVCTIEISVSDTGIGISPEQQKHLFQSFQQADGSTVRKFGGTGLGLAISKNIVEMMGGKIWIESEIGKGSTFIFTVRMKRGTEKKRALGAPGVNFSNIRILAVDDDHDILEYFEETAISLGLHCDTATSGDEALSLIEQRGAYHVCFVDWKMPGMDGIQLAHELKTRKASVNSFVIMISAAEWSVIEEDAKKAGVDRFMSKPLFQSTITEIIHEYIGTDGKPPETKSAEEAQTPSNNFAGRCVLLAEDVEINREIVLALLEPTELNIDCAESGAEAVRLFTQSPDKYDLIFMDVQMPGMDGYEATRLIRAMDVPRAKTVPIVAMTANVFQEDIEKCLQAGMNNHIGKPLDLDEVLDKLRKYLGEK

SEQ ID NO: 95773 - protein, 807 aa, Unknown
  Obtained from environmental sample
  DOMAIN (136)...(216): Cache domain
  misc_feature (1)..(807): Xaa is any amino acid
MILTITVSITIIFFYNLRHIVTNLTELNTKTNVARSQDMVLSFIKEHEEAIKQFSVGITHLFKQTNVSTESVADFLRDIKEIVPNSLDLYFTNNVMWNKPGGFASFAGGWIPDDDWDNTQRSWFTDAKKAQGKIAFSEPYVDSETGDVIITLSMAVFDSEGTDIGVSADDVAVNVMKDIINAMRDFPGQEMYIINSGGLFITHEDINAVMEKDFFEELSLEKYRASVLSPTDFFNIDKNIFIYSSAIPNTGWILVSTIPSSVIFNDINTLILRLIILCIAMLAVVVFILVFFVARKISSPIKAIHSALEKLKDGDLTVKVAVKSEDEIGELSGFFNTTLEKIKNLVGTIKYKVNGLNHTSFELSSNMNKTATAVQQISANLDNMENLMVKQENGAEEAGRAVGAIKTNIDSLNKMIEEQTESVNMSSSAIEEMTANIHSVTQTLAENSKNVGVLAEASENGKTGLQTVAQEIQGIARDSEGILEINSVMNNIAAQTNLLSMNAAIEAAHAGEAGRGFAVVADEIRKLAESSSRQSKTTATMLKKIKASIDNITKSSDDVLNRFGAIDSSVKTVSEHEQNILSAMREQETGGKQILESISRLRDITRSVKKGSDDMAESGKTLVKETDEFIKTSQRAVEGMNEILKGVNQINISVSHINDMSMENNRNFDALKQETGKFNDTIGDEKQTILVVDDDVIHLEMVEAVLQNKYDISTAKSGKEALGLFYQGLVPQLILLDLIMPGMDGWNTYTRIKAISGLYDTPIAFFTASNDPKDIQRAREMGAVDYIKKPYDKDDLLKRVGRITKKG

SEQ ID NO: 95774 - protein, 345 aa, Unknown
  Obtained from environmental sample
  DOMAIN (3)...(345): tRNA methyl transferase
  misc_feature (1)..(345): Xaa is any amino acid
MDKKALIAMSGGVDSSVAAYLLKQQGFDCTGITMKLFGNEDIGAGGEKRCCSLEDTTDARNVSYAMGIPYFVYNFTEDFKKQVINRFIESYQNGATPNPCIDCNRYIKFEKLLCRAKQLDMDCIATGHYARIEYDGESDRYLLKKAADETKDQSYVLYAMTQEQLSYTLFPLGELHKSEVRDIAKKQGFVNADKHDSQDICFVRDGNDYADFIEQYTGKKYEEGDFIDMQGNILGKHKGLIRYTIGQRKGLGLSLKRPMYVHFKDTKKNTVTLCEDDGLFSKSFDAADFNWIACEKINSPIRVKAKIRYNQTGQWATAAQTSPDTVHIEFDEPQRAIAKGQAAVL

SEQ ID NO: 95775 - protein, 265 aa, Unknown
  Obtained from environmental sample
  DOMAIN (35)...(232): haloacid dehalogenase-like hydrolase
  misc_feature (1)..(265): Xaa is any amino acid
VTEIPSNVEWINLQTESRSDDAQSETVCKKMLRNIKGVIFDFDGTLFDSAGIAFYLIAAYLPDIFLVRRERLIRNRFSGRDYLITEKYFESFFKEMSGCFGKQSGKMRAWYFTRYMPRMVKVLKKHFKPRPGLKELIKLMDTPESPIKSAIYSDYSFLKERMESLGLDTSGFIRLYGPESFGAQKPAVRPFLQIAKDLSLKPEEILVIGDREGTDGLGAFRAGMHFFCLETGRKRYFKLDPNRRPPKEKPQGPSLLMYAGSWDGI

SEQ ID NO: 95776 - protein, 248 aa, Unknown
  Obtained from environmental sample
  DOMAIN (1)...(247): Protein of unknown function DUF114
  misc_feature (1)..(248): Xaa is any amino acid
MGMMPPVDETIKNLLISKLEALEKYLNGDVIWYFGHILEEYESDFFKIMEQLAQDENKKDTLYIVLTTPGGSAIAVERFVNIVRHHYNEVNFVIPNQAYSAGTIFCMSGDKIMMDYRSVLGPIDPQVLNKAKDKLVPALGYLDKIYDLIEKSRAGTITKAEFLILKDFDLAELREYEQAKELTIDQLKKWLVKYKFKNWNKHKNGKEVTDQEKIKRAEEIAEKLSNSNIWKSHSRPINIETLEKELKV

SEQ ID NO: 95777 - protein, 71 aa, Unknown
  Obtained from environmental sample
  misc_feature (1)..(71): Xaa is any amino acid
MTAANPGVPVFFFDEARFGLRPAFGRRWAQRGERPVAVVRTGYLNFYAYSAVCPETGEDFTLRLPRVRTDV

SEQ ID NO: 95778 - protein, 96 aa, Unknown
  Obtained from environmental sample
  misc_feature (1)..(96): Xaa is any amino acid
KERRDVLRQSLYGDDLPVPCLFNCGCAIGKKGLDAIELSSEDIALVYWFTRGQSRGFVKRGNYETEKLAGTGYRRAVLNRERLDYILARIKLLGAQ

SEQ ID NO: 95779 - protein, 375 aa, Unknown
  Obtained from environmental sample
  DOMAIN (1)...(172): ATP-dependent protease La (LON) domain
  misc_feature (1)..(375): Xaa is any amino acid
MIGNPIDVKVVDDAVTGDALVGLVMLHNETETPSVSDLYKIGTVAKIIKKINLPDGGLNIFISTLKRFRIKKALHASNPIVAAVEYLDEEEDDTSEVKALTRALISEMKQISENNPLFSEEMRLNMINIDHPGKIADFIASILNIDKAEMQKILEILNVRKRMEQVLVFIKKEQELLRIQKKIQKEINEKIEKSQRDYFLKEELKAIKGELGMTTDAKSSDYQRFKDIIEGFKFEGEVKEAVEQELEKFNLMEPNSPEFVVTRNYLDLIVSLPWKDPEPENFSMKNAREILEADHYGLEDVKNRITEYLAVRKLRTYNAESAQPVPVEAAPVQPAATSSTPEAGTELANEVGAGTGNKEQGTANKEPTAEKKPPR

SEQ ID NO: 95780 - protein, 516 aa, Unknown
  Obtained from environmental sample
  DOMAIN (205)...(421): 7TM diverse intracellular signalling
  misc_feature (1)..(516): Xaa is any amino acid
MLIVVFYAWNEQNKNKNGANSPLYRNLRECPSFARWGFDPADLLKVPDEAAGVWKRFEGSSRRINDSRLMNIPKRRYLSPWGEDAEEFTIIFLLEMDSAAMAFLDGRITSVVPGIFFAGIGENWEVYFNGILILSQMHLDETGRIRERRTWRDVYFPFDGAFVHPGTNILALRILGDPTYRGTGPFYTSAPMYMEDYRIIEGGRNDFLRIFLCGFFAFTGIYYLMLFFSVNKKKTEVFNLYFGIFSILLCVYNISILWVINSLIPNTDISIRMEYGSMMLSIPVFGMFFEALGRGKTTRVSQGYLACSFLLCLTQILFCAQYGEEVIRIWDIITMVYVTYLLVYEVIYFHLWGRQKGKFFGSDTGDAQSLPIGNILIGMVICYVCGLFDILIILFFGDSASLFPYSVFVVYVGMVFTLSQRFSGMYKQLEKSNAMLELAVQERTLELEKQTEIAVQANLAKSHFLATMSHEIRTPLNAVIGLSEIELLTDLPVSSRESIVQIHQSGSSLLGIINDI

SEQ ID NO: 95781 - protein, 511 aa, Unknown
  Obtained from environmental sample
  DOMAIN (152)...(346): FtsK/SpoIIIE family
  misc_feature (1)..(511): Xaa is any amino acid
ETEADEDVEIALAEAEAQAAEEEAARHGAKKSRRITKRRGQPYYVPVEKILKQYPDGEYWIIDEETRNAAVTLKETFKEFNIQVEVTGIRKGPVITMFEILPAPGIRLARIESLADNIALRLAAQSVRIVAPIPGKHAVGIEVPNAKRNIVSFREIIEGELSKDGKKAEVPIVLGKDITGEAVTVDLVQMPHLLIAGATGAGKSVCVNSMILTLLYQKSPAECRLILIDPKIVELKLYNDIPHLLTPVITEPKKAFQALQYCIYEMERRYSCLDSMGVRDIRNYNKRIKEKNIAQEHMPYIVVVIDEFADLMATTGKELEATLARLAAMSRAVGIHLVLATQRPSIDVITGLIKANIPSRIAFMVANKIDSRIIIDAVGAEKLLGKGDMLYAGITDPFPIRMQGAFVSEEEVEAVVTHVKTFGGPDYIDDEIFFDEEEEEAEPSLFSGADDPLYEKALEIVLQQGKASASYIQRRLKIGYNRSARLVEEMEHRGVVGPAQGSKPRELLRGV

SEQ ID NO: 95782 - protein, 393 aa, Unknown
  Obtained from environmental sample
  DOMAIN (72)...(312): Iron only hydrogenase large subunit, C-terminal domain
  misc_feature (1)..(393): Xaa is any amino acid
MALTPLAPVIRIDEEKCINCYACIVICPVKYCMDGSGDKLQINHDICIGCGNCINACTHKARTLIDDTGRFMDDLKQNKKIIAVAAPAVVSFFPDKFLNLNGWLKSLGVEAFFDVSLGAELTIISYLDYIKDKNPRTVISQPCPAIVTFIEMYHPELLPALAPADSPILHTIKLAKEYYPQYKNHKVAVISPCIAKRREYDETGLGDYNVTMISLKNLLDEQKINLSSFPKVEYTGITAERAAGFPIPGGLLDTAERFVPGIRRDTLKIEGVHSIYPYLKEMQELLDANVKLPLLVDCLNCEKGCIGGPGTGNAEKPLAVLEDPVRKRMEELERKQGSQTGKNAYKKYHNLLNKYWKKKLYDRSYRDLSGNNMIKQPNDAAITEIFHSMKKYE

SEQ ID NO: 95783 - protein, 77 aa, Unknown
  Obtained from environmental sample
  DOMAIN (1)...(76): Nucleotidyltransferase domain
  misc_feature (1)..(77): Xaa is any amino acid
LPNTRVWVYGSRVNGNSNENSDLDLVVFSSDKQRADLAELRENLEESSLPFRVDLFVWELIPENFKSNIVKTYVEFL

SEQ ID NO: 95784 - protein, 68 aa, Unknown
  Obtained from environmental sample
  DOMAIN (3)...(67): ThiS family
  misc_feature (1)..(68): Xaa is any amino acid
MKLVVAGSPKEYADDLTVAQLVELEKVETPMYVTVSLNETFVESRDFAKTTLHDGDNVEFLYFMGGGW

SEQ ID NO: 95785 - protein, 346 aa, Unknown
  Obtained from environmental sample
  misc_feature (1)..(346): Xaa is any amino acid
AYRGKFIAPLKAKISSQTQGTGGSVSADNAGGSGGGGNTGGNTGGNTGGNAGRTGNADGSGGGGNSGGNAGRTGNAGGTGGGSSRNATTIRVTPVSAGTIEKSVIINGEILARNQVIIYPTVGGKLVETRLGIGDRVASGQIVAMVDPSRPGEVYSRSPVISTVSGTVLQAPFSIGDTLTTQSAVYTVGDLSSLLVETFVPERFVSSVRQGMRAQLRLEAISGETFNAEVIEINPVIDPASRTLKIRLRFLTPDSRIKAGMFATISLVTSRKVNVPVVQRTSVINTYGSWIVFTVDENNIARRREVTLGIDNEDFFEILSGLSLGENVVSAGQNFLSDGDLVRVVE

SEQ ID NO: 95786 - protein, 71 aa, Unknown
  Obtained from environmental sample
  misc_feature (1)..(71): Xaa is any amino acid
MTISEYSVKRPVTVVILFALCIGIAFTMLVNLALDLYPSIERPVLSVFTRFPGAGPEDVERNVTERLERSL

SEQ ID NO: 95787 - protein, 326 aa, Unknown
  Obtained from environmental sample
  DOMAIN (149)...(313): Transposase DDE domain
  misc_feature (1)..(326): Xaa is any amino acid
MIAMNKIAIGEGLEDMQEFRQDTTVIETDIHYPTNNSLVWDCIKECERLLKHLKEEIETLEYEKYQRKAKKIYFKINVEKDEEKRTKLFKKQLEMFTSCIKQASSVVKKKSEYGATAKAESIITAMEGLIPVMEKVFRMTERREIMKEKVPVEEKIFSIYERHTDIIMKGQREAQFGHKVNLGSGRSNLILTCQIVEGNPKDSELYEGTIKKLKKDYGKTPQSSVADGGYASKANIEYSQNAGIINIVFNKIRGSMQNIANSKWVENKLKRWRSGIEAIISNLKRGFQIRRCTWKGLAHYGQKVFWGVIGYNLRVMTGTILQTMTL

SEQ ID NO: 95788 - protein, 588 aa, Unknown
  Obtained from environmental sample
  DOMAIN (452)...(487): UvrB/uvrC motif
  misc_feature (1)..(588): Xaa is any amino acid
VFKGLTNRVQRLLSINAQEEAKRYNSDQLLPEHIIVAMLKEGGGTACKALMFLRIDIPEFRHILEGSIPRIPGLIVKGEVPPSKRTKNMLDTATEEARAMGSDFLGTEHLLFAAMKEQDSSVQVYLNQRAVDTDMMRVIIQTTFNQPSSASDDYVPVERFQPYYVNKERTAVHHRASAGTERQPRVKPVPFPVLTPVLDTFSRDLTALARAGKIDPVVGRKAEINRAVRILARRTKNNPILVGEPGVGKTAIVEGLAQLFVSEAVPDALCGKRILCLDMGLVVAGTKYRGEFEERIKKILREVSQAGNIILFIDEIHSIIGAGGAEGTLDAANMLKPGLSRGEIRCIGATTLAEYRKHFEKDAALERRFQSVIVEEPSFDDTVNILFGIQKKYEEHHQVRYAQEAIPLAAKLAQRYITDKFMPDKAIDIIDEAAAFRKLENREQPPEINGIEDEIAKLCEEKTAYVSAQDYEHAAELRDRVRVLKARLEEVHSSWERASRNEWPLVTENDVRKIVTDATGIPIMHLEEQESQRLLYIEDELHKNVMGQDDAIRRVADAIRRSMTGVSSPKRPMGSFIFLGPTGVGKTL

SEQ ID NO: 95789 - protein, 159 aa, Unknown
  Obtained from environmental sample
  DOMAIN (1)...(158): Uncharacterized protein family UPF0007
  misc_feature (1)..(159): Xaa is any amino acid
LGLSVPKAFVDLCGKPIVYYSLITFVNHPSVDRTILVVPPVMMDEALSVINTYGDLADKVQIAAGGAERWESVRNGCAVAKGEWVLVHDAARPFVSDMVIDSVLEKRNDFDCVITATPVADTIRTIGEGGRCGATVDRSTLMRVGTPQLFRRERLMPAF

SEQ ID NO: 95790 - protein, 356 aa, Unknown
  Obtained from environmental sample
  misc_feature (1)..(356): Xaa is any amino acid
VNNIEPELVSNNGEKLVFTVKFPATAALVTAEALTGVISPVATATPSTTINAGTGFTAVLSWNDEPAEFGYSTAYTATITLTAKDNYTFSGGFTQTSEITGFKVNTIEPVFVSNGGTTLVFTVTFPKTEDDPGSGGQDQLVTAAELTGVISPVAAATPSTAIDNGTGFTAALSWNEDLEKFGYSTEYTATITLTAADKYTFSGGFTETSEITGFKVNNIAPVWVSNGGTTLVFTVTFPETGPDPGDGGSPELDLDELPTDDLDWGNVFLVDLSGVSKKDVTIKNKGNGAFTALSVTIDNSDNFDLNMPNFSATLGVGSEFIASVKPKAGLTVGEYETTLFIKENTTVLGSVKFKIA

SEQ ID NO: 95791 - protein, 64 aa, Unknown
  Obtained from environmental sample
  misc_feature (1)..(64): Xaa is any amino acid
LPILKKEYVVKRIVKAVMKDKKRLIMPRFVYTVFLLRILPVTVMDAIANFLGISHAMDDFKGRA

SEQ ID NO: 95792 - protein, 362 aa, Unknown
  Obtained from environmental sample
  DOMAIN (1)...(360): Glycosyl hydrolases family 38 C-terminal domain
  misc_feature (1)..(362): Xaa is any amino acid
FPVQRYINLDGKEIAVCCPRLPPLGWITLRAAEFSASSCFTFRGNSLKTPFYEVGFDVAGRITSLFDIMGDRELVAPGGVLNGFVSAQDVPVLWEAWDIEADWTRYLTEETRLLSTEIAASGPVCFRIRRKYKIGEASILSQDTVFYTENPRIDFETLVDWREKQRLLKTQFDTAINTAQIRCEVQFGHLSRNTHKNLPQDRARFEFCAHKWVSLEEEGGGIALLNDCKYGHDAEGGRVRLTLLRSPTAPDPDADTGEHRFTYALLPFAGTFGESALVRSGYELNDPAHVEPTFGSLLTSDSQADEYSLFRTEGKSVIIETLKAPETSAADGSEKRLVIRLYESLGGPAKTVLHFNKALLSA

SEQ ID NO: 95793 - protein, 165 aa, Unknown
  Obtained from environmental sample
  DOMAIN (86)...(120): Gram-negative bacterial tonB protein
  misc_feature (1)..(165): Xaa is any amino acid
GTVVQEIPENARVMKLTDLAELPPPPPEEPDIPQVEEIAEVMIETDIPPVQTIVPAGTLTVTFEDYLQMHQVSTRPIFDEEALTSALVYPPIALRSGIEGRVVLELFVDRAGFVQKITILREEPEGKGFGEAAVKAFTGRKGTPAYANDEAVSCRYRYPVVFRIK

SEQ ID NO: 95794 - protein, 127 aa, Unknown
  Obtained from environmental sample
  misc_feature (1)..(127): Xaa is any amino acid
MKVLYVAELVGKAGVYTFKNALKELKTRYPWNIMIVCANGATGGNGLGRTHAAYIHKLGANVITLGDCCFYKKDLTENLDKCHYVLRPENLSEDAPGYRNKNVQCGKRKSRRRGFYRSERIWPRSRE

SEQ ID NO: 95795 - protein, 78 aa, Unknown
  Obtained from environmental sample
  DOMAIN (6)...(73): Phosphopantetheine attachment site
  misc_feature (1)..(78): Xaa is any amino acid
MDELFEKMKKLIATKLEVDEAKITMDASFRQDLGADSLDTYELVYAIEEEMGISIPDEKANEFATVKDAYEYIKSQQK

SEQ ID NO: 95796 - protein, 343 aa, Unknown
  Obtained from environmental sample
  misc_feature (1)..(343): Xaa is any amino acid
VFQCSDDAFAELAVAHPDLAFVSPSFVKLPFGPVQVGVEPPKASPLKMLAECDVSRAQRETLLEKLEALEEEKKSLSLKVSEAQSRLTDMQDDSAGAKRSMEDAKGLLASIQRQIKETEEAQARADEQWDLFEAEIAQLKSKARGMDEGHPEEAQQALDAEIRGLEDQQAEAQVHLEERRGILMGAATARQSAWSERDSAERNLQHLQRAAFDMEAEKKRLAAEQEEAEERRTAAVGRISEIEQETQRLLDDRLGVSNVLTGAQPEMERAAESLRVQERMGRELQESLENARQLREEVKLQTMQVRGSMEAVAKEVELALGMSVPEFMASIKAEEKAAWEQGE

SEQ ID NO: 95797 - protein, 276 aa, Unknown
  Obtained from environmental sample
  DOMAIN (166)...(242): Toprim domain
  misc_feature (1)..(276): Xaa is any amino acid
EEGGEREEQDNSQKEELYELYRRTTLTFTHFLLEKPEGRNALNYIKSRGFSQEMIERFKLGFSSPDRDFLHKFLISKGYSDSFLEKSGLFSSRYKNLPLFTGRLMFPIADRQGRVVAFGGRAMPGVMQSDGKEPPKYINSPETEIYKKGQTLYALDLALPEIRQTKTVYIAEGYMDVIAMHQAGITNAVAPLGTAFTEEQAALLRRWADKIVLVFDTDEAGEKAAYKAIITSHKNALFCALASMRQGLKNEVPEADTEKFKDPADIYKNSALRYEK

SEQ ID NO: 95798 - protein, 502 aa, Unknown
  Obtained from environmental sample
  DOMAIN (44)...(211): Radical SAM superfamily
  misc_feature (1)..(502): Xaa is any amino acid
IASHPNVWVMGKKKAQRAISINFPQSASVFPIPSMKITHHHGTVEIMRGCPNGCRFCHAGYWYRPYRQKDEELITSQVNEMVTKGGWQEISLSSLSSGDYSGITELVQNLNGRFSGLHVSFQLPSLKVSGFSLSILEQIAVTRKSGLTFAVETPKEAWQMSINKEVTRDSVVSIIQEARKNGWKGAKFYFMIGLPVPIFDQNEEEEIVSFIADIGRRTRMHFNINVGVFIPKPHTPYQWASQLDGERTIEKLNFIRSKLKPLGHKVSISDPLISQIEGLLSRGDERAGALCEQAWLAGSRLDPWSEYINKEEWRRILEENRSVVDSILSGKNNSLPWGNIDSLVTTEYLKREFEKSENSIVTSSCKENCNNCGLASVITECPPNKTESHISKSVSFVNHKNIEVNDSSQHKPDPSIYRVLFSFSKKESAVFHGHLSLIEIFSMSFRRANIPVMYTQGYNPLAKMEFASPLSLGVSADCEIASVDFPEKISTESFYYGTKQQF

SEQ ID NO: 95799 - protein, 119 aa, Unknown
  Obtained from environmental sample
  misc_feature (1)..(119): Xaa is any amino acid
VACPSGWHLPSRQEWGDLAVAAGGTGNYGSSGTAGTALKSTSGWSSRNGTDDFGFSALPGGSRYTDGSFGNVGDNGYWWSATEYSSGYAYRRRMNYNYDNVNEDYGDVGYGFSLRCRED

SEQ ID NO: 95800 - protein, 74 aa, Unknown
  Obtained from environmental sample
  misc_feature (1)..(74): Xaa is any amino acid
MKDRANVSALPGGARITDGSFGDAGDGGYWWTATEGSRGGAYSWVMGYGNDYVREGIGDVGNGFSVRCVKNDVR

SEQ ID NO: 95801 - protein, 146 aa, Unknown
  Obtained from environmental sample
  misc_feature (1)..(146): Xaa is any amino acid
MGILGSIKEKILGKAAAEPAKTTVATTAAATAEMAGKMKAAAEAAKATAAAVSVVKEPAKPVDVEAIMEAAVKAKGIKLNWRVSIVDLMRALDLDSSLAARKELAKELKYNGNDPDGSAEKNMWLHKELMKTLAENGGKIPKELLQ

SEQ ID NO: 95802 - protein, 452 aa, Unknown
  Obtained from environmental sample
  misc_feature (1)..(452): Xaa is any amino acid
MKFRVFLFVFIFACVFTNAQENQGRVQGWGDGETAQKYVEWVKKAMDEGRWSEALAAAQRAADYSNVSSDISYQLAFVLSHEGKSRNDVIKALDRALEINRWVIYNENQALLFKANQLVATRKFTSALAVLEKAGESADAAVIRLLALRGMAFSLNRAEGYDPVLALSRFRSQVLAAMDRYSRDPRPLRIFFEYARNTRPVESELAQSDHNLLELAVKRLPFLLEADPELAWLAAPFMRDTEQAKRYVSTYRAGGIPSVFNRDFMPSPPSIAVALNMGLLDDERAVEELFSGARGINSAVPPGIAFDNNPVLDAGVMNEVFSLLRGDEGRDLFMQKLLSFSGTIISDDDNDGFFDSKALYRSGIVRDFAYDINQTNEFNWNVMFSSDGVPISAWIPAEGNKRAQVQWERYPSVKQITILNEIFFFRPADFQYAPVDLIIFAGSKKYAGSAYP

SEQ ID NO: 95803 - protein, 283 aa, Unknown
  Obtained from environmental sample
  DOMAIN (9)...(219): PP-loop family
  misc_feature (1)..(283): Xaa is any amino acid
LKDCPEGTVFLAAVSGGADSMAMLAALCALVPKDRIFCLHVEHGLRPARESQGDAEHVRIFCEKNGINCLIETVAPGKIEAFAKRQGTGIEAAARHFRRRLFFRHAARHDSENGVKTRVLIAHTKDDALELSLMRILRGAGPAGLAAMPVSRGRILRPMLGISRADVIKYLTEKKIPWREDSTNNDEKFLRNRVRVRLIPLLNESFPEWKNGLCALAATQSLVAEYFSKDAQKSIAWESAAGGLVTGEENFFSVSEIIREEAVFCGIDRLTAESEEISPNRDF

SEQ ID NO: 95804 - protein, 275 aa, Unknown
  Obtained from environmental sample
  DOMAIN (2)...(275): EPSP synthase (3-phosphoshikimate 1-carboxyvinyltransferase)
  misc_feature (1)..(275): Xaa is any amino acid
MEVSATVHTDGLKASELIAPYDLVKTMRASILVLGPLLARFGKASVSLPGGCAIGARPVNMHLDALERMGAQIRIDGGYVRAQVPSGRLKGIDYTLEKTSVGATENILMAACLADGTTTLRNAAMEPEIGDLARMLLAMGANVQGIGSQTLTISGVDSLAGCEHNVIPDRIEAGTFICALAAAGGEIVLERVALEDIRPIVDLMDLAGCSIESSGGDSGCVHGSLRVSRGPGQGLKARDVMTAPHPGFPTDLQAQVMAVMTQAEGISMIKETIFE

SEQ ID NO: 95805 - protein, 183 aa, Unknown
  Obtained from environmental sample
  misc_feature (1)..(183): Xaa is any amino acid
MLVLEEYPGGYLRMVSEANVQIGDKVKWLEQEGGSRLLVRRLDPDGASYDRYNPTAHWKVEMTESELLSTLRSRSAVRSVRSIELKHNEHGRVLEMIVKDGAGGNHRFTGMRIRGVLGLRDNVFRIITIGDAPNRKYIFYGRGWGHGVGMDQTAAYGMALEGYTFDQILKRYYQGITIQPIGN

SEQ ID NO: 95806 - protein, 87 aa, Unknown
  Obtained from environmental sample
  DOMAIN (33)...(86): Helix-turn-helix
  misc_feature (1)..(87): Xaa is any amino acid
MSFRKHLAEEMKNPEFKKLFEEEKRLLNLSYAIVEAREKKGLTQKELAQKSHVTQQQLSKIENGINCNMLTFIRVSNALGLGLTITA

SEQ ID NO: 95807 - protein, 176 aa, Unknown
  Obtained from environmental sample
  misc_feature (1)..(176): Xaa is any amino acid
MTFYQFMSKFPTEEAAINYFIKVAYGGILTCPHCGSKTRVYRYRQLQKLCNCKNCLNSFSPFTGTIFEKSTTDLRKWFFAMRLFLNDRKGVSSLNLHREIGVTQKTAWNILQKIRLVMEEKDMEPFDSVVEIDETYVGGKPKYTPPPKGIDFSLLDSSEGYSMIEYIEEYPSGSSK

SEQ ID NO: 95808 - protein, 389 aa, Unknown
  Obtained from environmental sample
  DOMAIN (16)...(369): Isocitrate/isopropylmalate dehydrogenase
  misc_feature (1)..(389): Xaa is any amino acid
MKEWNRRRNGIEMKFSVAVIPGDGIGPEVIAPTLDVLDAVGDKYGHIFNYVELEAGGIAIDHSGEPLPQETLEAAKQCDALLLGAVGGPKWDTLPGHLRPERALLGLRAGLGVFANLRPAALLPQLKSACPIKDEVLIASNSEGKAAFDLLIVRELTGGLYFGKRGRLDEPSNGHSPGSAFDTEAYSWMEIDRVLRAGYEAAAVRRKKLCVVDKANVLESSRLWREVAAEVSKDYPDIETSYLYVDNAAMQLIRAPGQFDVIVTSNLFGDILSDEASVLTGSIGMLASASLGEKVQAGTRPGMYEPIHGSAPDIAGKDIANPLATILSTAMMLRYSFGLEKEAVAIETAVNNVLDQGLRTGDIASRSAIRPLQPLRQAQGHQGAENNEE

SEQ ID NO: 95809 - protein, 285 aa, Unknown
  Obtained from environmental sample
  DOMAIN (1)...(152): YicC-like family, N-terminal region
  misc_feature (1)..(285): Xaa is any amino acid
MTGFAYCEKTGQDLSVTVEIKGYNNRYLEIIINLPPWLSVLEPKVREQVASRCGRGKVEVSIRMREQNTPVNISVNANAAKAYFNAINKLAEELNLEEKCNLSALLRMENVLEIEKNRDEERYWKEIEPLLSEAVQAFEKERNREGKHTEEDIFSNFEIIVSSVKSISALAPVIENTLKENIKTRFAELLGDKVDENRVLAETASLLLKYTISEEISRLNSHLSEFKAEAERNQKPGKKLDFLCQEINREINTIGSKSIIIEVSAEVVKMKEALENIREQLRNIE

SEQ ID NO: 95810 - protein, 340 aa, Unknown
  Obtained from environmental sample
  DOMAIN (45)...(149): Putative tRNA binding domain
  misc_feature (1)..(340): Xaa is any amino acid
MKISLNWLKRYLDIEVPIGEISSKLTSLGFEVEGVEEFGKIYSALLVAEVLECSPHPDSDHLSLTKVFDGKENLQIVCGAPNVKAGIKAVLAPIGVELPLPDGKTLKMKKTKIRGVESFGMLCAEDEIGLSQNHDGILLLPNDAPVGKPFADLGFYDTVFEINVTPNRPDALSHLGIARELAAAFDLPLKSQQQKPLDVAPATPMKLSVEAPTACPHYVGRVINGVKIAPSPEWMQKLLRAVGMNPINNVVDITNFVLMDIGQPLHSFDLGKLKGGEVKVRFAHDGEKFTTLDGKEHILQSTDLAICDGNSPACLAGVMGGLESEITDETKDVFLEAAFF

SEQ ID NO: 95811 - protein, 801 aa, Unknown
  Obtained from environmental sample
  DOMAIN (186)...(281): Glycosyltransferase 36 associated family
  misc_feature (1)..(801): Xaa is any amino acid
MKYGDFVDEAREYVITNPKTPVKWINYIGNLAFGGFVDHTGGALVCKGDPSLNRITKYIQQMPSSDFKGETLYIRIKTEGGYKVFSPFFVPTLDGYDSFECRVGLGYNKIVSVFYGVKTECTIFIPQDAQVEIRDIRVTNVSGSPLEIDVVPVLEYTHPDAVKQFTNADWVPQTMQSRCFTNSDGVRTLVQYPFMFRDIKINYFTSNAAASSFETDRRVFLGDNEYGTWAAPCALKADELGNNEVHRGDNIAALMHRLGTLKPDESRRIITQLGQKDSLATAQPEIERFRNPDEVDKAFNSLKEFWEKYLTALQVDTPDPAFNSMVNVHNPRQCFTTYYWSRYLSYYQLGMGTRGLGFRDSSQDVMGVVAHMPDKAKELIVKLLSVQKTDGSAMHQFNPMSMEATNGDAHEMPDRPQYYGDDHLWIALAVSTYIKETGDSAFLNESVPFYAGKGAKAESGSVYDHLVRALNFTKSNVGSHGLPLLGFADWNDCVNLPKGSESIFNTCLYSRALLEMVDLETFLGHNDKIETYAADHAVMKKNLNERAWDGEWYVSYYNADGTPLGSNKNSDGKIYLYTQAWPVLADLATEEHGRTALNSARKLLNTAKGLKLSTPGFNGYDPSKGGITTYPPGAKENGGIFLHTNPWVMIAEALMGDGDRAYEYYNQINPATKNDIIDEYECEPYVYPQNILGDEHPLFGLARNSWLSGTSSWTYQAASRYIMGLRPQMDGLLVDPCVPSGWKRFSVERNFRGSRYVIIVENPNGVCRGVKSISVDGKALDKPVVPVFTDGKKHENKVTMG

SEQ ID NO: 95812 - protein, 674 aa, Unknown
  Obtained from environmental sample
  DOMAIN (67)...(307): DEAD/DEAH box helicase
  misc_feature (1)..(674): Xaa is any amino acid
RKIRFSYQKLRVPPCPPWFKFLFFVIFIFLGEGNKISAAKIIDSEKIIASLCEGGSVAGLLPSYEPRKAQLDLLALITRAFNEDALVMAEAGTGVGKSFAYLLPAMHFALASKEKVVISTATITLQQQLFEKDIPLVASSMGDVKIKSVIMKGRGNYLCLRRLDDTLREGLLFDFDKEEIDNIVEWSQKTKTGAKSELTFMPSETLWTGVCSESDLCLGNHCPWRDKCFILALRKEANNAHIIVVNHHLLFADLAARYQGAGYESAVVLPPFNRLIIDEAHTIENAATSFFSQEFARTGIFRQLSRLYNTRRANMHGLLVRLCAILPSGEDKLDDMADVIQKIRSSAESLENCAFELCGIEGIFRLSPSVDESFLKKSLFPNFKALRKDILSLTNMIRDILENLNDEQMTDPIVWEIKTIVRRLEGAADICNVFCHYKKHEDQVLWIEKLRFKNNPWAVFTKTPLDLAPILKDSVFSPNKTVVCVSATLAINDDFTFWASRCGIGGINTRQLLSGCFPSPFPYSSAVLLASPQDAPLPEEEGYQDFVNKAVADLAAVAGGSALVLFTSYQSLTNSYNAALATLTPMGIRCLKQGDDDRTRLLQTFLSDESSCLFATDSFWEGVDAPGDTLRLVIICRLPFRTPGDPVHEARREAVEKRGGNPFLELSLPQAVMK

SEQ ID NO: 95813 - protein, 480 aa, Unknown
  Obtained from environmental sample
  misc_feature (1)..(480): Xaa is any amino acid
MDESLAVRDVIAGTADVYWQAVAPSILQTLSDADKAKLDFYSVPSGSWSLMVNPIPNKAPYTWTANGTTEFNPFAIREVRFALNFLIDRKKLVDEILFGAGEATFTAFTPGQPGTYRYNLLASKFGFTATGNERKAIADIDAAMTAASNLPENRGKLVKRGSFWQYNGKDVSIKFLIRVDDPNGRLPAGRYVADQIEKAGIKVERLEYDRSKASGLAYYSDPADYEWSMYTEGWGAGDTRAWWDVSNAQMYAPWFGYMAGGAEEEYWNYTNDRIDELTKKGYFGQYLTEDDYWKGNLEAAELGLYDAARIFLVTQYDNFIANKTRFNNRFAYGLGEGPNHWSVRTADVKPDADGQFKGQKVLRVVQYSARGSLFMNAWDPVGTEGFNDVYASGIMAACCDPSTFNAPNSAAPTPFSSKYDPASLKTAPQINEDGEMSGTIPVPANAVKWSPETNKWEAVGNGTTAAATGTGSIVPAKWQH

SEQ ID NO: 95814 - protein, 479 aa, Unknown
  Obtained from environmental sample
  misc_feature (1)..(479): Xaa is any amino acid
VRVQDNIAKPKTVTDVKLSVNILDSELISPIFHYQVTVEYIIKDLLSKHLIDNIDRIIEQIKDNRIDQGLEELSDSEIIFNKLGKIETVTDDEIDDPKAKRYNVLAKRVFEKIADLRAEIDPESYDALNIRENIKKIIDLENIRNRGFNTAINSLTAILDTSRMGYQYIENLKNGREVALREYEDTDIANLPDERYSIKLRYFDNAQLIEDRKAYDVMIKSFETEVQHLWDILEVIYQDKKSFFKINDFDDLAKRNKNRVRKTIKEKTGEPMYEDIAKVWDEISFIKSAETEVEKSNRTYIWEKDRIRSRIILMRNKMKRMYDFMYPIERRVMTERLEWLEKEYYRFDYMINPYHLQPGLLLDVDITSIKRKKVTLDAMANVLNEFLHGVSKGFSDAAFASFSRRRSTVREDINQSFAAVADEEEEEAVAAAAAKPRPAVIAAPKGGAKKGGSKSSSKKGVIDSRAKSKKSSRGGIAEL

SEQ ID NO: 95815 - protein, 135 aa, Unknown
  Obtained from environmental sample
  misc_feature (1)..(135): Xaa is any amino acid
NPRLTKDIDFLISSKYENIDKLKRALDDFGAPPIDIELFKKEKDSVIRMGVSPIQIDVIKQATGIIMEECYKRKEILYLDDLKINVISIKDLIINKRAAGRDQDITDANTLEKFTKLREKEYISIKEGTIKKDKT

SEQ ID NO: 95816 - protein, 196 aa, Unknown
  Obtained from environmental sample
  DOMAIN (1)...(196): FHIPEP family
  misc_feature (1)..(196): Xaa is any amino acid
VLLIVLYSEKPTEFSLFPTVLLITTVFGLALNVSSTRLILSKGEKFNGRMIRAFSDFVVGGSTGNDGIVIGFIIFIIIIAVQVIVITKGATRISEVAARFTLDGMPVRYMAIDTEYSSGSITEEEAQRRKAEIQKESQFYGSMDGASKFISGNVKIGVFIVAIDVIGGIIIGSVLRDEPIANAIPNYIRFCIGDGL

SEQ ID NO: 95817 - protein, 302 aa, Unknown
  Obtained from environmental sample
  DOMAIN (224)...(299): Sporulation related domain
  misc_feature (1)..(302): Xaa is any amino acid
LSFLKFQSKNQYADINDMKKNYLFLAILFLSVIIPFQLQAQGADVFRQEGIASWYGREFEGRPTASGEIFDASQMTAAHPSLPFGTMLVVTNQHNKKSVTVRVNDRGPFVPARIIDVSRAAAEKLDMIVTGTAPVTVESMDKIAISTPVLGKQIAPSVITSPSASPVVTAPVIAQNTPIYSTQVQTVPVQTVPVQTAPVIVSQPVTVVIPNGQIKLTPEINIVAGKNYRLQIGSFKNAKNAVEAFDKLKASGLSPAYERFINGDNVEFYRVVIAGVRGSDVQLTSERISAAGFREAIIKEEN

SEQ ID NO: 95818 - protein, 183 aa, Unknown
  Obtained from environmental sample
  DOMAIN (17)...(175): CO dehydrogenase beta subunit/acetyl-CoA synthase epsilon subunit
  misc_feature (1)..(183): Xaa is any amino acid
VTVGPEGYLAPAAALIGVVSPDAGYALSEGVILPEDEALTLVAEKLASAIAPAVCPGPLLLWHWSDSVPPQAAAVRAMAEACGAKLIPMPDYRAKSPRINPEIEINPNHPSLTIQRNNIDVCLFVGMHLHFANMALRLIRGATDCYTIALSGTAAIDEAILSVRDVDADKIGEITKRIKKMRS

SEQ ID NO: 95819 - protein, 297 aa, Unknown
  Obtained from environmental sample
  DOMAIN (197)...(294): Histidine kinase-, DNA gyrase B-, and HSP90-like ATPase
  misc_feature (1)..(297): Xaa is any amino acid
MENPTDSFSVFSAVLSSADKIALTQKADAIRQEIYLWSSIDASISSKVFSRLFNVFGIFLFFVIGLVIFVLFLYRDLRHSRIQEKNSFDFAENTILAQENERTIISAELHDTVLQDMGRWLQINKTKTPTDQTLSELAYKIMNRTREICRALMPPDFSRLALTDLFIQLCADFEKRMSVECRPIIDKDFSAEKLSPQMQLQIYRIVQEALSNVEKHSEAKEVTLTAQNKDKKTLLIYITDDGKGNMANIQSSQSGGDGLGIKGMYQRAAILGASLSFIEGAGSGLTVRLEVPIPMRN

SEQ ID NO: 95820 - protein, 377 aa, Unknown
  Obtained from environmental sample
  DOMAIN (18)...(375): Permease family
  misc_feature (1)..(377): Xaa is any amino acid
MSFLEDYFGIAKSGSTLYRELVAGVTTFFAMSYILFVNPMILSETGMDKSAQFTATALAAIFGTLVMGVYARLPFALAPGMGLNTFFAYTMCLFLGHSWHFALGVVFVEGIIFFLLSIFDLRRIVVNLIPRSLQLAFCPGIGLFIASVGLQQAKIIEMHENSIKFGQITDPNVLLACLGILVIGVFYVKKIYVGMVVGIILLTIISLSFGLTQIESFFSLPPSVSDIMFAFDFSEILSYDFICLVLLLLSVDIFDTMGTLLGVSNATENLTGKDGSPKNLRKAFVADSLATLFGAVVGTSTTTTYIESSTGVSVGGRTGITSIVTAFCFVIALFSFPMLLAVPPAAVSAMLIFAGYNMFMSPALKNMDFKDYSESVP

SEQ ID NO: 95821 - protein, 73 aa, Unknown
  Obtained from environmental sample
  DOMAIN (1)...(64): LexA DNA binding domain
  misc_feature (1)..(73): Xaa is any amino acid
MEKLSERQQQVYNFIREYCAENGFSPSLADVAKAIGLHESTAATYVAILKQKGFVKSEYRVARSLRVVGQGAV

SEQ ID NO: 95822 - protein, 74 aa, Unknown
  Obtained from environmental sample
  misc_feature (1)..(74): Xaa is any amino acid
MNHPIDKIQWIPVDGLLSNDYNPNVVFTQELALLKYSLLISGWIQPILITSNNVIIDGFHRATLAKTDRDIKAM

SEQ ID NO: 95823 - protein, 173 aa, Unknown
  Obtained from environmental sample
  misc_feature (1)..(173): Xaa is any amino acid
MEALNRIPADLRVLACTEDSISSFKPLAAQTGFEIFAGPKDDVLERYCQVIRRFKINRVIRATGDNPFVFTDAAAAINAEALAINADYAGYSGLPYGAGVESVSAPALLRAGSETSSPYDREHVCPYLYTHPDLFNLHRPLAPLRWQGSNLRLTVDTQEDFDKARLFIRRLKE

SEQ ID NO: 95824 - protein, 245 aa, Unknown
  Obtained from environmental sample
  misc_feature (1)..(245): Xaa is any amino acid
MILLKISGKKEILITENNAKKIIRDSAKTAMNTIPSIFNKNITGYTTIGGRERIDSAAGIGSTSDDISEMCVVILNRPGLPHRSFFQEFEKIGFDNIISIESSSPNYNIEELSQRFPFVRFIIPEKEINLGEQINLAASEVESPLFFVIYSDMKIIAGGTARRMAERLIAIQEEAGINSNAVKRLCTVPVIVNANYESIPTIVTPLTRNKKMWTGMMEPHNEGELSLYPFNGIGIYDRLKFIDIG

SEQ ID NO: 95825 - protein, 364 aa, Unknown
  Obtained from environmental sample
  DOMAIN (96)...(271): short chain dehydrogenase
  misc_feature (1)..(364): Xaa is any amino acid
TEIAPEDDEDLAAEKFRAAYVAWKKENRAAEGKILLPSCAAVCSSRNPAVLYWIDDDLDSARKRLAEQNDSPRIEKYIAAAAVVNVAERAGVVKNRVALVTGGAQGIGEEIVRNLASAGALVFIADMNLEGAQKLAEHINAAENRTAALPVQVNVADEASVRLMFDKVAEIAGGLDLCVSNAGVLKAGSVLEQDLADFKFVTDINYTGFFVVSKFAGRIMRAQHLAAPAWKTDIIQVNSKSGLEGSNKNGAYAGGKFGGLGLVASFAMELVEYNIKVNAVCPGNFLDGPLWSHPEKGLFAQYLNTGKVPGAKTVADVRAFYESKVPMKRGCTGKDLIRAIFYIVEQEYETGQAVPVTGGQVMLH

SEQ ID NO: 95826 - protein, 103 aa, Unknown
  Obtained from environmental sample
  misc_feature (1)..(103): Xaa is any amino acid
SKIFRNASRYAAYTLSKKSLADITRLAAREFAPSLRVNAIAPGCLCSEDDSARDTSKDGDWTRGAPLGNAGTAEDIGHALEFFVRAQSVTGQILCVDGGLSLG

SEQ ID NO: 95827 - protein, 282 aa, Unknown
  Obtained from environmental sample
  DOMAIN (1)...(279): Aminotransferase class I and II
  misc_feature (1)..(282): Xaa is any amino acid
IGAEYGVSPEHIFCGNGSDEILSLIFRSFMNDGDLLVLSYPTYSLYPVLAEANGCRVESADTREDFSIDTEAMLAVRNARMAIIANPNAPTGLLLDKKQIRDFAKRFDGLVVVDEAYIDFAGEGASCLSELGALDNLIILRTFSKSFSLCGIRVGYAFAAPALAEGLIAMKDSYNIDRVAQCGAEAAIRDTAWMRANAARICKTRAKFTKALAERGFETLPSASNFVFTRHPKIAAAELKSRLQREEIYVRHFDARRLSEYLRISIGTDRDMARLAGALDRA

SEQ ID NO: 95828 - protein, 59 aa, Unknown
  Obtained from environmental sample
  misc_feature (1)..(59): Xaa is any amino acid
MFAAGNRIRFTVTSSAKNLVFPNSNTLAGYNSKETLVAQNTVHYSAQYPSRIILPVEAQ

SEQ ID NO: 95829 - protein, 291 aa, Unknown
  Obtained from environmental sample
  DOMAIN (163)...(291): X-Pro dipeptidyl-peptidase (S15 family)
  misc_feature (1)..(291): Xaa is any amino acid
MTKWSYYYSGILYGCFEKDDEKIRYKWLDPLTSLFSDYAELDEEKNKPPLLLANLDVLKALNHIEEYERAFAGQESAVKTELGEYTQKEPGLYAQRNKILPMDLLFKEGKLVAFICPAREYCAVLVREGHEKDTILSRWREYPAREAKYSVKFAGTFSVRMRDNINLAADVYLPEGAQGKLPAILVRTCYNKSKNKHLYYRYVQRGYAVIIQDTRGRDESEGDFRSMYLEIEDGDDTLNWIAAQDWSNGKVGTIGASYLGYVQWCMAASGNPHLAAMISIVAAGSAFVDMP

SEQ ID NO: 95830 - protein, 280 aa, Unknown
  Obtained from environmental sample
  misc_feature (1)..(280): Xaa is any amino acid
MANSHDPHRSFAGSEDELTRFYGYNTYASRYYKSDEIQVPGFLPDLPDVRKELAQYYSSVHRCDETVGGILRALEEAGLAQDTLIIFLSDNGMAFPFAKANCYLNSTKTPFIARWPGVIKAGTHNREDYITGIDFTPTILEAASLADLMKCDGRSYLSLLKGGKQDNRDTVFTQFNTTAAKNSYPMRCVQSRQFGYIFNAWADGKTLYKNESKTGLTYKAMQEAESDPFVAARVRFFDYRCKEEFYDFSNDPDALSNLIDDKIYQDKINEYRNLLRRYLY

SEQ ID NO: 95831 - protein, 147 aa, Unknown
  Obtained from environmental sample
  misc_feature (1)..(147): Xaa is any amino acid
VIEPNVCGTRRRFEILRILHDNGIPSVVWLCPFLPYINDSEENLRGLLDYCIEAGVYGIICFGIGLTLREGNREYFYSNIDRHFPGLKNEYQKKYGFNYVIASDNNEVLMKLLYSTCEKHGIVCNNEAVFGYIRDFKDAKGEQMELF

SEQ ID NO: 95832 - protein, 389 aa, Unknown
  Obtained from environmental sample
  misc_feature (1)..(389): Xaa is any amino acid
LKLPDDIQNIIKRKYQSKHKEWLKATVLNNNSQVLWPLEINLDIPAEQDAFCQQDAVKTWISAWKSWRGKGDIIWTERHWRSLGVQTVPQRLILNEPADVVSWIGESEAWSRVVERYKTLIQRWPVLIDVLPKYYRVLADYDDANFHRITGMLSWILANPNSGLYPRQIPVAGVDSKWLESHKGLVCELVSAIQKTNERDFFKVCGLKPPPQLIHMRILDPEIRNRFGGLGDICAPWEDTANLDIKPAHVFIVENLQTGLAFEDLAGSVVIMALGYNLDVLGRIPWLHHARCVYWGDIDTHGFAILNRARTYLPYLESALMDKQTFFAHRDLWVQEKEQSASSELSLLTNEEQEIFLSLKNNVWGQQIRLEQERICLDAAWEAIKKFLK

SEQ ID NO: 95833 - protein, 313 aa, Unknown
  Obtained from environmental sample
  DOMAIN (94)...(263): DEAD/DEAH box helicase
  misc_feature (1)..(313): Xaa is any amino acid
VYRCIDTQTASASLSRLDGARPVLKDSQRVALEKIRSHPEPLSAAQLGTRFGIAAPTLASLCKKGYLSKEIKTVFRDAGEFSRSSADEEKITLSAGQRDCVERVAASFSAPDKPFLLYGVTGSGKTHVYAELAKRVLSAGRGVIILVPEISLTPQTISRFRAAIGDAVAVIHSRMSDGERRDSLQEIVTGRRRAVVGVRSALLCPMDDVGLIVVDEEHDGSYKQSDTDPRYNARDAAVMRGRLQGAAVVLGSATPSLESYYNALTGKYNLLTLGDRFGTARLPAVKIVDMTVEHKEKNWTALSRYLAARLDEE

SEQ ID NO: 95834 - protein, 367 aa, Unknown
  Obtained from environmental sample
  DOMAIN (2)...(355): Protein of unknown function (DUF342)
  misc_feature (1)..(367): Xaa is any amino acid
SADYKNIDIVNLVSNGTVLAKLYPAQKGTPGKNVYGNVVAALNGIPARLPVGANTAIPNDDPNSLISVSDGIAIYDGTSVNVSAGYVISGDVDFKTGNIKYDNSIMINGDVKSGFEVDCGGDLQVKGIIEDCKITVKGNILCKFGFVGTGKGTITADGNVNLNFMKNQTIVAGGNVNIAKEALNCNITATKSINVYGHPLSVAGGTLVSNGSITVRTVGNISGAKTTLQINPEPELIAEMDGIKAAIAKNEENAKNLENMIKKMPPAEQVRNKEHVRKLKNTIILIRQQIGALEGKMRLLNITMNKFENAFIRIDRMAYPGTTVRFGTMNMALSDTLQGGKTIRVINQEIRVFSDRPIRPKPGEEKK

SEQ ID NO: 95835 - protein, 157 aa, Unknown
  Obtained from environmental sample
  misc_feature (1)..(157): Xaa is any amino acid
GYANCYVPSASKDKVRIDAPNGTGDDEACVFSQSGGYLTIEPRKPSKGKERRWGKAFIQAGKGMMAAFASSQALIIRFKRHSPKLIHPEQALVEFYNITTNNKEEALTELEYHAPYRTLAPGESMEAWQSWELYPFKPQPTPEECVRFLKSQGPQRC

SEQ ID NO: 95836 - protein, 81 aa, Unknown
  Obtained from environmental sample
  misc_feature (1)..(81): Xaa is any amino acid
MQIEAAGLLKAAKNLNNAKLFLDFMLSSDFQNIIPLTNWMYTVTNIPLPASFRVNPKSDKPLKGVTVTEADLNEWAALMLN

SEQ ID NO: 95837 - protein, 314 aa, Unknown
  Obtained from environmental sample
  DOMAIN (54)...(269): Binding-protein-dependent transport system inner membrane component
  misc_feature (1)..(314): Xaa is any amino acid
MAAYIRRSTILFALPLVAVVLFAFIIPYGASFWTFWAARDLVSVWKNSALLHITLFTLKQAFFSVLLSLAIGLPGAWLIGTGKSPLLRTLSSIPFAIPSILTVLGFVLFFGNSGWLNRLIFVFSGKMPLRILYRPEAVIIAHAFLNFPLVIRLAGDGLARVRKAYAPAAAALGASPLAIFFTVILPLIFPSIMSAALLVFLYSFTSFAVVLVLGGGPASTTLSVEIYRHARIFLNYPNAGALAFVETLIAVFVFLAYLFFGKKSAGIKIDTQERIQEEKELGLVPKIITIAYYVFMAIFVLGPIVSIVIESLLY

SEQ ID NO: 95838 - protein, 354 aa, Unknown
  Obtained from environmental sample
  DOMAIN (183)...(353): Hsp90 protein
  misc_feature (1)..(354): Xaa is any amino acid
MEKMEFQTEVRELLHLMIHSLYSNKEIFLRELVSNAADALDKLRFLSIANPELLPASTELRIDISANDETKILTIEDNGIGMNKEDLIQNLGTIARSGTKSFMQSVTGDAKRDVNLIGQFGVGFYSAFMVASKVEVHSKKAGEEQGYQWVSEGTGDFSVNELPKEKNGTKITIYLKDDDDCKNFAQEWQIKSIVRKYSEFVTHPIYIHSLDKDKKENVERLNEKPALWRQSAKTIEEKQYKEFYELVSHEGGEPLAWSHNHVEGTQEYWSLLYIPSRAPFGVRYASEHSHGLKLYVKRVFIMDDCKELLPNWLRFARGVIDTEDLPLNVSREILQSNKIVGNLKKHATKKILDT

SEQ ID NO: 95839 - protein, 89 aa, Unknown
  Obtained from environmental sample
  misc_feature (1)..(89): Xaa is any amino acid
SLFAWDDSTLTLSDSEKNTRLAIQTNMYRKLFDMFTDKYNKGKFDMVLVWGLDDGHSWLNNFPKRGREDHPLLFDRQYQPKPAFDSLMK

SEQ ID NO: 95840 - protein, 148 aa, Unknown
  Obtained from environmental sample
  misc_feature (1)..(148): Xaa is any amino acid
MNLHERVALKTTARSDLYSLEPPFPRTNFLIETSNACNHECIFCAHRKMKRKIGKIKPEFVEKILHQAHELGTREVGFYATGEPFLVKELPDYIALAKSIGYEYVYLTTNGALATPERIRDVIGAGLDSIKFSINAPEREMYEFYTAM

SEQ ID NO: 95841 - protein, 288 aa, Unknown
  Obtained from environmental sample
  misc_feature (1)..(288): Xaa is any amino acid
METVLCLIEEKISYVILSPNQAESCRRISGGDWVHINQAPIDTRRPYRVFPRTRDGAQLEGHLDVFFFNEGLSKAVSFDNLLQDSRTFGNSINQCYDNNYGGNQAVIIATDGETFGHHKPYGDMCLAYFFKHIAPEMGITPVNFGYYLSINPPEYEVSLGDAFGEGRSWSCAHGVGRWIRDCGCSTGGKAGWNQAWRGPLRNALRRLQSQIDFHFEARLSTIFADPWALRDKYINVMWEPSLAKTAEFLHAQSGGKLSFNEELTAEIRRLLEAQKFMLFSFTSCGWFF

SEQ ID NO: 95842 - protein, 315 aa, Unknown
  Obtained from environmental sample
  DOMAIN (1)...(314): Glycosyl hydrolase family 1
  misc_feature (1)..(315): Xaa is any amino acid
LQEKGGFANRDCVGHFCDYTDKVTAHFGDRIKNWMTFNEPWVYAFCGHLYAAHAPGLKDLPTALSVAHNVLLAHGKSMPIIRKNVPGAKAGIVNNLAWIESATNKQEDIEAAKRWDLAFNRWFMEPLFGKEYPEEMVSWYGKNMPEIKSGDFELMAAPMDFLGINYYTRRLVAYAPEDSHIKAKQVYRPHIKRAEFEEWELYPEGLYKLLVNIKEQYNNIPVYIAENGTSCPDRISEDGCVHDPERVEYYRRHFAATWQAIQEGCDLRGYFVWSLYDNLEWGFGFTKRFGFVYIDRENNLKRIIKDSGHFIASVY

SEQ ID NO: 95843 - protein, 68 aa, Unknown
  Obtained from environmental sample
  misc_feature (1)..(68): Xaa is any amino acid
GKSIWDIFSHIKGNTADGESGDISCDHYHRYREDVELMRGLGVKNYRLFYRMAQDFPDRIGRGKPERT

SEQ ID NO: 95844 - protein, 749 aa, Unknown
  Obtained from environmental sample
  DOMAIN (485)...(711): Methyl-accepting chemotaxis protein (MCP) signaling domain
  misc_feature (1)..(749): Xaa is any amino acid
MSLRIKLTTIILVMILVSVAVLSVFNLSRSAVLQVDTTHQYAEALAELNAKEIERQMGVFTDYGNVLVQILNSYEDTEMGGRRAMYDDVMYSLIATVDSIAGIWTAWFPGTIDNLDAQLGQYQTFYHRRNGPVAKEPAGYEGWQGHLSRVTVKGLTSTTGAEPAFQELADPYWANVAGKGNVPIVSAIFTFKNDAGRIVGLIGINFISAVQTVVDDLVKEVYNGAGMAAIYSDNGTIVAHWDKDRVKDNIKTNAKEKKLFGNDISRLANAILHGGENGGNAVTLEKYSPDLKSNVYFIFEPIPVSGFETTPWSMQLGIPTSEIKKPVNAMISYSVIFAVILLVLAAVITLFVATRIVKPIIGVTNTLKDISEGEGDLTRTIAVSSKDEVGDLAKYFNKTLEKIKGLVLLIKKQAGVLSEIGSDLSGNMTETAAAVNEITSNIQSIKGRIINQSASVTETNATMEQVVTNINKLNGHVENQVRDISQASSAIEQMAANINSVTNTLINNAANVNTLKEASEVGKAGLQEVATDIQEISRESEGLLVINAVMENIASQTNLLSLNAAIEAAHAGEAGEGFAVVADEIRKLAESSSEQSNTNGAVLKNIKASIDKITLSAREASEADRDGLQGVAADIQEIARKSEDLLKINLLMKDIASQINMLSINAAIEAAHAREAGKGFAIVADDIRKLAESSGEQSKTIGAVLKNIKASIDKITLSTENALNGFEEIDSNVKTIVEQGVRNKQIQAA

SEQ ID NO: 95845 - protein, 434 aa, Unknown
  Obtained from environmental sample
  DOMAIN (340)...(417): OB-fold nucleic acid binding domain
  misc_feature (1)..(434): Xaa is any amino acid
LLENILDETYGILCYQEDVSKTAIALAGFNEADADKLRKVIAKKMGGARLAVYKNQFFDGCRKNGVSEETILKIWEMMLSFDGYSFCKPHSASYAMVSFQSAYLRVHYPAEFMAAVLSNQGGFYRPHAYIAEIRRMRLITVGPDINLSQWKYYGDSKYKITNKKEQINRDIGYRGVVVIGFMAVKGLSVSGAKVIIDERERGGDFSSLDDFLRRVKLNRDDIIALCPAGVFDSIADGVPRHLQARRLLANNKEQIINKKGVRNLDLFVADVSPAFNITHRRVSAVQIKGDVRCENDLWEEYNSLGFLRNTHPLALWKDDVLAVKHRVKALNIGEYAGRNVKMAGWPVTQKDVWTKDGLSMCFLSLEDETALYETVVFPQVYERYSKLLFDQQPLLVFGLVTNDEGAVSLEINRIEVLGAVKNANFMRSGILNFR

SEQ ID NO: 95846 - protein, 169 aa, Unknown
  Obtained from environmental sample
  misc_feature (1)..(169): Xaa is any amino acid
VHPRTRDGWRPRPFCTKGRAAGVSIHAPVMGATAPNPRIHSQALCFNPRTRDGCDQNFMNDLSLHGMVSIHAPVMGATDSLLRQVSEFGVSIHAPVMGATVTPGLTDPCRRCFNPRTRDGCDHKYSNSRGGIRLCFNPRTRDGCDVEIQATANPDTDNVSIHAPVMGAT

SEQ ID NO: 95847 - protein, 87 aa, Unknown
  Obtained from environmental sample
  misc_feature (1)..(87): Xaa is any amino acid
MGATDDTVLFGRNKKVSIHAPVMGATSDRYSQIQMLRVSIHAPVMGATYKGRQDVRGGRVSIHAPVMGATENTGKILAELKFQSTHP

SEQ ID NO: 95848 - protein, 177 aa, Unknown
  Obtained from environmental sample
  misc_feature (1)..(177): Xaa is any amino acid
MGIVDSIKKVATDGLKTAANATTKAVSASSSKAIESVVAKTTALVGSKVTDAILKDLGPSPPNTAASPQNPAAAKAAALVGSKAAPNQQLPAESSKLSPAEVEAIIEARVRAKGVSSNWRYSIVDLMSALDMNSSLDSRKALAARLNYYGYDADGSAEKNSWLHAELLRLLAQNGGE

SEQ ID NO: 95849 - protein, 263 aa, Unknown
  Obtained from environmental sample
  misc_feature (1)..(263): Xaa is any amino acid
VFYVRPRGGLAVGDYSGFIGIKAGSVEYASVYVMFEVWGDVEYRLYVNPEVVDFGSRPTPYRQPAAQTVEVVNMGLNSIELTQPTSAYFDIGPLSATVLPRNGATAVFTVRPKEGLPPRTSPPYYDETITISGSGASAEVSVKFKVESEDMYGIRASGLSTFGTRPYRVTSPYYDQPPMQIVTVRKIGAGVGAITVTLPKDTTGKYVIEAYAQSPVPWTSSGANRTAVLPNNLAEAKFTIQPKATGLPAGSNNVAIPVIGVSG

SEQ ID NO: 95850 - protein, 482 aa, Unknown
  Obtained from environmental sample
  DOMAIN (336)...(418): Mur ligase family, glutamate ligase domain
  misc_feature (1)..(482): Xaa is any amino acid
MDYSGVKVLVMGLGLHGGGLESARFLLKRGAEVSVTDLRDEKTLSPSIERLDTACGELGGKPVRYILGRHEIEDFKNADIVIKNPGVRPDSPFLQAAKQIETDISLFLSESKARLFAVTGSKGKSFTSSALNFILNSCGKSFLGGNITVSPLNFPQEPGENDNVVLELSSFQLGDLKGRKAEDGSALLKPAASILTSIMPDHLDRYASMEDYIDDKKNIYRGQDSNCVTVAGDDDWGKSFLSETKARKLIRSHKQEISSALSDEQSGGCIDSSGRGIARLLNFRGVPDEITELVPQKILTPGSHQKINMLSAALAVFALGGKAQTIRAALSTFPGIEHRLEFFHESNGIRYYNDSAATIPEAAAACIEALTEPSMQGGLILVTGGTDKNLDFTPLARAAKKAKSIILLEGTGSEKLIPLLRENGVSYSGPFNDLDKAVHCAREKASGADIVALSPGCASFGMFLNEFDRGMKWKEAVARMAK

SEQ ID NO: 95851 - protein, 420 aa, Unknown
  Obtained from environmental sample
  DOMAIN (157)...(291): ATPase family associated with various cellular activities (AAA)
  misc_feature (1)..(420): Xaa is any amino acid
DGIEILGKRKLSANEKPRVVKPSLFGPEAVPTNEEPFRSYMLYVPDSVIAQWEALGKTVRVLHDENTWVNHILAFLPVLMIMGLFWFMMAKQTGGMGGRGLFSFGRSKAILINNDKNKTTFKDVAGCDEAKQDLEELVSFLKDPKKFDKLGGRIPKGVLLVGPPGTGKTLLARAVAGEASVNFYSMSGSDFVEMFVGVGASRVRDLFETGKKNAPCILFIDEIDAVGRQRGAGLGGGHDEREQTLNQLLVEMDGFAPNEGVILVAATNRPDVLDKALLRPGRFDRQVVVGLPDLVGREAILRVHLEKRKVPLDKEVNVKDVAKGTPGLAGADLENLVNEAALMAARFGNPTVTQLDFEEARDKLWMGAERKSLLMSEEDKRMVAYHEAGHALINLLCKNADPLHKLTIIPRGRALGVTLS

SEQ ID NO: 95852 - protein, 232 aa, Unknown
  Obtained from environmental sample
  misc_feature (1)..(232): Xaa is any amino acid
MAKNKNPMRSEFIIFSSVLFLVILAVGGLAFFFSMRQIVRTNRTNELSQMLEIKRINLETYVMNEIAIVKKMAGSPLIKDYFANPTEEKLRKQAVKEIAAYRAAFENKSVFWVNDIDKIFYSNDNAPYVVDPDSPDNYWYPLTLYKTEIYNFNINYNPDLDIINLWINAPVFDDNKKPLGMVGTGFELSVFVNALFSDLDDRMELYYFNADGEVTGARDIELISSKKKIDDV

SEQ ID NO: 95853 - protein, 230 aa, Unknown
  Obtained from environmental sample
  DOMAIN (34)...(171): HD domain
  misc_feature (1)..(230): Xaa is any amino acid
MDKVIKESQLAVRKIRDATINVIANMVEQRDKVTGAHIDRTQRYLSILVKEMMRRGVYADEMANWDLELLLPSAQLHDVGKIVVSDLILNKPGKLTDEEFALIKRHSAEGERIIDEIIAKSGVSGFMLHAKKFAGYHHEKWDGSGYPHGLRGEEIPLEGRIMAVADVYDALVSERPYKKPFTHEQAVDIISKDSGTHFDPKIVEVFLKAADDFWTESMMFASVSHIGMKN

SEQ ID NO: 95854 - protein, 65 aa, Unknown
  Obtained from environmental sample
  misc_feature (1)..(65): Xaa is any amino acid
MAIIKKSTKLDNVLYDIRGPVVDEAKRLEEEGYQILKLNTGNPAPFGLMAPDEIIHDMVLNLTGS

SEQ ID NO: 95855 - protein, 504 aa, Unknown
  Obtained from environmental sample
  misc_feature (1)..(504): Xaa is any amino acid
GYGVGIYRTGGSLKVEKSLLKNITGGGAGIHHAASADLEVTVLELQDIPGNGIYSTGSGVRKFSGITAVKNIGGDYGIYSADMTGGSFTLSDSVFTSCDVYCSATEAVPVIVKDTDIRSAKTANGLYAATGNAMVTIDKVTIDGVPKGRGIYASSGNTVKVSNTDVKNCVTAWNGGGINISGSGSAAISSVTITGCKADGSGGGMYFDNSGNVSVSNITIDTVTLTASSGYGGGIYRTDGGLTVVNSAIKNITGTHCTGIYHNASTNLEVTGLELQNIPGPGIYNSGGGVKKFSDINAANIGGGWGVYSENMTNGSFTVSDSKFTSCGVSCNATGAVSVSVTDTDIHNAKGASGLYASSGNAAINLEWVSIDGVPNGRGMYASSNNTVRISNSTIKNCVAAENGGGMYIEGSGSANISYTTITGCTANQYGGGMYLSNSGNVSVSNTTIDTVELTGPPVKYKEDDHLFYEDYYIYNNYGGGIYRSGGRLSVVNSVIKNIKGTLV

SEQ ID NO: 95856 - protein, 294 aa, Unknown
  Obtained from environmental sample
  misc_feature (1)..(294): Xaa is any amino acid
IKNISGNGADCTGIYHNASANLEVSGLVLQNIPGNGIYSTESGVRKFSGITAVTNIGGDYGIYSADMTGGSFTLSGDSAFTSCGVYCSATGAVPIQVIDTEIISAKGPYGLYASTESAAVNINRIIIDGVPNGRGIFISGESDAAISDANINNCVTDGNGAGINIDVSGSANISAATITNCQAGGSGGGISISGSGSADISAVTITNCTANQYGGGMYLTCSKNVSVSNTTIDTVTLTASSGNGGGIHRTNGGLKVVNSSIKNITGAGAAYGIYHNASANLEVTNLELQNIPGY

SEQ ID NO: 95857 - protein, 442 aa, Unknown
  Obtained from environmental sample
  DOMAIN (1)...(353): Beta-galactosidase
  misc_feature (1)..(442): Xaa is any amino acid
KLAGVNTLSVGIFAWSALEPQEGVYRFDWLDEIMDMMAENGIAAVLATPSGARPAWMAQKYPEVLRVNGYRQKNLYGERHNHCMSSPVYREKTAAINTRLAERYQEHPALAVWHISNEYSGECHCPLCQENFRSYLKKRFGSLDALNEAWWNSFWSHTYTDWSQVESPGPLGEVNVHGLNLEWKRFCTEQIVDFYLNETAPLKKITPNIPCTTNLMSGVSGVDNFRLARALDVDSWDSYPQWTGTEKDIETGALFSFYHDMNRSAKGKPFMLMESSPSATNWRPVAKLHRPGVHMLQSIQAVAHGADTVQYFQFRKSRGSSEKLHGAVVDHEGSENTRVFNDVAEVGKRLAGMSGIIGTSTPAAVAVIYDYQNHWILDDVKGLQRGNNKYKETVVSHYRAFWRMGVSADVIDSAGNLEGYDLVIAPMLYMLRPGIAEKITAF

SEQ ID NO: 95858 - protein, 424 aa, Unknown
  Obtained from environmental sample
  DOMAIN (30)...(244): Methyl-accepting chemotaxis protein (MCP) signaling domain
  misc_feature (1)..(424): Xaa is any amino acid
MVKQENSTNEAGKAVNTIEENIDNLKEMIAAQTDSVNVSSSAIEQMTANINSVTKTLSENSKNVEALTEASENGKTGVQTVAQMIQEISKDSEGLLEINAVMDNIASQTNLLSMNAAIEAAHAGEAGKGFAVVADEIRKLAESSSEQSKTTATMLKKIKGSIDGITKSSDEVLERFGAIDTGVKTVSEHEQNILNAMEEQEVGGKQILESIGRLRDITASVKKGSNEMAESGQTLVKETDQFIKISQEAVGGMNEILKGINQIKVSVNQVNDMSIENNRNFESLKQETEKFKNTAGNEKQKILVVDDDDILLSMAETVLKDDYDVVTAQSGKEALGLFFQGLVPQLILLDLIMPEMDGWNTYSRIKAIGGLHDTPIAILTASSDPKDLQHARELGAVDYIKKPFSKDDLQNRIEKIFDKRTGRA

SEQ ID NO: 95859 - protein, 288 aa, Unknown
  Obtained from environmental sample
  DOMAIN (12)...(107): OmpA family
  misc_feature (1)..(288): Xaa is any amino acid
VAQSANIEISLKFDNDRHRLRSDAKKTLDKTLDTLLIDKIAKITVSGHTDSNADSLYNVRLSERRTKTVKDYLISKGFASDIIQTSSFGRDKPVASNETPEGKQTNRRVDIVFYRNPPSTQKPPQQPAKIVQQPAKPKPEPQAKPPQAKLPDDPSKKDTVIILPDGTEAVFNIGEYRELKDCILEIVITNDINVILKDGGMLPEENGIPLAVCGMVKIRLKENCTSITCFKHPVKMKIRSRVPTDTDCSICIKGKSYTVIASPEGWRKAKGSLNKVTITKKGKDTFIS

SEQ ID NO: 95860 - protein, 291 aa, Unknown
  Obtained from environmental sample
  DOMAIN (1)...(63): OmpA family
  misc_feature (1)..(291): Xaa is any amino acid
AYGHTDSNADSMYNIKLSERRTKTVKDYLISKGFRSEIIQTDYFGKNKPAVSNETEEGKQTNRRVDVVFYVKPVSASATVKQPATTPIQPAKPPQEEVPNTAICEKDTTVILPNGTQAVFNLCEFLRVRDCMEITEANSPQDILDAGLSLMTDNQIPMASCGMIKIGINENCTDVKCFKHPVKILFPAPDFSDCDYCNGSAGLWTISSISSPGWILQPGEQNNVTTIEKDGKKYYQLEIQCADIWINCDCQIATDNTQAYRTRKFKINRSYEIVNVKITSNCPTTVFELKP

SEQ ID NO: 95861 - protein, 495 aa, Unknown
  Obtained from environmental sample
  DOMAIN (204)...(348): GAF domain
  misc_feature (1)..(495): Xaa is any amino acid
AAQNLSGRRAAIVMALNKSIEIFAAHEEETFKEVITNCISPFADAVGLDRVVFYKLVKIGEGKRLGQVYRWDKSEGGLTSIANELKVLPYHPVFDKWLSITSKGDYIRLKESDYTEDEADLMRVYGVRSIFITPIFTHGKYWGVINFQDHTNNRYFDEDCDDLLFTAARVFSAAVIREEMKQREKMEAALNRAAIMFLSHDEKSFEETMTSGVKEIADAFNLDRFSLLRNLKTSGDSRHGGQIYRWNREAGGTTAPIKGLEFFAPEKYVPNWKNIFASGGTINGPVKLMPEAAVLQSFGLVSICVTPVYINNNFWGIAFFEDLHTERFFEEDSIEIMRLAAFLCANTVVRADMEKNIREQSEQLKIRLKQQELISELSRGFISSGDSQTLVQEAIAKFGRYHNVSLVFVFAMDYERKDTNLMYHWFADGVPPRSHVANLFEFLNSYFSETLPDEVKIVVRDDTTADPNAIFQALYAIGVMAVIGVPLYVSGRLWG

SEQ ID NO: 95862 - protein, 461 aa, Unknown
  Obtained from environmental sample
  misc_feature (1)..(461): Xaa is any amino acid
MDGVGVEYLNPPSVKVGIDLINYQGFLTSSLLWTPRTDMLVKFTAGTGYEDYIYDGTIEDNAPGRGFSDNFKNTYPDLWAYIGRDDFDYLDKKLIKQSDSSLNIQGRIDYDWEITERFLLAAGVQEMYNLYRSHGEQSTFYDTRVTYLEQSQQDKLKILFPTLEPSTWNDLRISVPVNYSPNSENNLFTTSAYILTEYNSGGRVKAELGLRIDHFFLYNKEFSLSGDPALNPRLIIDFNILKNFGFLESLDLSGGTGLFSSIDNNIFAAEKKYNIQKIKPSRSWTSVLGIKFQFPESLSLNIEGYYKYIFNRMYIPVTLDINDMDINPRFDGEGIVWGVDIMLQKAQSRFWDGWLSYSFSWAKYRDPEGKINAIGVSGGNFGSEWYFPSYHRFHSLNLIINIKPIKYINIYIRFGLASGMPSSRRVGKNPESYPVLMYDDDPHFIERIYWSSSNYTFSSDA

SEQ ID NO: 95863 - protein, 90 aa, Unknown
  Obtained from environmental sample
  misc_feature (1)..(90): Xaa is any amino acid
MCGIFGYVGTQDAVPIIVEGLKKLEYRGYDSAGIAVYGQNGLGVVKQKGRLTALEARLAEQSHAVPPMAGPPLAGHIGIGHTRWATHGEP

SEQ ID NO: 95864 - protein, 84 aa, Unknown
  Obtained from environmental sample
  misc_feature (1)..(84): Xaa is any amino acid
VGSFPANACGLYDMHGNVFEWCWDWYADYSITAQTDPMGASSGAVRVLRGGSWYSPTQNLRSAYRNYDTPFDRISHLGFRPARS

SEQ ID NO: 95865 - protein, 532 aa, Unknown
  Obtained from environmental sample
  DOMAIN (29)...(62): Tetratricopeptide repeat
  misc_feature (1)..(532): Xaa is any amino acid
MRRFGIIICLFFILSFFPAALSAQTQASSAVYYERGKSLMAEENWYSAVESFLECIRLNPAHAEGTAALAECYYELAEFDQALNWVRKARLLARSNLSITNLEVFTLIALGRLDEATSLVNEILTKEPYNREALFAAGELDIARNRPSEALLRYREAVRRYPDDRRLLISLALVSLSLGDGDTAIRYINNALEQHPDDYRVFFYAAYIYSKNNKLPEAITYVTRALYYKPNHEPSNSLMAVLRYRSSQYEEAIRLSDMSIAKDRQNMDAWYLKGLSLIRLNRPQDAITVLSTALSVNEEAEFSRAILEDTLISSTPLEDPRRARWALWHFDNARNYRTRNLTDQALFEYRRGLRLNPFAQDRREYAELLRLSGYPSRYLEELLFLQDQGISDKPLNDAVEAYSSLLSNALFKQWNVNPVDLAERHWKVAVFSLAGQSSFIHADAGEIAASVIKDLLVHERNIAPVNLPLRQPSFSQAFRQARESGADYFMLVSVTENERDISIKGELFTARTGSPAAIFTPIVPEQAGCATR

SEQ ID NO: 95866 - protein, 140 aa, Unknown
  Obtained from environmental sample
  misc_feature (1)..(140): Xaa is any amino acid
LQRGYARAPRGEIIEETTRGEKFDRANTVGALCNGEHSAIECCRQTTDSAFFEDWFENKLLREIPSGYTAIMDNASFHRKKELRKIARGKVRLLFLPPYSPDYNPIEKTWANMKRFLRNNPGDFRSVVSGIYNYFGFIES

SEQ ID NO: 95867 - protein, 109 aa, Unknown
  Obtained from environmental sample
  DOMAIN (12)...(107): Nucleotidyltransferase domain
  misc_feature (1)..(109): Xaa is any amino acid
MSDINPVIQNELDLITAAIKANTTPESIYLFGSYANGVPNSDSDIDIYVVVPDSETDTIELNAKIRMDLSVKRMMPIDLLIGKKSVFENRKNRLTLENVIANEGVKIYG

SEQ ID NO: 95868 - protein, 77 aa, Unknown
  Obtained from environmental sample
  DOMAIN (2)...(66): DNA gyrase B subunit, carboxyl terminus
  misc_feature (1)..(77): Xaa is any amino acid
VGDIKKEGIQRYKGLGEMNPDQLWETTMDPTRRNIIQVHMDDAVEAERIFTTLMGEVVGPRREFIEENALLVSNLDV

SEQ ID NO: 95869 - protein, 340 aa, Unknown
  Obtained from environmental sample
  misc_feature (1)..(340): Xaa is any amino acid
EKRTARLVTRGEEPSFTLESELKRSEEHLFQPTITVKPIRNDNDYLKNLTGNLAEDYQLYLKSRADYANSPTFYFDMADWFYTRGDKETALRVLTSIADLDLENSLLYRLLGYRLKEYGEYVLEKFVCQKVVRWRPMEPQSYRDYALALADNGETQAALDSLYGLLKKLRSEDFDNRSTGIEEVLVTEINHLITKNTNLNKSKIDKRLIIDIPVDIRVVINWNMNNTDIDLHVKDPNGEECYFGNKETKIGGRISTDITGGYGPEQFLLKKAIKGKYGVYVNYFGDRQFTTEGPSTVMAEIFTKYADQTEQRKVVSLQMSNVKRRDARDRAKVEVAEFEF

SEQ ID NO: 95870 - protein, 349 aa, Unknown
  Obtained from environmental sample
  DOMAIN (69)...(186): Vault protein inter-alpha-trypsin
  misc_feature (1)..(349): Xaa is any amino acid
MKSSKLYLIVAASVVLLAVGGLLFINNLSNIEEQATRQEADELEEESAPDTILPRAKHTVLKMDGQENSDVYLQSLDIQVEVTGNIASTRYTMVFKNRTDRVLEGALTFPLPDERSVTYYALDINGHMREAVPVEKARGTRVFEEIERRRVDPGLLERVEGNNLRTRIYPIPAKGTRTVSIGYDEELTLEKDLLQYRIPLDYLDSLEKFTVTATVWKSGVKPLVSDSADDLRFDKTGENYVASFVRENYRPARALNFSLPAPTDIPQIIMQPAQGRYYFFASVTPILETRKKQWSNNIAIIWDVSLSGLQRDLKRELEILNIIFAEEKDAKAHLYFLTINLKKSPTTAQ

SEQ ID NO: 95871 - protein, 174 aa, Unknown
  Obtained from environmental sample
  DOMAIN (1)...(174): Amino acid kinase family
  misc_feature (1)..(174): Xaa is any amino acid
VTVISLGGSIVAPEGADAKFLKDFAGLIREILEEDKERRFIFVVGGGGPARIWQNAYREVCQGSVKDEEADWIGIMATRLNAQLVKAVMAQWCFQEVVTDPTKAGPISGRVLVAAGWKPGFSSDNDAVLLAERFNAKTVINLSNIEKVYTGDPKKDSNARPLDRISWDDFRAMV

SEQ ID NO: 95872 - protein, 742 aa, Unknown
  Obtained from environmental sample
  DOMAIN (609)...(740): ATPase family associated with various cellular activities (AAA)
  misc_feature (1)..(742): Xaa is any amino acid
MNYERLTIKAQEAINDASAIAQQEDHSQLEIEHLLLALLRQQDGIVAPLVERIGTDTGRLAADVEALLKQTPKAYGEAVQLHFSSAASKILAKAEAEAAALKDEFVSTEHILIAISAGEGKTAELLKKAGVTKKAILDALRQVRGNQRVTDQNPEGKYQILERYCRDLTALARQEKIDPVIGRDEEIRRCMQVLSRRTKNNPILIGEPGVGKTAIVEGLARRIVAGDVPEGLKDKKLLALDLGQLVAGTKFRGEFEERLKALIHEVQSAEGKIILFIDELHTLVGAGAAEGATDASNLLKPALARGELRCIGATTLDEYRKHIEKDAALERRFQQVYTAEPSVEDTIAILRGLKERYEVHHGVRIKDEALVAAATLSSRYITSRFMPDKAIDLVDEAASRLKMELDSRPTELDKLERRLLQFSIEKQALSREEDPASKERLTKLEKEIADITAERDAVKARWEAEKVDIQGIRELKQRIEELKIEETRYEREGNLLKAAEVKHGKIPEAQKQLAALAALMEKKRNETGGSGGAALLREEVSEEDIAAVVSAWTGIPVSKMLSGEMQKYLDLEKVLEQRVVGQHQALAAVADAIRRNKAGLSDAAKPLGSFLFLGPTGVGKTELAKTLADFLFNDEKALARIDMSEYGEKHSVSRLIGAPPGYVGYEQGGQLTEVVRRRPYSVVLFDEIEKAHSEVFNVFLQILDDGRLTDGQGRIVDFKNVIIIMTSNIGSDLILEEENTAS

SEQ ID NO: 95873 - protein, 297 aa, Unknown
  Obtained from environmental sample
  DOMAIN (2)...(297): LytB protein
  misc_feature (1)..(297): Xaa is any amino acid
MIIRAKVLGFCMGVRRAVELANSQADNPAGKVYTLGPLIHNPQALEDLKRRGAAILDEANLPENLSGAVVIIRAHGISPQTEAELRKRGAEVVDATCPKVKASQLKAASLAKQGYRLFLAGEESHAEIAGIRGYANNAAAGSGQFLQVVSNAEEAQAAAAGLLAEDQALQKDPAKTALLAQTTISAEEYHAIGMVISRYFPALEIIPTICAATRERQDSLRELLGKVDAVAIGGGKDSANTRRLLGIAQASGKPCAIVETAKDIPPDFFRFETVGLAAGASTSDTVIDEIEKRLAKL

SEQ ID NO: 95874 - protein, 386 aa, Unknown
  Obtained from environmental sample
  DOMAIN (207)...(368): GGDEF domain
  misc_feature (1)..(386): Xaa is any amino acid
MEEVLLEENEDDENIKFLSSPAIKKNYALLQELGVIDHIENLSRDIRNYRSFLARGLDIFNHTSIEKIMDATVFQISDQFVPSFIAFVWKPIQTREDITIKAYKNYKPVDIKLHVDCITPFEAFFKKYPKPINFELLAFQLENDEAVKPYLDIDTEIAVPILGPFGLYGIVLIGKKVVDAGYTRDELFFLQQLMSFVSQALKNHLHYEHALRDVKTGLYNHGFFMTRLKEEIVRTKRQPHASSVIVMDVDKFKNFNDTYGHLAGDQVLEKLAQVIKQSVRSEDIPSRFGGEEFTVLLPSTEISTAWRISERLRTSVAAMRVPWETPLPKVTISLGVFAFDKDSELDTVGILRRADEALYVSKAKGRNCSTVWAPGIIDSIHKEQGQ

SEQ ID NO: 95875 - protein, 82 aa, Unknown
  Obtained from environmental sample
  misc_feature (1)..(82): Xaa is any amino acid
MKVEWEVPLPQVTISLGIYTFDQNASVDVNDIIRKADEALYISKERGRNRCTLWNPGIIDPHPDEACSIEKIKFTDHTVEML

SEQ ID NO: 95876 - protein, 291 aa, Unknown
  Obtained from environmental sample
  misc_feature (1)..(291): Xaa is any amino acid
MKSKKIAALFLTAAVLCAVLVTAGCSVRAEAQPANQPKITPPTPAQSAGQSVAQGAVVYMTDKITPEGLLAVYNALGLAANGKVAVKISTGEPGNPHFLSPLLIKNLVQKVNGTIVECNTAYGGKRANTAAHYQVAKDHGFTAIAPVVIMDEKSEINIPVTGGKHLKEDIVGARFKDFNFHIVLSHFKGHGMGGFGGALKNMSIGYASSAGKSWIHSAGKAKSGFRGAQNDFLESMAEAAKAVADQNKGRMLYINVMNHLSVDCDCNGRPAAPTMADIGILASLDPVALDQ

SEQ ID NO: 95877 - protein, 421 aa, Unknown
  Obtained from environmental sample
  DOMAIN (8)...(178): L-fucose isomerase, first N-terminal domain
  misc_feature (1)..(421): Xaa is any amino acid
MTAKRFQGDWPKIGIRPTIDGRMGGVRESLEGQTMNMAKSVVALLTAALKYPDGTPVQCVIADTTIGRVAESAACAEKFKRENVGVTITVTPCWCYGSETMDMDPHTVKAVWGFNGTERPGAVYLAAVLAGHAQKGLPAFGIYGRDVQDASNTEIPSDVKEKLLRFSRAAMSVAIMRGKSYLSVGAVCMGIAGSIVSTDFFEDYLGMRCEGVDEVEIIRRMSEGIYDKGEYEKALSWAKANCKEGEDACNRKELQKPRAEKDKDWEFIVKMTLIVRDLMVGNPKLKEMGFGEEALGHNALAAGFQGQRQWTDFYPNGDFTEAIMNSSFDWTGVRQPFVLATENDALNGTAMLFGYLLTNTAQIFADVRTYWSPEAVERVTGKKLTGRAANGIIHLINSGAASLDGSGRQSDKDGNPVIKPF

SEQ ID NO: 95878 - protein, 317 aa, Unknown
  Obtained from environmental sample
  DOMAIN (27)...(157): Bacterial flagellin N-terminus
  misc_feature (1)..(317): Xaa is any amino acid
MRINHNLTAINTHRQMGISELDGSKSMEKLSSGYRINRAGDDAAGLAISEKMRGQVRGLSMASKNSSDTISLIQTAEGALAETHSILQRMRELSVQSANDTNTDKDREELQAEVTQLKAEIDRIGNTTEFNTKKLLEGSATGVRDEIVGTVRVNNNSSVVIDATKEKAMGTNVSNDKSWAFDGAYMLVKVDQSTNKGEKIFKAENYNLIGPDGNVFKFKTYTPNTKSLANGLDVNTIIAEGGETRKYTALNAGTDTLLVADATLNKLYQTGYGNTVKIGAELTEMELQKVTANSILVAGSSFTLTGNAGGVAIASST

SEQ ID NO: 95879 - protein, 163 aa, Unknown
  Obtained from environmental sample
  misc_feature (1)..(163): Xaa is any amino acid
MPAEKKRIYIETTIPSFATAKTSRDAIIAGHQAATILFWETERQKYELYVSQYVIEECKLGDAEAASRRLNFLKDIAVLQKTGEVESLGEIYQRILNIPERTKTDCFHLSCCVLAEIDYLLSWNCAHLGVNAYSKIKDYNKDINLHTPMLLTPEALMEMEGSL

SEQ ID NO: 95880 - protein, 468 aa, Unknown
  Obtained from environmental sample
  misc_feature (1)..(468): Xaa is any amino acid
LLNQAESVLYDHISAEISKPLRFNADGAFSFDARLDLALEAYAHTNTDDFVLNEDWNYGYEQRQPAAKLFLEMNLYSWFYICTDLMYNRNRFNEKDEFRRVKDLEQGIGAETSLPDSYRITRQSWAYSKSFITNVPTGTDEFDFDWPKRANITFGGRYWNISIARDRIQWGRGYSGNFVFDGHRDYDEYFRFSAFSQKFKYEWLNVFYPGKLFMAHRLEYRLFSSLVFAVSENIMCASDAFNPRYINPAFIFHNWYDRDNINSLAQIELDFVPYNGFRVFTQAAFDQIRAPWEKDDEPPAWGIIAGFEHTRSALRGIMTFSLEFAYTTPLLYRRDMVDFITLSDTKTNYAEHSLAMDYTGFKYGGDAIVVQLDANYRFPGSTFIYARLFGMIHGNMNIFTSHNKDGNNTGHANLEIKTPSGSDDQKEQTFSVSLGANYLLPQFVSWNKISVWTDISYISKKNKLLFPE

SEQ ID NO: 95881 - protein, 93 aa, Unknown
  Obtained from environmental sample
  misc_feature (1)..(93): Xaa is any amino acid
MNNVILKAEDLDGYLSAADRDSLDKMEGLYLKLMEAFKGLKSGLQQERRGAEDSLISLYNEVGTLMQEICRQSPNIHVYSFLSPQEATRRRRA

SEQ ID NO: 95882 - protein, 603 aa, Unknown
  Obtained from environmental sample
  DOMAIN (346)...(559): Methyl-accepting chemotaxis protein (MCP) signaling domain
  misc_feature (1)..(603): Xaa is any amino acid
SMPPRFRMENGQANITTTTDVEAAMAYLTGPDAKKDRYVHPVPRNIDGKDTWYFRIMVPILNRRNGEVVGGVGLLCVIDAVQPTIQETIRTREEIAAMAIYSSNGFIIGHYTPDRVGKMIKEVDVIYGDSLDKVAKAIENGEELVLSSYSPLLKSEVEITIQSFQMGNSGQSWSIMVASTRSYILREVEAMTEFTLILAAIAIVIAAVIVYFVLHSTTKPIVKVADTLRDISEGEGDLTRSIPVSSKDEIGSLALYFNKTLEKIKNLIVTIKKEAASLNNIGNDLASNMTETAAAVNQITSNIQSIKGRVMNQSASVTETNATMEQVVANINKLNGHVENQSNNVSQASSAIEQMVANIHSVTETLIKNAANVKNLKESSEVGRGGLREVAADIQEIARESEGLLEINAVMKNIASQTNLLSMNAAIEAAHAGESGKGFAVVADEIRKLAENSGEQSKTIGTVLKKIAESIKKITSSTENVLKRFEAIDSGVKTVAEQEEIIRHAMEEQAEGSHQLLQGTSNLNGITQQVKAGSEEMLEGSKEVMKESRNLEKVTQEITGGMNEMASGAEQVNIAVNNVNGISARNREGIDTLIREVSRFKVE

SEQ ID NO: 95883 - protein, 729 aa, Unknown
  Obtained from environmental sample
  DOMAIN (1)...(208): PHP domain
  misc_feature (1)..(729): Xaa is any amino acid
MSLADRAEELGMTHLALTDHGNMFGAMDFIAACGHKKRKRPLKPIVGCEVYVSPGSRHEKKGSENENKYYHLVLLAYNRTGYFNLVKLCSLAYTEGFYYRPRIDEEILSKYREGLIALSACASGEIPRYIQAGKIDEAEKKAIYYRDLFGKDADGNPNFYLEIQDHGIPSGVMRGSDLSQKDINEAVAGISKKTGIPLVATNDVHYLNKDDYISHDVLLCIGTGKVRTEEKRKKYYGDQFYFKTGDEMAALFAEYPQAVENTVKIAQRCNADVPKIETKELPQYLPEFKIPEGFSEPSEYLRHLTAEGLEKRYAKVKDGDLKKWEDIKKRADYELDTIISMGYTGYFLIVADFINYAKEQNIPVGPGRGSGAGSIVAYSLRITDIDPLKYGLLFERFLNPERISMPDFDIDFANEGREEVINYVTRTYGKERVAQIITFGTLGAKAVIKDVARVLGISISESEMITKLISFDPDITLAKAKEDEPRLKDMEKDARFTELFAIANKLEGLNRHSSIHAAGIVIGKKPLIELVPLYQEREEKGGNIATQYSMNFLEECGLVKMDFLGLKNLDIIKHSKELIRQRGGKYSNFNIEDIPEDDKKTFKMLGEGKSHAIFQFASDGMQDILRQTKPTSIDDLTALNAMYRPGPMQFIPRFVEAKTGKAPITYPDPSLEKVLKETYGVIVYQEQVMEVARIIAGYSMGKADLLRRAMGKKKKEIIDGEKTPFLEGA

SEQ ID NO: 95884 - protein, 214 aa, Unknown
  Obtained from environmental sample
  misc_feature (1)..(214): Xaa is any amino acid
MERGTNLSFTILFRFSSIEDIPSAITLKAGLAVCLAIEDFAPCLQDSCLVKWPNDILIKPIRGESYKKAVGILCEADGGNVHLGIGINVAQKEFPSHLRDKAVSIALAADRDISQDERYALLERILSRLYAELGPANDWKTRLEQKLYKKNEQVLFIEGAAGSGKEVKGRLIGITDTGELLIIPNGETNPHPFITGELKIFNHEPHEPHEQSGI

SEQ ID NO: 95885 - protein, 1111 aa, Unknown
  Obtained from environmental sample
  DOMAIN (137)...(295): AIR synthase related protein, N-terminal domain
  misc_feature (1)..(1111): Xaa is any amino acid
VIKIKSWLINPVESREASLQKPATLTQNLQAPSDVVNIDRFISLNDSELEQLLKKMNLAMDLQDIIFCRNYFRNTEKRDPTVTEIRVLDTYWSDHCRHTTFLTQLDEIQIDNKDILESYKNYLELRLYCGRAGKPVTLMDMATIGAKVLKQNGLLPDLDESEEINACSVKIKVDVNGSNKNWLLMFKNETHNHPTEIEPFGGAATCLGGAIRDPLSGRAFVYQAMRVTGAANPLAHANETLEGKLPQRKICRTAAAGYSSYGNQIGLATGHVHEIYHPGYAAKRMEIGAVIGAAPLKNVVRITPSPTDVVILLGGRTGRDGIGGATGSSKSHTSSSLETCGADVQKGNAPEERKIQRLFRDPKAARLIKRCNDFGAGGVSVSVGEIADGLVIDLNKILKKYEGLDGTELAISESQERMSVVTSKKNADKFIALARKENLEAEIIAEVTKVPRLVMKWNGKTIVDISREFLNSNGAKKTAKVHIKDIQLTTPENKTVNEQELKSLMGNLNICSQKGLVDRFDSCIGAATVIAPFGGKYGITPAQVMAAKIPVLDGETKTCSIMSWGFDPLISEASPYHGAIFAVVHSVAKIIAAGGSRKKCWLTFQEYFERLRDDPFRWGKPASALLGALNAQIGLGTAAIGGKDSMSGSFSLVNGGQLDVPPTLVSFAVSTAKLENIITPEFKKADSYVYLLKPPFSVYEKIDFAVLCEYFDGVEKIAAEGKILSCWAGGSGGTAEAVVKMCMGNKIGFTAENELFTGEGFCGFIVETNSPLQLKDAVLIGRTTGDYTLKTKTYNIPIDTLQEEWEKTLEPVYPYLIKQEGKLENFSWKRENTEKNRKKSGLNSFSKPIFVIPVFPGTNSEYDSARAVEKAGGKAEIFVIRNLTPAAVAQSVKEFEKAVRKSQVIFIPGGFSGGDEPDGSGKFITAFMRNRAIKDAVTDLLKNRDGLICGICNGFQALIKLGLVPYGEIRDMTEDSPTLTFNTIGRHQSTLPITKVVSNKSPWLSCFEPGEQFIVPISHGEGRFIAQESVIRSLAANGQIATQYSDYDGNASQDIRFNPNNSDFAIEGITSPDGRVFGRMAHNERLDDGIYRNIPGIRRMDIFAGAVRYFR

SEQ ID NO: 95886 - protein, 185 aa, Unknown
  Obtained from environmental sample
  DOMAIN (25)...(147): GTPase of unknown function
  misc_feature (1)..(185): Xaa is any amino acid
VEKEIEEVSKQRQVQRRQRERQGLPVCAIVGYTNAGKSSLLNSLTGADVLVEDKLFATLDATTRRCEPSPGKPVLLTDTVGFIRRLPHSLIKAFRSTLEEAAHSNLLIHVLDASDTAVEEYYKTTIAVLSELGAGEIPVITALNKVDKLDDTAQVEGKFPDSIAISVKSGFGLEELKCRIAGKIR

SEQ ID NO: 95887 - protein, 287 aa, Unknown
  Obtained from environmental sample
  DOMAIN (2)...(282): C-5 cytosine-specific DNA methylase
  misc_feature (1)..(287): Xaa is any amino acid
MTAFLDLFSGIGGFALAAYRAGLRFDKHYFSEIEPYAVELYKKHFPEAEHLGDIRNVDYSKMPNGEWLVTAGFPCQPHSDAGLRKGADDERDLWPECRRMLRGLRPRIALFENVRGLLTSPGRDRKGEFFNGVLSDIHACGYDAEWQVISAADAGAPHLRKRVWIVAYADGDACGSRRPEPARQMREAGITESGDDMAYSESAKRERGSGTRGRGIRPANGGETLADAEIKRRGYGDDGADEGQADRKIDAFADAGVPRGEKTLADTDCEGLQGRLGGILQKCSSER

SEQ ID NO: 95888 - protein, 283 aa, Unknown
  Obtained from environmental sample
  DOMAIN (17)...(283): tRNA synthetases class I (C) catalytic domain
  misc_feature (1)..(283): Xaa is any amino acid
MKKDLYLHNTAAAKKELFVPKNNPVAIYCCGPTVYNYAHIGNLRTYIFEDVLKRVFKWCGYGARHVVNITDVGHLTSDADDGDDKMESGAAREGKSVWDIAAFYTERFMADIASLNVLQPDLWPKATEHIPQMIALVKSLEEKGFTYRTGDGIYFDTAKFPSYCDFARIDPSSLRAGERVEMGEKRGATDFALWKFSPTGGKRQMEWQSPWGVGFPGWHIECSAMSLAHLPQPLDIHCGGMDHIRVHHTNEIAQTEAATGKKCARYWMHGEFLVLDKGKMAKS

SEQ ID NO: 95889 - protein, 446 aa, Unknown
  Obtained from environmental sample
  DOMAIN (5)...(161): Peptidase family S49
  misc_feature (1)..(446): Xaa is any amino acid
SALEQFKANGKKICAYICNADIDVYCLASVADKIVMDDLGNLNIMGYAIGRGYARHALDKLGIGVRELRYFEYKSAGETFTRDSMSEADRRQYNDYLDDTFNLTRDTLKKARNWTDEEFNSVLNNGFLYSARSAHADGLVDFVGGKEAVYHAVWQVEENIGVSFKLYGTSDSSITGSKTAYSLPKARSFFRRAPPVVAVVYANGETSMRQGMEAVKLAKIIRELGQNTEVKAIVIKVNSPGGSAEAADLVDNAVCYAKQFKPVVVSMGQVAASGGYWVSMNASHIVANPYSITGSIGVIGNWFYDKGLNSKLGFNLDVIQRGDHADLMTGVLFPRRDLTDSEEERYKYYILDLYHVFTNKAAYGRKKNLDEIEAVAQGRIFSGLRAKEAGLVDSIGGFADALRIARELADISPKTAVKYEEYPKPKFFEKLMESLPMASAFSPKAK

SEQ ID NO: 95890 - protein, 381 aa, Unknown
  Obtained from environmental sample
  DOMAIN (187)...(360): Glycosyl transferases group 1
  misc_feature (1)..(381): Xaa is any amino acid
VIFYSDNLDEVNGIANSLRSVVPYLNSKGKKAHLWGSAFHTRTNGVVEDGFVVLFPRAASMEQLGYADSELAFPYLAPVIKFLKRYPADLMELETPSPGAWLVGAAAKIIGMKVLSHYRTDVPSYTRSLVKEAWMRRYVLGLIRIFYQNTMPVISPCEAYRKILETEIKVKPEHIKVLPRGIPLENFSPSLRKHSVNSHITFLYVGRISVEKNIPFLEKLWKEFCKENKDAELIFVGGGWYLETLKENMKEYSNVHFSGVKTGKELAEFYANADFFLFPSATDTFGNVIVESIASGTPVLVTDKGGPQDIVNNASQKCGWILQYEDLNAWKEQLKQCYEMVGSPEYEQMRLACTEHGKNYTLEKMATAQWEFFREILSVQN

SEQ ID NO: 95891 - protein, 483 aa, Unknown
  Obtained from environmental sample
  DOMAIN (200)...(391): Peptidase M16 inactive domain
  misc_feature (1)..(483): Xaa is any amino acid
DSGFEILDVRELAEFEADGLEVFGIWARHQKSGAEVFHVSNDDSENLFSFNFATPPSDSKGAAHILEHSVLCGSASYPLKDAFLVLAQGSLQTFLNAITYPDKTLYPASSVNEHDYFNLMSVYGDAVFRPLLSEWTFMQEGHHLYYSPDRKLGISGVVYNEMKGAYSSLDSYAGFWSVKSVLPGTPYEFDSGGDPECIPDLTWQDLKNFHRAWYSPANCRVFLAGNIPTEKQLEFLDEKFFSALPAGNKNSPIPKTERWQSPRSFKVPCPAGAEQKPTVLVSWLCGDVTDTAETLALTALSEILLGHDGSPITRVLVDSGLGEDLSPVSGFERELRETSFCAGIRGVNYEDPGLGVEEAAKKVEALIMGELERLEEEGIPKEEIEAALLAMEFSNREIRRSGGPFSLVWMSRSLKAWLHGGNPWDNMLFVSPFSDLKQRIETDIRYFEKMIRRYFLDNPHRAFIIIKPEESFWKIKKPRWPLI

SEQ ID NO: 95892 - protein, 306 aa, Unknown
  Obtained from environmental sample
  DOMAIN (2)...(306): Fatty acid synthesis protein
  misc_feature (1)..(306): Xaa is any amino acid
MVRLAVDVDSGDFGPEAMVRGVIAARLAASEPFAVCLCGEEGRVRRVLADIGGDAERCEFTIEHCPEEITAEDRRATVWKTKRGSSIVRCVTLQKEGLADASISAGDTGVLIGSALFILGCVDGAARPALAAFIPTPKKPVLIMDVGANISCRAELLAGFARLGCEYVSRVRGGKPPKAALLNVGSEPHKGPPEVRAAAELLSGCENYIGFIEGNKVFSGEADVVVCDGFVGNALLKACESFYALTSEFLADSPETYEKLSQKIGALNPENYGAVPFLGIKGTVLKAHGGSSITSIKSAVLTAVKA

SEQ ID NO: 95893 - protein, 59 aa, Unknown
  Obtained from environmental sample
  DOMAIN (2)...(57): Ribosomal L32p protein family
  misc_feature (1)..(59): Xaa is any amino acid
MAEPKKRHTHSRTHKRRSHQAIVAVSPTLCSHCKQPKAAHRVCGNCGHYAGAEVFVPED

SEQ ID NO: 95894 - protein, 193 aa, Unknown
  Obtained from environmental sample
  misc_feature (1)..(193): Xaa is any amino acid
MGEAHFYGARGRLPPLFEFEFDFDFEFDFNYFDFYLNLYRRPVPMPKIAMLFPGQGSQSVGMGKDFYDSGDTPSCRSRFEEADKILGRGLTKVIFDGPMEELTETRNTQPALFVVEAAITDLLLAKGLDPICAAGHSLGEYSALYAAGALSFEDGLRLVAARGEAMAEAGRSNPGAMAAILGMERDKIADVIS

SEQ ID NO: 95895 - protein, 334 aa, Unknown
  Obtained from environmental sample
  DOMAIN (15)...(182): Radical SAM superfamily
  misc_feature (1)..(334): Xaa is any amino acid
MLIDTFGRVIDYLRVSITDRCNLRCVYCMPPEGVEWKPHNTMLKFEEILRACGIMAGLGIRKIKVTGGEPLVRRGAAAFIQNLNALPGIEKVTLTTNGLLLGAYLDEAETQGYSAGVDGVNISLDALNPRRYGQISRNEGTDPAVILSLIDRLLDKGIAVKLNCVPIRSFNEDEILPISALAKDKNIAVRFIELMPLGSAGTLKPVPGGEIAALLEEAYGPLTPFSGIRGNGPAVYYSLPDFTGKIGFINALSCSFCETCNRLRLTSEGLLKPCLANDLCIDLREMLRSSASDGDLIQAVNEAVAKKPQFHSLSKVYGASSEEKHSAGMSCIGG

SEQ ID NO: 95896 - protein, 261 aa, Unknown
  Obtained from environmental sample
  DOMAIN (1)...(141): DNA gyrase/topoisomerase IV, subunit A
  misc_feature (1)..(261): Xaa is any amino acid
MRPQILSLKELMGHFLDHRHNVVVRRTQFDLKKAQDRAHILAGLRIALDHIDEIVALIRASSTTEEANEKLMQRFGLSEIQAKAITDMRLKQLTGLEREKIEQEYQELMKLIEELTAILASRDRRMQIIKGELEEMRERYGDVRRTEITDAVGDVDIEDMIAEEDMVITMTREGYIKRTAVSEFRAQRRGGKGVKGMESKENDVISTLFVASTHAYILFFTNIGRCYKMKVYKIPEAGRNSKGRPIVNVLNLLPDEKVAAF

SEQ ID NO: 95897 - protein, 328 aa, Unknown
  Obtained from environmental sample
  DOMAIN (246)...(325): Transporter associated domain
  misc_feature (1)..(328): Xaa is any amino acid
MLWLVPIVVSFLLWLLTHYVTRAFALRFYRGVVKPAYYIYSLLSWLLRPFSWIFSAIHSTILKILKYNVKLSFLSEEEKARITAEDATEALGEEEREMIRSIFDLSDTTVDEIMVPRINVIAAEVRSDLQTILRIIREEGHSRIPIYKDTIDQITGILYAKDIFPWISEHNKSEWNLDTIVKKCHYVPMGKKIKDLMKEFKLKHLHLAVIVDEYGGTAGIVTMEDILEEIVGDIQDEYDEEEKEIVPIENNVYFVDPHIDLHDLNDELGLALDEEAEYNTLSGLIYHEFGDVPVEGTQIECAGVRINVVKMDNQRIEKVKLEVCRAAR

SEQ ID NO: 95898 - protein, 719 aa, Unknown
  Obtained from environmental sample
  DOMAIN (279)...(407): NusB family
  misc_feature (1)..(719): Xaa is any amino acid
MNSNRSGGGGRGGHRKDGAVRKEYRKDTRHKGDARRSEHRSSERYGKDTYRKDDSGRKEYRKDTYRKDDAGGDDHRKDRYGRGDSVRKEYHKDTYRKDDSGRKEYRKDTYRKDDTGGDDHRKDRYGRGDSGRKEYHKDTYRKDDSGRKEYRKDTYHKDDSVRKEYHKDTYRKDDSGRKEYRKDTYHKDDSGRKEYRKDTYRKDDSVRKEYRKDTYHKDDSGRKEYRKDTYHKDDTRRSDRGGDRQYGKDRYRKDDARGDNRRKDRHRRDDTRGKPDSSVGTRQLVQRILADFDGNPGDPERIADRILARRYIEHRDRRFVFELVYGVLRNRIYLDYVIDTFISDEREPMSDALRRILEIGAYQILFLDRVPDHAAVNETVNLAKRDPSTAPGAGFINAVLRKVISNKFDIKLPDSQTDLSGRLSIEFSHPKWMVERWLARYGLGDTKKILAFNNERPAVYLRRKMRDISRPQFEFDMRTLCEAGSGYLNLYYKMKKPLEPENLRILQDGFCSVQAPSSGWVVAMLGLRDGERALDMCSAPGGKTTLMAELVGDSGSVVACDKGRWKMKTVAEAVAAQGIGNILPLVCDSVEPPFFGTFDKVLLDAPCSGSGVLQRHPDGRFVRTAEDIDSRVLLQRGLLDSAAKLVGDGGILVYSTCSLEPEENEHQVERFLNAHPEFKLDHPPDVIPAMYIDDADCLRITPYKHGMDGMFGARFKKVE

SEQ ID NO: 95899 - protein, 307 aa, Unknown
  Obtained from environmental sample
  DOMAIN (14)...(268): PHP domain
  misc_feature (1)..(307): Xaa is any amino acid
VNEIGSNIYGKNFSSLHTHTIFCDGKDDIETMCRAAYEKGLASVGFSSHAPIGKTGLKSTWHMKDEKLEEYVSEVNAARLRWEGKLAVYLGLEVDYIKGLRSALDRDIKDLNLDYTIGSVHYLMPDRGEPFTVDGPLEELETGILDGFDGDGESMLSAYLNNIMEMVTLGGFDIVAHLDLVRKNHSLQGSPAFRERQGRWFELKNADYMHKMEEIVRAISSAGLVVEANTGGYNRGYITDTYPPLAILRLLHRYNVPIIISADAHRAVDLDGHYREARQILLDAGYTSHVLFEGRKNGKPIWIERPL

SEQ ID NO: 95900 - protein, 681 aa, Unknown
  Obtained from environmental sample
  DOMAIN (242)...(677): Glycosyl hydrolases family 31
  misc_feature (1)..(681): Xaa is any amino acid
MKFTDGYWGIREGVEPHFAASVIEAEQSENEVTVYAPGRQIRHRTDTLNMPLLTVRYSSPMRNVIRVRISHFEGGLDRGPRFHLKSNPAGSAFNSDIRITEKEAVLESGELSVVIEQGQNWNNVFRASGKVLTKNLSKSTGYMIDSEKGPFTKEELSLSVGELVYGLGERFGPLVKNGQSVDIWNADGGTASEQAYKNIPFYMTNRGYGVFINNTGNVSLEIGTEKTSRVQFCVSGEELEYFIIYGPEPKTILELYTAITGRPAMPPEWSFGLWLSTSFTTSYDEKTVMGFINGMEERKIPLSVFHFDCFWMKGFNWCDFTWDSSTFPDPKGMLSRIKAKGIKICVWINPYIAQRSALFAEGKEGGYFLKRADGSPSKDGVVYQTDQWQAGMAIVDFTNPAGVKWYTNHLSKLLDMGVDCFKTDFGERIPEDAVYFDGGDPHRHHNFYSYLYNKAVFELLEQKRGKGEACLFARSATAGGQRFPLHWGGDCESTFEAMAETLRGGLSLGLSGFGFWSHDIGGFEGTPNAALFKRWLAFGLLSSHSRLHGSTSYRVPWSVDEESAEVCRFFAELKLRLKPYILRSAREACERGIPVLRAMFLEFPNDPACAYLDCQYMLGPDLLVAPVFSEDGKVSYYLPEGEWTSLLTGEKVKGAGWKTERHGFLSLPLLVRDGQKELFPN

SEQ ID NO: 95901 - protein, 749 aa, Unknown
  Obtained from environmental sample
  DOMAIN (618)...(749): Carbohydrate binding module (family 6)
  misc_feature (1)..(749): Xaa is any amino acid
MMLHPMLGDIVKNQWGLEGHIVTDGGDFLQTVSTHHYFDTHAETLAAALKNGADTMTDKPSEIISAVMEALKRNLIDEDELNKHLERILAIRFRLGLFDPPGLCPYDTISEADFMKDEYRGVSREAVRKSAVLLKNDGNFLPLRPGAVEGTIAVMGPLASELHLDWYAGHPSYMITPLDGLRDLYGKDKVAYTDCRDIVFFTTEDGRPLVLTEKTFSVGKQGEVPTRFYMEDWGWGARTFTDAQSGLMLEIPYYDPKPGDDAGEPQLITATAKSSLIWFNKNLFNAIPQENGLFLLRTYDNRRAAYPCEPGPVELRDNTFESTGELFRMNLERDGLSEAVKAAAQAGQVIFVGGNDPMITGREGVDRPSLSLPPRQEELIRRISAANPKTVLVLLSGYPFACKDIALKVPAILWMAHGIQETGAGFADILSGAYSPAGRLPLTWYDNERQLPAMMQYDIIYSTSTYQYFSGQVLFPFGHGLSYSSFEYSHLAIDKTEAGANETVNISFKIKNTGFVEAEEVPQMYISFSGSVFRRPLKSLKGFTRLGMRPNEEQVVRFTLPVEELAVWDSFQDRFCVETGHCTVMIGASSADIRLSGGFKVHGENVFPRTIPDRIYAQRFDGYSDCFLHEKRGSDIPAVFNSSEGGWIRFEALDFADGRGLISAIVQGAPGSRIEIRLDSPYDEYGALLGTFVVPNTGDISFYHLAEIYSPHRLPVWAYAETAIEKTSGVHDLYLVFFGKTGLWRIDIQ

SEQ ID NO: 95902 - protein, 464 aa, Unknown
  Obtained from environmental sample
  DOMAIN (123)...(458): Glycosyl hydrolase family 3 C terminal domain
  misc_feature (1)..(464): Xaa is any amino acid
GYCKKSWGLEGHIVTDGGDFLQTVSAHHYFDTHAETLAAALKNGADTMTDNPSEIIKAVMEALKRNLIDEDELNKHLERILAIRFRLGLFDPPGLCPYDAISEADFMKDEYRNVSREAVRKSAVLLKNDGNFLPLRPGAVEGTIAVMGPLASELHLDWYAGHPSYMITPLDGLRDLYGKDKVAYTDCRDIVSFTTEDGRPLLLAEKTFSLGKQGEVPAHFYMEDWGWGARTFADAQSGLMLEIPYYDPKPGDDAGEVQLITATAKSSLIWFNKNLFNAIPQENGLFLLRTYDNRRAAYPCEPGPVELRDSNFEGTGELFRMNLELDGILEAVKAATQAGQVVFVGGNDPMITGREGVDRPSLSLPPRQEELIRRISAANPKTVLVLLSGYPYTCNDVALKVPAILWMAHGIQETGAALADILSGAYSPAGRLPLTWYDNERQLPAMMEYDIISSSSTYQYHYGL

SEQ ID NO: 95903 - protein, 119 aa, Unknown
  Obtained from environmental sample
  misc_feature (1)..(119): Xaa is any amino acid
MKREQLESVMTWLIAGVLLGARFGYVFFYNFGYYINNLSEIIMPFSFEGGFHFTGISGMSYHGGLIGAFLAASYAIKKQKLDYWKSVQYNFSCCAFGLYLWEAWEFYKPANFTEGLRSR

SEQ ID NO: 95904 - protein, 252 aa, Unknown
  Obtained from environmental sample
  DOMAIN (170)...(252): Beta-ketoacyl synthase, C-terminal domain
  misc_feature (1)..(252): Xaa is any amino acid
MAGIEDPKTAVDVTRAGVVVGSGMGGMEIYYESSLNLSTKGPRGVSPFFVPQAIANMVAGEVAIRTGWMGPNWSPVSACATSNHSFITAADQIRLGRADIMIAGGTEEAVCPIGLAGFASMKALSTRNEEPEKASRPFDAGRNGFVLSEGAGILILESLSHAKKRGAKILARLAGYGMSGDAYHMSAPREDGEGVNLAISMALKDAGIDVSQIGYVNTHGTSTPRGDVAECKAILKAFGGKIDNVKINSSKS

SEQ ID NO: 95905 - protein, 111 aa, Unknown
  Obtained from environmental sample
  misc_feature (1)..(111): Xaa is any amino acid
VSSFFWGGNPRLVLERVITGTDELFITKEILDEIETVVGRPKFHADKEKIAYFINSIEEIGNKIVPKKRINNGSRDKADNKYLECGITAGVDYIISGDIHLLELKEYNKIK

SEQ ID NO: 95906 - protein, 301 aa, Unknown
  Obtained from environmental sample
  misc_feature (1)..(301): Xaa is any amino acid
MSRLINLLVEGAPAEETAALAGKILNKTIPIPKGYERRTGEDMEAEQSSFPYIFMHTFLPMLARFMAIAIVVFCVGYLSWQYIYNPIKAEKIYKLGIERIEAGEYTRANERFSEAYRIHPKKPWFYTYARAFRDSRQYTLAEEKYKELLYFTASKNKRGIPEKAAVLEYADMETNYIGDYQTAENIIWRNILDYFPNDKEGLLALGDNNLIWGEYEKERLEDAREAYARLIELYGRTDPLLERMLKYFIRTDDLGRYWPFKTILCPPQKGLYRQPRWPKWEATFWIKGLKKSAAFRMSISI

SEQ ID NO: 95907 - protein, 491 aa, Unknown
  Obtained from environmental sample
  DOMAIN (268)...(296): The GLUG motif
  misc_feature (1)..(491): Xaa is any amino acid
AFSEHDKGHITKTYGDAAFTNAITAAHKGSGEITYHSSDENVATVDNNGTVTILAVGSTVISAEKAADATYAHATTTYTLTVNPKLGTAENPFLVTNEAELRKVGTGTDGWTLSAHYKQTADIALTGGFTGIVYTSSKFNGSYDGGGYTITGLNITATSSNLGLFGYIGSGTVKNVNASGTVTGTGSVAGIGGIAGANEGTIENCSFSGTVTGSTTSLQVGGIVGRNTGTVKNSRSSATVSGNDQVGGITGRNEGKIENSYNTGSVTGIRQVGGIAGVNTGNSNYIKNCYNTGNVTSTEATVASEAGGIVGSNQSSATVEYCYNTGNVTGTSSAVGGIVGNNANNCTVQFCVSLGARVTGTSNVGRVAGTVPGLGNNRAREDMKIGASGAEATVSGNGSSSNGASNSIGTAQTSFYLSWDSSIWNISGDMTIGVNLATLKTNTQSPAPTLPAAYSPLGSEGNPFLVTNEADLRKVGSGTDGWTLTAHYRQT

SEQ ID NO: 95908 - protein, 96 aa, Unknown
  Obtained from environmental sample
  misc_feature (1)..(96): Xaa is any amino acid
LSGLGSAKKEILDLTISSPMQIGLVFDIAEDLRYLAENPEWQFSAPDACGQLYAREAIAKYAGSDCNDIFVTSSTSEAYSALFRVFCKKGAFYFNP

SEQ ID NO: 95909 - protein, 93 aa, Unknown
  Obtained from environmental sample
  DOMAIN (1)...(79): Acetyltransferase (GNAT) family
  misc_feature (1)..(93): Xaa is any amino acid
DVISAAYLIIGEWPANRTFINGKIATILNVYTYPEYRKNGIGANVINKIIEEAKKQNVSIINLLATEDGENVYKKAGFIATEDKSMRLKLQNM

SEQ ID NO: 95910 - protein, 173 aa, Unknown
  Obtained from environmental sample
  DOMAIN (40)...(173): DNA gyrase/topoisomerase IV, subunit A
  misc_feature (1)..(173): Xaa is any amino acid
MFEHGTSGETAPTGKVIPVAIEDEVKTDYLNYAMSVIVARALPDVRDGLKPVHRRLMYSMGELGLRHNAATKKCARIVGDTMGKFHPHGDLALYDALVRMAQDFSLRYPLLEGQGNFGSLAPDGAAAMRYTEAKLSRFGEEMLHDLDKETVDFIPNFSEEEMEPTVLPTVVPN

SEQ ID NO: 95911 - protein, 230 aa, Unknown
  Obtained from environmental sample
  DOMAIN (27)...(143): HD domain
  misc_feature (1)..(230): Xaa is any amino acid
MRLRMDSLIKSIATALDIVEGSLLGASTNHGKRIAVLCAKMGTVLQKSREEITALAVCAMLHDNALTEYILSERLDGHHDPAMKKHCEFGQRNVDALHFKTNVKDFILYHHERADGMGPFGIREGEGPLEAEIITIADSVDAAYHLQRLEPEKLPAIRDIIKKESGKHYGKIAAETMLEILSWPTVLSLKDEVIKQTASEALFPWTVDVQTETIFGLAGLPPGSSTTSPF

SEQ ID NO: 95912 - protein, 194 aa, Unknown
  Obtained from environmental sample
  misc_feature (1)..(194): Xaa is any amino acid
GGWGIDSASFSAHKIGGLRGIGLLYLRKPIEVLYSGGGQERNIRPGTENVSGALALAHCLETHALPEIVATEHAKAKARCKRLISGLGEIGRCRLIPAERAGGEHDAVFSPYIVQAAFKDIPGEVMVRALDDLGFAVSTGSACTSARHERPVLAAMGVDDKLAFEGIRISQGWSTTEEEIDLLLGAIKEVLKFL

SEQ ID NO: 95913 - protein, 395 aa, Unknown
  Obtained from environmental sample
  DOMAIN (125)...(313): Adenylate and Guanylate cyclase catalytic domain
  misc_feature (1)..(395): Xaa is any amino acid
MDMILSESFITPVGIYRQALIAFVFVALFFLASMHFSPPARVSSGFILAALAVAITAVLFRFTGIFFNPFTAVISMAASVILREIISYAESKKEKQFIKNAFSAYVCDGTVKEIIADPSRLRLGGTMRRMTALFTDIKGFSTISEKLDPEKLVTLLNIYLSAMSGVLLEEKGTIDKFDGDAIIAFFGAPMELPDHALGACHSAIAMKNIEKELNKKIMEEKFSPAPLLTRIGINTGNMVAGNMGTGNKMNYTIMGNAVNLAARLEGVNKQYRTWILASDDTVRETQGKILVRMLDRVRVVGINEPVRLYELINTVENSRHEEKTLVETFSQALEFYETRQWKKAAEGFRDALEIEARFTLNPEGGPSAVYLDRCERFRARQPADDWDGVYNLTEK

SEQ ID NO: 95914 - protein, 87 aa, Unknown
  Obtained from environmental sample
  DOMAIN (2)...(86): FlaG protein
  misc_feature (1)..(87): Xaa is any amino acid
MEKALASLPGNRQSAPTLEKTTADIQHISLVFNSRLKFIIDHESNEILIKVIDNETDKVIKVLPPEELQRLHSRIKETIGFLFDRMV

SEQ ID NO: 95915 - protein, 410 aa, Unknown
  Obtained from environmental sample
  DOMAIN (224)...(376): Flagellar hook-associated protein 2 C-terminus
  misc_feature (1)..(410): Xaa is any amino acid
MSDIYVPGLSSRFNSGKVIEDLMRLERIPRDRAVSNIEKIQKEKRYWQDLSNTTKTLRESATQLFSYQNPFNDRTVKSSDESVLTGTAMRDSMQQDISFTVKQIAQADRFLSSPLSNDFKVESGTYTFTIGKDEVSFDFKGGSLKDFSDTINRRGRNLIQSSLITVKSGTKSLLIESKVTGEDNSLIFSGASLTLGGNTGMIELFNGEDGVPAQLRPLNAVSTARDAIVSMEGIEVYRPTNEIDDLIPGVTLKVKGTSDSPVRLQVEMDTEGVKDAIITFIGNYNRLMAEINILTARSSFSGVIEEVQDPKTKQIKQIYKTNADDTILNELTYLTADERAEMRDRLGVFNNDSTLSQIRNTLMRIVTDPYPNTADESLNLLVQIGIGTDIRRTGGANPSKLRGYLEIEKK

SEQ ID NO: 95916 - protein, 279 aa, Unknown
  Obtained from environmental sample
  DOMAIN (1)...(87): SRP54-type protein, helical bundle domain
  misc_feature (1)..(279): Xaa is any amino acid
MFEKLSEKITDAFRFVTGKSSISEKNIEDAVEAIKMALLEADVNLRVVRRFVNSTIEEAKGEKVLRSVDPGQQFVKIVHDKLVSFLGDADPSSRALKLRGPDVISAVLMLGLQGSGKTTSAAKLALRLKKEGRKPMLVACDLVRPAAMEQLAVLGNQIGIPVHKEDGAKDSVKVYQNALSWANQNMIDTMIIDTTGRLQIDEPMMQELSRLKDAAKPDEMLLVADSMTGQAAADIAKTFDEKIGLTGVVLTKFDSDTRGGAALSLKTVTGKPLKLPAQA

SEQ ID NO: 95917 - protein, 524 aa, Unknown
  Obtained from environmental sample
  DOMAIN (434)...(524): phosphoenolpyruvate-dependent sugar phosphotransferase system, EIIA 1
  misc_feature (1)..(524): Xaa is any amino acid
YQVIIGNDVQEVYAELEKLGAPTSALADTGSAGGKVSIGDMLINTISGVFTPILPALVGTGLIKGLLAILQMIFPAWGGSGDGAFLVLNTAGDTLMYFLPVLIAYTSARKFGLEPILGIVIGAALVYPDIAAKYPFGPWSVEKFLGRNLLVILRYSGTVLPSIFAVYGASRLYKHFRKTLPSAIKNFIAPFFTLVIAIPLMFLVIGPILGIVGLGIQSAIQGIQGLGSIGPILLGTIIGGFWQVLVVFGLHWAIVPLAIFEAGAPNVFFGDNGVTTILAYSQIAALSQLGAVLAMAVKIKNTERRSAAFATGIGGIFGITEPIIYGFTLPKKKPFFLACIAGAVSGAIAAGIGNIFSGGRGIVTQIGAFGVFSYPNFLLPNYEGSTANFLIHLFATFLSIGLAFIMVYFSYKPDAIESREGEAVTIDISKVDMAKAKKIFAPVKGRVLPINQSADPAHQEETLGKGVCIMPLGGRIYAPFDGVVEMVFDTKHAINVKSNDGVEVLIHCGIDTVKLGGNGFTVHV

SEQ ID NO: 95918 - protein, 471 aa, Unknown
  Obtained from environmental sample
  DOMAIN (1)...(469): Glycosyl hydrolase family 1
  misc_feature (1)..(471): Xaa is any amino acid
FLWGGAIAAHQAEGAYLQDGKGLSTCDVMHAGKERFAEINNPKAIRANIQNPQGYFPEHIAVDFYHHYKEDIALFAEMGFKTFRTSISWARIFPNGDDPQPNEKGLLFYDSLFDECLKYGIEPLVTLSHWEMPIHLTKKYNGWASRELIPLFEKYAKTVFARYKNKVKYWLIFNEINMTFHAPFLGAGALVDDPSKKEKTGYIACHNQLVASALAVKACHEMLPNAKIGSMVASLTVYPYSSRPQDTWEKLQLERKNYCLTDVQVRGYYPAWLKKHLEKERILSAISAEDEKILRENTVDFVSFSYYSTCAVSTDPKTAAEKTSGNIFGGVQNPYLKSSEWGWQIDPMGLRIALNFFYDRYQKPLFIVENGLGAKDAPLPNGEIHDDYRIEYLRKHIKAMKSAVEEDGVELLGYTTWGCIDIISASTGEMSKRYGFVYVDRDDEGKGALKRSRKKSFFWYKDVISSNGEKL

SEQ ID NO: 95919 - protein, 85 aa, Unknown
  Obtained from environmental sample
  DOMAIN (1)...(84): PTS HPr component phosphorylation site
  misc_feature (1)..(85): Xaa is any amino acid
MKECVYTIKDPVGIHARPAGFFVKKISEFSSKAAIHRGNDSCDGKKLLALMKMRVKQDETITVKFEGADEEEACAAALAFLQANF

SEQ ID NO: 95920 - protein, 80 aa, Unknown
  Obtained from environmental sample
  DOMAIN (4)...(80): PEP-utilising enzyme, N-terminal
  misc_feature (1)..(80): Xaa is any amino acid
MITLQGTGASAGIAIGRIVFHEKANLKIEKKPVTDVAGEIERFFDARLVAIEELDELAITMVEKIGEENAMLFEIHRSDA

SEQ ID NO: 95921 - protein, 701 aa, Unknown
  Obtained from environmental sample
  DOMAIN (1)...(304): Pyruvate phosphate dikinase, PEP/pyruvate binding domain
  misc_feature (1)..(701): Xaa is any amino acid
KTIKKDIFDLLGKCAKLVGKTYGDAENPMLLKVIISSNMAITTYPVLHNFGLARPVLEGFAKWVGKDFAANEVLFMINGMMNIEEKINELEGKTQMKEEIAEKNKLIKRLLGIKGPSNELHNEEDKAPLPKKKTAEEYMDDYAKYFPKGFFDDAESQLLITISEISKLLKMDEQNNNDTAIAIQPMVYGNYGKDSCSGYFFSRNVVTGEKKLQGNYFVGKFNEIGAAGYDINKIDPTHLKQLEKIAWTLEDKFKEIRQVRFTVENGKLWLIEQRQVEQKSTQADIKLLLDLANRKIIDKAHVIKAIDPLRLNEILHPIIDPSSAKNLKSWRGGIAGAPGAAIGRVYFTTDSLLEAKKLAQQKGQDSRTILVALSSFAEDVKAIEVSTGVLTAEGGYSAHASVVARQYGKVSLVAPDLKIKGKKATLGDFSFSEGDYITLEVPFYGQSNVYAGTATLIEPDPKNSGLLDFIALTKSFLKKFHVRCNSDNPRDAALALSFGADGVGLCRTEHMFFKAERIHAFRAMLLSTDKNEREKTLAKLQVMQREDFYGILKVMAGKEVTIRLLDSPLHEFMPHNEDELAGYMAYVSKGKKTKPNKAEILAQIDALHEFNPMLGHRGCRIAVSYPEIYAMQIKAIFEAAYKLRAEGIDARPEIMIPIVMNASELKLIAFGKKIEGANYKGIVDIEDELRAEKKAKPGNTR

SEQ ID NO: 95922 - protein, 458 aa, Unknown
  Obtained from environmental sample
  misc_feature (1)..(458): Xaa is any amino acid
NKVIHHLTARLPKDVLERLDVMGGIKEKLFNYFNQNYQNMFNRYMVTSEDEMVKKVRNFIDKEETKVLTRYTPKEIADLLDAVGGADKFNTGEVEKSVVNMYGHLQGHIQRGVNELETHTNSILRQKTDTGAFVRGENAYSIVKCAFKDNQIKPKTVSDVKLSVNILDSELISPIFHYQVTVEYLIKDLLAKHIIDNIDRIIEQIKDSRIDQGLEELSDSEIIFNKLGKIETVTDDEIDDPKAKRYNVLAKRVFEKIADLRAEIDPESYDALNIRENIKKIIDLENIRNRGFNTAINSLTAILDTSRMGYQYIENLKNGREVALREYEDTDIANLPDERYSIKLRYFDNAQLIEDRKAYDVMIKSFETEIQHLWDVLEVIYQDKKSAFAITDFEDLAKKQKPRIRKTIKEKSGEPMYEDIAEVWDEISFIKAAETEVEKSNRTYMWEKDRIRNRIILM

SEQ ID NO: 95923 - protein, 520 aa, Unknown
  Obtained from environmental sample
  DOMAIN (117)...(279): DNA gyrase B
  misc_feature (1)..(520): Xaa is any amino acid
MNTGGKYDSEAFQKSVGLNGVGTKAVNALSSYFCVVSHRDGKCKKAEFKYGNLIKQYPEKPSSEKNGTEVYFEPDKDIFKNFRFLPAYMEERIWNYAYLNTGLSLNFNGKIYESKNGLFDLLSSQAKDSMRYPIIHCKGKDIEIAFTHGELYGEHYFSFVNGQHTTQGGTHQAAFREGVVKGVRDFFKKDFDGSDIRNYMLAAVSVRIQEPVFESQTKTKLGSTTIAPGGAALRNWMVDFIAKEVDNYLHKNPESAKIIQERIAQNERERKEIAGVRKLANERAKKAAVHNRKLRDCKIHLIDLKNEKKNETMIFITEGDSASGSITTARDVLTQAVFSLRGKPLNTYGVGRKVVYENEEFNLLQHALDIENGLENLRYNKVIIATDADVDGMHIRLLMVSFFLQFFPELVEQEHLYILQTPLFRVRNKKETLYCYNEQERDTAQAKLGAQAETTRFKGLGEIDPEEFGLFIGEDMRLESVIMPQESNTNKMLEYYMGNNTAARTEHVINNLRTEAVADL

SEQ ID NO: 95924 - protein, 334 aa, Unknown
  Obtained from environmental sample
  misc_feature (1)..(334): Xaa is any amino acid
KWLDMGTITLTPDNMTGVNGITETLQLEAGFYVLTVLITKNESYAGISEAVHIYPAIVTEYIKDFKDEELLAFTPIINAEIVVTAPVKGVTQDTTASGTGNYTISAVSWSPAGNPFLGGTQYTATVTLTANDHCTFTGLNSATINGQNATVSNNTGATVTLSYTFITGIKTVMDIAIKTPPTTLTYTHGDPLDLTGLVITLTYDDTTTEDVATDGFTNKNITVNPAQGNHLVHLTHNDQPVTITYGNLTPLTTGNLTVSPKVITFTVGAIPAQTYTGSEIQPAVVVSDGTVILTADDYAEAYSNNINAGTATVTITGAGNYAGSTGSGTFTINK

SEQ ID NO: 95925 - protein, 277 aa, Unknown
  Obtained from environmental sample
  DOMAIN (3)...(277): MraW methylase family
  misc_feature (1)..(277): Xaa is any amino acid
MTEFSHTPVLLEETLNLLGPRGKDELMIDGNTGEGGHSYNFLSKFKELKMVCIDADKDILAIAEERLKEFKDRVYFYYGWSHDFFADYPSGLKRPDTIFFDLGVSSYHYKKSGKGFSFEKDEYLDMRLDTSGGVTAADLLTRLPERELANLLYNNAGERFSRRIAARVINQRQKGNITTTSALAELVERAVPASYRHGPIHPATKTFQALRIAVNGELSRLPSLLEAALRTLEPGGRLAVISFHSLEDRIIKQFFREMNKDCTCPPQAPICRCEGRR

SEQ ID NO: 95926 - protein, 79 aa, Unknown
  Obtained from environmental sample
  misc_feature (1)..(79): Xaa is any amino acid
MTINEYFIVFPEGDVQEVEGRLPFNSIVDVNGNVLFPPLPTNKMIAFKVIGIRNEEKRGINETYHFLDLMSAEELTEYI

SEQ ID NO: 95927 - protein, 264 aa, Unknown
  Obtained from environmental sample
  DOMAIN (78)...(222): Thiamine pyrophosphate enzyme, C-terminal TPP binding domain
  misc_feature (1)..(264): Xaa is any amino acid
IRRRTLEIIHNAKGGHTGGDLSSADILATLYLHVLNVDAKNPHKPDRDRFVMSKGHCVEALYCALAEAGFIPDALLNEYGKFGTILAGHPTKKVTGVEINSGALGHGLPVGVGMALAAKMDKASYLTYVLMGDGEQGEGSIYEAAMSAAHYQLDNLVAIIDRNGLQISGSTESVMSLEPMRQRWEAFGWHVLEVNGNSIPELLQAFDTFKKSKNGKPHLLIARTVKGRGVSYMENVAKWHHGVPNEEQLAQAKKEIAERLNMMK

SEQ ID NO: 95928 - protein, 72 aa, Unknown
  Obtained from environmental sample
  misc_feature (1)..(72): Xaa is any amino acid
LEILEGIGVGRAYAQVINSASSKEFRPFFEAYISKEAHVVTDEWTGYKPLKQEYPSNYPSIPRTYGLENPNT

SEQ ID NO: 95929 - protein, 68 aa, Unknown
  Obtained from environmental sample
  misc_feature (1)..(68): Xaa is any amino acid
VDRSNNKTIGWVIGHRNAKTFRRLYEKTRGFVKHYYTDEWEVYRKVIPRKRLTQSKKYTIGIEQNNSN

SEQ ID NO: 95930 - protein, 522 aa, Unknown
  Obtained from environmental sample
  DOMAIN (327)...(522): RecF/RecN/SMC N terminal domain
  misc_feature (1)..(522): Xaa is any amino acid
MPFISLASDPGLITSGWYKKAFDFFRAASEESFIIGLGIGIICFYILRAVYSFLVTYSLNRFSFGLYKHFSKKVLATVLSVPYKLYAVKNSAELMRTITNEASEVGRIILNILQLCTELFTVIMVYAVIILLNWKMTLVVSAVLLFIVSILLAILTKENKIQGAKRVIFGRKMHRVLMETMGNYKYVKLKGNEENILSAYNSVVEKFTRTEVVNNTLGIIPKTILESLGFSFLVAVVVFILWIYHDASKVIPVISMYALALYRILPSLHRLLQNINSITYSEKALESVYESLRLPVENEGAVPLQFEHSIRLEDIHFKYMTGNEVITGVSLEIKKGEKIAITGESGGGKSTLVDIIIGIHKPLSGKVYIDETEITDDNIRSWRKKIGYIPQSIYLFDGTVAENVSFGSMPDEEKIKKALQMANIWNFLAAKDGSNTLVGEGGIQLSGGQQQRIGIARALYDDPDVLILDEATSALDTETEQKIMDEIYNVSANKTLIVIAHRLSTVERCDRKIRIENGKIIS

SEQ ID NO: 95931 - protein, 266 aa, Unknown
  Obtained from environmental sample
  DOMAIN (1)...(135): Domain of unknown function DUF21
  misc_feature (1)..(266): Xaa is any amino acid
MTSLGLGWLGEPAAAALLRPLLDSLGLENPDLAKSLAFILGFGLITFGHVVFGEQAPKIVSIRAAEATVLALARTMRVFYFLFRPGVRLLNTAADLTIRLLGGEALGRHETAPSSDELKLLVAASRAEGQLDADEARIVNNIFNLDRRNARDLMVHRTGVVSLAASETVGAAVQALHGRSFTRLPVYEGDRDNMVGFIHARDLLGQPPDQPIKGLIRQALAVFDQAPADDVLARMKREGRKFGLVWDEYGSWQGLITMSDLLETIV

SEQ ID NO: 95932 - protein, 388 aa, Unknown
  Obtained from environmental sample
  DOMAIN (304)...(388): Response regulator receiver domain
  misc_feature (1)..(388): Xaa is any amino acid
MKNLMVKQESSTNVAGKVVNDIKQNIDSLKEMIAAQTDSVNVSSSAIEQMTANINSVTKTLADNSKNVDALTEASENGKTGVQTVAQKIQEISKDSEGLLEINAVMNNIASQTNLLSMNAAIEAAHAGEAGRGFAVVADEIRKLAESSSGQSKTTATMLKKIKASIDSITKSSDEVLERFGAIDTSVKTVSQHEQNILNAMEEQEQGGRQILESISRLRDITASVKTGSDQMAESGKALVKETGDLIQTSRQTVEGMNEILLGINQISASMARVNEMSNENNKNFEAVKNETGKFVDSMGNEKKKILVVDDEPPVLVMVKGVLGDDYDVVTAASGKEALGLFYEGLVPNLILLDVVMRGMSGWDTFSRIKDLTALHHTPIAFFTSSNT

SEQ ID NO: 95933 - protein, 285 aa, Unknown
  Obtained from environmental sample
  DOMAIN (239)...(283): Bacterial regulatory helix-turn-helix proteins, AraC family
  misc_feature (1)..(285): Xaa is any amino acid
GVKKFFDSYKGQISLDEIDKHLEGIPERSGEEMKALSRMLRLCAEKISSSGTGYHDLTEQERKHGCSDHPSFLNDKERLLIACLRRGDSAEAQDIARNLLADFSNSAGGDFEYFKMKAIELVVLVSRTGTNSENEAELVETNSRNIKQLEDSNTPGELTDNVCLILERMAGKIFSFQGIRHASALRKAERFIWENYTRKISLKEIADASGLSAPYFSTVFKNEMGENLSNYLNRLRVEKALMMLGETDAPINKISADCGFEDQSWFSKVFKSYTGISPYEYRKNS

SEQ ID NO: 95934 - protein, 258 aa, Unknown
  Obtained from environmental sample
  misc_feature (1)..(258): Xaa is any amino acid
MRVALDEASEKQRRYVYLTNYASGLCMPEIAVMGALERLDMMLNDSMYGILFRDINMYRTFVDQRFSRMVNAYAGVIINTGEDNYLTTSDAVEKAHTVLASQFLNERFAFEAGLPPAQMGLGHAFEMDPTIKNGFLMELAQAQMAREIFPDAPLKYMPPTKFMTGDIFRGVVQNALFNFVSQLTGQGIHLLGMLTEAIHTPYMQDRALALENAKYVMDNMADLGDEISFREDGVIAARARQVLKETVEFLGQVAEKGL

SEQ ID NO: 95935 - protein, 288 aa, Unknown
  Obtained from environmental sample
  DOMAIN (2)...(82): Biotin/lipoate A/B protein ligase family
  misc_feature (1)..(288): Xaa is any amino acid
DIHVPDAFLAENGIEVHQIDRGGQVTYHGPSQIVAYPICNLRGGRQNVSKLVNGLEQAMIETAKGFGVRAERLEGHPGIWVETARGWEKLGAIGLHLKKWVSTHGLAFNLAPRMEHYQWITPCGIADKGVCSLRTLLGDTCPSWAKASASLEQCLLEALELEPLPTVEPSRSVSITVWRRGANGPEILMVPRHPQDDQWQSGVTDMVEPGETFEAAAKETMEETGLHGRLASQDFSHTRCLGPAPTIGHEPFFNTEACFHLEVMPDAAVTLNKAERSRWCPPEEAMSL

SEQ ID NO: 95936 - protein, 336 aa, Unknown
  Obtained from environmental sample
  misc_feature (1)..(336): Xaa is any amino acid
ISIYRADHPWNDLTDMEFYKIAGLYRQDLASNTEGFTMAALLLFGKDEVIGSAIPHYKIDALLRRVDNDRYDDRENIRCNLIDAYDRLMAFVVKHLPDKFYLQGDMRISLRDKIFREIVANTLIHREYSNAFPSTFIIYKDRVETKNANKPHTYGQLLPETFQPYPKNPHIAEVFTQMGRSEELGTGLRQVYKYSKAYSGSQNIVFKEEDVFIQQVPLDENVLYEGIDTVIESIDEVNDSGKSREKVGDKVGDKVGDKVGDKVGDKVGDKVGDKSREKSREKIIELIQANKYITKDEIAELIGLSLKGVEKNIRQLKDNGLIKRIGPNKGGYWEVL

SEQ ID NO: 95937 - protein, 198 aa, Unknown
  Obtained from environmental sample
  DOMAIN (99)...(198): Polysaccharide deacetylase
  misc_feature (1)..(198): Xaa is any amino acid
LPPAIKQPFEQALETIKQNAKNINKYFILDGEGRITVKAGLRYENADFEIVYDLENSREIGVSIYEIGFSCRDKESGMLLKDSLVWNPLASDAAPSLTAPSETAGLLLSFDDDYTDSWERFFDLFDKYKARVTFFVQGQPSSFCAKAINRGHDVGYHSLNHLDLRKMSRKEFNRETIESVQPFRDAGFPFSSFAYPFG

SEQ ID NO: 95938 - protein, 275 aa, Unknown
  Obtained from environmental sample
  misc_feature (1)..(275): Xaa is any amino acid
NTAFSVKDFFLLSKDERKLIICWGDPKNITSVTIPNSVTNIGAKAFDGYKITSVTIPNGVTGIENDAFQNNRLTTVTIPNSVTSIGNNAFSNNQLSAVTIGGGVKTIGDNAFSGNRLTSVTIPDGVTVIGTGAFNGNQITGIIIPNSVTSIGDKAFSNNQLGTVTLGGGVTTIGNEAFRKNQLASVVIPNSVTNIGNYAFAENRLTAVTIPDSEMYIGDYAFWENRLTAVAILGNVKSVGDYAFEKNPINRVNIGIHTEVFTNTFPNDFFSQRKG

SEQ ID NO: 95939 - protein, 280 aa, Unknown
  Obtained from environmental sample
  misc_feature (1)..(280): Xaa is any amino acid
SAQVNKGTAAFIEEDGNRTVTQGEMLSFNTEGAELRLPAAVMILPRPNARYVKNTPRPLPVGFVWNRVNLDADTGLRLEIAADRNFNHIVQSVDNLNASAEIFLDAGFWNWRLSYDGAILSAGQLSVTEASNLNLLSPVKGSLFRYQDDPPPIRFQWSEFEEALYYIIEISPIQDFSSPHISRQTAAPFFIDSYLGPGTWYWRVQPFFSSVYEGAAGFSPVSWFNIERAFISADDEIIVLPEPEIKPVITVQGSPAVQESPFLIQEVSPSLQEVTPFLRE

SEQ ID NO: 95940 - protein, 395 aa, Unknown
  Obtained from environmental sample
  DOMAIN (61)...(130): HAMP domain
  misc_feature (1)..(395): Xaa is any amino acid
VVRDILESSDRSKQFLVNTDRGVTRPQFLAYTKLSTGGCIVITGIEYDKVFEGIDATTRRNIYLTIAVLSFSIMLIWFFSKSISTPLKTLAAAARKIEGGTFEVELQPKGQDEIGVLTASFRRMSFALNIFGRFTNKEIAIKAMRGHIKPGGLPKHGTIFFSDIRGFTEKSEIFTKVFGDDASNKIVHWLNHYFSRMVECVEKTNGIIDKFIGDAVMAHWGTAYTSGKPALDALNCVMAALMMRKALYEMNRERRKGDPANPPIRIGCGINTGIITAGQLGSEKRMEYTVIGDPVNLASRIEALNKPLGTDILISEDTYNLVKKCIITEEMPSVTVKGKEKPVRIFALINIVGITKGPKTLAEVRSLLGIEAPDIASVDVNADEKKYKIGGGDQE

SEQ ID NO: 95941 - protein, 104 aa, Unknown
  Obtained from environmental sample
  misc_feature (1)..(104): Xaa is any amino acid
SVFTETMGRMVDYVRFHFAAEQELLHRIKYPEYQEHKKQHEKLIRDIVDAVTAHNKGEKFVPNQFVRTMRDWILGHIAIADKQYVLFIADQKKKGLLSDKDIEG

SEQ ID NO: 95942 - protein, 355 aa, Unknown
  Obtained from environmental sample
  misc_feature (1)..(355): Xaa is any amino acid
MGSRNNNAALETVKEASLLCQKSSGKASGSALGGPLAQAYRLFALASLLRGRVGETIDYLGFALENAGKFGSSQDIGMAAYYAASIQLLYGNLSRSKTLAEKARRHFLKAGNPEWADRSRFLLGRLAFEIGSYQQAIDIFENIRQSPEGARSPEKNALLEVWACRAKVYSRPLQQGPRLQGSGPDAQLFEIEALCLTGDYSAVVERSNTPPSSFGDNFLYIEQPDWRSGFAQCELLCFSWADLWERMLGAWRSLAQCRLSAKKAGEAQITMQQLIRKSQFPEIDTWDPFYYYALYQTLEHSGANQVDIRTAASAAFNRLQNRASRIDDSDIRQQYLKQPHWSKALSKAAVEFKLV

SEQ ID NO: 95943 - protein, 86 aa, Unknown
  Obtained from environmental sample
  misc_feature (1)..(86): Xaa is any amino acid
IGLQAFEDCTSLGSVTIGNSVTSIGQSAFKGCASLTSVTFKCTIDSNNFQPMAFYDLGDLRAKYLAGGPGTYTTNKPDYYAVWTKQ

SEQ ID NO: 95944 - protein, 601 aa, Unknown
  Obtained from environmental sample
  misc_feature (1)..(601): Xaa is any amino acid
MALRKKQREWLENNSNYDGNFANVPEELSTQEFWHEAVRRNIWALRHVPEKWKTIDLFLDLMRYTAHIKYGLSSYGYDPSRVPEELRSEKFCLAAMQAQGGMALRFVPEALKTPALCLAAVQQVGNALQFVPEALKTPALCLTAVQNNNSQYGMALEYVPEALKTEALCLAAVQKHWGELKFVPEALRTEALCLIAIQQAGNVLRYVPEAQKTEAVCLAAVKNCSWKIGQEYGPTIQYVPEALKTEAVCFSAVVRQARALEYVPEVLKTAARCLIDAEEKPHTLKNVPDALKTEAFCLAAVQQNGGALEYIPEAFKTEAICLAAVQQNGNVLKRVPEAKKTEAICLAAVEQDASALKNVPSALKTEAVCLAAVQQDGDTLQHVSDAKKTETLCLAAVQQNGNALQYVPEAKRTEALCLAAVQQNGDTLQYVPDAKKTESLCLAAVQQKGITLQYVPDAKKTESLCLTAVRKNGYALQYVPEVKKTEALCLTAVKDNGMALEYVPNKLKTEAVCIAAVQESYKVLEYVPNKLKTEVLCLAAVQENGNALQYVPDKLKTEALCFAAVDNNYYALEYVPNEFKTEALYLAAVIKDESAWGYIPE

SEQ ID NO: 95945 - protein, 459 aa, Unknown
  Obtained from environmental sample
  DOMAIN (15)...(439): FHIPEP family
  misc_feature (1)..(459): Xaa is any amino acid
MKDSKDDAIENEGNFTPEAAASVFNSCIRFCDVIITGKEAAIGLKYDEENMFAPMVVFLEKGASADALVWVAGNLGVPVIKNIALAKNLASHCKAGDAITEATYRDVSLALVKLDSNKFQRKSPASGNGRQGLPVKIPRPVSLEMGEALFSLTGEEPGRDKLLAQPLNAIRKRLIRLLGISLLPFRISKSEKLKNDEYRILFKGFEAGRGRLELGWYQNSTLAYKSAIPEIMNKPETIRSAAKFAASSLVRHAEEIIQQRAPELLGRDEVEAILDAAEEQYPVVTGEVKSLLSLGIIREILQNLVSEQVSIRHIAVILETLADWGSFGPVPSDLIIERIRQSLRRQICMEYTDDRLNLRVLTLEPKLEKKIADHSQDSPLLEDCTEAILSAVCGMKEKGFPPVILCSPKARFPVKEATRRQLPELAVLSYLEIPSDISVEPVGEIRLEERGELGMEKRR

SEQ ID NO: 95946 - protein, 612 aa, Unknown
  Obtained from environmental sample
  DOMAIN (231)...(408): Trypsin
  misc_feature (1)..(612): Xaa is any amino acid
MKRNILPWVVLLLFLSSCNTQSAAEKKLTPPKSVKDFRIDDISKQIKDDPAKAIHLLEIYDILYGARSETPNDFSPGDQSKLIALREEAAENLVNAQIKAVEEKRWADATSLARSLASLGIRAESTGDEPELVLEYAKEQLSEGKNLPAFLAAVRAHNLKPLSFDDALLFLRKAVEVRQRRTAAFFFSIIEGMGGGAQIPQELRTYAQGRDTPTDMIKGVATVLVERGVRIQQGIGFPDNVLGSAFFVDATGLLITNYHVISSEVDPSYKGYSRMYVRMGDSSSPRIPARVIGWDKAMDLALIKTEVVPEYVFSVVDWIIPNIGETIYAIGSPVGLEKTVTQGIVSALGRRLVQIGDVIQIDAAVNHGNSGGPVVDMAGRLVGIVFAGIEQYQGLNFAVPAERLAAALPAMIAGGKAERPWLGLSLCETIDGAEILYVAPFTPAADQQIREGSIIKTINGEAVSAPQGALIPALQDRIFPLSPGELVTLELELPQGKTEKYTIMLASRPEVPMANAAQKDTKERITGPLFGLVLTTQTGGGAFSKYLVKKVVRGSIADEAGLSESDPVAIRGFKVFEKDGYALLDIDVKKRRMGYIETSMRLPALLDTPDTL

SEQ ID NO: 95947 - protein, 454 aa, Unknown
  Obtained from environmental sample
  DOMAIN (30)...(164): ATPase family associated with various cellular activities (AAA)
  misc_feature (1)..(454): Xaa is any amino acid
KDAKYELEEVVSFLKDPQKFTKMGARIPKGVLLVGMPGTGKTLMAKAVAGEAKVAYFHMSGSDFVEMFVGVGASRVRDLFDQGRRSAPCIIFIDELDAVGRTRGAGYGGGHDEREQTLNQLLVEMDGFDSKDGVIILAATNRPDVLDPALLRPGRFDRQVVVAMPDIKEREDILKIHAAKIPLDGEVDLSRIARATPGMSGADIANLVNEAALFAARKDKTTVEMSDFEEARDKVLMGVARKTLVVSDKERNMTAIHEAGHALLHYFLKNADPLHKVTIVPHGRALGMAMSLPEEDSYSRTRAWILDRIVICYGGWSAEKLFYDETTTGTKQDLEQATEMARRMVCEWGMAEEMGPVTYGQEEEPIFLGKEIARHKDYSEETAQKIDRTIKRILDEGQRQAGEILSAHKEKLQKLSDALLVRETLVDDEIRTLLGFPPRENSASLIDKPASPES

SEQ ID NO: 95948 - protein, 325 aa, Unknown
  Obtained from environmental sample
  DOMAIN (51)...(211): ATPase family associated with various cellular activities (AAA)
  misc_feature (1)..(325): Xaa is any amino acid
MKNGANSEEEELEDRTEKNHTADAADEDSSEKFKATREKFRTMLREGKLEDRTVELVVNQNPQFPPFEMMGVSMEDIETNLSGFASFFGGGKKNKVVTVARAREILKAEELEKLIDRDRVSDEARQRVEETGIIFIDEIDKIAVKGDRGGGPDVSREGVQRDILPIVEGATVTTKWGPVNTDHILFIAAGAFTVSKPSDLIPELQGRFPLRVELDSLGKDDFLRILTEPKNALTKQYTELMATENVEIEFTPEAIERLAALAAEVNSKLENIGARRLHTIMEALLEELSFEAPDIGPAKVPITVDYVNEKLVNLVNDQDLGRYIL

SEQ ID NO: 95949 - protein, 279 aa, Unknown
  Obtained from environmental sample
  misc_feature (1)..(279): Xaa is any amino acid
MATVVNVVRAVNPQVLLVDSGDFNTGSALSNMFDAEPVIRAYNMMGYDAMTFGNHEFDGSLEKLDKQIGLADFSFVSSNIKKQDGSYLGGHRYIVRQYNNFSVGIFGITTLRTKVIANPDKSLVFVNEIDAAREVVDFLRNNEKVDIVIGLVHMGDVKEAEDHITSVDLAAAVEGIDILVDGHSHSSFERAKKAGNTWIVTANEMGKYMGFGRITVRNGKLDGFEWVSIAVRPDNNIIEMLKPYIEKAGDSLKAVIGEASDTFVFGNRLTRIRRRRLAT

SEQ ID NO: 95950 - protein, 384 aa, Unknown
  Obtained from environmental sample
  DOMAIN (1)...(113): ATPase family associated with various cellular activities (AAA)
  misc_feature (1)..(384): Xaa is any amino acid
MVFWGPPGCGKTSLANVIKNLGKKRFVAISAVTSGVKDVKTILDEAKTYKENNTKTILFIDEIHRFNKAQQDSLLGAVENGTITLIGATTENPGFEVNSALLSRCQLILFGPLQEQDMQNLMESALHTHPRGLKRKDLSISPEAAQKLIGQADGDARFLLNQLEWIAATVQGETEITLELMEEIQYKKPLRYDKHGEEHYNLISVLHKAVRGSDTQAAVYWLHRMLDGGEDPRYILRRLMRMAMEDIGLADPNALLLATAAREAFDFMGVPEGLIALDELTVYLSLAPKSNSLEVMGAKVNKCIRQTGTLPVPRAFRNPVTKVGKDLGYGKGYEYDHDVQGAYAGQEHLPEKLKGTKFYEPTAYGREKTLGERMAELEKLSKKS

SEQ ID NO: 95951 - protein, 283 aa, Unknown
  Obtained from environmental sample
  misc_feature (1)..(283): Xaa is any amino acid
MIKQAVIVAAGLGSRLKEKTVLKPKGFLELGGIAIVEWSVQKLLACGIEKIIIGTGYHAEAYNELAKKYPAIQTVFSADYETTGSMATLSVCAPFVTGDFLLLESDLIYDGIGLSVLCNDIHENVILASGATNSGDEVYLEAVNGSFLKSLSKNKSELASTYGELVGITKISPALLSTMCAYYEKKRAELPKLDYERAIMTCTDKHKVFIRKIEYYAWREIDDDSHLEMAQNKILPLIQENESLRQIRREVLLNPGPATTSDSVKYAQVCADICPREKEFGDG

SEQ ID NO: 95952 - protein, 228 aa, Unknown
  Obtained from environmental sample
  DOMAIN (1)...(228): metallopeptidase family M24
  misc_feature (1)..(228): Xaa is any amino acid
MLSAMYRELVPLVKPGMETIEIDRWVHNWIKKAGGKPAFLGEGSKKNPFPASICISINNEVIHGIPSRRKIVSGDLVSLDCGITLDGYISDQAITLEAGKVSPEAHKLSIVARECLYEGIRFARSGNRLLQISRAVYDHARASGFGVVSQFCGHGVGFSLHEDPQISNIPKGANPRLSAGMVLAIEPMVNAGTGDVVVLNDGWTVVTSDKRLSAHWEHTIALFSDHTE

SEQ ID NO: 95953 - protein, 318 aa, Unknown
  Obtained from environmental sample
  DOMAIN (101)...(299): 60Kd inner membrane protein
  misc_feature (1)..(318): Xaa is any amino acid
AAVINFNGESEAALGAEPIKEKKNEKDPGTYALTISDNMTTDSIALNFSILPLHWKEIGSMGEGYEKIIVSGWEWCGADKWFVWLCGLLLQILNAFYSIIPNYGIAIILLTILVKVVTTPLALKQLRSTRSMMALKPELDAIRAKNRGDMRAQQQEIMALYARHGVSPFSGLSGCLPMLLQMPIFIGLFVVLGRAIELREAPFFGWISDLSKSDVIWSGISIPYIMPEGIAILPFLMVVSTWFQTKQTITDPNQKMMVWMMPAMMFVFSAVMPSGLVLYWTISNLWGISQYFVINRKPAVLGKAKGKVVDAKIIKGKK

SEQ ID NO: 95954 - protein, 270 aa, Unknown
  Obtained from environmental sample
  DOMAIN (1)...(268): Pyridoxal-phosphate dependent enzyme
  misc_feature (1)..(270): Xaa is any amino acid
LGARVLIKNEALQRTGSFKFRGACNRALQLTPEQRRGGVVAWSSGNHAQGVAAACAMLGIPATIVMPADAPAAKICGTEAFGATIIFYDRHGEDREAVGRAEAARTGAVIVPPYDDPQVMAGQGTIGLEIMAQTQDLGLEPDYVLVSSSGGGLIAGIATAVKETSPHTAVYAVEPEEFDELGRSLRSGRRESNRPDARSICDSLQAATSGRLTFPVNRRLLAGGLAVSDGEVLHAMKFAFTTLKLVLEPGGACPLAALLSGKPDIRGKMA

SEQ ID NO: 95955 - protein, 206 aa, Unknown
  Obtained from environmental sample
  DOMAIN (6)...(128): NusB family
  misc_feature (1)..(206): Xaa is any amino acid
MNSQGLSPRIAALHALLNWKKGGDFVQNNLQQTCENLPQNNRALAYEIALGTCRVLTELDEKLKTLMRELPKEPCRTILEISLYQLLHTRIPSYAVVNSAANLAKHIGLNEHNVKFVNAVLRNAVRKNYVNIENENAKAPDQWIRINTQKTNLEELIAKLELKDPEILFNKFILIPNTREILKNPLFKKGFYSFQNPASFFMASLC

SEQ ID NO: 95956 - protein, 81 aa, Unknown
  Obtained from environmental sample
  misc_feature (1)..(81): Xaa is any amino acid
LKGSHVAITGVEKHFGDFHALKSVSIDINKGEFYSLLGPSGCGKTTLLRIIAGFEDPSAGAVLLDGRDVVPLPANKRQVNT

SEQ ID NO: 95957 - protein, 293 aa, Unknown
  Obtained from environmental sample
  DOMAIN (63)...(280): Binding-protein-dependent transport system inner membrane component
  misc_feature (1)..(293): Xaa is any amino acid
VKKNYGPVYVAPLTVWLGVFFVIPVSIIIYYSFLKKGFNGGVMHEFSLDAFRALYNPTIFKIAFNTFWVACASTAVMVALAIPASYFMARSRHKNLYMLLVIVPFWTNFLIRVYAWMAILGNNGILNSTLISMGLMREHIQFLYNTNAVILVTVYTYLPFAILPLYSTIEKFDFSLVEAARDLGATKLTAILRVLLPNIRGGITTAVLFTFIPAFGNYAVPQIIGGSDSYMLGNVIARELTVTRNWPLASSISMALTMLTTLGVLLFMRLNRSPMESAREKRSAASASAPARA

SEQ ID NO: 95958 - protein, 89 aa, Unknown
  Obtained from environmental sample
  misc_feature (1)..(89): Xaa is any amino acid
GERWELYYNGIELANCYSEETDPQKVKEFFIAESAQKEKTALVKHKVDYDYYKTFENFPRCSGVALGMDRLIMALTNRSTIDSVLPFAL

SEQ ID NO: 95959 - protein, 301 aa, Unknown
  Obtained from environmental sample
  DOMAIN (89)...(273): ABC transporter
  misc_feature (1)..(301): Xaa is any amino acid
MTYNKILTKENIPETKIPPEVLAAIITSALTKYKADNEEETETPLIIEVTSEKKPAPKPQEHTLGVSNLFKSFGKKLVVKGVNFTMKNGEVAGLLGPNGAGKTTIFYMIVGFYQPTMGYVTMDGVDITQKPMYRRARMGIAYLPQEASIFRKLTVEQNIWAILESRQDIEDYEKEEKLESLLAEFGIARIRTQLGYTLSGGERRRTEIARALATEPKFLLLDEPFAGIDPIAVYEIKQIIRQLAKKGIGILITDHNVRDTLEITNEAFIIADGNIFARGDKDVILNNEMVRKVYLGSEFRM

SEQ ID NO: 95960 - protein, 219 aa, Unknown
  Obtained from environmental sample
  DOMAIN (18)...(206): OstA-like protein
  misc_feature (1)..(219): Xaa is any amino acid
MINKYRLSIIDLHKNVYLRGLCLIIFLLFSVKNIYADKFSFRADKMSGSKALGRETTILIGNAEVRSDNLLLRADRIEIQGKDNQFIVCTGNVWGHEEDKDILFLTDKLRYDRKLKIARLEGNSSLEDRENEIVARGRFLEYDDKNEIAVFQISVRLFKDDMVCRSEYAIYHRNEKLLDLSGFPVVFKKDDEFRADKIRVDLDTDDVNMVGTVTGTIMN

SEQ ID NO: 95961 - protein, 210 aa, Unknown
  Obtained from environmental sample
  misc_feature (1)..(210): Xaa is any amino acid
TAFYGKGEPSGSPLIPGLTAYYEKSLANPYPVDPEKAHSLLKEAGYGEGGKKLTLEITVTSIYTMHVDTAQVIADQLAKIGIDVTIKLVEWAAWLSDVYLGRKYQATIISLDSPVVSPRSFLSRYRSGDNSNFINYSSGNFDRVFDAVLVEPSEDKRIALYKEAQRIISADAASVYIQDILGFRALRAGAFGGVLNYPLYVNDFAAMHAK

SEQ ID NO: 95962 - protein, 265 aa, Unknown
  Obtained from environmental sample
  DOMAIN (9)...(261): Hydroxyethylthiazole kinase family
  misc_feature (1)..(265): Xaa is any amino acid
MIQSYAALLSKVREKKPLVHHITNYVTVNDCANITLAIGASPVMADAIDEAADITAIAGAVVLNMGTLNERTIPSMIAAGISANAKGIPVIFDPVGVGASQLRNDTAARLIREVKLSVIRGNISEIKFIAGISSQTKGVDASDNDIATAESAGQTAKALAQKLGCVIVISGAVDIISDDKKTIFVENGHPMLGNLTGTGCMCSSLIGSFCGAVPQEPLAAAATAMMCMGIAGELAYENSGQRGNGSFRIALHDAVSRMDEATFEK

SEQ ID NO: 95963 - protein, 355 aa, Unknown
  Obtained from environmental sample
  DOMAIN (26)...(101): OB-fold nucleic acid binding domain
  misc_feature (1)..(355): Xaa is any amino acid
MNGKHLTVSELTEQIRLNLEGSFSYVCVEGEISNCRPASSGHLYFSLKDSGAKIDAIMFKNKLRTINFEPKDGMLMRVRGSLSVYAPRGSYSIVCEEMEIAGAGEILAMLEKRKQKLAAEGLFDEEKKRPLPRFPATVGVVSSPTGAALRDILNILARRAPGIKVIILPAPVQGDEAASLIAARIKQANQWHLADVLIVGRGGGSLEDLLPFSDEEVVRAVAKSKIPTVSAVGHEIDWALCDYSADLRAPTPSAAAELVSENYFTVSDFIQSTAEDFMSVMRTRLERAKLLLKPFDPQDMEYRIRAILQPRLIRLDDAKEALITAVSDKCAVIRKRIELSAAVLETASPLAVMER

SEQ ID NO: 95964 - protein, 681 aa, Unknown
  Obtained from environmental sample
  DOMAIN (53)...(223): ATPase family associated with various cellular activities (AAA)
  misc_feature (1)..(681): Xaa is any amino acid
MDELFNEKNKSTDCSPLADRMRPRTLEDIIGQDHIVGQGRLLRRAIQADRLSSIILYGPPGTGKTSLAAVIANTTRAAFEKLNAVLSGVKDIREVIDRSDDRFRLYGKRTILFVDEVHRWNKAQQDALLPWVENGTVILVGATTENPFFEVNRALVSRSRIFQLKPMGQPELLETARRTLTDKERGYGKWNINFEEGALEHIVEVAGGDARSLLNAIELAVETSVTPWPPKEGAKIHISMEAAEESIQRRALLYDRDGDYHFDTISAFIKSVRGSDPDAALYWLAKMVRAGEDPKFIFRRMIILASEDVGLADPNAISVVISCAQAFERIGFPEGNFPLSHACLYLATAPKSNTAMSYFDALKAVESEDAEVPNHLRDASRDAESFGHGEGYVYPHAYRDHWAAQQYLPNTLRGRTFYVPSSSGYEGKIREDVLRKRELQAAIVLGSQKDTDADGEFLSWSAASKGRESWFKRLESGRSRLLLSDRDAIFTSASVTRQDRVLIPLANDGLLLWESLRHCPEGLSAALVNNAAAKDALYQYASVLDETEKPLIAVTEEILPNPKECDDWFSCSQFDHILIRALRLTCTPTFLASRAKALLAKNGNVVLLCSPPRLGERLSRILLQECGQKELSSALEQAEDSFFRESADLWEAEDFTAAFEEQGFTVSLQTIDQKEERLISE

SEQ ID NO: 95965 - protein, 356 aa, Unknown
  Obtained from environmental sample
  DOMAIN (52)...(82): Putative Fe-S cluster
  misc_feature (1)..(356): Xaa is any amino acid
KYHKLLNQYWKPGLYDRSYRNLSDNLVMKYPGENAVTEIYHQMKKFNKSDLYDCGACGYGSCHGMAVAIHNGFNKPENCAHYTLAMLKEEMGAEELNHLLQEHISRASGLVEGITKLVHELNTNIDSQAAAVNQSSGTTGRMLDSIKNTSDISLNKQEAIKELIENAAQGQESMRVTIQSVHDISQSVDGIAQAIKIISAIAANTNLLSMNAAIEAAHAGDAGRGFAVVADEIRRLSESTRENSRNIARTLKNIIDGIAVTSKQSGDTDGRITEMSKEINGFAETMTNLIKTLSELSTGSDEITAALRNLRNQSNVMKTNYAEILTKTNQLHTAMLELTDISGHNQLSPAIQAAAR

SEQ ID NO: 95966 - protein, 457 aa, Unknown
  Obtained from environmental sample
  DOMAIN (367)...(397): Putative Fe-S cluster
  misc_feature (1)..(457): Xaa is any amino acid
MDGSKEKVLINPDLCIGCGNCISVCHHEARHIVDDTASFFSDLKRGDKIIAVVAPAVASVFPGEHLKINGYLRSVGVEAFFDVSLGAELTVISYLNYIKEKKPRMVIAQPCPAIVSYIEIYHPELIPHLAPADSPMLHTVKMIREYFKQYSNHKIAVISPCIAKRREFDETKHGDYNVTMFALKKYLEENRINLSSYRTEGYTGLLAERAVQFSSPGGLLDTAERFVPGVRRNTRKIEGIPNIYPYLTEIAQLLNDKEVEFPLLIDCLNCEKGCNGGSGTGNHSLPLDKLETPIRKRSAEHEKQIARNKHKNDFEKYHKQLNQFWKRGLYDRSYRDISGNLVLGKPSDLELNEIYLKMKKLGKSDLYDCGACGYGSCKGMATAIFNGINKPENCAHYTLAVLKEKKDTEELNRMLHEHIGYASDILEGINNLVSELHTVIELQAESVDRSSAITEEM

SEQ ID NO: 95967 - protein, 294 aa, Unknown
  Obtained from environmental sample
  DOMAIN (6)...(285): pfkB family carbohydrate kinase
  misc_feature (1)..(294): Xaa is any amino acid
MLDIESAFAGCVGSLTNADLLSDVDISKVAPSGNLAAIFKNDLEAAGVTPLLSTGKDKTGLCFAFNCGNSTRIAASPGAALEFSEADVPGEMIPQAEAIVLDGYMLDRRPLVQHIMQLASRHGIPIALDAASVFQIKEKTEAILQYSRIYPLIVFMNTDEAIVFYNNIKKSSDKLEAYSEREKETLILKEICPVLKCITEGEIFPIIVIKLGGRGAVVLAGGNIYREETFTIIPHNTVGAGDAFCAAFLSAWIRHKSIQECAALGNKVAREILLVPGTNIEKNKLKSFAKLLRK

SEQ ID NO: 95968 - protein, 210 aa, Unknown
  Obtained from environmental sample
  misc_feature (1)..(210): Xaa is any amino acid
MLHMKKLSLLLLGSSFAVMLSAAWIDKYPVQITQPDGTTFNLFVTGDEYHRRVHDSLGYTLLRNKDGWVVYAVLENDSLVETNIPYGQLAPLGNHGKGSKGSSSVSPEIQPNLDISPEKKMQLYDRYWNVVKPAKKNETNDQPQQAPAATTPRTGTLNNIVIYIKFPDADFTTKRENIETLFNDATAGKSMFSYYRDISGNTFNIPSTFF

SEQ ID NO: 95969 - protein, 491 aa, Unknown
  Obtained from environmental sample
  misc_feature (1)..(491): Xaa is any amino acid
LETGDLMKAAKRTLSDKERGYGKWKVTFEEGALEHLAEVAGGDARSLLNALELAVETSGTTSWPPPPDAEIFVSLEAAEESIQRRALLYDRDGDYHFDTISAFIKSVRGSDPDAALYWLAKMVRAGEDPAFIFRRMIILAMEDVGLADPTVISTVIACAEAFDRIGFPEGNFALSEACLCLSTAPKSNTTLAYFDALEEVEKEDADIPAHLRDASRDAESFGHGEGYIYPHAYRDHWAAQAYLPTALLGRTFYTPSQVGYEGRIREDVLNKREIQAAVILGDSIAHGNSTANTEILSWSAASKGREGWYKRLESGRSAALLNARNLILEQAGIARHDRVLVAAANDGLLLWESLRRCPEGLAAALVDSASARETLLKFAAILDETDKPLISFFPEGKIPSSKEAEEAFSCPVFDHIVAREPFKRKCEEGTIHAFATAAKLLLSPNGNIVILQSLPKMGERISRIIREECGAAPSLANNLAAAEEFFLEIQK

SEQ ID NO: 95970 - protein, 199 aa, Unknown
  Obtained from environmental sample
  misc_feature (1)..(199): Xaa is any amino acid
MENVNEKHKDTVFTFLFSNPDLLRELYSAIEGITLPPDIPININTLSDVLFRTQRNDISFLINNRLIVLIEHQSTINNNMPLRFMMYSAKLYQGMIDPEDKFKRKMEKIPKPEFIVLYNGEDNYPDYKELRLSDSFIQADIKIDLPLELVVQVYNINKGRNQEILSKSRTLENYSKFIDKIREYQKEYKWKYYKEENDE

SEQ ID NO: 95971 - protein, 66 aa, Unknown
  Obtained from environmental sample
  DOMAIN (4)...(62): Ribosomal protein L35
  misc_feature (1)..(66): Xaa is any amino acid
MPKMKTKKSAAKRYSFTGSGKVKYKKQNLRHILTKKSAKRKRGLRHSGILSDDNVPVIRKKLLPYG

SEQ ID NO: 95972 - protein, 375 aa, Unknown
  Obtained from environmental sample
  DOMAIN (177)...(365): Protein of unknown function (DUF1538)
  misc_feature (1)..(375): Xaa is any amino acid
DPGQRAKAVYVAGGENELYKIALDAVYSGDLSKEELDICFSEQQLGETHEAVSLSLFAPKAFLVYAKSAVLSVLPLALVLITAIGLIARDRIFNADIVVLGILFAALGMFALNLGMTGGITVLSSQAGNSLKQTYTETLYENRTVTVRGVDENSLITVPGENGPETYIWVQGRNGPTLEKFVPQRLLGDSYTHIPVKGAMSSRFGIIGAYILILVIVFFLGFFAIFAEPGLAVTAVTVEEMTTGTFKRSKLIMIAAMGVGGGMVIGFARVLFSNMLPAGGIHLSWILAPCYAIALILTIFAPEDFSSIAWDVAGIATGPISVPIIITTGLGLGHDSLRADGAFGIVAMASVFPIIVILISGIIDKARSKRMLKNM

SEQ ID NO: 95973 - protein, 281 aa, Unknown
  Obtained from environmental sample
  DOMAIN (1)...(281): Transposase, Mutator family
  misc_feature (1)..(281): Xaa is any amino acid
MARKKEKKEKDIIDQLLDNIDFRGLTQDEVVGQDGLIKQLTGRILQKALEAEMTEHLGYEKNSNTGDNSGNNRNGHTEKTVLLENQSATIEVPRDRNGTFEPVIIPKHEKRVPLFNDQIISMYSRGMSDREIQGHLEEIYNIEVSPDLISRVTNAVLDEVKEWQNRPLEKSYPILYLDALRVRGREDGKSCMKSVYIALAVNFEGKKEVLGLWVAENEGAKFWMGVLTELKNRGVQDILIACMDGLTGFPEAVRSVYPNTRVQLCIVHMVRNQQSLFLTKI

SEQ ID NO: 95974 - protein, 496 aa, Unknown
  Obtained from environmental sample
  misc_feature (1)..(496): Xaa is any amino acid
MANDNAIRSFSDIAVYMPDPNKYAPYIQRVFGAFPQNHPEYIPFTILGASGGSSLTARAFSALLSIAGGEFNRAMIFELLDNPIVRESRSFSHGDLERWEEWAEGYGMFRGYNAEQRCLMGDKGGAVVNDHTFEHGMRLAEESAEMIKEGARQCAELFLSLLRELSDLSAFFAGNNGLLNIREAAETVRRAIWSWFGHIGGGSADEAAETRVRREALNGLAQIELQHTCAGRIDISKEEFLTLARGCVPGELTAPSAAWRGVTFAPLRASMVLPHRAMFAMGLCAAEFPGTNEAPTWDLLPSKRIVGDSDRVRDNRFAFLELLHAAKERLILSYRARDMQKDEELQPSSVVLELEEYLIGQGLVDSEVNSRKCSVRREIPWVVHETLNKAMEAGRKHGSWDKEQRILAAESLKDRVEHRHNLAVNRRLSTNGDLPANIDSSAKTADLRALKKFLSNPLEYHLSMTLGIRDDDDTGDMTATDEPIDSGYNISKLRKK

SEQ ID NO: 95975 - protein, 295 aa, Unknown
  Obtained from environmental sample
  misc_feature (1)..(295): Xaa is any amino acid
ALGPAPDTQMIDAGHLSQVICALLDEGLLGDDVYKPLRDYLRVDANNIINNNGMNLGIDPIKRVQLSARIARQFLEYEYNRPSVWSDEASRWGRHGIDAKWLLGKEYFEGREHEAWQMDLYRRTFERLSKSVSPRYATLPHLYRQKREVCAKERRPWCDVGSNHQIILFGVSKISHFHRNTLVEISQSAGIDMHVLLTNPCAEFWEDVDTSRRTRAPRRRWSSDSPSEIAGITPVKPEDYDKGKLDRFADDEDHALLKLWGAAGKENIFLWCPQAQWNFEYHGGIDGDSSVDTTL

SEQ ID NO: 95976 - protein, 908 aa, Unknown
  Obtained from environmental sample
  DOMAIN (72)...(329): BadF/BadG/BcrA/BcrD ATPase family
  misc_feature (1)..(908): Xaa is any amino acid
MFTEQGKNISPQAVLTSLSMYREIVTENTSTDNINFFNTEAERNAFVARHKILSIDKDKINKKSGETLRVYLGIDAGSTTTKFVLIDEDENVVDYSYSPNKGEPLKVIKQALLEMYEKYRKAGVNLEVIALGTTGYGELLFDKALGADFHTVETVAHAAAAQKYIPGVSFILDIGGQDMKAINISNDIVTNITVNEACSSGCGSFLETFATNLNIPVEKIAETAFNAKNPARLGSRCTVFMNSTIITEQKNGKQADDIMAGLCRAIVENVFTKVVRIANPARLGNKIVVQGGTLRNDAVLRAFEQYLGKFVVRAPFPGEMGAIGIALLTKREISENGYSSPHGPSDRTRFMGFEALKTFEYKQEANLLCPFCANNCNRTLLRFSNGQTWVIGNRCERGEVVGDPNDPAVREQVKNITGLMNAAPDMIRLRNELLFKDYRYTRLLPSKDITIGLPRVLDFWRSMPFWKVFWSALGYKTIVSRKSSRLLYEKGLQYIASDTVCFPAKLVHGHIQDLIQSKVDRIFFPQINRLPADNPEKTGTFTCPVLKGYPLSIRCSDNPEEKHSIPLDSPVCHWFSDRDMRFQLCRYMQETFNIPKKITLAAIKQGEKAMDEFYGAMVEKGKKVLEDVEREKKIAVVIAGRYYQYDEQINHNLSHYFTSIGIPVLTLDSLPNLGKIPLAKSRIEITNDNHARLLAGAIAAAQHPSLEYVDIYSFGCGHDAVYSDEIIRIMDEISGKAPLILKLDESDIAGPLRIRVRSFIETVMIRRKRKTHNAKPLGDPYAVKYTKKEPKKVLLVPNVSRAFCMVMSGALANEGVLVDQLPMGGLEAIAMGKKYVHNDMCLPVQIVVGEALLALKSGKYDPDKTLVGMAKVLCDCRLSNYMPLARKALTRRVILRFRLLPPYMSDSK

SEQ ID NO: 95977 - protein, 486 aa, Unknown
  Obtained from environmental sample
  DOMAIN (167)...(335): Protein of unknown function DUF115
  misc_feature (1)..(486): Xaa is any amino acid
SRTGRVVPALVDGAGQAHALHSTVDPEKEAQRLAATLNEGWAEPGFVVFLGLGAAYAATAALSSGNASHILVIDFDINGVAELLSSQMYASLGDPRFTLLVDPDSSLIQKTILDLYNPCLSGGIRALPLRARVEQDKEKFAFVREAVQRTIEKVSADYSVQAHFGMRWFSNIIRNIGIAQSQNLVMPQISKADISDAAICAAGPSLNAQIPLLRTRRKSLFIIAADTSLPALLAGGVKPDAVVSIDCQHISYYHFVGTACADIPLFLDIASPPLLSGFSSRLFFFRGGHPLAAYLSMKWMPLPPVDTSGGNVTYACLSLAEKLGACRIIIYGADFSYPLGKPYARGTYFYPLFERKQNRLSPLEACVSSFLYRSPFLPPENGGSRSKVSPCYETTALRFYRKSFETKASAMEAEVIAESGLGIPLEIRRKPGKPFASGGQMEYFAPNKPLMDSREFLAQYRKDINALNLNSCEGKQVFTTLLPLIA

SEQ ID NO: 95978 - protein, 549 aa, Unknown
  Obtained from environmental sample
  DOMAIN (345)...(511): ABC transporter
  misc_feature (1)..(549): Xaa is any amino acid
MITVTDLSIIFGERTLFKDVNLKFTPGNCYGIIGANGAGKSTFLKILSGEIEHDKGEISVSKNQRMAVLKQDHFAFEEYPALETVIMGYPKLYKVQKEREAIYAKEDFTEDDGLRASELEADFADLGGWEAEAQAGQLLSGLGLDEEDHTRLMAELDESKKVRVLLAQALFGNPDILLLDEPTNGLDLESISWLEDFLIDFPNTVIVVSHDRHFLNAVCTNVCDIDFGKITPYSGNYDFWYQMSQILQRQARDQLKKREDKAKELKEFIQRFASNASKSRQATSRKKVLEKLDLENVPVTSRKFPYAGFKPDREIGNNVLRVEKLNFSFEGKALLKDFSLTINKNDKIAFVGLEHSSKSALFDIISGVKQAESGDCYWGQTTSFSYFPKDNSSFFDSDLSITDWLRQYSPDQDETYVRSFLGRMLFSGEEALKPVNVLSGGEKVRCMLSRMMLSGANVLILDEPTNHLDLEAITALNDGLTSFPGVILFNSHDHEFINSIANRIIEILPQGESPESYIDRMMTFDDYLTDSNVKELRSAAYHHVERLRI

SEQ ID NO: 95979 - protein, 373 aa, Unknown
  Obtained from environmental sample
  misc_feature (1)..(373): Xaa is any amino acid
VKIETSSGVAVKAVGETGYVDINNGNAVILNTNGVASTNDVPSAAVFSLHKGITVWNVDSIRAGGQAIALLTLNPNDSEFVNNAWVKRKNGTVDVFSGKIRSASTYAINAAADVTVDLILATAGTATTPATIKRGSDPAVAIGSKRGDVVVSTAASSANFSAIYSDGGKVSVGKAEVSATASGGASSIYTLRGEVTVFHEDALVTSASGTGIYVRNEKVNVYGGNVISNPASGNYAAIWVVDGDVNVGHESQPKGWSGEEVKKWTRITSNGSLAIFADGAGKYKVNVGKLGILNVKGSAATAGGIRVLKNIDVDFAGQFTASGDKSKAFAIEAAVGDVNIGGRGTVGVGYHPEDTLATIKSDEGIAVTTVGGN

SEQ ID NO: 95980 - protein, 251 aa, Unknown
  Obtained from environmental sample
  DOMAIN (110)...(234): Transglycosylase SLT domain
  misc_feature (1)..(251): Xaa is any amino acid
MEENEQQQHADRPRRQRNIVFTGKSIWISELASMALIVALLVPLLSVSLVILRNEFTIQRQNYDIAAMKADRVNTVHVLAVMREKERLVRLLGEVAGQKITPEAKYRLAELIHQNSTQFGYSPELLLAVIAVESKFNPQALGRYRGGALSGALGIMQIKYATASYIANTLGMGQITRQDLLDPEINMVLGTAYLMTLITQFKSFKHGILAYNLGPNKVRLALVNKEPLPMRYYEKVLKQYYRIKDMGRIKR

SEQ ID NO: 95981 - protein, 84 aa, Unknown
  Obtained from environmental sample
  misc_feature (1)..(84): Xaa is any amino acid
MNAARDAGASGGTVVHARGLTHEGPVKFFGIAVQEEKEIVLVLTNREKKLPIMEAVSRSCGITTKAEGLIFSLPVENVMGLNLE

SEQ ID NO: 95982 - protein, 149 aa, Unknown
  Obtained from environmental sample
  misc_feature (1)..(149): Xaa is any amino acid
MAVVAMIGVSGSGKSTFAKTHFKPTEVLSSDYFRGLVSDDENNQQVTPQAFDALYYIANKRLELGLLTVIDATNVQREARASVLRLAKEQNCLAVAIVLDMPEKMCRERNEKRPDRKDMAANVVTRQFGNLRRSLNSLQKEGFRYVYVI

SEQ ID NO: 95983 - protein, 80 aa, Unknown
  Obtained from environmental sample
  misc_feature (1)..(80): Xaa is any amino acid
DGRGYPRQLKEKEIPISARLAALADVYDALVCARVYKAAMPYEEAIDIIKQGKGTQFDPIMTDAVVQIQKEFQEISRMYQ

SEQ ID NO: 95984 - protein, 291 aa, Unknown
  Obtained from environmental sample
  DOMAIN (14)...(288): AMP-binding enzyme
  misc_feature (1)..(291): Xaa is any amino acid
SYYKGKDGKFRSVTYRQFYENVCFVSAGLLELGVKRGDKIGLIADNRREWMLSDFGVLSIGAIDVPRGCDITTQELIYILGFTGCEIAFAENQKQVEKILSCKAELPVLKTLITFDPVDNQTEAAAKDAGINVLFFANLVAMGEKREKMRSGEVEAEMDKGGSEDIASIIFTSGTTGEPKGVMLLHRNFLYQLPYFILFFEVKPGDIWISMLPVWHVYERLMEYVIFNYSNGIAYSKAISSILMEDFKAIRPHWMVSVPRVWEAIMDGINRNIKAKSGFTKKLFDIAVSMS

SEQ ID NO: 95985 - protein, 386 aa, Unknown
  Obtained from environmental sample
  DOMAIN (2)...(374): Glycosyl hydrolase family 92
  misc_feature (1)..(386): Xaa is any amino acid
IFHLLQPKRNSDMINSMLAHYDQSVDKLLPVWELDGNETWCMIGYHAVPVIVDAYLKGIKGFDPQRAYDAVKTTAMNPDYDSVALYAKLGHVPFDKENESLSKTLEYAYDDWCIAQMAKALGKNDDYNYFMKRAGNYKNLFDATVGWMRPKDSNGKWREPFDAHNYGGGAANFGDITEGTSAQYSWYVPHDVPGLISLMGGKKAFTDKLDGIFAYKGKFSTGEENEDVRTIGEYWHGNEPSHHIIYLYSYVGQPAKAAERIHQVIRTQYGNKPDSLSGNDDCGQMSAWYLFTVMGFYPVCPGSDYYAIGSPCLPKVKYSLASGQSLTVEAKNLSEKNIYVQSLKVNGKDWTNPFLPYQEIINGGTLVFTMGPKPSKWGTNPVVPER

SEQ ID NO: 95986 - protein, 96 aa, Unknown
  Obtained from environmental sample
  misc_feature (1)..(96): Xaa is any amino acid
MPTPPVLPPPVLLPPLLPPELPPPPPPLLPPPGGVVGGLGGAGSSGAPATPVPPVLADVEGSYPTGVGGTGASFWEADAMLYAAIPLEEPAPTRTV

SEQ ID NO: 95987 - protein, 474 aa, Unknown
  Obtained from environmental sample
  DOMAIN (129)...(474): Carbohydrate phosphorylase
  misc_feature (1)..(474): Xaa is any amino acid
VGDQMSQTAKEKETADGAPAAPKHKALTTPKGWSINHKTLDKADVLKSVLYNLEYNISKDRLSNTPYDLFLSLSFAVRERIIERWISTSQTYKNHNVKRTYYLSMEFLMGRLLGDSLMNLRMTEASEEAVRELGLDLEELIDQENDAGLGNGGLGRLAACYLDSMATLRLPSMGYGIRYDFGIFNQKIVNGFQHEVPEQWLQRRNPWEIERPEYKVVVKFYGRTMQYTDKNGKPCNNWIDTENVVAMPYDIPVPGFGVNNVNTLRLWSARSAEEFNLQYFNSGDYIGACHDKFTSENISKILYPNDNNVSGKELRLKQQFFFSSASLQDIIRRYLQTNKDFKAFADKVAIQLNDTHPSIAIAELMRLFIDEHGLSWDEAWDIVQKTFAYTNHTLMPEALEKWSVGLMQHLLPRHMEIIYEINAGFLRQVSYKFPGDIDRLRRMSLIEEGDDQQVRMAYLAIVASHSVNGVSALH

SEQ ID NO: 95988 - protein, 257 aa, Unknown
  Obtained from environmental sample
  DOMAIN (33)...(257): Histidinol dehydrogenase
  misc_feature (1)..(257): Xaa is any amino acid
MPATTARKRSAASARLRQIPIADANSREGKSLLKKINEARECRDDAVMRAVGSILSDVRENGDAALFKYTKRFDRALPSKSLRIPPAEIAVCARLASSELKNAIRETARRLRQYHGCQGLQMFKINTPDGELRQAVRALNRVGVYIPGGRTVYPSSVLMNVVPAQSAGVKEIVAVTPPQSGGIDAGVAFALNHLGVTEVYQVGGAQAIAALAYGTETIAPVDKIVGPGNAYVATAKRLVYGKGDIDCVAGPSEVVII

SEQ ID NO: 95989 - protein, 324 aa, Unknown
  Obtained from environmental sample
  DOMAIN (1)...(324): Histidinol dehydrogenase
  misc_feature (1)..(324): Xaa is any amino acid
MFKINTPEGELRQAVRPLNRVGLYIPGGRTVYPSSVLMNVVPAQSAGVKEIVAVTPPQRDGIDTGVAFALNLLGVSEVYQAGGAQAIAALAYGTETIAPVDKIVGPGNAYVAAAKRLVYGKVDIDCVAGPSEVVIVADKSAPPQFVALDLLAQAEHGTGDEIAVCIVESKIVATKIAAAITKEINASPSKATFMKLPSHSIAIFVTTSRTESLELCDIIAPEHLQLMTETANDDAWHVSNAAAIFIGVETPVALGDYFIGTNHVLPTGGTARFASPLGVESFQKRISMAKVSLKGLKAAMEVVPTFARAEAFHHHAVSVEARME

SEQ ID NO: 95990 - protein, 351 aa, Unknown
  Obtained from environmental sample
  misc_feature (1)..(351): Xaa is any amino acid
VKFNAGGGTVSPDSAKTGIGGRLASLPTPVRGGYAFGGWFTAATGGDSVKLDKVYTATTIIYARWTVVTYTITFNAAGGAVTPASAKTGAGGTLASLPNPAARTGYSFSGWYTAATAGTQVTASTVFVSDTTIYARWSAISYTITYTLSGGTVTPANPTSYTVETPDITLNNPVRSAYTFDGWTGANGKEKQTSAYLEAGSIGDKSFTANWTLNNYTITFDPSGGTVTQESGKTGAGGHLASLPTPASRTGYAFDGWYTESSGGVKVSTSTAFGGDATVYARWTATVYTISYNLNNGTLTAENPKSYTIESGGFSLNPPVRVAYTFDGWTGANGTVKQTDVYVEPGSIGNK

SEQ ID NO: 95991 - protein, 68 aa, Unknown
  Obtained from environmental sample
  DOMAIN (1)...(64): DnaJ C terminal region
  misc_feature (1)..(68): Xaa is any amino acid
INTLEDKVSLKIPGGTQSEKIFKLKSKGLTEYRGRNKGDLLVKIHVNTPEKLGREEKDLFEKLAKRGM

SEQ ID NO: 95992 - protein, 491 aa, Unknown
  Obtained from environmental sample
  DOMAIN (324)...(491): Type II/IV secretion system protein
  misc_feature (1)..(491): Xaa is any amino acid
MDSNNDKTSEPFKLALLGYSRKDFDSITRLVNIIDLGRPLKLSVGDLSKMHNVECDLVIAILDNISNLDTYNKHVSLVKQKSSNPPVVCAAREADRQILESYRMGVKTDHIIFMPIQLERFAAMIRRFGFGASGNGDVAATATSPLRLGELFLKGGLITKDDLERALEHQKQNNMYIGDALIDLGVINEDQKLKCLAEQLKTVVAASRQYASVDLNVVALIPEQTARRFNCIAIEKHGNELIVATTDVLDLNMLDTLRDMTDMRITAILGKKEDIATSLDRCYRDISSHKDASRLTENMDDHVEYVKRKEKETSDEEDASAAAGAELGIIKLVNILITNAIRDHASDIHIEPMENELLVRYRVDGDMRKVMSPPKNSHHAIIARIKILSDLNIAERRLPQDGRMTIKIGQREVDIRVSVLPTIFGEKAVLRILDKATFEKNTASLGLTQYDERIFRSQIAKPYGLVIITGPTGSGKSTTLYSALQAVKTGE

SEQ ID NO: 95993 - protein, 208 aa, Unknown
  Obtained from environmental sample
  misc_feature (1)..(208): Xaa is any amino acid
MRLLPTDYYFTEEQLMKLTEKQKDEQLLAAGLLDPVPVQLIRYYGALARFDFGTSRRIQNGVPIVEIIAKRFSISMRIGISSVALSLLIGVAIGILQARFKNKLPDNLGIAYTIFVNAVPHLVSYSLILIFGSRVLGLPSLYSSRNPGISSVLPIICLAMGNIAWWAMWTRRYMIDEANKDYIKLARIKGLSSQKIMVRHVLRNAFVP

SEQ ID NO: 95994 - protein, 524 aa, Unknown
  Obtained from environmental sample
  DOMAIN (8)...(381): FAD dependent oxidoreductase
  misc_feature (1)..(524): Xaa is any amino acid
MSDNSARQFVVIGAGPAGLTAAYKILQDIPNARVDVFESTDRIGGISTTIEYHGNRIDIGGHRFFSKMQAVNDFWWNIMPLQGAGSKDDNILGTDKEFAPDGPDPEKTDVVMLLRRRVSRIFYRRRFFDYPIALKAQTFINMGFFNTVLAGISFVYSSIFKRKENSLEDFYINRFGKHLYRMFFEDYTEKVWGVHPSKLSASWGAQRVKELSVAAVIREAIRKVFRKNYKTDQTSLIEQFFYPKLGPGQLWSLVAEKVQAAGGRIHYNQKVHEIILENGRITAVKTSGQDKPFACDTVLSTMPVRDLVCAINPAGQVPEPVYKAAAALPYRDFITVGLLLKRLKLVNKTNLKTLQNIVPDCWIYIQERDVRIGRLQLFNNWSPYMVKDVENTIWIGLEYFCTEGDNLWNLSSEDCIQFAIGELVKINIIDKEDVLDATHVKIEKAYPAYFGTYSEMDSIQNYLNTIPNLYCLGRNGQHKYNNMDHSMLTAMRAVELIKAGGGDKSTVWNVNAEKEYHEEKKDHT

SEQ ID NO: 95995 - protein, 181 aa, Unknown
  Obtained from environmental sample
  DOMAIN (2)...(134): Phosphoglucomutase/phosphomannomutase, alpha/beta/alpha domain I
  misc_feature (1)..(181): Xaa is any amino acid
MKLMRSISGIRGIVGKTLTPQTVISHTKAFLDLIKAKKIVIGRDSRPTGGNITEMVCSVCSLCGVEVVDAGLATTPTVELLVEQLKADGGIIVTASHNPIEWNALKFLNSKGMFLGPDEVKELFAKADAFGKRESISNGDEMHIKATIALPFVDEQKIKERKFKVAVDAVNGAGSYALPSC

SEQ ID NO: 95996 - protein, 520 aa, Unknown
  Obtained from environmental sample
  misc_feature (1)..(520): Xaa is any amino acid
MPLPCEHFKASSGALSARVRSDSFERLLHSGIKPEQEKNWFRPQNISQVVFAFGTGLGYHLEFLNDLPQGEVQLVVLCDAFSENLEIVKKKLAGLNVALFSDDLSQFADIFKNNHITVIRHPAAARYCTDQAEPALKNILTIAHPVSSAATPLEAGSKTIALPFGTHFLQQEILNALNELQIPHITLQQENENPSAQESELMELFQKNTPRLVLCVNAKGLDSEGILLSVCKRFSVPIHIWFVDDPRPIACLLNKSQCKNIFAWTWEKAYIPWLKEKGFADAQWLPLAGDPHLFYPQNKKTIYDLLFTGSAMAENFLNKIWERIPYDKEEALPIAQNTAFHVLTGKINAEHIPVDTRDEAWFASYCIHLASNEKRRLCLEPLLHLGLQFAGDPQGWKMMFGPAIKTLPDIDYRKGLNSHYSLGNIHINITSCQMPGAVNQRVFDIPLCERFVISDTQSDLFELFPQNAICVANSPEEYAELAKFYLKNTSEKNAIIKNAMEHIMKEHLYKHRISKFLQSF

SEQ ID NO: 95997 - protein, 442 aa, Unknown
  Obtained from environmental sample
  DOMAIN (5)...(234): ABC transporter
  misc_feature (1)..(442): Xaa is any amino acid
TEKNKTRLMDSIEKAYAESGGKIKIKIGNNTASYSNFPSCPDCDFSLKRELDPKNFSFNSHFGACETCQGIGDIYKRICPKCKGERLKPEFLAVKIDGKSISEACKLSISEAYEWFSNIPFNKTQKIIADPLLKEILGRMEFIINVGISYLGLNRRGDSLSGGEAQRLRLAGQIGSGLEGVLYVLDEPTIGLHQSDTKKLLDSLYKLRDLGNTIVVVEHDLEFIRASDYVVDLGPRAGEFGGEVVATGTPKEISNAAAKFPHSLTIPYLAGKKTLCDTEHKALDMSQGDNFFELNNLAKNNLKNISVKIPFGAITAISGVSGSGKSTLMECIYDYAEKKKKPVCFIDQTPINSSPRSTPVSYMSILEKLRALFAKLPESKTRGYDIGRFAYNKEGGRCEVCEGRGYQLIEMHFLSDVWELCDECKGKRYNKETLKILWKGKS

SEQ ID NO: 95998 - protein, 219 aa, Unknown
  Obtained from environmental sample
  misc_feature (1)..(219): Xaa is any amino acid
GSSSEVFAVFGKNIERIKKNLLLLAISGGIVAIATTLLLVAEGPASLTLTAEGRYNEAAIVALGRCLGFIPLVMTTAIISGVYSPAGTKAIHVPAILFINLGIMGFVGSFFVGALIMTIEVLLLGFIAKGLDRFPGMKELGDNTRTAMSKVLDIALLVGGMMAANAIAPTIGYIWVIGLYYLNQNSKKPVSSMAIGPIGAISMGILVNILHLIGLFPKP

SEQ ID NO: 95999 - protein, 297 aa, Unknown
  Obtained from environmental sample
  misc_feature (1)..(297): Xaa is any amino acid
WLVEMDYHDPANDERNQWFKSAKYDMGTFIKWPQLDDTSFTKNPNNTSQLDFVKTDFNGLVNKMSENGFPTNGYRDMIDLESWAKYVLIQLFMDNFDFNSKAQTGFLLGSNYCYRVDSSRTSRIKAGPLWDFDLAAGLERTAPMGGGGGWGGWGGGGMGGASSFPAHYKTYQDSIAPTHAFYRRLWEDPAFKAKYYKTWLKHKSDFQAMSQLIDQIKSQVEGSVQGKGANKWANNQMMGSANLTTQQFNTEVQNLKTWWNNRLNWVDQRLKSYNIDTTKDVIQNSPGDNHTSIASNQ

SEQ ID NO: 96000 - protein, 391 aa, Unknown
  Obtained from environmental sample
  misc_feature (1)..(391): Xaa is any amino acid
MQLTLTDPAKPANNITVTDYKDSIRGRGNSTWAVDKKPYRLKFGEHKSMFGSNKHKSWALLANWYDPTFTLNAVAFELGRRLGLPGTPKYYFVDFYLNGTYKGIYQITDLVQVNKGRVEVDTAAGWLVEFDYHCPSDADEIDFNTEYPNSPSSDARLHTFIKSPEDLRSQSGYQFVKDDINKLTRMMFQTQGFPTNGYRDLIDLESMAKYTMIQLFMDNFDFNNKAMAAGTGVGGSTVAKPGSNFMHKDKGKMMVAGPLWDVDLAAGVDNSQNFPKHYQYYNYPIKPKHPFYLKFFDDPAFLAKWKKAWDRHKNDFSDMTRIMDSIANVVQGSVEKNFALQNNNSGGGGIWGGGFGGMNPEAPKTVQAYKDEVNKLKTWWNNRMNFYTQEI

SEQ ID NO: 96001 - protein, 411 aa, Unknown
  Obtained from environmental sample
  misc_feature (1)..(411): Xaa is any amino acid
MANEPWLILSTKDGIMSFNIKDINFIKFKDTAIEKDLERALDLIAASRNSLSRQLLVNLPGSGRRNVSISYVIPSPVWKVSYRLDLGTAKPLFQGWAIVDNDGDTDWNNIELSLVAGRPTSFIQELYPPYYVYRPVLPLSIAGAAPAASYDTSVYMAADEAETRSKSRMEYGTLRDQAVAEAPAPRASAATSNLTGGVVDTAGGNMAGGQFEFTIKNPVSLNRRMSAMFPLVETTLQARKLLIYSGTGRFPRLGAELTNTSKMKLPAGPITVYDGGVYAGDALIEFWNENEKRLISFGEDLSVTASTSNTSANVINKVNISLGVMTITRLLNFTKTYTFINSGSEQKPLVTEHSKTSNTELVSPKADEQTTYVYRFNITLAAKGDTVLTVTEQRPLSERITLLPLRLDSLI

SEQ ID NO: 96002 - protein, 337 aa, Unknown
  Obtained from environmental sample
  DOMAIN (72)...(203): Pyridine nucleotide-disulphide oxidoreductase
  misc_feature (1)..(337): Xaa is any amino acid
MLHAAATGIDTGKQQVILSDDKRVPYNKVLVATGSQPFVPPFEGLDSVTDKVTFMSLDDARKLGGMINKNKRVLIIGAGLIGLKCAEGISGKVALITVLDLAPRILSSILDDDGAKTVQSHLESKGIKFRLAASAKKFEGNTAVLDNGDKIDFDVLVLAVGVRPNTALLKDIAKIERGIVVDERSQTTAPNIYAAGDCTQTLDVSSGQSKIMALLPNAYMQGECAGINMAGGEKAFDKAIPMNAIGFFGLHIVTAGNYVGEVYSGGGKGDYKKLFYSDNKLNGYILIGNVEKAGIYTSLIRERTPLDSIDFALVCEKPGLMAFTKEERKIKLGGIAS

SEQ ID NO: 96003 - protein, 283 aa, Unknown
  Obtained from environmental sample
  misc_feature (1)..(283): Xaa is any amino acid
LEDTSIPILADSKLSYIGEPVAILLGQDKIKLEEFAKQCKVIYDEQTPEFNAIEPAAVVREIQIGDCKSVFEKPGKIIAGSYITGIQDHWYAEPVGAVTYYEKNQKTKDEKAPQNSPKGSPGGGEEKKETKLKKSEKLLIVKTATQWPYHVKRSVARALGIDQSEVSVEPTSLNLHMDGKLMFTSLVACHAALGTFFTKKPVRLILNREEDFFYSPKRCKSNIDIVTTIDDKGSITAAEIDISVNLGAHKVNGEEILDQVCLGAIGYYDIENLKITARANLTN

SEQ ID NO: 96004 - protein, 301 aa, Unknown
  Obtained from environmental sample
  misc_feature (1)..(301): Xaa is any amino acid
AFSQEEPQSNSIFILNSFDFNIKGLTRPDALIRKGELKTGEELTGVSELIKYIQDKTQLLYNERVLDSVSIDYTIGQPRDDGKFPVDITITTKDTWNIVAIPRPRYSSNTGFDITLKARDYNFLGTMSPLRIDLGYSYDENKNNSFFFMFDSNIPFMAYGLNWNINFYNDFTYRHDTEQPIYNRNTTGLSVELPVGFTTVTAGISESFIVNEENANIYKPEYGNFQDGFYMSTNPYISWKIPLGINAGIFGEVVFTPGVSAVFPHEFARWPLDDIRKGPILVLKQNLGFNRIDWMETSERD

SEQ ID NO: 96005 - protein, 140 aa, Unknown
  Obtained from environmental sample
  misc_feature (1)..(140): Xaa is any amino acid
MIEDRLADFLDIIGINEYYGWYDPDFEKLPKMLFNSNPDKPVIITEFGGDARLGQRGSVDDLWTEDKQKRLYEQQTEVFKKCPYIAGTTPWILYDFRCPRRLNRYQEGFNRKGLIDAERKVRKPAFYVMQEFYAGMRNEE

SEQ ID NO: 96006 - protein, 653 aa, Unknown
  Obtained from environmental sample
  DOMAIN (18)...(523): RecF/RecN/SMC N terminal domain
  misc_feature (1)..(653): Xaa is any amino acid
MAFVQFSKVSLAFGDRDILKDVSLHLASGSRAALGGANGSGKSTLMKVLAGELPADSGDRAVQRGTRISYLPQSGIVHRGKSLRDEAETAFAHIQELIDQAEKIAALLQDAKSDDSSKALLEDHHRLQEQIENSGYYHREAEISSVLAGFGFSSKDLDRDTGEFSGGWQMRIALAKALLEQPDILLLDEPTNYLDIEARTWLENWLAKFPGGCLLVSHDRYFLDVTVNEVYEIFQGNLKRYAGNYSAYEKTRQMELSAVMKRYTEQQEEIAKTEALIRRFRYKATKAAFAQELIKRLEKMERIEIPENLKKINITFPPPPHSPRVALTIEGLGKSYGAKRVLGGLDLTIDSGERLVVAGPNGAGKTTLLRILSGNDIDFEGSVKFGSGVCAGYFSQDAAEALNGSEQVIEFMEANAPMQLIPKIRDMLGAFLFRGDDVYKPVSVLSGGEKSRLALLYMLLKPLNLLILDEPTNHLDLHSKDVLLETLNQFKGTIIFVSHDRAFMEALSTKTLELSPGEGASSSRARLFYGNYGYYLEKTMSGFLGDLSPSGGDREQKIAVVSDSHLKTCAMEQRAQNKQRQTEIRRLQRQEAELLNVIEGLENEKSRLEAELSLPAVYSNGEKARTVKQKLDECIDVLKVKTSEWETVAALIN

SEQ ID NO: 96007 - protein, 306 aa, Unknown
  Obtained from environmental sample
  misc_feature (1)..(306): Xaa is any amino acid
AEGSPAIGSTGEPLPGEWYKVLTEDGSTGYCFSYRLRVFEYGSEDFTSSVAVINEQAEDPELEILLSKEWSPESYLTMINSKKINLEELSKHWRFDPGQEIGRARVFVPDIDNTFQYTSIRRDGNRTWRFEGTNLSIQLRGETILAVQFPEGSGSTRTLLFVSLPVSVDDLILQEAARRESLYNRIYSRGPVYTSNNYGTITFKGGGRFSWRNFDLLVPRFIPEDIEGDGTVLLDLFLDSAFEDRYDGAFTLRFANKKAALYCMYSLDNEGFRIEIVPDSSIEEVTITNRGASPMVLYFFRDTEPQ

SEQ ID NO: 96008 - protein, 286 aa, Unknown
  Obtained from environmental sample
  misc_feature (1)..(286): Xaa is any amino acid
SPSSGGWTAVASSTFGDNDIYAIAYGSGKFVACGGNGKMATSTNGVTWTAVSNSTFDEEGIYSIAYGNNMFVAGGFRGKMATSTDGVTWKAVTSTTFDRNDRVIVAFGNGTFVAGGNRKMATSTDGVTWTASNVLNDNGYVAVYNVKAIAYGNGKFAAGGDNYGKVIAYSSDNGATWKDVTINTLGSTTSEIFTIIYANSKFVAGSNNGYMLTSTDGVIWTAVKDNTLGLNDIYAIAYGNSEFVVGDRNGDAATSTDGTTWTAAGNKILGYYTYNDWKTGYIINAI

SEQ ID NO: 96009 - protein, 234 aa, Unknown
  Obtained from environmental sample
  misc_feature (1)..(234): Xaa is any amino acid
MKKRLIFTFIVIASVLLFLAASPWEGSAAIAPNGDLPATGYYIATNAYPRNTVVDITNLETGKSTRVIVSNILTSPGLLAVVSRQAGELIGMRAGSVSRLRMIQPTDPMAYMRFTQSMKDGNPEYDSGNVITEDNLVAQVYKDDTYRPPEAVKAPEEPKSPLLPGYIVDEPEWGGEGRLQIVDVPGYLPESSAKLASAYEPELLEREKDVAPKIDERPPVEVVKEVPEYDPDRV

SEQ ID NO: 96010 - protein, 497 aa, Unknown
  Obtained from environmental sample
  misc_feature (1)..(497): Xaa is any amino acid
GHEETPDFGADTVQDLFSPDLAGQGSFVTSRGSAPFSAINPAQAGQTDRMILNIGAIGITNLNIASELGGIFDLGFLYPTKSATFSGTLRYYYFDQFKTDFPLKSELGGNFSVAKEFFPQFSLGAGINFGAGTGDWTLSADLGLLHNLGNLGFLKNFTWAFVLRNMGKSWAPTWFTPWLGFTFDFLQIPGKGGKPDPLIMNFAADVGVPSVIDPENINLIVKAGITVTILEKLTLSVLWPGAAGYNMREAQKENKGHFQWYPSVGMGINFLIPSGGKRQPGERRPSDGDITFDAVFKPLYYDVYATGAGVTWYAPYRDDLPPNIIVDYPETQYISPNYDGKSDSLVFPVRIVDDHYVMGWIMTIKDANGNIVRTYQNKDRRFEMMDVRDIYGRYYVEKKGVEVPPTMRWDGVFTTGEIGPDGKYYFSISATDENGNVGTSRDYEVILKNTPPQVAIDNINLNDRIFDPSGGNRTSINIVPRGTMEDKWESGIYDSEG

SEQ ID NO: 96011 - protein, 411 aa, Unknown
  Obtained from environmental sample
  DOMAIN (2)...(192): Bacterial extracellular solute-binding proteins, family 3
  misc_feature (1)..(411): Xaa is any amino acid
ILRELESLTGLNFNIANDKNAEWPELLSSLESGETPMVTELLFSEDRIGAFLWPRSVIMTDNYALISKSDYPNVSINDILRLKVGLIKNTAYASLFNTWFPDHKNNVLYDNTDAAFDALESGEVDIVMANLSQLLMLTNYYERTGYKANFVFDFTSESTFGFNLNETILCSIVDKALRLIDTRGISGQWMRKTFDYSAKLARSQRPWLIGAAVLLFCVIVFLIVLFQRKKIIEKWLEGIVYKRTTELYEQHILVSLINDIAVVLLESEAGDYLTSINKGMEMIAHYVKVDRVSIWQNYQKEDGNLYCKLACQWANKGLPKLEVGTSYSYHDSMPNWEILFNKGKYVNSIIDDITEPERSMLMEFTIQSLLALPIFIKEKFWGYISFDDYHKKRIFPETEMFSLRSWGLLAV

SEQ ID NO: 96012 - protein, 270 aa, Unknown
  Obtained from environmental sample
  DOMAIN (1)...(42): Helicase conserved C-terminal domain
  misc_feature (1)..(270): Xaa is any amino acid
MVATNAFGMGIDKSNVSYVIHYNMPNTIESYYQEAGRAGRDGSPADCILLYNGQDVRINQYLITHDEDEETADIELQAHNLELLKQMTFYAAGHDCLRRRLLAYFGEKAPANCDNCSNCLTEFSETDITVEAQKIVSCVYRLKQRGRNFGKTMIIDILRGSKNEKLLRLGFDTLSTYAIMTDTSAHRIRLIIDHLIDKGFLLLEEGEYPVVMLGNAERVFREEERVFMKLPQEREKASDKKMSQQKSIKFIDTQNASDEKTQKQSGAKFF

SEQ ID NO: 96013 - protein, 89 aa, Unknown
  Obtained from environmental sample
  misc_feature (1)..(89): Xaa is any amino acid
METISITELKAGFSKVLKTVKNGRRVGVLNGRNKKPVAIIIPFVESEYNESSYEIGKKYFGKYGSDNGNLSQDYKKMLKRKLHAKLSPS

SEQ ID NO: 96014 - protein, 129 aa, Unknown
  Obtained from environmental sample
  DOMAIN (5)...(124): PIN domain
  misc_feature (1)..(129): Xaa is any amino acid
MQNSVLVDAGPLIALFDKDDYYHKSIKRFMSVNNFKLITTIAVITETSHMLDFNVHTQIDFLKWINEKGIIIHEIQQKDIQRIIELSVKYSDIPMDFADATLVLAAEHTGIHKIISVDSDFEIYRCSKE

SEQ ID NO: 96015 - protein, 622 aa, Unknown
  Obtained from environmental sample
  misc_feature (1)..(622): Xaa is any amino acid
MKFNRLHILCLISLFTSVCFNIYAQPVTNAKDDSQAALQYVQWIQQAVDEQRWDEALAAATRAMDFYSVSSDIPYLLAVVQSRYKNNIRQKAVVDSLNKAIDANRWVKYSEYNAQLLKAQMLISMREYQDAIACLDKIDAAGSRADSVMLRLLALRGMAGGKELGYDYAYASAQFRGQVLLAMDKFPRDPRPLRIFFEYAHNRKPQASELPESDINLLELALKRLPFLQEADPELAWMAAPFIRNIDDARRSAAAYRSGNLSNDENFKPNPASIPVALNLGLIDDKTAIEEVFSSVTVSNDTPIIFDKELPVIFDKAPPTLDKEVPLIKKEIIIDTYKLLRSEEGREVFTRKLLTFSGFIIVDDDNDGYIENVVHYNAGFIDYLIDALSNNVFRFGVKFGLDNDPEKVSAFISKNDSSRERNLSRRISLQWERYPSVKQAELENEMFNFGPVFFSYAPIKFIELGGSDKLTGLLYPELDYQYITLTYKALLSFCSSYSRPSLEIDGATETIYMDRGVILRVIETLKGRQVSVTEFEKGLPVVQHIDIDLDGRMETIRRFRRPPPGYEMENVLDYRRLIASSESDWSGDGVFKTKEVYLQDGSVVYSFDIDGGGEMNYSETRK

SEQ ID NO: 96016 - protein, 267 aa, Unknown
  Obtained from environmental sample
  DOMAIN (55)...(179): PAP2 superfamily
  misc_feature (1)..(267): Xaa is any amino acid
MEEVLQWGLDCVRRIQILAAVPGLTIIMRAITNIGSTAIYFFLFPFLYWCVDEKKGLRLAVVLFISTWLNLALKFAFNQPRPFFESYDPSVGLVHEILGGFPSGHAQISLVMLIILASWKMLPGLSRAAHFGIAAFLCLLTGFSRVYLGVHFPTDVFGGWLLGGLTLAVYFTAGSRIEAWLESHNPRIGLIAAAAVAFAMNMYRPSEYLLLPGGIILGLGIGGFLRRRYINFNASLKDRSGKEKHLTRLVRYVLGNYGMVLLFVAVG

SEQ ID NO: 96017 - protein, 304 aa, Unknown
  Obtained from environmental sample
  DOMAIN (191)...(304): Glycosyltransferase family 28 C-terminal domain
  misc_feature (1)..(304): Xaa is any amino acid
LDLAMKKILLTGGGTAGHVTPNLALIPGLKSAGFDIHYVGTSAGMERGLVEKAGLTYHCISAGKLRRYFDFKNFTDAFRIAVGFFQSIFLLIKLRPAVLFSKGGFVSCPVVWAAWLCRVPAVVHESDITPGLANRLSMPFVKKICFSFPETESHLPASKRVMTGLPVREELFGGDAAMGRELCGFTDGKPVVAVIGGSLGASAVNEAVRGGLNKLLVDFNVCHICGKGNKAPGGRSGYCQFEYVGAELPDLFAMADVVISRAGATTLFELLALCKPALLIPLGTAASRGDQILNAESFEKPGIL

SEQ ID NO: 96018 - protein, 197 aa, Unknown
  Obtained from environmental sample
  misc_feature (1)..(197): Xaa is any amino acid
MLNVNDTILKTRVKKAYAEWQCVFQELDTETFNLKISQLFSEEESSGDFQPETSRDSRESVIDQVADDAPVVNLLNSIFLEAISRRASDIHIESGAYETAVRFRIDGLLVTIKQINQERAIAVSARLKILANLNILENRRPQDGHIDVKTDSYSLDVRISTIPTVWGESIVLRLLNRSDSPLSLTPLVFPQGMLRIC

SEQ ID NO: 96019 - protein, 111 aa, Unknown
  Obtained from environmental sample
  misc_feature (1)..(111): Xaa is any amino acid
MRHESWAYEIRRRPRKIKKDIVSGVSFSEAFARTKRFSPYVLGWLSIADINGNLNEISGNIRDHYLQKESKIREIAAKLIEPAVIVLVGIYVLIIMATVILPILSYSGGIL

SEQ ID NO: 96020 - protein, 283 aa, Unknown
  Obtained from environmental sample
  DOMAIN (120)...(282): Predicted permease
  misc_feature (1)..(283): Xaa is any amino acid
MRKIIYFIIEAFRGFYQAKLMTFVSIMTIAATLFLICGAFIALMNIEEILNNAGDMPDAVVYLNDGVSGDSAQRGGLIDSIKKMPGVKALVFQSKDSAWSRFKAMYGAEMLEAVDENPFAASIDITLYESSQTSQAAAELQEKISTLGGVESMRYSRDWFDYIKTVRDRFYIISIAAGLIILLALHAIISNTIKLTIYARRDLVRNMHYVGATDLFIKMPFLLEGMLQGFIGGVLCVGVMIAARVVLSNISINWHFSYLPFVVVIGVFFGWLGSRLAVSKFLV

SEQ ID NO: 96021 - protein, 293 aa, Unknown
  Obtained from environmental sample
  misc_feature (1)..(293): Xaa is any amino acid
KADISDGKIKKAPELERRIDTYLRYYNGYGAILVQMNVEDSRNGVAEYVIDKYGDKVAIELKWGQGAKNIGGEISVRDIEYAKFLHKRGYLLDPDPTTPDAAAAAKHGIHAHFARHSRLGYTNLDSYAAVRKDFLSAVRKLRKLGYKTITLKTGAYGMEALAMSIRLAADAELDLLSIDGAGGGTGMSPWDMMEHWGVPSLQLHAKAYEYASMLAARGIKPADMSFGGGFAKSSSIFKGLALGAPFTKFIIMGRCMMIPGFLGSNIEGVLRPANKAKVHGNWTELPQSVSQYG

SEQ ID NO: 96022 - protein, 84 aa, Unknown
  Obtained from environmental sample
  misc_feature (1)..(84): Xaa is any amino acid
VRLCELIALADQADEQQKKLVQVFHEALDYFEKRDWTQAEKGFQEALSILSGDNPSVLYLDRCKEFIKNPPEDNWDGVYNLTSK

SEQ ID NO: 96023 - protein, 266 aa, Unknown
  Obtained from environmental sample
  DOMAIN (32)...(266): Aminotransferase class I and II
  misc_feature (1)..(266): Xaa is any amino acid
MGTTVKTSVDQALALVNDSVRTLKAYHLTPETRNVKLNQNENPFDWDRSIKERTAEFFVERPWNRYPDFVPDSLKARLAAHVGVTPESVIVGNGSNEMLLVLMLSFAAKAKSVIVCPPTFSVYRLLSNGTGARPVDVSLTDDLRYDIPAIKKAAAANPGSMLIICSPNNPTGNAVSEADLRDILSVHTGICVLDQAYVEFGGFNGLSLINEYKNLIVARTFSKAMAAAGMRLGYMIGDPELIVEINKIKLPYNINFFTEHAASTIL

SEQ ID NO: 96024 - protein, 340 aa, Unknown
  Obtained from environmental sample
  DOMAIN (90)...(245): Peptidase family S49
  misc_feature (1)..(340): Xaa is any amino acid
MKLNAKLLVFGACLLMTRPLFAQNIFLELNLNSQRGQGFTRSMRSKSSLELFRVIEQAGNDRKIGGIILNISACQEGKETLWELRNALEKFKAKGKKVCSFISGADLDLYCLATIGDKIVMDDQGVLMLTGYTWGRGYVKHSLEKLGIGARELRYLKFKSAAETYTRDSLSEADRAQYGEILDDIMRTTRDTVTMARSWTTDEFDTIINNEYMFSAKNALARGLVDRSGRKEAVIEAVKEISDGKGAGFFFLYGETESSVTGSKFIYKPGRQSGLFSRPPVIAVINANGITDMERGIAAWALSNTIRELSEKRRVKAIVLRINSPGGSAEAADYVAEAEK

SEQ ID NO: 96025 - protein, 68 aa, Unknown
  Obtained from environmental sample
  misc_feature (1)..(68): Xaa is any amino acid
MGRPKKILETDRLYLREFLDSDYNDLCGILQDKDVMYAYEHSFSDDEVKSWYNKLIAWHYEKHGFGLW

SEQ ID NO: 96026 - protein, 332 aa, Unknown
  Obtained from environmental sample
  DOMAIN (140)...(275): SecA preprotein cross-linking domain
  misc_feature (1)..(332): Xaa is any amino acid
MGSIVLHQGKIAELKTGEGKTLMVVAAAYLNAIPGKGVHVVTVNDYLASRDADWMRPVFTYLGLTVGTILSDMDNERRRDNYACDITYGTNNEFGFDYLRDNMCRDMRSRVQRGHNYCIIDEIDSILIDEARTPLIISGAAEDDTFKYAEVDKLLGSLKEVEKKADGEYPDETQGETVSGDYKINEKNKNISFTNQGLANIEEVLKKRNLIQGAIVDEENFEYIHYFTQALKAHLLFHIDVDYVVEDGEVQIVDEFTGRILHGRRYSDGLHQAIEAKERIKIAQRNRTLATITFQNYFRLYKKISGMTGTADTEAVEFNKIYNLDVVGFLQI

SEQ ID NO: 96027 - protein, 441 aa, Unknown
  Obtained from environmental sample
  DOMAIN (67)...(147): Cache domain
  misc_feature (1)..(441): Xaa is any amino acid
MRIYQAIYSQKTRILSVLTVHSAISKNLQKARSFLTALAGSRRTAGSHRERPWYKAALAAGDGIAETLPYIDIVTGEIVLSYSRCIFDDDGSRIGVAVIDVRADRIGKKVVDTASAKDSSYGVLVGQDLTLIGHSNPDYVGKKMNDPIIPLSVLTDELVRTGYISEIKWINWKGEPVVGFFRTLPNGWRLGFFAQTSIYYQPVYNMALVLALLGAALASVLIIVLIRVDAAKNKSNRESKYKSAFLANMSHEIRTPMNAITGMVAIGKSASDMERKDYCFDKIHDASNHLLGVINDILDMSKIEANKFELAPTEFDLEKMLQQVVNVINFRVDEKHQKFSVHIDRSIPRTLIGDDQRIAQIITNLLGNAVKFTPENGVISLAVRLVDKVNGHCTLRFSVKDTGIGISPEQQEKLFSPLNRPNPAQPANTAAQDLDLQFPKT

SEQ ID NO: 96028 - protein, 315 aa, Unknown
  Obtained from environmental sample
  misc_feature (1)..(315): Xaa is any amino acid
VEELFSGTRGINYPLPPGIAFDKNPVLDANVMNEVFNLLRSEEGRDLFMQKLLSFSGTIVSDDENDGFFDSKVFYKSGFVSDFAYDVNQTNEFNWSVKFSADGVPVMAWIPAEGDKRAQVQWERYPSVKQITILNEFFFFRPADFQYAPIDLIIFAGSKKYAGPAYPVLIPQYMGLPRKALVSFCSSIRRPSMEFDGAMEELFLEKGIITRAVETSGGKQISVTEFERGSPVIQRVDMDMDGRMETIRRFYRADPSWSELDETFNYRRLIASSESDWTGQGKFKTGEVYQKDGSVVYSWDMDGSGDMNYSETEKK

SEQ ID NO: 96029 - protein, 469 aa, Unknown
  Obtained from environmental sample
  DOMAIN (251)...(465): Methyl-accepting chemotaxis protein (MCP) signaling domain
  misc_feature (1)..(469): Xaa is any amino acid
MIALKRFLDEKKISLSSFPQLEYTGDSAERAAGFPIPGGLLDTAERFEPGIRRNTEKIEGVFAIYPYLKEICEILNTDDELPLLIDCLNCEKGCIGGPGTGNAEKPLADLKAPVRKRMAKLEKEHNSQKGIKSFKKYNDVLKKYWKKGLYNRSYRDLSGNNTIKHPNEAELTKIFHSLKKFKKEDIYNCTCCGYGSCKAMATAIYNKLNKHENCAHFILALLKENQEHIASASDLIEGINNLIQELNDIISSQAEAVDHSSAETEEIVASIKNTSEMSLKQQESVKGLMEVAGHGQESMKKTIQSISEISKSVEGISSAIHIISSIAANTNLLSMNAAIEAAHAGDAGKGFAVVAGEIRRLSENTRENAVSISHTLTNIINGISDTTKQSGETDTRIAQMSKEISGFAETMSAFMNTFNELSAKSGNITASLVSLKEQSSAVKTSYAQIIEMTNKLAKALKDLSELSKR

SEQ ID NO: 96030 - protein, 321 aa, Unknown
  Obtained from environmental sample
  misc_feature (1)..(321): Xaa is any amino acid
YNALGDPFPTKNALATATTFFYKGQTFTPTEHDYCVVQADESQEGGQVRYVYNGAQWIFSYKINDKPFTAAQSAAIDSGATAAIINSVAEKVDKINITPLATAMAKKIKHNEQGQITATEDLTKSDIGLENVTNDAQVKRSEMGATNGVATLDASGKIPGTQLPEGNAGPANLTNQAANFGQSARHGTLYTFARSDHYHALPAAPRVPTGANLSNQNASFGQSKRDGSSINFARADHYHELPTFPIPMPQDTGFTTLSLATGSGSYNLPPDVRYLYLEYYSNKGAIAEIKINNTVVSRDTFNNSNWTSFRMWVKGGLTNAR

SEQ ID NO: 96031 - protein, 215 aa, Unknown
  Obtained from environmental sample
  DOMAIN (65)...(133): POTRA domain, FtsQ-type
  misc_feature (1)..(215): Xaa is any amino acid
MLGDFIYSGEVEDASYRYDTPYKYDVPADNDKTQKIEKTVRRFLALAAVFISIGLVWIFCVSPAMVPVKIDIKTFQGFSKPDVLNIAGIRSGATYISIDAREAETLLSRHPMVESVKVIKRFPDRLSIFLEPRQAVAAVIARVNGRLQPVYIDRYGVAFRIGNGAGEAPPSWLPVVSGVLDERQPLGLGMRLSAVYLPLFSRIAAISEDDSKIWQ

SEQ ID NO: 96032 - protein, 406 aa, Unknown
  Obtained from environmental sample
  misc_feature (1)..(406): Xaa is any amino acid
YFINSQSVRLKELRELFWDTGVGKTAYSVMEQGKIDQVLSSKPDERRYLFEEAAGITRFKVRGAEVERNLAKTSENMHQVELVLNEVKRSYDTLKVQSEKTLKYRALRDEIFNCELDIQLLRLKHFKYERDERNETLRRRTADRDRIRQQMEEESKALDAHMDEMNTMEARLVEMQRNIYGLALEKNAKENEARLLGERRNEGKAKIEQSEVREKQINNKIEELNDDAAGQDEVVSELRQKAVSIEDNIKSFEENIQLASTRIGDNEKAIHKTESEIHSLEKEQAQFEIQLAQITDDIVAELDAGLKKAGYSASERRNIEAALNETLNRLRTVLTGRGTLIRDLSAAASVESAELQRISGTLATELANAASDAEKASPSLRVIAAIRPCSLTSFWRRRVSSPKSGN

SEQ ID NO: 96033 - protein, 128 aa, Unknown
  Obtained from environmental sample
  misc_feature (1)..(128): Xaa is any amino acid
MKILKKLLIIVPITILLIFLVLLAAPVLFKGKIFEIAKKELNGMLTAKVDFSDVKLSFIRNFPNAYVALTDLIVTGTDEFEGETLVAFKSLSVTVDIMSVIKMDNINVKAVLLDQAEVNAHIWETASQ

SEQ ID NO: 96034 - protein, 248 aa, Unknown
  Obtained from environmental sample
  DOMAIN (5)...(248): Amidohydrolase
  misc_feature (1)..(248): Xaa is any amino acid
MTTIIDFHTHFFPPELAERAITRLIENAAPTIAMKNHTDGTVGGLVESMRLGGVDRSVTLPVATKPSQVSTINRGVAETVSAYPGIIQFGAMHPEMEEFEPEIDFMAAHQIKGIKLHPEYQYSHVDDPRAFPIYEKLASAGLIVVFHSGKDPGPFTNDHALPPALKKIRENFPALKMVAAHLGGWMVWKEVEETLAGLNLFFDTSAIYKLLPPEIFVRICRRHGTDKILFGSDSPWYDQGASVEWIKK

SEQ ID NO: 96035 - protein, 109 aa, Unknown
  Obtained from environmental sample
  misc_feature (1)..(109): Xaa is any amino acid
MLDPLRGIGGELMNLIDGEQYFVMHASRQSGKTTLLKQMTRDINAAGDYHALYCTLEAVQDFTDPERGVPAVVERLRLALKDCGMPNGFAADSGGVGVTSLLRDSLTAY

SEQ ID NO: 96036 - protein, 215 aa, Unknown
  Obtained from environmental sample
  DOMAIN (71)...(156): Transposase IS116/IS110/IS902 family
  misc_feature (1)..(215): Xaa is any amino acid
LHGLFVAQGITTKVRANLATNEAREESIKELTGMERQEAEYLVECLKLHDKQIKFLEKAIKEESAGDEEIERLQSVPGVGPMVAFAFVSYVSAERFENPSQVSNYFGLVPRVYMSGDVVKYGKITKRGNSYARALLVQAAWALVRSKAGGKLKERYEYMTVEKSISKKKTIVAIARRIAELLYTLMKDGTKHEHRPFIREKKAAEGIAAQLAKSA

SEQ ID NO: 96037 - protein, 108 aa, Unknown
  Obtained from environmental sample
  misc_feature (1)..(108): Xaa is any amino acid
ILRPRFDTVIKKLEAELSGRGAGEWVKPDGGYFITFIANTGCARRIIALCKEAGVTMTNAGATHPYGKDPEDRYIRIAPSFPSLPELEKAMEVFCTAARLATVERIIS

SEQ ID NO: 96038 - protein, 407 aa, Unknown
  Obtained from environmental sample
  DOMAIN (193)...(366): Phage integrase family
  misc_feature (1)..(407): Xaa is any amino acid
MHNDFTVFSRVVPSGKKVVYYYAYDENGKRRGPWSTGQASKTAARNYCNALNRKGKLLPGLGAMPTFAEFAEGWWEWESCPYLKERGKRFNLTQAYAKRGKMVVVNQLLPYFGKMKMDAITQEEIEKWFDYMVGKGYKNTYTNGIFAIFRVMMNWAAKKKVILSDPTGDVILLKNDRKPLKIITQDEFKALFVKDWRKVWEGDLMACLGNKLAALTGMRAGEVLGLRGENVRESHIQVYKQYDKFGYRDTKTKDRRNIPLPPQVMGELRELMALNGDGYLFSHNGGSKPVPTRYFYDAFLEALEKIGMGKEEIKERGLCFHAWRHFCNTELQKAGLTIQKVQAVTGHKTDRMSEWYSHFDPMDFAEVPKIQEGWLSGGSGDGPEGGGESTRPVELRIVKPEPERKMA

SEQ ID NO: 96039 - protein, 429 aa, Unknown
  Obtained from environmental sample
  DOMAIN (299)...(366): Transglutaminase-like superfamily
  misc_feature (1)..(429): Xaa is any amino acid
MIGLFALAFFLQILAFVFSAPPEFKLRKKEGAVATIVLFLLVFVGGALFVRPFQEKAVDRGGGLLEPKLFRFDFSQVIRLESEISLNDDLVLIAKKDPYDPHILLRRYTLSAYSPRQGFYRLGDVDEATHPQNLPSRRTLLQTEEINTVRESEQEYYIVNFDSSAFIGMNMPVEIIPFETWDASSFNSAYAVVSYTSEAFPYELIRSVRGNDWSESLGLNPEEYALYTDYGGDEAIAAFAREIIGSSVSRFSGRREDSPSYWEQVQMIYDRLKFGEYRYSLKPGIAADGDQLKHFLFNSKKAYCSYYAFAFTLMLRSLGIPCRVAAGFFVDSSTEAFGYFPVRADMAHAWAEVWFPGYGWIEYDPTSENLAEGEEFRFSGGTPPELFERLMKEILDNRSRLKAKEGEESENEGGNLASLGREALHFLSK

SEQ ID NO: 96040 - protein, 217 aa, Unknown
  Obtained from environmental sample
  misc_feature (1)..(217): Xaa is any amino acid
MLNLNTRKTFGIFKDPFTDDVASAGDVYLNDASRFAAEYLYQTARAGGMVALVGESGSGKTTIRRYAVDRMQAEGQKVRIISPRTIEKQRLTAAAICDAIIADCSTEKPRRTLEAKARQVEHILTNSSRSGFSHILMIEEAHDLSIQTLKYLKRFWELEDGFKKLLAIVLIGQIEMKAKLDESKNWEAREIIRRMEILELEPLDGKEIAGYLDIKFK

SEQ ID NO: 96041 - protein, 317 aa, Unknown
  Obtained from environmental sample
  DOMAIN (58)...(245): PGAP1-like protein
  misc_feature (1)..(317): Xaa is any amino acid
MKTRRFCIIYFAVTLLFLFYGCKSVSKNVDYNQGFPARRVGMGVDLDNLHTEQERFDKLSLKYPVVLVHGIAIRDRDVATAPWGRIPRILRENGVEIYFGNTDAWGTIESNAEMLKTTVDKILKETGKEKVNIIAHSKGGLDSRYMIWKYNYGAKVASLTTISTPHHGAVLADMILNLKALHTKAAQKSLEDLEKLYNDIYPDIYTAGYDLTTANVKEFNKMVTMDDRVYYQSIYSVMNNAMEDLLFTASHNYIKKEVGENDGLVSEYSARWGNNITKVEGGISHGQIIDIIGQDRFGMKIPNIYLRIVNDLGQKGF

SEQ ID NO: 96042 - protein, 121 aa, Unknown
  Obtained from environmental sample
  misc_feature (1)..(121): Xaa is any amino acid
GWEKVKAKLPVLLTFTEEGETPRPASAIKTCAFKRAAPVAGDAGSPSDPFAEGTQSANPMALWDIAAINADPVQCGLSGSPTKVKKIDSVVLTAADIRYIEPNEAGVAELIHGLIADHTFG

SEQ ID NO: 96043 - protein, 276 aa, Unknown
  Obtained from environmental sample
  misc_feature (1)..(276): Xaa is any amino acid
ILPKTSTLLERIINSSTNPGDLVFDCFMGSGTTQAVAMRLGRRFIGADINLGAIQTTTKRLISLAAELNKQQLQQPHQQLLPFPTPTDRNVDTTEYHYLQAAEQSNNPSVDNSDDLNILDSVDTDSIGYVPTRDKNTSASASASASDFGQQQLYTGFEVYNVNNYDFFRNPVEARQLIIDMYSIQSFGAGNVYDGELDGRMVKIMPVNRIATPADLEELKANLPYKTFERRREENPNLPVEKITIICMGHTPDLRGSLELDLGGSGYKVDVEVLDI

SEQ ID NO: 96044 - protein, 272 aa, Unknown
  Obtained from environmental sample
  misc_feature (1)..(272): Xaa is any amino acid
KDARETSLRSTINMLAAELRSSGGSVVACYNYTGTPYVKNRVLPEVVYAYGLRDSVNNGYLKDCDVVSYENVKSVDFLRNAVTRFWGMYGNKVYEGLTPKFAVFAATIEEAVNEVRPVVEGVLSELDIPLSSVLVNVGDTKYTKDEDICHFNSLDIEGAEGNRKQFLILVNKGREGWNCRSLFGVALFRSPKSKIFVLQATMRCLRKITDEQHTATVFLSKENSDTLNNELADNFNMEIGDLKVSGEKNPKYKVRVLPPPRIIRLRTISHEY

SEQ ID NO: 96045 - protein, 260 aa, Unknown
  Obtained from environmental sample
  DOMAIN (64)...(260): FAD dependent oxidoreductase
  misc_feature (1)..(260): Xaa is any amino acid
ALGKLAFHFRKKDTRRFIRELQKETDPDTRPGGIVNNIRYTGGDREPMVVPALQDNALEGQKPDVLIIGGGISGCTIARELAHHDLDILLVEKEHDLAMQASSRNDGMVHPGVDLRKGSWKYRYNLKGNALYGKLCEELEVDFDRSGQYVCFSNPLLMPFLYLTLLYWKWLGVPARVIGKKELRRLEPGLKEDLVLALAFPSTGVVCPYNLTIACGENAVQNGARISLDTAVLGMNSCDGRITAVRTNRGTIYPKVVVNA

SEQ ID NO: 96046 - protein, 167 aa, Unknown
  Obtained from environmental sample
  DOMAIN (30)...(148): CobB/CobQ-like glutamine amidotransferase domain
  misc_feature (1)..(167): Xaa is any amino acid
MIIVDYGAGNLTSVHNALEYLGIENEISSEPEKIENAGKIIFPGVGAAAAAMENLNKSGIGAALEKAIKKGTPILGICIGCQIILEESEEDGGVKCLGFLQGRAAKFKKEPNLKIPHIGWNQVNFTKEHPIFKGIPNNSIFYFVHSYAPFACDAASIYGTTTYGSQT

SEQ ID NO: 96047 - protein, 549 aa, Unknown
  Obtained from environmental sample
  misc_feature (1)..(549): Xaa is any amino acid
AVIIVGDFDSAYLERTLTEHFHDLWPESGSFSRPIYDLSAQKEGNFQTLILTDSELPRSSIYLYWKQKTEKRRQDLADYRESVIDYLASIMLYLRFQEEIEKSETPYIYGGAGWADYGYSSRFYALVAQAKTNSVWASLKELFLVKESLSRYGFTQSETDIAKAALISDMEQTVAEKDRQNSNNYINAFTQHFLTGESVPDVEWELNAIELLLPGITLEEINERVKGYFSGDDLTVIISAPEAEKTILPTDSEVRAMAAAALIAEIAPPAEGDIRRELLEQVPNPLPILSETTDSETGAIRWKLGSGAEIILKETKNKNSEISFYAQARGGTLSAVYETAVSASLAAEMLNASGLGPYSRSELTRALLDKQVSLSFWTQNYLRGFQGGAAVKDLKTLFEMLYIMFTGPRFDPEAVKAMLDQRRSSMAFQENDPNAVFQREIIRTINGNPRLHPLEKEDLQKVNNDQALAFIKRCLNPGDYTFVITGSVDIPLLRSLTETYLASIPASAPFDAWADIDTGRPSDTVKEIKKGKEARSTVYLSWFNPLPYT

SEQ ID NO: 96048 - protein, 244 aa, Unknown
  Obtained from environmental sample
  DOMAIN (4)...(242): Lyase
  misc_feature (1)..(244): Xaa is any amino acid
KPQGEAFAFQASINVDKRLVYDDINGSRAHVAMLGKQGIIPRDSAAKINRELETIANEIKTGKLTIDTQAEDIHSFLEAVLTKRLGNAGKMVHTGRSRNDQVAVDFRLYLKRNIPKLRKELSASINTLLDIAQLHITSLMPGYTHLQRAQPVTLGFHITAWCAALERDHSRFNDALLRLDECPLGSGALAGSTLPLDRKAVSDALKFNRPALNSMDAIADRDFVKNYPAPAPLQWFTIKVSAKM

SEQ ID NO: 96049 - protein, 405 aa, Unknown
  Obtained from environmental sample
  misc_feature (1)..(405): Xaa is any amino acid
MKEDGAIGVWTSRSHDDPLITTYAAHFLTEARNANYYVSPVMMEKLLNACRNIASSSGTSHYDFTTRAYAIYILTRNEIVTTQLVESLKRDMNRFDESQTGIAGLYLAGTYALLQKTNDAALLLGKIKRAMAKDSSFRYIDELMYHSIYLNILSRHFPNRLRDISESLLVDMAQQLEVQSYTTISASHALMAIDAYLKAVPTAETGTFTVQEVSKDNQRKDLKPAGTAVFSVPFSANAAKISVDNKDNLNLFYQITAAGFDREMPSKETKNGIEIYREFLDSAGKPAASFKVGDIVTVKLNFRSLSNNEHRDVAIVDLCPAGLETEIDSVRQDDNQSSAWKADYVDIREDRLVIYGSVSGKVASFSYRARAINAGTFTTPPLFAEALYDKSVWALRPQASIKITK

SEQ ID NO: 96050 - protein, 101 aa, Unknown
  Obtained from environmental sample
  DOMAIN (45)...(101): Bacterial regulatory proteins, luxR family
  misc_feature (1)..(101): Xaa is any amino acid
MDLGAKAFVSKSAVAGEMMSAIDAILAGGTYTSVKKETQEQNKLFLALTKRENEIVSLVKQSLSNEEIAKMFGVNNRTVEKHLEAIYEKTGVSSRKELIEL

SEQ ID NO: 96051 - protein, 82 aa, Unknown
  Obtained from environmental sample
  DOMAIN (19)...(79): KH domain
  misc_feature (1)..(82): Xaa is any amino acid
VFVEIESYKETAQKHEIVAGIHVETIGQKGIVIGSGGALIEKIKRFARKDIERLIGMRVSLKLHVKVTPEWRDDNNFLRTMQ

SEQ ID NO: 96052 - protein, 77 aa, Unknown
  Obtained from environmental sample
  misc_feature (1)..(77): Xaa is any amino acid
MKALSVAEVKTHFSDVLVRVKNGENVKILYGKSKKPVAMIIPIENINSPRGIGILDGKATFKTNGNGKISEEEFLGI

SEQ ID NO: 96053 - protein, 659 aa, Unknown
  Obtained from environmental sample
  DOMAIN (64)...(251): 3'-5' exonuclease
  misc_feature (1)..(659): Xaa is any amino acid
VLIREGIRQSAKQLDPNVKPAVQAAAEQNSNAQNSSEHETDSVNQIGSLSFSAAEQDLLGDGVYKTILDIDEIKSILEQAKKQKLLALDFETDSLDAWRSRPIGISLAVKPKEGFYIPVAPHDVNGTPSKFNDPDKVRALLSPMFADKEMTIAAHNAKFDYKVSRGWGINRWQCKIWDTMTAAWVVDAERNNYSLDSLVAYTFDCSPTKYMDIVPKGAAFDVVSLETATRYSGEDADFCIRLKHHLEPMLKKTESIALFENLEMPLLPILAEMEGEGIKIEPKALTSYGKELAVELDKIQSDTWKIVGHEFNLASTKQLQEVLYVERKLTPGKKTKTGFSTDAAALEELAREDPVPALILRHRTLSKLKSTYVDTLADMADSEGRLHTNFVQTGTATGRLSSREPNLQNIPVRAEEGRRIREAFIAKSGCVLISADYSQIELVVLAHLSQDENLISAFKEDRDVHARTASLIFGIDENEVKNEQRRMAKTINFGVIYGMSAFRLANELNISRTEAQNFINAYFSTYSGVRQFIENTIRKTEQTGYVTTISGRRRYVPTINSHNKTEKSAAERIAVNTPIQGSAADIVKMAMLNLDKKLAAEKSKARLLLQVHDELILECPKDDAEKTSALIKTEMEQAAALSIPLRVSVETGSRWGDFH

SEQ ID NO: 96054 - protein, 64 aa, Unknown
  Obtained from environmental sample
  misc_feature (1)..(64): Xaa is any amino acid
DKAAKEFIVNDGYDASLGARPLRRSIQRLIEDELANRFLLGEVAENSVMDVSVTEGRLHWGFHT

SEQ ID NO: 96055 - protein, 182 aa, Unknown
  Obtained from environmental sample
  DOMAIN (1)...(182): Dihydrouridine synthase (Dus)
  misc_feature (1)..(182): Xaa is any amino acid
MVTTGAILHNKPEKFLEYNKEEHPVALQLGGNSPKDLAECAKIGEDFGYNEINLNCGCPSERVQSGSFGVCLMREANLVAECVAAMQNAVKIPVSVKTRIGIDRDDSWEFFLNFVETVAETGCKYWIIHARKAMLKGLSPKENRAVPPLNYETVFKLKQIHPDFKISLNGGVRDLYQAKNIL

SEQ ID NO: 96056 - protein, 627 aa, Unknown
  Obtained from environmental sample
  DOMAIN (334)...(518): Transketolase, pyridine binding domain
  misc_feature (1)..(627): Xaa is any amino acid
IAAMVERARSGHPGGAMGGADFINVLYSEFLNWDPDDPAWPNRDRFYLDPGHLSAMLYAELALCGLFTLDELSAFRQWGAAAPGHPEKCAMRMIENSSGPLGQGHAMGLGAAIAERFLAARFGEWMAHKTYTYISDGGIQEEISQGVGRLAGHLGLSNLIMFFDSNDIQLSTTTDAVTSEDTEAKYKAWGWSVSVIDGNDAGQIRDALAAAVNERERPTLIIGKTVMGKGARAKDGSSFEKMVSTHGQPLSDAGADVAETIKKLGGDPASPFTVFPDVAERYRAVIEKKRDYARAKKAEQAAWEKANPELAKKFAAYMNRELPDIDWQSITHKSGVASRVASGNVLAEFSAKIGNMIVSSADLCNSDKTDGFLKSSKALQKGDFSGGFLQAGVAELTMAAVMNGIASHGGVLAVCGTFFTFSDYMKPAMRMAALMELPVKYVWSHDNFRVGEDGPTHQPIEHETQVRLLERMANPHGRRSMLVLRPADAAETTEAWRLALENMNGPTALLLSRQALADLPAKPGSPSRAVDAKGVKFGAYAVVECENPELVFVANGAEVIACMEAAAAIKKERGIGVRVISAISEGLFKEQPQEYKDKLIPFGVPVLAFTAGLPVNFKDIVRPFGKV

SEQ ID NO: 96057 - protein, 334 aa, Unknown
  Obtained from environmental sample
  DOMAIN (209)...(319): Phosphoglucomutase/phosphomannomutase, alpha/beta/alpha domain II
  misc_feature (1)..(334): Xaa is any amino acid
MDTSELTQKAKDYIRLEQAPHFRSQVEELLKKEDWTELNDRFYADLEFGTGGLRGVIGGGYNRMNPFTVRRATQGLANYVSKAVPSGASAVIAYDSRNFSDLFALQAALVFCASGIKAYLFTGLRPTPELSFAVRQLKATVGIVVTASHNPPEYNGYKAYWNDGAQVVPPHDKAIIKEVLSVGDAIKAMDKDEAIKAGLLVMIDKEIDRPFIDMVKRCAIRPNLLKEGGKSVKVVYTPLHGTGAMPVDTALKEMGVDVTFVKEQQAPDGNFPTVSYPNPEEASAMRLALELGEKIGADLVLGTDPDADRLGIAAPDGGALKLVTGNQLGSLWPT

SEQ ID NO: 96058 - protein, 261 aa, Unknown
  Obtained from environmental sample
  DOMAIN (1)...(169): D-alanyl-D-alanine carboxypeptidase
  misc_feature (1)..(261): Xaa is any amino acid
MYLAQGQTLSLRELMLGMAVVSGNDAATAAALRFAPTVDDFIRMMNMEAVAMGLNKTRFVDASGYSEENMTTARELAELCRLYLQAHPDSLRDFHSVREFAYPRVDNVPPERQGNPGTRLRRNNNNLLGKVEGVDGLKTGYIPESGYNIALTAERNGTRFIAVILGAPSEWGGDRKRDEDGEKLLEWAFGRFKTIPIRPSIGAFPPVRIWKGKDNYLSFVPEEPLNFTAPVERGSQLSWETELDEPLIAPFYTGQKVGSLV

SEQ ID NO: 96059 - protein, 317 aa, Unknown
  Obtained from environmental sample
  DOMAIN (43)...(128): YbbR-like protein
  misc_feature (1)..(317): Xaa is any amino acid
LNTRKLILSLAVNWPAKVLSVALALILFVFHEMSTLTTRTIIVPLTIETNSAMTPGSAYPRNVRIRLRGESDGVKSILDSDIEAYLDLSMHESEGQYRAPVQIRKKGSALVPEPLEIAVNPLEVSINLEKRINKTFPLAASIQGNAADGFELVSYLVFPDEIAVSGPLRIMEALNDIKTDPIDLEGRKSDFNVMVNIANPNPLLLSIRGDAYAEFRCVIRPSVPVRNIDGITIDIIGLDPHLESDLGGRTGSIRLEATQSLLDNFTAEPGFLSVDCSGITEPGTYTLPVDIDLPDGFILVRRDPEEVGVTFTLVSGE

SEQ ID NO: 96060 - protein, 509 aa, Unknown
  Obtained from environmental sample
  DOMAIN (22)...(108): OB-fold nucleic acid binding domain
  misc_feature (1)..(509): Xaa is any amino acid
MENFKRTVNCGELRKASAGKTVTLNGWVHRKRDHGGIFFINLRDRYGITQVTVDTTGAQSALAAICAELRNEFCVAVEGNVRPRPDDMVNPSMATGEVEVIASNIVILSRCEVLPFQVDEESNAGEDLRLKYRYLDLRSTAMQNRLRLRSEVAYAVREWMTANGFYEIETPTFIRSTPEGARDYLVPSRLYPGKFYALPQSPQLYKQLLMVSGFDKYFQIARCYRDEDARGDRQPEFTQIDIEMSFVGRDDILAVTEGMLVHVFKKTIGIDLPAQFPRLSYEDAMTQYGTDKPDLRFEMLLHDFSPYVEAGGFQAFKDALSQNTGAVKALVVKGQAGYSRKQIEELEAHAKIYKAKGMAWMKVTANNALEGGVSKFFTNNASQIIKGLGATEGDLILIVADTQRRIANTALGAVRSRLGKDLNLCDPKVFNFVWIVDFPLFEFNEEEKKWEAAHHLFSWPQEKYHATLESDPGSVKGDLYDLVLNGYELASGSIRIHDPVLQQRIFSIA

SEQ ID NO: 96061 - protein, 418 aa, Unknown
  Obtained from environmental sample
  DOMAIN (13)...(292): Methyl-accepting chemotaxis protein (MCP) signaling domain
  misc_feature (1)..(418): Xaa is any amino acid
EEKNASEAEKAVEAIKDSIESLNKMIESQAESINTSSSAVEQMTANIHSVTKTLIENSKNVANLSEASENGKTGVQTVAEMIREIAKDSEGLLEINAVMDNIASQTNLLSMNAAIEAAHAGEAGKGFAVVADEIRKLAESSSGQSKTTATMLKKIKASIDSITVSSNEVLSRFEVIDSGVKTVSQHELNIRNAMEEQEIGGRQILDSMNRLKEISVSVKKGAADMMDSGNNLNKSTGDFIEISNKTMAGMNEIVNGAMIEIQTAVTHVDEMSSENNRNFDELKKESMKFKVNLGDEKQKIIVIDDEQPILVMAKGILDKDYEVTTVNSGTDALHLFYQGYAPDLMLLDLNMPDMDGWGTFNRIRDLTKLNKVPIAIFSSSEDPGDRAKAKEMGAVDFIKKPINKGELLDRVGKLIKKG

SEQ ID NO: 96062 - protein, 402 aa, Unknown
  Obtained from environmental sample
  DOMAIN (1)...(402): Aldehyde dehydrogenase family
  misc_feature (1)..(402): Xaa is any amino acid
GSSQLALENAQAKNKALSGLATAIFRNRNMILAANSRDVENARARGMKQSLIDRLLLNEQRIEDIVEGVEVVMKQDDPVGKLRSGWTLPNGLFVEQVSVPMGVAAIIYESRPNVTVDCAALAYKAGCSILLRGSSSALESNRALVTTIKMGLESGGGIPDAVELSDQAKSGSHEDVDEILAARGWIDVVLPRGGRDLIQRVVQNARIPVIETGEGNCHIYVEPSANMDNAVEIIANAKLQKPGACNAVETLLVHRGTLRPLMFRLVARLAGAVEFRCDAESRAAIRDEALVNLRLKDAVEEDWSTEFLDAILAIKTVGSCQEAIEHINRYGTKHSEAILTNDLHSARQFRNGVDAACVYVNASTRFTDGGVFGFGAELGISTQKFHTRGPMGLEALTSYKYL

SEQ ID NO: 96063 - protein, 500 aa, Unknown
  Obtained from environmental sample
  misc_feature (1)..(500): Xaa is any amino acid
RSCYDDFADVSLDDTALTDTAADDDALATDDFADVSLDDTALTDTAADDDALATDDFADVSLDDTALTDTAADDADLASDDFADVSLDDTASTDIAADDDALATDDFADISSTDLASEETTEEQIETDITADDADLASDDFAGISLDDTALDADLATDDFADISSSDDALSEDALSADALSDDALSTDDLSDDALSADALSDDALSTDDLSDDTSSTDLASDDADLASDDFADITLDDTRCTDLAADDFADISSTDDASSTDLASDDLASDDLASDDASAAQDPDLAMDDFADISQEDTEIIAEAQNSDELDKLREEGAMPTTEAPENSDYLENDSMDLSDAVIDEPVLSSNELLEKEVLTEPSLDGEDFDMDSFDNLSIDSDTDDDFSSLDDDTASQPEAPAPAPQPAAKAPPPPVQEAAAPQPAPQTAPQSTSVAVAGGQAGGGAPFTLPSGLRSELRNILSYMDQLLESLPEEKIEEFAKSEYFDSYKKLFKDLGLV

SEQ ID NO: 96064 - protein, 369 aa, Unknown
  Obtained from environmental sample
  DOMAIN (67)...(234): Transglycosylase
  misc_feature (1)..(369): Xaa is any amino acid
MQNEHEERTLETKKPIRDLGKKKLLWILIFGSPVILGFVAIGIVWLKLSSTLPSFEKLETIEPRLITKIYDKDSILVHEFFVEKRIWTPIDSIPDMVKNAVLATEDRKFWNHWGMNPLAIPSAVLESVRTGNKMRGASSLTQQLTKLLFLTPERSITRKIREAMTAIRLEKTYTKEEILEFYMNEVYLAGGNYGFQSAGQFYFGRPLDSLTIPEIAVLAGMLQRPEAYRPDRKPEAAIARRNTVLFAMKDAGYISKDDYNNYIKMPLTIETKIDSAIAPYYMEEIRKYLENKYGENSLYADGISIYSTIDPNAQQIVETAALKQRTRVDRRLRQRAIWKLNLVKKYNMPNDTILNKFDSVYADFTKNYL

SEQ ID NO: 96065 - protein, 268 aa, Unknown
  Obtained from environmental sample
  misc_feature (1)..(268): Xaa is any amino acid
MQDNLPELLSPKVDVIFKLLFGDERYKDLTINFISAVLGYKDGELEDISFYDTHLKRENPNDKLGVLDIKAKLSNGNIIDVEMQSRCVSDMRSRISYYRSNLLTEQIGRGGSYSELKPVKSIIVADFDFVPESEKCHTIFQTLEKDEHFPFNDLEEIHVLCLKKLSKLNNERLREWLRFINSEKREEFMDLAGIDPVFVKAVDVLAKFSADDHNRMLYEARLKEWRDNKSRTDGAIKEAKFEIACKLKGMGFSASQIAEATGLSEKEI

SEQ ID NO: 96066 - protein, 231 aa, Unknown
  Obtained from environmental sample
  misc_feature (1)..(231): Xaa is any amino acid
MDKTRTPLAKWFMAIYLMAADKRGVSALALAKHIGVAYYTAWTMCHKIRHAMGARDGGRKLGGTVEMDETFFGAPEEGGKRGRGAEKTPVLVSVSLTGGGKPKAARMKVVGAVGRGEVKEFAEAAASGGSEVRTDGLHVYRQLAGLGFTHVRKGHGPKKEPAHLRWAHVIISNAKAMVGGTFHGLDARHLQRYLDEFCYRFNGRLSPDGIFGRLLDACLCAGRVNAHELIG

SEQ ID NO: 96067 - protein, 244 aa, Unknown
  Obtained from environmental sample
  DOMAIN (111)...(225): Recombinase
  misc_feature (1)..(244): Xaa is any amino acid
MLDEVTAGRVAVVIFKDSSRIGRDVLEVGLLKRQFEENSVRFIAASEGLDSAKGFDIMATFRDVFNEYFVAETSAKIRAVHRSNAQQGKCNGRVPYGYKTAEDKVTWLIVDEHAEVVREIFRRYATGTSIPDICRDLSARGVPTPQANFSGEKKSELWRVSSVCPMLVEEAYIGTFSALKQTTVSYKNHKRINNAKEDWVVIPNHHPPILDLEIFETVRRMRGTRQRYTKLGEKSVLSGLLRCA

SEQ ID NO: 96068 - protein, 282 aa, Unknown
  Obtained from environmental sample
  misc_feature (1)..(282): Xaa is any amino acid
LLFLDEIQHSLPAISSLRFFYEKYKELHVVAAGSLLEFALQELPSFGVGRVRSMFMYPMNFSEFLNACSNSLLLQAIQSSNCKNPLPEPVHEKAIELLRRFLILGGMPEVVSAYVNKNDLLECQRILNDLIISFRSDFAKYKEKVPTLQISAVFDSVVAQMGKKFVYANVSGGYAHRQLKEGLELLKMAGLVIPVIHSSANGLPLGAEMDAKKQKMLLLDTGIFQRLLGLSLSDLLISDDFSLINKGHIAELFTGLELLKATSCYEQKTLYYWHRESKSSNA

SEQ ID NO: 96069 - protein, 75 aa, Unknown
  Obtained from environmental sample
  DOMAIN (1)...(75): WGR domain
  misc_feature (1)..(75): Xaa is any amino acid
MAKTVRTFEYADGKTSKFWTIEINGKGYTVKYGKTGTNGQTSSKEFDSAEDCKKAAEKVIKEKTGKGYVEKAKGK

SEQ ID NO: 96070 - protein, 70 aa, Unknown
  Obtained from environmental sample
  misc_feature (1)..(70): Xaa is any amino acid
MDLTKVVDKKYEATPLKELVNAPVDALYGVSAGDAEKLKAAFNVKTISDLANLKYIKAAQAICAIADLEK

SEQ ID NO: 96071 - protein, 452 aa, Unknown
  Obtained from environmental sample
  DOMAIN (41)...(184): Penicillin-binding Protein dimerisation domain
  misc_feature (1)..(452): Xaa is any amino acid
NFKRRFIVIFSLLAIFLLYLIIHYAVLIIKGELPPPARPNTNLPERGSILDRNGRFLAIQIRFADVSVWRPSIKDVDVLSNELAVILDMSPSEIREKINSSESNFLYLRRRIDDGTARQLTAILEEKKIRGVMLQPIVGRVYPEKNIASQVVGFVGDRNEGIEYAFNNVLSGVDNDGKGSNVVLTIDVYIQHILRQIAVKTMEETQAEAAIFVAMDPRTGDILGSASLPDFDPNNVRASDANSRMNRPAIWAFEPGSTLKVFSMSALLDSGAISTNSTFICNGSYTTSRGAVIKCEGRHGRVTVREIIINSCNAGAAYASDNITSSKFYQLLSDFGFGSRTGVGSPGETAGYLVHSENWSDRSKPTIAFGQEIAVSAYQIAQATTAIANDGVLVPPRIVSKIISADGNTETEWKGGEKRRVISAETARAMRSYMADTASSIGTGWRAGVQDL

SEQ ID NO: 96072 - protein, 353 aa, Unknown
  Obtained from environmental sample
  DOMAIN (8)...(353): Lipid-A-disaccharide synthetase
  misc_feature (1)..(353): Xaa is any amino acid
MKNANPSIMFIAGEPSGDAHASAVVAAIKERRPSAEIWGIGGPKMQSVGFDSVLPFAKFNRMGYVEVLSHLPFFLNAKKKLLKMMAGARRPDLLVCVDYSGFNMPMMKEAREMGIPVVWYIAPMVWAWKRKRAATLGASASHIAVIFPCEAQYFTPYAAPVTFVGNPLTESLPQIGAAKKFPGIDGFRLAIAPGSRPQEIKHMLNVMIDAACMLKTRFPAIKIAVSRFGGFDESLFCRAKDAGFEIFTGPLQTLFQRSDLALVTSGTATLEAALLGVPMVAAYRTSRISYAIYKKFVTIDHIALPNIIAGKTVIPECVQNDVNPKKLYCEAERLISMPQRWEETAANLSALRA

SEQ ID NO: 96073 - protein, 310 aa, Unknown
  Obtained from environmental sample
  misc_feature (1)..(310): Xaa is any amino acid
MPGRFHSALPSQVAELSRLLTGARGDRSLSYLSRPNYLSAYLRYFLPWNILRLCRLLPSLGINLRAGDLITDLGSGPLTFASALWLSRPDLRSVPLEFVCIDNCAPALAAGKKFFAALCSQANCAWKVNTVREKINLKTKTALARKKAALVCAVNFFNEIYEDLPHTDSGALKRAASDAALLMHNQAAAEAGILTVEPGVPQSGQFISLLRSAFLELGRPPLSPCPHSETCPMPGGKAAFGKAAFGKAAFNKANSKTVNTKNRWCHFAYTAADAPKELSRLSAAAGIPKERLVLSYLLAGAHKERQKHAA

SEQ ID NO: 96074 - protein, 738 aa, Unknown
  Obtained from environmental sample
  DOMAIN (149)...(665): UvrD/REP helicase
  misc_feature (1)..(738): Xaa is any amino acid
EAEHRPYYSLIPLKEILGELLETGGASKKIDAAYGTLIEKAGSEFAILLDMAPEKIETLSCPGISGELLAKAICRMRRSEVSISPGYDGEYGVIRTLAPGEAKESGTGLFEDNIVNDINTKKKPREAKQKIVSPVNNKKPSPQIRGFSLDEDQLAAVSSDLRRGAIIAGPGTGKTAVLAAKIARVASEGVNPTSILALSFTVKAAAELRDRVLRLTQKPKVEKPEMEKPMIVTFHSLCASILREQHAAAGLPADFKILSETERNELLTKICAAANNKALSPRRLSEYIEERKRYLLLPGEKLEDLSRILPVSLVSLIPEDDSGDDCVNEHAYVEYRKQLHSMGAIDYDGLIAGTVRLLAMRENILKYYCQKFGFIFVDEYQDINFAQYALLRLLVPAREVSPSLWVIGDPNQAIYGFRGSDKTFIDRFLLDYPGAGRFELRKSFRCAEPIIKAAGCLTQVDLKGADVTSSAPVSLFRRTYPTDKSEAEGIARIIASLVGGTSFFALDSKTTKSIDSNTADFSPSDCAVLVRAAALAEPVAKALNDHGIPFVIAGAQTWWEEEPVKTLLENIRTQQSEDIRAVWVSMKTKDKNPSAPVPDAVEHLIRLKDLFGNTQSLLDNLSTGQGIPDTPLEGVRVMTIHASKGLEFDHVFVAGLEETILPFTLYNEHPDIEEEKRLLYVAMTRARRGLWLSCSAVRNFRGRVLKNPPSRFLSELETLVPLVTEERQSKWDGQMCLF

SEQ ID NO: 96075 - protein, 365 aa, Unknown
  Obtained from environmental sample
  DOMAIN (5)...(141): Semialdehyde dehydrogenase, NAD binding domain
  misc_feature (1)..(365): Xaa is any amino acid
MEKIPVGVLGATGMVGQQYITLLKDHPWFQVRFVAASPRSAGKKYRDAASGRIHFPGVAETVGEMLVADANDVSRAAEAAKAGDCAFVFSALEMGKDEIRALENAYAAAGLPVISNASAHRWTDDVPVLVAEVNHQHTEIIPTQRKKRGWDKGFIAVKPNCSIQSYTTPLYALIKAGYVIRRLIVWTLQAVSGAGYPGVPSLDMIDNVVPYIGGEEEKSELEPLKILGSINGGVFKNAELPKISAHCNRVPVTDGHTACVSLEFGENKPSVDEVKKIWTDFKSLPQELDLPTAPQRPIIVLEDNDRPQPRKDRDADKAMAVTIGRVRPCNVFDLRFVGLSHNTVRGAAGGGILNAELLKHKGYLG

SEQ ID NO: 96076 - protein, 341 aa, Unknown
  Obtained from environmental sample
  DOMAIN (1)...(341): Carbon starvation protein CstA
  misc_feature (1)..(341): Xaa is any amino acid
MNGLFLLVISVVVLSLAYLFYGRSLAKRWGIDPMAKTPAHELEDGKEYVPTSPAVVFGYEFSSIAGAGPINGPIIAAMFGWLPALLWLLLGSMFFGAVHDFAALYTSVKNKGKSIGYVIELYVGKTGKRLFLIFVWLFSILIASAFADIVAGTFNGFNEVKTRNVISGSVASSSSFFIIAAIILGLFIRRRKASGLASGIIAIDLLIICIVFGIFFPFYMEKSIWLYLIFAYIFIASILPVWSLGQPRNYLNSFLLISMMLAAFIGVIFTAPPISIPAFTGFNIKGNLLFPGLFVTIACGAISGFHSLVATGAASKQVSNEKHMLPISYGAMLVETLVAVL

SEQ ID NO: 96077 - protein, 343 aa, Unknown
  Obtained from environmental sample
  DOMAIN (41)...(77): Sigma-70 factor, region 1.2
  misc_feature (1)..(343): Xaa is any amino acid
MTDAFMEFDTENYDHELIETIRPVRSSAAKNSKKAKTSKESDPLALYFRQISNFPLLTVQEEQNIGEKIISLRSKQKELEAERKTKSKTEDDYHREKAALDSTLLFYKNKMINSNLRLVVSIAKNYQHRGLSLLDLIDEGNIGLIEAVERFDYTRGCRFSTYGTWWIRQAIIKSIADKGRVIRIPIHMLNTIKKCYYVAKQLTQDLGRDPNEQELSEYLGVPVSKVKEIVKLSQETTSLDTIVDDGNMTRLAELIKDDVRAEPFEMVFSMTLQETMSDILSQLSEREMKIIQLRYGLTGENPLTLEETGKYLGITRERVRQIQEKAVWKLRTMRELKMLKDNS

SEQ ID NO: 96078 - protein, 293 aa, Unknown
  Obtained from environmental sample
  DOMAIN (56)...(170): DNA polymerase III beta subunit, central domain
  misc_feature (1)..(293): Xaa is any amino acid
VFGIISTFPYDEIEFSQNDITAVIKPTTQKKPEYKLKIIASEKYPEFPVSTSQAFEMPIKDFRDMIQQSIFAVSDDETRYFLNGAYFEKSDDKINMVATDGRRLAFIGKTADKSIKDFPPVIIPPKILNTVLKRSGDEGLVSISVNDKSIFINFASYQFSSVLIEGSFPNYKKVIPESQEFSLSVKREEMLSALRRVSLMVEKKSHRIFLGVAPGRIAVSSEESEIGTVEDEIPCKYNGGEMTIALNFRYLEEPFKTMTEDEIQILFTQVQKAITIKPVPEKDFLHVVMPMQS

SEQ ID NO: 96079 - protein, 63 aa, Unknown
  Obtained from environmental sample
  misc_feature (1)..(63): Xaa is any amino acid
GKLTWSHYCELLGIADKNEREFYQNECVNSLWSVRELNRQIETRQNTIRKEGINEWQEWIRID

SEQ ID NO: 96080 - protein, 260 aa, Unknown
  Obtained from environmental sample
  misc_feature (1)..(260): Xaa is any amino acid
MPKQIYLRDLAYVIDGYRDETSTVYVNGRSAVMLMVQKQSGKNSIQTAKDLRIRLKKIISELPPDINITEMFNTTDIIENSLNQVTSTAVSGAVLAIIILFIFLRAAKPTIIIGISIPISIIITMMLMYFAHLTLNLMTMAGLVLGIGMLVDNSIVILENIYHYREKGAKLKTAAVIGSSEMIVAITASTITTICVFAPLVMFQGLLEMAGELFAGLAFTVVISLGISLFTAIFLVPILASHYLPLVTRNKNRLRAFLSE

SEQ ID NO: 96081 - protein, 57 aa, Unknown
  Obtained from environmental sample
  misc_feature (1)..(57): Xaa is any amino acid
MANSRETLLEKYSAKVYKNRRDHLLQLAESDKNAAIAANTRAIPGVMTARGCCYAGC

SEQ ID NO: 96082 - protein, 612 aa, Unknown
  Obtained from environmental sample
  DOMAIN (155)...(235): Cache domain
  misc_feature (1)..(612): Xaa is any amino acid
MKKPKKTSSAMLFITVSLLMILSITVSLSVIFFYNLRKIVINLTELSTKTNVARSRDMVLSFIKDHEEAIKQFSAGITHLFRQRAVSEESVAGYLSDIKEIVPNSLDLYFTNNIMWNKPGGFAAFAGGWIPEDDWDNTQRDWFTDAKKAQGKIAYSEPYVDSETGDVIITLSMTVFDGAGTDIGVSADDVAVNVMKEIIDAMRGFPEQEMYIINADGLFITHEDIEAVMEKDFFKELDLEKYRASVLGSAEFFRIDKDIFIYSSAIPNTGWILVSTIPSSVIFKDINTLIIRLVILSVAMLAAVVFVLIFFVAGKISSPIKAIHSALEKVKDGDLTVQVAVKSRDEIGELSGFFNMTMEKIRNLIVAIKGEATNLSNIGGDLASNMQQTAEAVHHITSNIEVIKEKVTGQSASVSQAGATMEQVTANIDKLGKNVEAQTESVSRSSSAIEEMLANIESVTQTLGRNAESVQELIKVSDIGRNSLQKVTQDIKEIEQESKGLLEINSVMENIASQTNLLSMNAAIEAAHAGESGKGFAVVAGEIRKLAESASQQSKTISDVLKKIKNSIDTITGSTNTAMEEFQAVDERVRAVSEQETNIHNAMEEQGKGSRQ

SEQ ID NO: 96083 - protein, 364 aa, Unknown
  Obtained from environmental sample
  misc_feature (1)..(364): Xaa is any amino acid
MPGVYNISDWDSDDEGSEGELSNLPEGVSWTEENGEGLTLTGISNLTIRGVTGSGEWPKIIVDPRNVYVLRFVNCSDILIETLTAGHSEGGYCAGGVFAFEGSSRITVNAAAMYGSGTEGLTLRNVSDMKVTNSKIYECTEAIFSVDGGGKVAFENCLFLRNRGYHLVYVSGDGDQHLSITDCEFRDNWNEDGRGGMFFLTGEGISISRTTFIGNKINKINVGNNNALFGEGCEFDDMFIDARDGMAYRFVKIGNQTWMADNLNYQTPNSYCYNNSDYACVQYGRLYKWDAAKEACPTGWRLPSKEEWNALVVATGGNEAGNALKSTSGWDENGNGTNESGFSALPGGSRNAGGGFERVNGSGN

SEQ ID NO: 96084 - protein, 283 aa, Unknown
  Obtained from environmental sample
  DOMAIN (1)...(283): Beta-eliminating lyase
  misc_feature (1)..(283): Xaa is any amino acid
MNYHFTTAKALITVNGGTVEELIIDEGLKIRSDCPFKGDIDIGRLNEVIKRYGADKVAYVRMEAGTNLVGGQPFSLANYEEVSKLCRASKIPLVLDASLLADNLYFNKRREERCKKMTLHEIVLKFAELSDIIYFSARKLGFARGGGICTNDHDIFLRLRELVPLFEGFLTYGGMSVREMEAIAVGLDETLDEDMISQGPIFIDYMVKELDKRGIPVITPPGGLGCHVDAMAFLDHIPQEQYPAGALGSAYFIASGIRGMERGRSASSAIRTVRSTSQIWSCC

SEQ ID NO: 96085 - protein, 416 aa, Unknown
  Obtained from environmental sample
  DOMAIN (23)...(92): tRNA synthetase B5 domain
  misc_feature (1)..(416): Xaa is any amino acid
MLELAGGSVADGVIDTNPNPFPDKVITVRPSRTKRILGVEFPADNMVFSLNTLGIKSVKESEDMVTCTVPHYRHDITEEIDLIEEVGRQYGYDNIPTAESATVNLVKQPSTAETNRDTARFALCYFGLNEIMTNSMVSESKRKLLTPSAEPVKILNPLNPDMAEMRTSMALSLLDTAAYNLNRKNGNNRLFEIGKVFEPDEKSGLATERDILAIAIEGDYVQQSWGNQKLENNFFVLKGIIEAFAAHCGLGTAKFERLVTTCPLYGPESAKITFKNGISGTMGRVSDKIRKAFGIKTPVFYAGFDVTEWLSTPKPLPKYNPLPKFPPLERDFSFVMPEALSSDTVKNEIKSVSPLIKTVRPFDLYRGEKLSAGTKSMTFSVEFRSPEKTLTDEDVAETCAKIVSVMEKKHGAALRK

SEQ ID NO: 96086 - protein, 338 aa, Unknown
  Obtained from environmental sample
  DOMAIN (97)...(292): von Willebrand factor type A domain
  misc_feature (1)..(338): Xaa is any amino acid
MIPARMGFGFERPLIAAAVLVVIPLSVFLVRKLGSPFTASVPLGPPGGVSFKAPFNLGGIVKALRILEYCGVVLLFVSAAGPLIKISETVWLNRGADILFVLDVSPSMAALDMGGASRFNIARELLKKCAEHRPSDSVGLAVVGYDAALLVPPTTDRELFVSRLGGLRLGEMGDGTALGMGLALAAYHLEKSVAPRRVAVLISDGENNAGAIHPETAAAMLKDLGVSLWVIGIGSGGEVPIDYVDPFTRIRRTGLFDSSYDTEALRRISIAGGGNMISAPSADALAAAFAYLDDQEMVVRRSGTVTRFYPCYLSFMIAALSLIITVRFVRRFFLGAWL

SEQ ID NO: 96087 - protein, 78 aa, Unknown
  Obtained from environmental sample
  misc_feature (1)..(78): Xaa is any amino acid
LLQDAPVAAAIGTERQKNLVNAACTALEEALALVQQEEPLDLIAPLLREAVNLLGEITGEVSTADILEEMFSRFCVGK

SEQ ID NO: 96088 - protein, 275 aa, Unknown
  Obtained from environmental sample
  misc_feature (1)..(275): Xaa is any amino acid
MSISNLTWGILTCSWFGFDVSAVPQVLQNLSLPLIVNTSDSPGWLAAYNANNFWIRFGLVSAYDNVDAMGKGITANLMLFCFSVALTQLCVAHIKGVIANIKSKSPRVLAELGQLGMLIGMYFVVLSLVVFNTGFGGVKSWQFGFLFGGFALNFVFGNYEGSVLKSFLTSCANILTNVLGITNVFSDIMSYIRLWAVGLAGASIASTVDGFAGSMVSHLAFFVFGVVLFLFGHSFNMVLNVLSVLVHGVRLNTLEFSSHLGLTWSGFAYKPCAKR

SEQ ID NO: 96089 - protein, 80 aa, Unknown
  Obtained from environmental sample
  misc_feature (1)..(80): Xaa is any amino acid
MFVKIDNVSKTYKQRGDILHALQDVNLEMEKGEFISLIGPSGCGKTTLLNILGGFEPVFSGHVYIGDKEVTKSHSPGVTI

SEQ ID NO: 96090 - protein, 104 aa, Unknown
  Obtained from environmental sample
  DOMAIN (5)...(104): Transcriptional regulator
  misc_feature (1)..(104): Xaa is any amino acid
MFLYMRISAKGRYALAVMVQMAENYGNGEYIAVVNISRNLGISKIYLEQIFSLLKKSGLLNSVKGTQGGYHLARRPRMITASDILSAVEISLFEETKGSTSDKA

SEQ ID NO: 96091 - protein, 132 aa, Unknown
  Obtained from environmental sample
  misc_feature (1)..(132): Xaa is any amino acid
MTSLKVRKALSIAVLLATSSTVFAQGAHPPTHPAAAAPEVAPVAEPPAAPVTEPVVAPPAQVVVTEPAPVAAKPEPVAKPAAKAAPMKISLYGFFQLNTVIEDGGNDNKAWSIWLPKKSEDGESRIALNANQ

SEQ ID NO: 96092 - protein, 316 aa, Unknown
  Obtained from environmental sample
  DOMAIN (5)...(315): Uroporphyrinogen decarboxylase (URO-D)
  misc_feature (1)..(316): Xaa is any amino acid
CPGGMMNSAIVDVMNATGHILPDAHSDKQLMLALAEDVSNQTGFENIGVPFCMTVEAEALGSDIDFGTLECEPKIKTEKFPNAESVEFLPKGAVAQSARAKTVIETIYELSKRNPDIPVIGSITGPVSAAASIVDPMTFLKQLRKNKDAAHKVMDYVTNQIIEYALLCADNGASVISIADPTATGEILGPKFFDEYAVPYLNKLADAVKSFGKQVIIHICGDVSMVKPGLAKLNCNALSTDSVVSLKKIKDELGGIAVMGNVSTYLLQFGKEDRISETTANLVKQGIDIIAPACGLSTSTPIANIKALTKTVVSGG

SEQ ID NO: 96093 - protein, 142 aa, Unknown
  Obtained from environmental sample
  DOMAIN (5)...(77): 2Fe-2S iron-sulfur cluster binding domain
  misc_feature (1)..(142): Xaa is any amino acid
MPTVNFINQNVKAEVTDGTPLVTAARTAGVAIETPCNGLGTCGKCKVRISANVRLGATVRLGENQREVLACQTVVKDDIDVLYYEKTTENRDMRIISSGHTFDYAIKPYITKESDKNKTKVFGGKKLLGTEDGDTANKIYGI

SEQ ID NO: 96094 - protein, 84 aa, Unknown
  Obtained from environmental sample
  misc_feature (1)..(84): Xaa is any amino acid
KGFIALAAVSFGRWLPLGVLGASFLFGFSSSLAVNVFNIRSLDFMPSEVFNMLPYLITLLTLVVFSGKEHAPRAVGQPYDKFGG

SEQ ID NO: 96095 - protein, 437 aa, Unknown
  Obtained from environmental sample
  misc_feature (1)..(437): Xaa is any amino acid
LGNKAVTPVYEAVIKNRVPVISINPIPDAQRIFDPKSGTTGGAQGGNRNVTITPKGSVEDAWESAIYNPTGQKVKTFETQSGEPKPVVWDGRTDSGQIAPDGVYIFRIGTTDKAQNSASAELTNIILDSREAGAFLTTSVSAIAPKKDQTANMVNFTNRLSINDGIDNWKLELKDETGTVQRSFSGSSPVPAVQGWNGLDEKGQIREGFFTAELTVNYTRGDIVKATASPVLVDVTGPALTVTTTPEYFSPDNDGENDELFIGLTAKDVSPIDVWSFEIRTPVESGTTQVFRKIEGHGSPSNRIIWDGKSDKGELVQSAMYYPYTFTATDALGNSSSTEGKIGIDVLVIRDGDRLRIQIPSIQFRPNFADFQGLPKDVVDNNMRIIRRIAQILNQFRDYKVQVEGHANPTQPAGPARDREEPELKRISELRARAIVD

SEQ ID NO: 96096 - protein, 65 aa, Unknown
  Obtained from environmental sample
  DOMAIN (36)...(59): 4Fe-4S binding domain
  misc_feature (1)..(65): Xaa is any amino acid
MDSRKLVINNDWCTGCGICAAFCPVKVLEIKLEKITIANPDACVKCGFCELRCPDYAIHLSEEEK

SEQ ID NO: 96097 - protein, 514 aa, Unknown
  Obtained from environmental sample
  DOMAIN (22)...(512): Carboxyl transferase domain
  misc_feature (1)..(514): Xaa is any amino acid
VSEKLEQLREIRKKVEEAGGQKRVDKQHESGKLTARERIALLFDAGSFVELDAFVKHRCVNFDMATTEAPAEGVVTGYGKVNGRLVYAYAQDFTVIGGSLGQMHAAKICKVLDLSAKMGAPVVGLNDSGGARIQEGVDALSGYGQIFYRNSVNSGVVPQISVIMGPCAGGAVYSPALTDFVFMVDKTAHMFITGPQVIKAVTGEDVSAEALGGAMTHNRVSGVAQFVSPGDAECIAEVKRLLSFLPSNNRENAPCYQAPSGVNDVVVELNDIVPLEPKKAYDMKEIIRKLADNADMMEVSAHYALNIITCFIRINGKTVGVIANQPSWIAGCLDINASDKAARFIRTCDCFNIPILNLVDVPGFLPGTEQEYGGIIRHGAKMLFAYSEATVPKVTVIVRKAYGGAYLAMCSKDLGADLVLAWPLAEIAVMGPDGAANIIFKNDIQNSADPAATKQQKIEEYTREFATPYKAAERGFVDDIIEPSQTRLRLISAFEMLAGKKGELPSKKHGNIPL

SEQ ID NO: 96098 - protein, 255 aa, Unknown
  Obtained from environmental sample
  misc_feature (1)..(255): Xaa is any amino acid
MEKKDGHLKQQLDLWYEKICTKDFILSDPVQFPRRFSKREDIEIAAFLSATIAWGRRDLILRSAEKMFVIMEHSPYNFVMSGGYKKLKNRNIHRTFFEDDLKYFCRGFEYCYAKYKNLEKLFAAEDVWEGFTLFREEMARANKGHYSKHISNPGAQDSNGSACKRLNLVLRWLVRKGPVDLALWKKLKPAALYIPLDVHVARTARKLGLLERTLNDKKAVIELTEKLRLLCPEDPVKYDYSLFGIGIENPLSFSQ

SEQ ID NO: 96099 - protein, 139 aa, Unknown
  Obtained from environmental sample
  misc_feature (1)..(139): Xaa is any amino acid
MIMSDILFLFFLGLLIVALAGPRWGLRIVADYRRGLDVVLAFDVSRSMNVRDCPPNEFYRQDNTSRIERGIGISRELLGYLEDVRFGTAISKGMGILAVPLTFDSDMVMNFLYVLDSQAVTGRGTNLESLLTPLLGVPG

SEQ ID NO: 96100 - protein, 108 aa, Unknown
  Obtained from environmental sample
  misc_feature (1)..(108): Xaa is any amino acid
MRNNYEYVDPDYHYTDPKTKVLRNLAGVTDPDDLLFFESAAVTDRLKELESQPIVIRNAETLLDIHSYLFQDVYEWAGKKRTVEISKGGRQFFPISHFDTPEFKKEVQ

SEQ ID NO: 96101 - protein, 74 aa, Unknown
  Obtained from environmental sample
  misc_feature (1)..(74): Xaa is any amino acid
MAYKPIEVDRQNLTIMGIRFSDLDTLNSAANAIGSNMFEGFEPTSRSIEIIRDYLSKKITLEQLIKLSKEKAYA

SEQ ID NO: 96102 - protein, 102 aa, Unknown
  Obtained from environmental sample
  misc_feature (1)..(102): Xaa is any amino acid
GYALVETSAPGIATACLQPLLDSYAKDNPQLIDYIHDEEEVFRLSDEGAKADGRKAAGILLPPVQKSGLFETVARLGPLPRKSFSMGHSVEKRFYFECRSLF

SEQ ID NO: 96103 - protein, 289 aa, Unknown
  Obtained from environmental sample
  DOMAIN (120)...(197): Fibronectin type III domain
  misc_feature (1)..(289): Xaa is any amino acid
FVVSRKDFPSVSYTLHIVFAKLDKIPLEPPTLTSKNTTFESVNISWNSVENASGYEVYQSAKENGEYITTNIITTETTATITGLYANTTYYYKVKAIGEGDYSDSQMSNNIKAITDKIKLATPIELKVDNSTDSSVIISWTGDNNATSYKVYQYVDGKDTEVTAKITISETTATITELHANTTYFYKVEAIGSGAYSNSELSEPLPAKTNKIQLPPPKLELKEITPKTVTLSWNNDTNASSYEVYQSTTEAGPYTKVNNNIDNINKTTVKISELIHDTTYYYKVIAIGS

SEQ ID NO: 96104 - protein, 216 aa, Unknown
  Obtained from environmental sample
  DOMAIN (100)...(179): Fibronectin type III domain
  misc_feature (1)..(216): Xaa is any amino acid
MKTNKTKLATPDGLKLGTVTSNSITFSWNSVTNASGYEVYQSTTSGGTYSKVATITGTSATITGLTSGTTYYYKVKAIGNENFIESELSSAISGKVKTKLLAPTWASSSKTFNSVTISWNGVTNASGYEIYLYPGNTKVTANITISGTTATISGLDPSTTYNYRVKAIGSGDYESSELSTNYIIVTTLTVAAKISGGSHTLMIDTTGDLWAWGRNK

SEQ ID NO: 96105 - protein, 68 aa, Unknown
  Obtained from environmental sample
  misc_feature (1)..(68): Xaa is any amino acid
VYNCPIARLPDCPIARLPDCPIARLPDCPIARLPDCPIARLPDCPIARLPDCPIARLPDCPDHSQKMP

SEQ ID NO: 96106 - protein, 605 aa, Unknown
  Obtained from environmental sample
  DOMAIN (404)...(605): Flagellar hook-associated protein 2 C-terminus
  misc_feature (1)..(605): Xaa is any amino acid
MSDVYMPGVKSRFNSEKIIEDLMRLERIPKERTEKNIDNLQTQKGYWQEVGRRINSMRESARFLYSFQNPFNERLAVSTDEYALTATATREAEEQSYRFTVKQTAQADRFLSSPLDEKTKIEAGSYNFTVGNDKISINFRGGTLKDFVEVINRRGNDKISANLIAIQSGTKSLLIESKITGSANRLGFHDDAAKFALKTGMMEQSKDNRKDISIDITENTVKITETQPGNTTINDGVLKVGVQSFATLPLGISLSANSPAILKLETSTRVEDSGILNVQQPPPGPSIPKGSVTYGGITIDNDPSSAPLPEWKPPYVPPQRHDDMSVLSLVFSDGTSAKLPPITDSNGFVTRQYTLSSIAQGRTITSLNIENTNTHREVSIGKIEIIDPTSMTGGLKPQNALSSARDAVITLEGIEISRPTNNIDDVIPGLTLNVRGVSERPVELKVTGDTEKVKEAIINFVGNYNRLLAEINVLTARSVSSGSGTKTSVDDSVLNELTYLTAEERAEMRNRLGAFNGDLTLNQLKNRLLQSVTAPYPTSLERDLSLLAQIGIGTNAARGTGYEPAKLRGYLEIDEKKLDAALETKIPAIRELFASDTTGDLLADT

SEQ ID NO: 96107 - protein, 124 aa, Unknown
  Obtained from environmental sample
  DOMAIN (19)...(123): FlaG protein
  misc_feature (1)..(124): Xaa is any amino acid
MGIQIASLYAGGSIPTPIQQELQKEKQPPLPIKQNVITEEALATLPGNRHSSPSLEKTTADIQHISLVFNSRLKFVIDHESNEILIKVIDNETDKVIKVLPPEELQRMHSDLRESIGFLFDELV

SEQ ID NO: 96108 - protein, 361 aa, Unknown
  Obtained from environmental sample
  DOMAIN (169)...(325): YbaK / prolyl-tRNA synthetases associated domain
  misc_feature (1)..(361): Xaa is any amino acid
MGESMLRVKNRLNNDFVVSPTAEEVFTAIVRDELSSYRQLPIALYQINSKFRDEIRPRYGVMRGREFVMKDAYSWHTDDKSLDDTYQAMGRAYRKIFKRCGLSVIPVKADSGAMGGSGSEEFMVESEIGDNTLILCKNCDYAANVEKAACKSDFTAHNTIEAAKDAAKGTKSFEKIDTPNAKTIEELCAFLKTESKAFIKTLIYRALNVELDLSSAPGCAKLERKKPSSDAPAVYPEAFFAVAIRGDLDVNEVKLAAVLKASEVALASDTDVTRLTNAPVGFAGPVGLTGLPVIIDHTVTGMNDAVTGALAKDLHYKHVAYGRDFEGWAIDGQTSVDVRTVKAGEHCPQCGGELYTKMGNE

SEQ ID NO: 96109 - protein, 266 aa, Unknown
  Obtained from environmental sample
  DOMAIN (2)...(223): MBOAT family
  misc_feature (1)..(266): Xaa is any amino acid
MQRTGNLLPQFKVNHEFDYDRVTSGLRLAAWGMFKKVVIADRLAIYVNGVFENPSVYPAASLALAVFFFAFQIYCDFSGYSDIAIGCARVLGFNLMNNFRQPYFSRSITEFWRRWHISLSTWLKDYLYIPLGGNRKGEVRRCINLLITFLISGLWHGAAWHFVVWGALHGVFQIMERSTAPFRNAIGLKVGLSEESRFRKAIQVCVTFALVCFAWVFFRANTITDAFLIMAKLAKLPAELAGYVGGLSRNGIIGTVRNAFQMGIDV

SEQ ID NO: 96110 - protein, 376 aa, Unknown
  Obtained from environmental sample
  DOMAIN (44)...(283): Rad51
  misc_feature (1)..(376): Xaa is any amino acid
SDKSWGKKSAAAAADEKDSKEGKEGKEGGNKQRNAAIEQALSQIEKQHGKGSIMRLGTASQQGDIQAIPTGSISLDTALGVGGFPKGRIVEIYGPESSGKTTVALHAIANIQKQGGVAVLIDAEYAFDAAYAKGLGVDVDNLLVSQPDTGEQALEIADTLVRSGAIDLIVIDSVAALVPAAEIEGDMGDNHVGLQARLMSQALRKLTGILSKSKTCLIFINQLRMKIGVMFGNPETTTGGNALKFYASVRVDIRRIAAIKDGEEVIGNRTRAKVVKNKVAPPFREAEFDILYGRGISFEGDVLDLAVEMKIVDKSGAWFNYEGERLGQGREKARDYLKENREVLAKIEAQVRAQAATKRAGAQQESGVDEGAEEGE

SEQ ID NO: 96111 - protein, 74 aa, Unknown
  Obtained from environmental sample
  misc_feature (1)..(74): Xaa is any amino acid
LAVEMKIVEKSGAWFRYEGEQLGQGREKARDYLKENREALAKIEAQVRALAATKRVGGGGQKEAGVDEGAGEEE

SEQ ID NO: 96112 - protein, 512 aa, Unknown
  Obtained from environmental sample
  DOMAIN (428)...(485): Sigma-70, region 4
  misc_feature (1)..(512): Xaa is any amino acid
MTTTTKKKDAAPPAALPIVDKAALRLRKLANLQGFVTEAQMEAAVDAADDIERIREILERERITINTFVGERRASPRPERKPERPASHAHYTDPTLAYLNTVGKVPLLSKGQEAEYAMRMEAAQGKLFEMAFRSQYAIDSLKRLGQKLENGEVECGDVICIDEVQGEGAESVDLDKKRAEFLKALSIVSSKYAAITDMERTGAGGKELDKLWEETILICRGMGLNAKHVEDILDKYKEELASDKRVADIEKFSRLEEARNQAKCAVIEANVRLVVSIAKKYMTRGMEIIDLIQEGNRGLIKAVENFDYRKGYKFSTYATWWIRQAILRAINDKSKAIRIPANTMELVNKVLRVTRKWVIDYGYEPSYQEIAVALGCPAVKVQQAMEYSLDPISLDMQISGDSGATVGEYIEDLTVVDPTQKISLLHLREQINEVLSSLAPKEKEILMMRFGLDDGRIKTLKEIGEIFNISRERVRQIETKALSKLKHPSRVRLLSAWREERSETLADVPYEE

SEQ ID NO: 96113 - protein, 453 aa, Unknown
  Obtained from environmental sample
  DOMAIN (4)...(75): HAMP domain
  misc_feature (1)..(453): Xaa is any amino acid
IRVAAYVSIAMLIAVIIVAVIMSLSISKPIVKVTKTIKNISEGEGDLTKRIETRAGGEVGTLVNYFNKLMDTLQYPIRETKMTVNGLSAAADKLSSVSKHLSETSKETVNQITNAASTAEQVATNAKAMASGAEQASVSASEVASTTEQMAVNINAMANGAKQASLNASEVAGAAEQMSVNMNTIASAIEEMSASIRQIADNAGEARHVANDATMKSSDATAAINKLGIAAKGIGQVTSVIKKIANKTNLLALNATIQAAGAGEAGNGFAVVAGEIKELANQSAQSADDIANRIEGIQNETSAVIEVIHEVSNIIVKINQSVESIAGHVEQQTKASNEIANNVAQANMGAKRVASAIGEVAKGTNEIASNVTQASAGAKRVASAINEVAKGSRDIAANAGKAVKGTDNIKENMAAANKVAEESNQGTSQVSTSANNLAKMADGLRNAIDKFKV

SEQ ID NO: 96114 - protein, 689 aa, Unknown
  Obtained from environmental sample
  misc_feature (1)..(689): Xaa is any amino acid
GYNARKAWIQLSERDNVGGRFWENYTHSILTANVTLSRALSKIDFPDNKEKIRHYKALLQDYFFDKKRILVIDDYHCIEDPLVLRFMEEGFFRNMLPGTTVILISRSITRLNIAGITYRDQIFNVNESDLRFTENELAQYFRRMEISLRTESLREIMQDTEGWAFAINLIARSYQKAPGYGGYVRSAMKQNIFRLLEMEIWAGLSEPLQIFLVRLSLIDHLSVDLLTQLAGKEEEFVGELEKQSAYVRRDSYINAYLIHPLFLEFLAEKQDIISEEQRRKTYKTAGDWCCKHGFMIDALSYFEKIGDYDSIVSALLSLPQQIPRDIANYAAAILDRAPEHAFYTVNNLATMHMSTYMYQGFLEKSFRLAEHYEAKFLKLPDNNPFKNQTLGAMYHYCSYLRVLMCIKDNRYDFDIYFEKYCKYFSPPANISKIRNHSPGPWVIAIGSSKKGEPEKYIEALFRTTSLVTEYFTGIKTGEDELARGELKFYQGDLYSAEILVIRALEQARNFRQFEIIHRALLYIMRISFTQGNYLKAQQALEETKSYLSEELYINRYTNYNITLAWYYCVLGQPENIPDWLKENFSSYGHALFIENFGNRMKTWYYLMTRNYPPLLSYIHEMKTRESYLFGRIEMLAMEACVHYKMKDKKLAFAVFAQAYKNASPNGIVMPFIELGKDMRTLSSAALKES

SEQ ID NO: 96115 - protein, 219 aa, Unknown
  Obtained from environmental sample
  DOMAIN (14)...(217): Binding-protein-dependent transport system inner membrane component
  misc_feature (1)..(219): Xaa is any amino acid
MVIKTVIYFWIPQLLKGARVTVGLTVTAACAGLVIGFFLALGKMSKKFILKKLCAAYIFFFRGTPLLMQLFFIYYALPQIFPPFTIKSRFLAAFTAFALNSAAYCAEIIRAAIQSIDKGQFEASRVLGLSRAQTLRYVIIPQSVRRLIPPVGNEFIMMLKDASLVSMIALVDITKAMNNIFNSTSSALVYIPALALYLIITAVFTYIFHKLEKKYTLAP

SEQ ID NO: 96116 - protein, 404 aa, Unknown
  Obtained from environmental sample
  DOMAIN (99)...(307): 7TM diverse intracellular signalling
  misc_feature (1)..(404): Xaa is any amino acid
MNLDKPFFPCLYLASIGVNWEIYLNGTLIKREMFLVDGRIMEQHSERDVIVPIDSSLLQKGENILAFRIVGDPTDYTTGFIYKVPYYIAEYAYIMRAHSEIDRIIIISILSMLGIYHFLFFAIFRENRYNIICGFVFIGMGLYYLWRTHLIYQLIPNTAIVVRLEFFTVYFMILALMAYTDKLCNLRYSIVTKVYGIFCTVLAVSQIFFSRPYGSETLIVWQLVSIPAMIWILVYNVVFPIIRELKKSKKIADILVNTYPGNLLIAVALQVLTVVIDLIDSFALHYSLDLTSYSMVIFAVSVTLMLFRMSVIKDRELREKSSLLERTTDPISAREKVFISYRLTEREKEIARLMTEGLDNTNIAERLFLSNSTVAFHVKNIFRKFGIIDGKNKGRAMFLVKLLN

SEQ ID NO: 96117 - protein, 247 aa, Unknown
  Obtained from environmental sample
  DOMAIN (2)...(204): Xylose isomerase-like TIM barrel
  misc_feature (1)..(247): Xaa is any amino acid
DVPEAGGITSGYARGIKNIFKERGISIAVLGCYINPVHPDPAIREKHLRRFEEHLCYARDFGCSIVGTETGSCNGDCSFHPDTEKDETLDLLCRSLERLIKTAEKCGSIAAIEAVADQHTVSSIEKMQTVIRRLASPCLKVIYDPVNLIPNAGLGESGIFQTQKDFFEKAFAAFGDEIAAIHAKDFRMGANGKIGTLPAGTGELDYPALLSLLAEHKPGIDILLENSSPDTGKQAIAFLRQLLPHNT

SEQ ID NO: 96118 - protein, 137 aa, Unknown
  Obtained from environmental sample
  DOMAIN (1)...(137): Putative undecaprenyl diphosphate synthase
  misc_feature (1)..(137): Xaa is any amino acid
MDGNGRWAQQRGLMRTQGHLEGLQAAKRIVKAASDMGVQYLTLYAFSTENWKRAAEETGFIMGLVKQYLRGEMNFYRQNRIRIRHAGDAAGLPPDIAAEIAAAVADTRKFSGMQVILALNYGGRDEVARAVRRIAAQ

SEQ ID NO: 96119 - protein, 246 aa, Unknown
  Obtained from environmental sample
  DOMAIN (5)...(246): Cytidylyltransferase family
  misc_feature (1)..(246): Xaa is any amino acid
MKKIIPRLLVFFIGLPIIFAMVFLLPQCRHLVFNLFAAVLSALGAMEFSVLLAQKKLIISKIEAAILGALPPLVMILDINLGLSDILFHIVFTAVVSWLLISRIFYRANMLDNLLNQLAAGFAVLLYPGMLMAWPIRISLWENASVIILIFLVVVFFTDGVAWVTGMLFGKGNQGILAVSPHKSIAGFIGGAIASIVIGAGAALLCPDVFVTRFHSILGIPSVAGALLGLLTGAASVLGDLGESAI

SEQ ID NO: 96120 - protein, 389 aa, Unknown
  Obtained from environmental sample
  DOMAIN (12)...(127): Dynamin family
  misc_feature (1)..(389): Xaa is any amino acid
LNETPSANRVHIGFFGIRNAGKSSLVNAVTGQDLALVSEVKGTTTDPVYKTMELLPLGPVMIIDTPGIDDEGELGELRVARARRVLNKTDVAVLVTEAGSTFKPAEEELIGIFKTKNVPYIIAHNKCELHSGNAVPESVSTTDNVLPVSAKIGINIHMLKEKIAAIANKTEPQRRLVADLIQPLDLVVLVIPIDKAAPKDRLILPQQQAIRDILDTGAIAVAVRDSELKEALSRLKPALVITDSQVFAKAAAEVPKDIPLTSFSILFARQKGWLESAVQGVAALDKLQAGDKILVCEGCTHHRQCDDIGTVKLPHMIKNYTGLEPEFSFRSGGDFPDDLSPYKMVIHCGACMLNDREMQYRSRCAKDQGIPFTNYGITIAHIQGLFLFS

SEQ ID NO: 96121 - protein, 181 aa, Unknown
  Obtained from environmental sample
  DOMAIN (6)...(132): HD domain
  misc_feature (1)..(181): Xaa is any amino acid
IDMEGFWRHCLCVGVTSKLIAIKQGVDPGNQQEYFTAGLLHDIGKVPLNAVLSVDYMNMIIAADSEHKTLITAEDESFGINHCYSGELIANAWKLESPVSDVIIWHHNTDKYYGEYLHILYDVMAADYFSAVYDIGFSGNKNPVKLDNEIWGIIGLNENFFEEIKGKVFKEIEKAKIFLKV

SEQ ID NO: 96122 - protein, 301 aa, Unknown
  Obtained from environmental sample
  misc_feature (1)..(301): Xaa is any amino acid
MLSVRFWGVRGSIPCPGPDTVIYGGNTTCLEIRADDRLIIADLGTGLRSFGDWLMANDLKKYGKIKADIFVTHTHWDHILGFPMFTPAYIGGTELRITGPVSFDNNTLKNIIETQMSYQYWPVTAGELAANIIYNQIKETTLDLGGGLSVTSKFLNHTILCLGYRFDYQGKSIVLVFDHEPFRNLFSVNPADEGYDEDAAKEGEIAAAEENEKIKNFMKGADIVVHDTQYMEDEYATHTGWGHATFKHAINAVNEADVKKLVCFHHDPSRTDSQLEQLEKKYTDSTTVKIIIAKEGMVLEA

SEQ ID NO: 96123 - protein, 271 aa, Unknown
  Obtained from environmental sample
  DOMAIN (22)...(268): Amidase
  misc_feature (1)..(271): Xaa is any amino acid
MFDMNALELSVAIKEKKIGVVEAVSAYIDLIEKTDKQFNAFLAMSKDKALANAKAVQTRIDSGESLSPLAGVPIAIKDNISTMGLATTCASKMLDGYTPVFNATAVEKLENAGMIVVGKLNMDEFAMGGSSETGVFGPVRNPWDVSRVSGGSSGGSVVAVMSHEIPLALGSDTGGSIRQPCSFCGATGIKPTYGSVSRYGLIAYASSLDQIGPIARNIDDCASLLSIISGPDDRDSTCVIEKPFSFDKKNTDRLDGVKIGLPRNYFASGID

SEQ ID NO: 96124 - protein, 95 aa, Unknown
  Obtained from environmental sample
  DOMAIN (19)...(90): Glu-tRNAGln amidotransferase C subunit
  misc_feature (1)..(95): Xaa is any amino acid
MKIDDELIAYLEDLSCLTLSDGEKKRLAGDLKDILGGMERLGELNTENVPERSHPFDNVNAFRDDHVQASYNRELILKNAPDKDDEMLIAPKTVE

SEQ ID NO: 96125 - protein, 336 aa, Unknown
  Obtained from environmental sample
  DOMAIN (80)...(113): Tetratricopeptide repeat
  misc_feature (1)..(336): Xaa is any amino acid
MEGAIAAGEADAPMLIKLGNIYRDQKQPAKAVPLFEKAVKENRNDVQLLAALAQSQEAAGMIGEAITTYEQYVLMDPKASKEHKTLGDLYTKQKKPAEAMRAYKKYLERNPTDNAVALMVAREAYNAKQFQEAVRYFAMVQGEESKKPEFIKMYGTAAFQANDNARALTVLKEIATPLNKDPEVFKMLEEVSRRTGANDMAVNYLKQYAALRPQDIEANRKLGDALFDRKDEAGALTAYRAVLKADPNAKGFLKRYVGLVMKAGNEAEKMAAFAAAINAGEADVGVYSQLGALHKSKGDYVKAAAMYEQATKLDPRNADYLGELADCQLKAGNLSG

SEQ ID NO: 96126 - protein, 567 aa, Unknown
  Obtained from environmental sample
  misc_feature (1)..(567): Xaa is any amino acid
SGRHAGLTDEVIGKIDQINGKITVYAPVGSGVTKRTMYPRFTAAGLVKVEETTQVSGVSGRIFDAPVTYTAVSANGINSRSYVVTVRELQSTIYVNCNSFGYGDGTSWENAFRTLRAACEAAALFPEDTPKEIWIAKGTYKPGAVEDGFPLTANTSYIGGFAGWETAKSQRNVTANAVIISGDFGGGLYTKRLFSSVGTLNGNLSFDALKFTSASGGGIYTVLSSQGVLNVTNCSFDNVRASVSGGAVYVRGGGAVISNSAFNTCNSGTVYVQGTTANISDVKFSMCTGADTVRLDCSGETRITKVTIEDSSVMSLSGNGDKTLETVSIKRSREVSIQNSSGNVRINNSDLTDISSDGISLNNFSGTTEINSINLRNIRGYGINGRNSSPNRILLSGITSNAIIGGFSVYLDITQGAIILENSNFTSKGIYLKTGTSSLIDVSNTNITPTSGDGICIDGGNNVTIDNVSITTSEYISGLRMSNLSGNVEISRLDLGNSHITGYDNISSNKMRLSGITGGSIHLSLTPLTQGAITIEDSNFTNSRGGITIIASGSVVNIRNCDFNTVQ

SEQ ID NO: 96127 - protein, 207 aa, Unknown
  Obtained from environmental sample
  misc_feature (1)..(207): Xaa is any amino acid
MYVAKLYQEITDPEDKFKRKLEKIPKPEFIVLYNGEDNYPDYKELRLSDSFIQADIKIDLPLELVVQVYNINKGRNQEILSKSKTLENYSKFIDKIREYQKEYKWKYNEKKEILEKSFKSAIHYCIKNNILKDFLKKHSSEVLNMLYTEYDPEVEMRVVREEALEDGIEIGREEGKEKSRQYFLKMINQGLTIEEIKERLQQKEEIF

SEQ ID NO: 96128 - protein, 60 aa, Unknown
  Obtained from environmental sample
  DOMAIN (1)...(35): Ribosomal L29 protein
  misc_feature (1)..(60): Xaa is any amino acid
MDLRFQLVIGHVDNPLQKRELRRQIARLNTLIRQHELEEQKSVSQKTASKDKAVAKSKKA

SEQ ID NO: 96129 - protein, 95 aa, Unknown
  Obtained from environmental sample
  DOMAIN (22)...(90): Ribosomal protein S17
  misc_feature (1)..(95): Xaa is any amino acid
VAEEDRLNEPVQAKSGKKVFVGIVRSDKMDKTIVVSVETKTLHPLYKKYIVRSKKVKAHDEKNEAKIGDRVRVIECRPISKEKCWRLDAILEKAK

SEQ ID NO: 96130 - protein, 376 aa, Unknown
  Obtained from environmental sample
  DOMAIN (1)...(376): UvrD/REP helicase
  misc_feature (1)..(376): Xaa is any amino acid
VDPRSILAVTFTNKAAREMADRARLIDDRAEMAMLRTFHSFGAWFLRRNGSLANFGPGFVIYDDDDTISLLGTIMEGTPRAEVRALASSIARAKDYFLSPGDPELDRIDHRKLFRRIYTEYEEKLARIGNVDFGDLIKKPVEILRQNPEVAARIRGRFRVILVDEYQDANIAQFELLRELCDSETYVCVVGDDDQSIYRFRGAEVRNILEFPDRFPGTDIIRLERNYRSIAPILRAASSVVDHNKNRLGKTLRAERGPGKKPVLAFLPDQDEEAKFCAELIGNQKNEGHGSSNRSSYSDWAILYRTNAQSLGFETELLRRRIPYRVVGSLKFYEREEIKDALALLAFLVNPRDEVAFRRVVNKPARGLGAVAIGRI

SEQ ID NO: 96131 - protein, 285 aa, Unknown
  Obtained from environmental sample
  misc_feature (1)..(285): Xaa is any amino acid
MRLILNNFRLVDEKTDASGSIIVQDGIISDVHAEGPLPDEKISGAAMIIDGKSLSASGELPVLMPAFVDLHAHFRDPGLDGNVELPSELLESACISAAAGGFGTVVCMANTKPVIDTIEKAASLKKRSNTLGLIDLFPVLSLTKRMEGRELSGITAITKSGSSCIPLMLSEDGKDPENDDLFLAAMKEAKRIGIPVSCHCDFGGDENNAVRRVIELGKKAGCRLHIAHVSTKKALETIREAKQEIQAQTAPDGFTLSCEAMPHHLCLTEEVASKLGAKTLGRGLI

SEQ ID NO: 96132 - protein, 339 aa, Unknown
  Obtained from environmental sample
  misc_feature (1)..(339): Xaa is any amino acid
MILEKYRVDAEKLAENSKCEVWAEKGSGVTAATAKGIADEYKNNIYAKMMNTFGWEENIPLNNGSTIKMNTMEFAHAVATGDMSGAKLTILLLDIKDGYKKKGDPYVAGYFYAVDFFKNDPSYPDIKSNERDMIYVDTHPSDPDSPDSYGTLAHEMQHLMNFASSILYRSDEELNIMDTWVDEGLSGAAEWVYSGEHSEERWQYYNEDPSGLIAKGNNFFIWDNHDDNQYANLDDYATVYLLFQYLRLQSSKPGDIYKEIHTSSYTDYQAVVKANSINISHKDKWDLLLRDWHAANYTNAASGLYGYRNDSTLKDIKAPIFPLETTTVNLFPGEGVYSI

SEQ ID NO: 96133 - protein, 269 aa, Unknown
  Obtained from environmental sample
  misc_feature (1)..(269): Xaa is any amino acid
MRYAPTNISELAAFIAAIRPGFKSQYKKFEAREPFSFGVKAFDDLIQTKEFPHSYIIYQEQAMKSLAFAGIPMSECYTVIKNIAKKRADKVYAVKEKFLDGFTKAIISEGKPKETAADIARQLWQVIEDSAYYSFNASHAVAMAADSLYGAWLKAHHPLEFYETVLKICEEKGDKDRMSALKSEAESYFDIKFPAYRFGQDNREIKADASTNSIINSVAAIKGFGKAIGEPLYDCSNYNPTTFIDVLKYLYACGVKEGKVRPLILIDYF

SEQ ID NO: 96134 - protein, 291 aa, Unknown
  Obtained from environmental sample
  misc_feature (1)..(291): Xaa is any amino acid
KILFGKEYVQYLEKNYLTDNLTIDTLITSCEKLQIDEASKVCTIGDSFSNQGIYGYQNYLAHLLGFKIINILRGDKELSNMAIALLNSNIIDSSNCHIFILSSVDRAVIPNLTYIDFEMLYKINDNQNKNKKNTNNSLNDLFSFIRLKLGYDNPIFKHNLKKECFTHRRFSKILFNYKEDMNFLNTQKINVAKAKENLILLNKKFSEKGIKLIFLIAADKYDVYRPFMADNSLPIDTTTDELSNISDVFVINTKPMLQEMVQNGEKDVYMVNDTHWSYKASEAVARETANA

SEQ ID NO: 96135 - protein, 105 aa, Unknown
  Obtained from environmental sample
  misc_feature (1)..(105): Xaa is any amino acid
VEDENNKTIAEVDITLENGEKVMLVEVKSKPTTEDITDHIKRIEKVRKHADSHNDQRKFLGAIAGMVFNDNEKEFAMKNGFYVIVPSGETFIITAPEGEYSPREW

SEQ ID NO: 96136 - protein, 220 aa, Unknown
  Obtained from environmental sample
  DOMAIN (1)...(218): Uncharacterized protein family UPF0027
  misc_feature (1)..(220): Xaa is any amino acid
LNGRRKSDIDAEIAKLKTEGRDTEIQNRIKEIKAQVRVDIPKDLAYVTGDLFDDYINDMKITQLFAAMNRKAMMKVILEGFEIADGSGYETFTTIHNYIDTDSMILRKGAVSAKAGEKLLIPINMRDGSLVCRALGNPDWNFSAPHGAGRLMSRSKAIKTLSLDDFKEQMAGIYSTSINKDTLDESPMAYKNMDDIVRNIAPTAEIEKIIKPVYNFKATE

SEQ ID NO: 96137 - protein, 78 aa, Unknown
  Obtained from environmental sample
  DOMAIN (1)...(77): Ethanolamine ammonia-lyase light chain (EutC)
  misc_feature (1)..(78): Xaa is any amino acid
TGAEVIVALIGERPGLLTAESMSAYMAYKATANMPEARRNVVSNIHKGGTPAVEAGSYISDIIKKMLDQKASGLDLKL

SEQ ID NO: 96138 - protein, 169 aa, Unknown
  Obtained from environmental sample
  DOMAIN (1)...(169): Cobalamin adenosyltransferase
  misc_feature (1)..(169): Xaa is any amino acid
MTHLYGNQLTEKDNPVIVFRGKLDSLCAMILEAQVLGRDNSGFVNDLQDILEFVRSLFSVEYKRVPLGEFRILGYDSKEIRERSHNPEKYFGRKRLVMHHSMGPLPLRLNFLRTTAREAELAAVSVLREIARNPKASGIQDAEHCYKDIVEALNRLSSLFYMLMYKYLL

SEQ ID NO: 96139 - protein, 228 aa, Unknown
  Obtained from environmental sample
  DOMAIN (40)...(213): Leucyl/phenylalanyl-tRNA protein transferase
  misc_feature (1)..(228): Xaa is any amino acid
MKFKPGPDPDFPYLDEDKRIRFPPPEKWENSIVAVGGNLSPGMLLSAYEQGIFPWYGPEDPLVWQSPDPRMVIFPEKLHVSRSMKKIFEKEIFIISINRDFNGVISGCCEAERPGQGGTWITKDIIEAYMEMHRLGWAVSAEAYLDGELAGGCYGIRMGRVFCGESMFARKPNASKAAFIGLASLLFNKGVTFIDCQMPSKHLRSLGGEEMPRDTFLALLKREMNNGQ

SEQ ID NO: 96140 - protein, 192 aa, Unknown
  Obtained from environmental sample
  DOMAIN (6)...(192): LemA family
  misc_feature (1)..(192): Xaa is any amino acid
MKVFVIAIILSLLFVGLLVGGGIGIWYIGTRNNLIKLDETINQSMAEIDNQLQRRSDLIPNFVNTVKGYAAHEQQVYSDIANARSRLAGAQTVEEKAAGYNDMQSALARLLVVVEQYPDLKANQNFIALQDELAGTENRLAVARKRYNDSITTFNVRIRQFPGSIVAGRMGFVPHAYFEIAETARQVPTLQF

SEQ ID NO: 96141 - protein, 139 aa, Unknown
  Obtained from environmental sample
  DOMAIN (6)...(139): Protein-L-isoaspartate(D-aspartate) O-methyltransferase (PCMT)
  misc_feature (1)..(139): Xaa is any amino acid
VEEDHQNLRDLMVSEQLGSRNIRSEAVLLAMRQIPRHLFVPDHLQKYAYEDSPLPIGLGQTISQPYIVAYMSEQLQPFKGMKVLEIGTGSGYQSAILSCLGCEVYTVELLEELAIKAEKVFKKLNLSGIEIKCANGYSG

SEQ ID NO: 96142 - protein, 223 aa, Unknown
  Obtained from environmental sample
  misc_feature (1)..(223): Xaa is any amino acid
MPYTPNIDGTTVRTLADWGAFFKKNGQPYDIIELMNQENTILDDIPWKEATDFDGNRTALRVGIPTAFWRRLYRGIDVSKSTVTIVKDPVAMLEARSLIDAKLLQIHSSQGAAYRMSEAKSFMEAMRQEVATALFYGDVKNNPDGVHGLDPRYAFKDAPNVVDAGGTGNQNTSIYGIVFGEMDTMGIFPKDSKVGLEHTVLSEYDAYDDQGLAFRAVGDLFQW

SEQ ID NO: 96143 - protein, 69 aa, Unknown
  Obtained from environmental sample
  misc_feature (1)..(69): Xaa is any amino acid
VYPTNAIESLNYSIQRVVRHRQAFPSDESALKLIFMALRNISKKWTMPFRNWGSALNQFAVIYGDRVPL

SEQ ID NO: 96144 - protein, 216 aa, Unknown
  Obtained from environmental sample
  DOMAIN (3)...(207): Alpha-L-arabinofuranosidase C-terminus
  misc_feature (1)..(216): Xaa is any amino acid
SFDEWNVWYHSNESDKKVEKWSEASPLLEDIYTMADALAVGCMLITLLKNADRVKIACLAQLVNVIAPIMTEKNGGAWRQTIFYPFRDASLYGRGSVLRCPVIVDKYDSREFCDVPYLEAAGVHNAKKNEIAIFAVNRNLKEAINLEAEIAGFGKMNLIEHRVMCNKDLNMCNSINEENVKPVIQTGGTLEGGAEGMWLKLILPPASWNVIRLKLF

SEQ ID NO: 96145 - protein, 233 aa, Unknown
  Obtained from environmental sample
  misc_feature (1)..(233): Xaa is any amino acid
MQALFDGLTLAKPLKAYGDVNPIYLQRFGADPWGLVYKDRVYVYMTGDTFKLSSGSSPTPDFSNLQANDYLNINTIRVVSSSDLVNWTEHPEIKAAGSQGAATKATNSWAPAAAYKNIDGKDYFFLYFADNASGIFVLRAESPLGPFINPRPDGSALINRSTPNCSNVTWMFDPAVLEDDDGEFYIYFGGGVPPGGNAAQFTSNDPLPGTERAVRLGDDMISIAGIPQNLNVP

SEQ ID NO: 96146 - protein, 165 aa, Unknown
  Obtained from environmental sample
  DOMAIN (6)...(106): tRNA pseudouridine synthase
  misc_feature (1)..(165): Xaa is any amino acid
MRTIKLIIAYDGTDYLGWQRQSGQARTVQAVIEAALEKMHGHPVALAGAGRTDSGVHAIGQAASFQTDIESIKPDRFVPALNSLLPADVRITESCEAAANFHARFSARSRLYRYFFITGRQALPHESRYALQLWRIPDIMTLNSYCRLLPGERDCAIFAGSGDAS

SEQ ID NO: 96147 - protein, 281 aa, Unknown
  Obtained from environmental sample
  DOMAIN (26)...(209): DEAD/DEAH box helicase
  misc_feature (1)..(281): Xaa is any amino acid
MNDFAGLGVLPEFADRLSKKSVNCPTVVQRLVIPKLLEGKSVIFRSATGTGKTLAYLLPGLQRLLSDIGAPYHGPRLLVCAPTLELCSQIKDEIDFLLENESGVNVSLLIGSINLSRQIDGLKKSKPQVVVGNPGRLLLLAKMGKLKLRNLRFLVLDEADRLTMPECLEETSALAQLAARELKSRTSDSKTGLVIAACSATVSAKTRELLRPLLDGAELLETDEQEILRERISHWAIFSEARRKSQTLVSFLAAVKPRKALVFTGRSNDAGKTASILNARK

SEQ ID NO: 96148 - protein, 340 aa, Unknown
  Obtained from environmental sample
  misc_feature (1)..(340): Xaa is any amino acid
MAENANLEILSTRAGFNSAVRHIKKTMDIASKTNANLGDIIFELDDEELTSGKTGLLLRMLLVDKLGYKTASTNLSSTVNDLSVLAKEFGKWNGVDLVAAYFHPEMGLLIANPKVAEELAGFGQLRQRELLVVYAGLQGKETDENCQKAADLALRLFEGSRVTAPSFLTRGKFTAKKVSKPKKISETEVVKKVKEKIASKGKVPAKRAAAETAAPSAKKAATIVQKSSGGPARMTPRYAVIVQNELFHNGNVEAWKRIIASYRAKHPSLEVFIYYEQERIMDINSLFKWGKVKHGSAIEFAVAGNDIQDVAKLQRYLAQGASHQFEAFLRGPVNTVLKLF

SEQ ID NO: 96149 - protein, 701 aa, Unknown
  Obtained from environmental sample
  misc_feature (1)..(701): Xaa is any amino acid
AKVHLYFLNNKLKKIVNRNTANGEYVVNAGNWDELKSLLKTAPFDGGTDFSQIDLNNIAGNEILFFSDGISTLGDADIIKDIHTNRPIHCIVSSSKTDYSAMKLIAGKTLGKFVNINALSSEKLKNELLNETLQFLGTEHGKTIREIYPSIATPVHGNFSLSGISDTNEAELTLLFGFGATVEKRITVKLNAKNADSLGNVHKLWAQKKIAELDLNYEKNRAELTELGRRFGIVTRNTSLIVLETVDDYILYKIEPPASETELYAEYQRKLKRQETRQRDTERNMLNDAAAAADNIRSWWNKTLKKSNTAADRFDNHNDTRGDYGRVTGIRAFFDGILGGLYDFFVDIFMPTPEIAVDFFEKLPEERVARLVKAEEIDVTLERKLEEEDSEKDFDQPTITIKPIKQDNDYLKKLTGKTSEDYQLYLKIRTDYAYSPTFYFDMADWFYTHGDKETALRVLTSIADLELENAALYRLLGYRLKEFGEYALEKFVCQKVVQWRPMEPQSRRDYANALADNGEAQAALDMLYESLTREYSENIRNRNKGVEEVTVTEINRLIAKYPNLNKSKIHKRLLINIPVDIRVVINWNMNSTDIDLHVVDPTGVTCYYKNRETKIGGRISADITNGYGPEQFILKKAKKGKYQVYVNYYGDRQFTSSGPSTVMAEIFTKYADKTEQRTVVCLQMSNAKGSNGMVMIAEFEF

SEQ ID NO: 96150 - protein, 251 aa, Unknown
  Obtained from environmental sample
  misc_feature (1)..(251): Xaa is any amino acid
MVSVFNYIFTEDHFNNLRYTVTFVYNDRTTGDSPLNRFHGDIVNAPASPSRTGYIFDGWYTDNGSFQNKYVFGTALIGDLKLYAKWNPINYTVVYNKDASGATGTTETSSHIYDESKPLTANGYSYTGYTFAGWARTEGGTVEFTDGDSVVNLTSVNNATVTLYARWGSEPYYIKYNKNSDEAEGTMETSTLFFGIEQDLEENSFTRTGHTFAGWARTSGGSVEFADKQAVIDLVNTVGATITLYAKWTVH

SEQ ID NO: 96151 - protein, 254 aa, Unknown
  Obtained from environmental sample
  misc_feature (1)..(254): Xaa is any amino acid
MPANTFNRTGYTFAGWVVSGTDSISGTYVVGTSKAVSDLSTGINTGNASITLTAKWNLNTLSINYSSGGGTGDAPTSPSSADYGTNVTMPANTFTRTGYTFAGWEVSGTSSVAGTHNAGASVAVTALSMSIVNGNASITLTAKWGFTVIYYPEDGIPSPSNGIVEYGSTITQPETMTKIGCTFDYWYTDSAKTIPATFPFTVTENVYLFAKWISNTVITQMADKEMIFIPGGSFEMGSNSGEDMEKPVHTVTLS

SEQ ID NO: 96152 - protein, 375 aa, Unknown
  Obtained from environmental sample
  DOMAIN (43)...(112): HAMP domain
  misc_feature (1)..(375): Xaa is any amino acid
KEKEKKTRHYVAYTKLKIANAVVITSIEYNKIFEGIAATTRRNIYLTIAVLSLSIIFIWFFSKTISNPIKSLASAARQIEYGKFDIKLYSKTNDELGVLTKSFGKMSSALNIFGKFTNKDIAVKAMRGEIKPGGLPKHGTIFFSDIREFTAKSENFTKFFGAEASDKIVFWLNQYFTQMVDCVEKTNGCVDKFIGDAVMAHWGTAYTAGSPAKDAFNGVKAALMMRKALVMLNKKRIPDDPGDPPIKIGCGINSGIVTAGQLGSELRMEYTVIGDPVNLASRIEALNKPLGTDILISESTWNLIKYFFITEEMPSVMVKGKEKPVRIFAVVNHVSVTSGPRTLAEVRELLGIKPPDISKVDTNAEEKKYKIGANA

SEQ ID NO: 96153 - protein, 210 aa, Unknown
  Obtained from environmental sample
  misc_feature (1)..(210): Xaa is any amino acid
MCPEPQMLSIYMDGELPSPWKEKMEAHLAECPECAQRYKNFRHLQEMFKKNNRQSRTYVESDGELKPTAPDQSLPEQDIESAKEKVWQKMESRRRFYRKNLWGYRLSIPLPAVAAAAAVILVILTVLFIRGGSLLPQDPASKSGFILASEEEDMPSIIPAAQDMNGLLQLLGTDGSDVLILRLPESRNFARSGEPAIIRAADYSRELPVK

SEQ ID NO: 96154 - protein, 234 aa, Unknown
  Obtained from environmental sample
  misc_feature (1)..(234): Xaa is any amino acid
MENNKFIKILKKCKFCHGKDGKYKDIYETVQLAFDTAVFIENSRGTTLNIYKCPYGNGWHLTKNNAISGIIDRQSIILQNNNIPLSSPDGSWEFIEDTVYDNDYSEKILNDKKNKNYTEIPIVKIDCKSEKDNIKIVGKIMEIVDNVNIDKLFKITLDDSYSDILIKNKLDGKINQVTIYVENGNNNQLYSYTILIKKKILKKYNLKKGSLLNIDINCISINNLCKWCCNKITK

SEQ ID NO: 96155 - protein, 609 aa, Unknown
  Obtained from environmental sample
  DOMAIN (555)...(609): PASTA domain
  misc_feature (1)..(609): Xaa is any amino acid
MNFKRRFIVIFSLLAIFLLYLIIHYAVLIIKGELPPPARPNTNLPERGSILDRNGRFLAIQIRFADVSVWRPSIKDIDVLSNELAVILDMSPSEIREKINSSESNFLYLRRRIDDGTARQLTAILEEKKIRGVMLQPIVGRVYPEKNIASQIVGFVGDRNEGIEYAFNNVLSGVDNDGKGSNVVLTIDVYIQHILRQIAIKTMEETQAEAAIFVAMDPRTGDILGSASLPDFDPNNVRASDANSRMNRPAIWAFEPGSTLKVFSMSALLDSGAISTNSTFICNGSYTTSRGAVIKCEGRHGRVTVREIIINSCNAGAAYASDNITSSKFYQLLNDFGFGSRTGVGSPGETAGYLVHSENWSDRSKPTIAFGQEIAVSAYQIAQATTAIANDGVLVPPRIVSKIISADGKTETEWKGGEKRRVISAETARAMRSYMVDTASSIGTGWRAGVQDLSLGVKTGTAQIIDPTTKKYSEDDFIASCLALLPAENPTLVLYLAIIKPKVGVISGGRMAAPAIREAAESLIDYLGIPRGRNPQIDHPPSVSIPAGRLPPVETQVPDFSGIAKRTLLSLLLRDDISVEIIGDGWVRRQSPPAGTPVTPGMKIILELE

SEQ ID NO: 96156 - protein, 307 aa, Unknown
  Obtained from environmental sample
  misc_feature (1)..(307): Xaa is any amino acid
MDRKLKELDAIEFPAIVGLVSRLAKTRSGAERLGRMHPWDGKAATRRSWQMEIGEAWGLEPSSMPILPFDEALDQLLSPAGWLLPEHWRQLRDAMISLDKLINAIALTPPPESPEARAALENANAGHLSLKSIASSLPGPMSVAETLSKCFNDEGQLDPLKVPSLSELHKNRARAYQRVQNSLQKYLADSPDAFMEATVVERNGRFCLPVRLDRKSLVQGLVLDRSGSGATAFIEPFATVPLNNEYMEADAEYREAVLAFLRDLLGSLRSRADDFARWRDFLADADETIALLRWSKMCDGALPKLDA

SEQ ID NO: 96157 - protein, 227 aa, Unknown
  Obtained from environmental sample
  DOMAIN (1)...(227): Carbon starvation protein CstA
  misc_feature (1)..(227): Xaa is any amino acid
MATFIIGLCILAVGGGLYGWVCERVMGPDDRATPALAKTDGVDFVPMPTWKNSLINLLNIAGTGPILGPIQGILFGPVAFIIIPIGCVLGGAIHDYFSGMLSLRNGGAQMPALVKKFTNGPTHNLYLLFICILMPLVGAVFVYTPGDIAATQVLGLSGSPLAMSTWVIYGAIFVYYAVATLFPIDKIIGRIYPIFGAILLLSTVGVFAGLFLGGYSLNNLSFSNWGG

SEQ ID NO: 96158 - protein, 69 aa, Unknown
  Obtained from environmental sample
  misc_feature (1)..(69): Xaa is any amino acid
MLQALVNMCVSTGITPVTGQNLPFISQGGSSLIITCVMFGMLLSVSRSQMEEEEKERRSLDGSESSSGS

SEQ ID NO: 96159 - protein, 160 aa, Unknown
  Obtained from environmental sample
  DOMAIN (4)...(145): Glycosyltransferase family 28 N-terminal domain
  misc_feature (1)..(160): Xaa is any amino acid
MVKVIISGGGTGGHVFPAISIANALKQMDGSAEILFVGAEGRMEMEKVPAAGYPVVGLPVVGINRKLLSAKNISVPFRLLKSMRQASKVIFDFKPDVVVGVGGYASAPMLWSAQNKGIPTLLQEQNSYAGLTNKLLAKRAKKVCVAYEGMGRFFGEKKSS

SEQ ID NO: 96160 - protein, 184 aa, Unknown
  Obtained from environmental sample
  DOMAIN (2)...(184): Glutamine amidotransferases class-II
  misc_feature (1)..(184): Xaa is any amino acid
MCGIIGYAGRRPAVPLLVEGLRRMEYRGYDSAGVAYIQGRELAVARAEGKLARLEEKLAACPNVIAMTGIGHTRWATHGIPAERNAHPHRSNDGALALIHNGIIENYQEIKDRLLDKGYVFHSETDTEALVNLIAEERKSHPDLLTAFAAALRQARGAYAVALVSREAPDVILAARIAAPLVVG

SEQ ID NO: 96161 - protein, 221 aa, Unknown
  Obtained from environmental sample
  DOMAIN (2)...(221): D12 class N6 adenine-specific DNA methyltransferase
  misc_feature (1)..(221): Xaa is any amino acid
MLAPRILQYMPRKFNRLLEPFAGMAALTLAAAKEQRAQRYCLNDIHKPVIDILREAIDMPCDLADNYAQVWTEQFSYPGGHIQHFYHIRDCFNSGKQTAENMLYLIARCVKGSVRYGKNGNFNQSPDARRHGTHPKTIAKNIRAASALLKGKAAFSAVDYRRILETAQPGDLVYMDPPYQGVSHARDARYCAGVRFDDFADAVKLLDRKGVDYVISYDGAS

SEQ ID NO: 96162 - protein, 262 aa, Unknown
  Obtained from environmental sample
  misc_feature (1)..(262): Xaa is any amino acid
TILYDWGDLIKGLDNGEIDFTGDLMSNPERRKSYSMTSPIAERSVKIFRIKDSTPLNELRLFKRKPKYAFMAGSIVNVDVVENAGYDFETVYINDYNTAYRMLKNGEIDAYFGMDTSDAAFAGFSDVVTEDFYPLIFKSSCLAAERTDLTPFINVVEKALTKQTLDYLVGLYLEGHRQYLGKKLNEMLTEEEKTYIKNNPEIPIAAEFDNYPVSFFDINTEKWDGIFIETLDEISKLTGLKFKRVNEQGTKYADLVIMLENG

SEQ ID NO: 96163 - protein, 746 aa, Unknown
  Obtained from environmental sample
  DOMAIN (22)...(134): PAS fold
  misc_feature (1)..(746): Xaa is any amino acid
MCIARDITGRKTMAKEIALQASLLKTIINSLPDSVFCKNLELKYTLCNKYMADLFGREMNEILGHNDMQAFGFTKEAMELANNADRIALNECRQVSFEEWMVCGDGTKRLFETVKVPLILDEEIVGILGIGRDITQRKAMEEEVRAASVAKSDFLANMSHEIRTPLNVVIGLTDLVLEDGSLSKEVTENLIKINNAGSTLLSIVNDILDFSKIEAGKLQISPVEYYMSSLLNDVITLVVTRIGEKPITFNLNIPDNLPNKLYGDDLRVKQILTNLLTNAVKYTRQGSIELKARCTRDGDSIWLNIAVKDTGMGISKENIKSLFSDYYQVDDKANRQIEGTGLGLAITKRLVKMMDGQIEVESERGKGSTFSFRLRQGYVDDAVLGADVSEKLRSFSYIDEKRINTQKLVRINLNYARVLVVDDMQTNLDVAFGLLRKYQLQVDVLTSGQAAIDRIKAGAPEYNAIFMDHMMPGMDGIETVDRIRAIGTEYAKKIPIIALTANAIQGTDKMFYAHDFQAFISKPIDVMELDAALRKWVRDGNREEVTVQTEPSSGEEKKLVIEIPGVDTKKGLSLYVGDTKVYLSLLRSYIKNTPNVLEKLRSVSAENLSDYVITVHGLKGTSAGIGAEEVRAQALELENLSRAGDLQGVLAKNDKLIADAEVIVANVKEWLEKNDVQDAKPLLKAPNKELLAKLRESCESYDIDSIEEIMSELEKTDYEEDADLVKWIREKIDISKMSEVAQRLAS

SEQ ID NO: 96164 - protein, 555 aa, Unknown
  Obtained from environmental sample
  DOMAIN (166)...(231): His Kinase A (phosphoacceptor) domain
  misc_feature (1)..(555): Xaa is any amino acid
MAGDRRKKIVVVDDSHENLNSIKNTLQDIYMVYPSPSAQDMFELLEHVKPELIILDVKMPGMNGYETIKKLKSSDKFREIPVIFLTSMDDTQSEMKGLQLGAVDYIHKPFVTPLLLQRIKTHLSMMEQQKMILERNKEIEELLEIKTKEGGLRQAAELEAQNASRAKSDFLSHMSHEIRSPLNAVIGMINIATDANDVQTIKRHLEKAGNASKYVMGVINDILDMSEIEANKLELSFDDFNFERMVLNIIDVISIRAQEKHQQLIVNINENIPQFVISDELRLSQVITNLLTNAIKFTPEKGKIELNAEKLDDQNDEITLKVEVADSGIGISPEQQKKLFKSYNQADSTITKDFGGTGLGLAISNQIVELMQGKIWIESELGKGAKFIFTIKTKKGNEDKISADNTAESDKNEFDFKNYSILIAEDIEFSRLILAKYLEKTGIAIDFVNNGKEAVSTFKENPDKYNLILMDINMPEMNGIDATRLIRAFESELKDEGSSRKQTTIIAMTANVFKEDIEKFLAAGMNDHITKPIFPDDLYASLKKHLQQEREFNEQ

SEQ ID NO: 96165 - protein, 543 aa, Unknown
  Obtained from environmental sample
  DOMAIN (158)...(223): His Kinase A (phosphoacceptor) domain
  misc_feature (1)..(543): Xaa is any amino acid
MSNERKKIIAVDDNIENLTALKNTLKDLYEVYPCPSASKMFSLLEHVQPDLILLDVEMPEMNGYEAAKKLKSESQTGEIPIIFLTSMSDAQSEIEGLAIGAIDYIRKPFVAPLLLQRIKTHLSIMEQEMQIKHLLELKTEEVKLREAAELEAENASRAKSEFLSHMSHEIRSPLNAVIGMINIANEEDDLDKIKLYLGKADNAAKHVLGVINDILDMSKIEANKLELSFGEFDFGKMMANIVDVTGIRAQEKHQQIIVNMNPNIPSFVISDELRLSQVITNLMTNAIKFTPENGKVALSAEKLEEKDGEITIKIEVADSGIGISPEQQQKLFQAYNQADSSISGKFGGTGLGLVITKRIIELMQGTIWIESELGKGAKFIFTIKVKQGTPASQAAGGTAPPGGAPASIKASDLHLQGYTILAAEDMDFNREVLAKYLEKTGVTIDFAENGKIAIDMFKENPDKYKLIFMDINMPEMNGDEAAKVIRALDMKKAKEIPIIAMTADVFKEDIDKCLAAGMNDHIPKPVAPKTILRKLKQYMITQP

SEQ ID NO: 96166 - protein, 738 aa, Unknown
  Obtained from environmental sample
  DOMAIN (118)...(212): PAS fold
  misc_feature (1)..(738): Xaa is any amino acid
MGVSEEELLNMTDAEGTWLTPEEVERIHNIEKNVIENKKIELFEEKVRSAKTGNECYFETVKAPILQNGKVVGLIAIIRDITQRKKTERELSFKTSQLEMIIDSIPDGMFCKDIELKYIQCNKVFESFTGVSEEYILGKSDKEEGSWLSKDVVEKINRIERTILDEGRSFTFEETVPLVNGKEIIFETTKAPIKQDGNIVGLIAIVRDITQRKKTEKELSFKTSQLKMIVNSVPDSMFCKDIDLKYIQCNKVFESFMGVSEEHILGKSDEDGDWLSPDDIKRIYDIERAVIDEGRSITIEETVHSPVTGKESVFETIKSPIMQDGVVVGLIAVIRDISRRKEMEEEILAASKAKSAFLANMSHELRTPLNVVIGLTDLILEESLDEHVTENLAKISNAGTTLLSIVNDILDFSKIESGKLTITPVKYYTSSLLNDIITLVTTRLGEKPITFRLDIDDDLPSELYGDDLRVKQILTNLLTNAVKYTKLGSIKLIVRCTRKGNDVWMDASIIDTGIGIREEDIKNLFVDYYQVVSSNTRSVEGTGLGLPITKRLVEMMNGELKVESEYGKGSSFNFRIKQGFVNDKPLGKDVAEKLRNFCYADNKRNVAKKLVRVNLEYAKVLVVDDMQTNLDVASGLLSKYKMQVDCLSSGPDAIDRIRQGTPVYNAIFMDHMMPKMDGIEAAGEIRAIGTEYAKKVPIIALTANAIQGTDKMFYEHGFQAFISKPIDVIEMDTIIRKW

SEQ ID NO: 96167 - protein, 306 aa, Unknown
  Obtained from environmental sample
  DOMAIN (216)...(306): DNA mismatch repair protein, C-terminal domain
  misc_feature (1)..(306): Xaa is any amino acid
MYGRIAILPPEEAMRIAAGEVIDRPAALVREFLDNAIDAGSLNIEVSIEEGGCKKVEVSDDGGGMTREDLAICSLTHATSKIRGLDDLTVSRTLGFRGEALAAACAVARLEIICSVDGREAWHLDTGPGESRPPAIEQTRRTKGATVRALNLYDTIPARKRFLKREGSEASLCRQVFIEKALAFNGINFRYVQDGKLKDFLPAVKTKKERFAAAVLQTGEENFLHEINVTGAGFSATIVIGGPELYRNDRRQLFIFANGRKVQDYSLIQAIEYGSQGWFPNGVHPVAAVCVEIDPSLADFNIHPAK

SEQ ID NO: 96168 - protein, 77 aa, Unknown
  Obtained from environmental sample
  DOMAIN (2)...(65): Exonuclease VII small subunit
  misc_feature (1)..(77): Xaa is any amino acid
AKSFEEQLGRLEKLGEQIKRNDIPLDEALAAFEEGIRLARNLEKSLEKIENRIEILMNSTEALADESPELELFNAGE

SEQ ID NO: 96169 - protein, 240 aa, Unknown
  Obtained from environmental sample
  DOMAIN (19)...(240): Dihydrouridine synthase (Dus)
  misc_feature (1)..(240): Xaa is any amino acid
MSLYSPVKIGSLELSGNLFLAPVAGYTDRAFRSLCAEEGACFSFTELISAEAVCRSPERYSLGGASDNAVRAAHSVSVNLIRRGENEKRYAIQLFGAESESVYKAALLLAPLLPDALDINAGCPVPKVVKNGAGCALMKNPANLGRVTEATVRASRESLGNIPVSVKIRSGWDSSSLNYAECARVAVEAGAAMVSLHPRTRAQGYGGRSNWAFIADLVSELSVPVTGSGDLYTPEDARQM

SEQ ID NO: 96170 - protein, 449 aa, Unknown
  Obtained from environmental sample
  DOMAIN (110)...(269): short chain dehydrogenase
  misc_feature (1)..(449): Xaa is any amino acid
LDDDPEKIGKRIDNIPVIGPINEVAVLVRASRADEAIIAMPSADRNYLKQIYDTLKKIGFQQIRILPGISQIIDGDAHFIQTRSIDLQDLLGRNPVAIKLKQSLAYLRGKRVLVTGAGGSIGSELCRQLLSGGASRLYLFGHGENSIYQIDRELRLLQEEGVGEKAALVPVIGDLRDTDYVDYILGHLKADAVFHTAAYKHVPLMEENPVAAVENNVFGTENLVLAAIKHNIKRFVHITTDKAVDPVSVYGASKYLCEQMVLEAAASSGGPNFMVVRFGNVLGSRGSIVPLFQQQIQKGGPVTITHPDIRRWFMTISEACSLVLKAGGVGVNGGLYLLDMGEPVRIKDLAEQLIRFHGFEPDTEIKIVYTGLRPGERMDEPLWSQDEKIKETEYSRILQVNREKPFNVDLKEMLEQLRPICRFDPAKPQVYRDAELLRAILIEKVMKLK

SEQ ID NO: 96171 - protein, 259 aa, Unknown
  Obtained from environmental sample
  misc_feature (1)..(259): Xaa is any amino acid
MGTVTATGNWGAGIGGDFDGIGGDSDGNSGGTITIAGGKVTATGGGFGEGGSAGIGGGGSERYIDMAGAIYGGYGGNGGIITITGGIVMATGGGLCNAAGIGGGGASRSYDSGDDAIYGGNGGIVTISGGTVMAKSGGLVESNPTCYTNGGAGIGGGGSSRNPNDNTISMNGGSGGAITISGGMVTAEGSGGAGIGGSGTGNGGTIIISGGTVTATSRYGVGIGGGYGSSGGKITINGGTVTATSGYSAGIGINDYGNG

SEQ ID NO: 96172 - protein, 269 aa, Unknown
  Obtained from environmental sample
  misc_feature (1)..(269): Xaa is any amino acid
NATASITLNKVTISHSSYSPFWLNNGAKVTLMLEEENKLVTAGSSYAGIQAPESTTLTISGTGSLEAIGGNYGAGIGGGDEGGAGTITISGVTVTATGGSLGINRAQGIGRGYGSATAGTLFINNNAVVFTNNSVGDLSLDRITSAILFSGNNGGSYGTVTLRENLTISAERTLNIRGNTTLTIPAGITLTNNGTVTPANGSTVIVEGTVTKKINGSNIRTPVADERTATSITINAATLLAATGQVVEYAKNTTSTVPASGWQTETTFG

SEQ ID NO: 96173 - protein, 190 aa, Unknown
  Obtained from environmental sample
  DOMAIN (103)...(173): HAMP domain
  misc_feature (1)..(190): Xaa is any amino acid
MAHLNGNIWQYIIDGSAERDDTEFFSNLGDEEDVSSYDDAFKRVLVSGKTEPSDLVYQDGWDWLISICTPIKNSSGRTVGIVACDFDGQQLHDEIVLNQKRQIITGGISITLGLLLLLLFLRKIFSPIGKISVILREISLGEGDLTKRIGIRQGNEIWNLAMHFNMTLDKIRNLILAIKGEANNLRSIGD

SEQ ID NO: 96174 - protein, 410 aa, Unknown
  Obtained from environmental sample
  misc_feature (1)..(410): Xaa is any amino acid
GLTSITIPNSVTSIRRRAFFGCNNLTSVTFQGTITNFDRWDWNTFPGDLLEKYLYGGGIGTYTTENPGYYAVWRKKDYNYNGPVNVYMTIPDPNQSVNRFQYIRGYGGMDVAWPSFPRTTQADTELMYNPDKLGYNILRIMIRPDHVDPAQTITELVATDRPDYYENVKIVNKYGGYVLASPWTPPKEWKSNNDLKGNGRLNTKNYQDYANYLKSFALNMYQNGAPIYAISIQNEPNFEASYDGCFWSPADMKNFFSQMGHFTDGVKGYGGGKEIPSVLTMNGESMNNPNINDAALGSPESRAAIDIIGRHTYGERLNRYAKALDHPTDPKEVWMTEHNINSGNTSGYPNDSTWNYVWKILNDIDLSIRLNDESAFIWWAAKRFYGLMGDGQYTTKDGELTPRGYAMSHY

SEQ ID NO: 96175 - protein, 405 aa, Unknown
  Obtained from environmental sample
  misc_feature (1)..(405): Xaa is any amino acid
MSDIQVRCNNEIISCPYGTIADTLLERLGIGEEAVALRVNNEIRPLKTRLAVNSTLEPVPLQSPEGAMIYRRSLAFLLAVAARKIFPNHSLYVGHSLGNSYYYTINSGEPLKEQEIAALQKEMEAIVREDLPITFKYLGYEEALEVFTKNRQTDTVLLLEQRSASRLKLHECKGFLDIYVEPLVPRTGLLSSFALMPYQEGFLLRFPAIGKGMEIGPFEDEPKIFDVYNEYKKWGRMVGVRVVGDLNALVAKRTINDYIRIAEAHQSRKMAEIAEQIYEQLDRIKTVMLAGPSSSGKTTSAKRLSIELMVLGIKPVAISLDDYYVGKELTPKDEKGDPDYECLEALDIPLLNEHLQALYRGEEIRLPVYDFKTGSRREGGGKTIHLDDRAVLIVEGIHALNEALT

SEQ ID NO: 96176 - protein, 69 aa, Unknown
  Obtained from environmental sample
  misc_feature (1)..(69): Xaa is any amino acid
MKYNPDLHHRHSIRLQDYDYANTGAYFVTICCQNRVNYFGEIENEKMILNEYGDIAHSPTIFTELLKST

SEQ ID NO: 96177 - protein, 460 aa, Unknown
  Obtained from environmental sample
  DOMAIN (15)...(316): Putative modulator of DNA gyrase
  misc_feature (1)..(460): Xaa is any amino acid
MLADLISPHKASFNDYTELRAQVNTTRGVTLLAGNMAANSRNSTGGVSARVYRGGTYGFASAAEYTDESIKKVLAAAGGNAAFMQKHVNKGLGPLPAVAPGRVGLEKEYSADVEQSVLIEFAKALDALIVERYRNLSSRSVHVNCLDIEKLLAVSDGADSHFYQPRSFVYVQMSVETDDKIPVELFSPIGGLGRFSELFSDPALLTERLDRQYEQLMQKREGIYSSAGLRKCVLGPELAGMLAHEAIGHTVEADLVLGGSIAGNYMNKVIASELVSMVDFAHTAFGKPCPLPVYVDDEGTIAEDVTLIENGILKSYMHSKESARHFGAKPQGNARGFLFSDEPLIRMRNTAVLPGKSKLDDMIASVDDGYYLIKTGNGQADTTSEFMFSVDMGYEIKNGKIGKALRDTTISGVAFEMLKTVDMISDDMYWECAGFCGKKQPMTVGMGGPAIRCDLNIGGR

SEQ ID NO: 96178 - protein, 220 aa, Unknown
  Obtained from environmental sample
  misc_feature (1)..(220): Xaa is any amino acid
MPVADKTCFSAEHISRHRLNASPELAEQAVHCLELVAELSLGGLSYQFKGGNSLLLILSEPKRFSIDVDVASDRTREEIEAVLDAIVPKYGVFTKWERRQHKTKPWLPLSSYYLYYKSAVTDAPDTNIMLDVQMRRSAYKTEFKPVRCGDLYVSDAKVELPLPSSIISDKLLTLGPATLGIPIGRGKEAQRLKHVYDVSRLSATLPDVAEMRESFRSCLK

SEQ ID NO: 96179 - protein, 167 aa, Unknown
  Obtained from environmental sample
  misc_feature (1)..(167): Xaa is any amino acid
MSSKQKIIMISAGAALAVLIVLGIIFFVKGKKQEPDGEETAIASQSDSRRQNTLKLIERYLTQGEFDRALDLIDRLLIENPDDEEANELQQRILTADRHKDSDGLTELQRQLLEEQRRQNERIAASMQKSMSSPSMASGESEAAAERRAAAEAEAARKKAQEEELAK

SEQ ID NO: 96180 - protein, 331 aa, Unknown
  Obtained from environmental sample
  misc_feature (1)..(331): Xaa is any amino acid
IENPVVNIDEGPPQLIVNIDRDRAAALGVSLSSIASEIRTAMDGSTAATISMGDRILNVRVSLRDEDRMGIPNLDAISVVSRNGSRISLSNVAEIVESRAPSSIRREKQERVVRVTGALPAGIAVTDMQKRLEATVKEYLIPHEGVTLRFMGEAAEIQSYYGRYILMVVTAVFLVFSVMASQFESFVDPFIIFFTIPMLFIGVIWIYKFSGEAMSMFSIVGVIALVGVVVNNGIILVDYTNTLRSRGLKVQEACLEAGRTRLRPILMTSLTTILGMFPIAFLTGAGAESIQPIGKTFVGGLSVSTLMTLFIIPSVYSLVNSRHDKKRARLA

SEQ ID NO: 96181 - protein, 80 aa, Unknown
  Obtained from environmental sample
  misc_feature (1)..(80): Xaa is any amino acid
MERIKAAGVGLGRIASLLEEDARREKPCTHAGAIAVNKDCALSGGCDIDEERRGLFAQRWGVPVYSDAAEMIREQNRKSS

SEQ ID NO: 96182 - protein, 132 aa, Unknown
  Obtained from environmental sample
  DOMAIN (57)...(128): Acetyltransferase (GNAT) family
  misc_feature (1)..(132): Xaa is any amino acid
MEIITYENKYFEEVYNVVHDTIEKIYPKYYPRKAVDFFHKHHSKENMLDNLPNEFTGIIIENDKVIGTGSAKDNDIGRFFILPEYQNRGYGKLLLKELENEVIKKYYKNITLASSLGAVFFYKSCGYKYNDY

SEQ ID NO: 96183 - protein, 311 aa, Unknown
  Obtained from environmental sample
  misc_feature (1)..(311): Xaa is any amino acid
KSADLVIWTYDSFNSQWGPGPDVSKVFEEKTGVKITWVSHGDAGNIVSRLIQEGSGSDADIILGFDQNYIARILDSGLLEAYRPKGAEKIFNELVLDVNFHVTPFDYSYFAIVYDSETVIAPWSLESLTFPQFKQKLILIDPRTSSPGLGFFAWVKEVYGNDWQDYWRRLRPSILTVAGGWSSAYGLFTRGEAPLVLSYTTSPGYHLEYEDTERYKAAIFTDGHALQIEAAGLLKNAKNKANAKAFMDFMISPDFQNIIPLTNWMYPVIDIPLPASFRINPKSDKPLLPQAATEAELNEWAALMLNADKNK

SEQ ID NO: 96184 - protein, 321 aa, Unknown
  Obtained from environmental sample
  DOMAIN (50)...(270): Binding-protein-dependent transport system inner membrane component
  misc_feature (1)..(321): Xaa is any amino acid
MTKKNAAFLLALVPVLAAAFSFILPYAASFTPAVAKFPSVFKTFLNNTALINITLFTFKQAFFSVLVSLALGLPGAWFIGNSRSRFTPFLKTLTAIPFAMPSILVVLGFVLFFGNSGWINRAITVRILYKPQAVILAHGFFNFPLVIRLAGDGIARAKRAYAPAAASLGASPLKIILTVILPLAFPGILSASFLAFMYCFTSFAVVLVLGGGPNTTTLAVEIYRYARVFLNYGSAGFLALIETLIAVCVFLTFVFIGKNSMTVKHDIIEHAETGKSSAASKIIMGAYFAVIAVFILGPLLSIPLESFLYRPSRATAQVFSI

SEQ ID NO: 96185 - protein, 400 aa, Unknown
  Obtained from environmental sample
  DOMAIN (1)...(231): EAL domain
  misc_feature (1)..(400): Xaa is any amino acid
MDFTPEKITPYFQPILSADSKSVYSYEILGRYIDDNGEVRSLGNFFNDDNTSNEDALRIDRHIRREAMRRYAEEKRDEYLFINIRLAWLLQFAENPEEMLTLQWAKEFDITPDKIVIEITEEEFNANETYIRTIIHYKNVGCRIALDDYGKKASDIERLAKIKPDIIKINMDYIHRSENSYHYREYLQSVADFAESVGIEVLYEGIETQKQLDICMSLKGRYYQGFLIALPQPSMRDAKINDAVFSTSIENVYTLFQDEIIVTEALRKSLDTRVERFLSQNPFNFEEEEHDNYLVNLCHELSNVRLVFLCDRRGYQLTSNIIWQPGGAAFINSGRMAKYKNRNWIWRGYFYETLKSVATGQKSYMSGAYHDFTTKDNVRTYSYAINEDIFLFVDVGTARE

SEQ ID NO: 96186 - protein, 89 aa, Unknown
  Obtained from environmental sample
  DOMAIN (4)...(54): Holliday junction DNA helicase ruvB N-terminus
  misc_feature (1)..(89): Xaa is any amino acid
MKEKSPVRPESIIEDAQDMALRPRNLKEFLGQKGMKENQSVFIFAAKERGDSLDHLFVIGPAGLGKTTMAQVVANEMGTGFVQTNGSRS

SEQ ID NO: 96187 - protein, 450 aa, Unknown
  Obtained from environmental sample
  DOMAIN (4)...(428): Amidase
  misc_feature (1)..(450): Xaa is any amino acid
VSKEKALARAKEVQSQIDKGGAVNGGALSPLAGVPIAIKDNISTTGIETTCASKMLKGYTPVFNAAVIDKLEKAGMVVIGKVNMDEYAMGGSSETGVKGPVHNPWDIMRVAGGSSGGSAAAVIAGETPIALGSDTGGSIRQPCAFCGVTGIKPTYGSVSRYGLLAYASSLDQIGPIGQNIDDCAALLSIISGPDTRDSTCVIEKPFEFGTGENYIRLENVKIGLPRNYYGSGIDDEVKTAVLAVTKELEAAGATIEEFEMPLMDYVIPAYYIIACAEASSNLSRYDGLKYGYRSSNAGSLSEVYRLSRSEGFGLEVKRRIMLGSFVLSSGYYDAYYKKALQVRALIKDAYTRLFTKYDMILSPVAPTTAYKIGENSGDPIKMYMGDIYTVSINLAGLPAAALPCGFDKQGLPIGFQLIGDAFSENKLIGAARVYQARTDYHLKRPEVVKA

SEQ ID NO: 96188 - protein, 232 aa, Unknown
  Obtained from environmental sample
  DOMAIN (1)...(232): Amidase
  misc_feature (1)..(232): Xaa is any amino acid
NLTSFLALSKESALKRAQEIQARIDKGEELSPLAGTPIALKDNISTIGLETTCASKILTGYKPVFNATITEKLERAGMIVIGKLNMDEFALGGSSETGAFGAAFNPWDTMRVCGGSSGGSAAAVAAGEAPVTLGTDTGGSIRQPCSFCGVTGIKPTYGSVSRYGIVAFASSLDQAGPIGQNIEDCAALLSIISGPDEKDSTCVMKKPFDFSERREDMKGVKSACRKIIWKAA

SEQ ID NO: 96189 - protein, 475 aa, Unknown
  Obtained from environmental sample
  DOMAIN (256)...(324): PET112 family, C terminal region
  misc_feature (1)..(475): Xaa is any amino acid
MKWETVIGLEIHTELSTKSKIFCACTTAYGGEPNTHVCPVCSGMPGTLPVLNRAVPEYAMRLGLTLNCEITRLSKFDRKNYFYPDLPNAYQISQLYAPICRNGYLEIDIEGKKRKIGIHEIHMEQDAGKLVHDPKGNSSFMDFNRCSVPLLEIVSEPDLRSAAEVIAYLEKMRETLLYLDISDCKMQEGSIRADVNLSIRLFGGELGTRTETKNMNSFKAIARAIEYESSRQIEILEDGGQVVQETRRWDDEKLESYGMRSKENAQDYRYFPEPDLLPIDIDEAWLASVKKNLPELAHQKRERYCHDFRISESEAAVLTVHKKTSDLFEAIAKKSGQPVEAAHLITGEIMRLMNNANILPEDLSIDVGKLSALITLVTSGKINRNAYKETVEAVFTRNVDPESYIAEKGLMMINDDNAVIEAVKAVITENQDSVTEYRAGKEKVFGFLMGQVMKKLGGKGNPDMAKKTLEDALKG

SEQ ID NO: 96190 - protein, 346 aa, Unknown
  Obtained from environmental sample
  DOMAIN (72)...(195): Diaminopimelate epimerase
  misc_feature (1)..(346): Xaa is any amino acid
VSYIISTSEKGRDPALDDVKIRRRACSLNIPCLTSVDTANALADGLLSGYSEINTELVDINRLRSERTKLAFTKMHTCGNDYIYFNCFDMEINSPESLSVFLSDRHTGVGGDGVVLILPSATADAKMRMFNLDGSEGSISGNAIRCVAKYLYDNGIVKKRDMRIETLSGVKDLWLSTRNGTVSSVRVDMGLVKLRPEHIPVNLAGESVIARKVTIGGNEYEITCVSMGNPHAVVFCDNLDDLDLSETGPLFENDPLFPDRVNAEFVNVIAQNHLEIRVWERGSGETQASGTSACASAVAAVLNGFCDKDTDIRVRLPGGELIVNYTDEVVWLTGDCVKVFDGTVEI

SEQ ID NO: 96191 - protein, 574 aa, Unknown
  Obtained from environmental sample
  DOMAIN (17)...(574): tRNA synthetases class I (I, L, M and V)
  misc_feature (1)..(574): Xaa is any amino acid
MYKTVDSKVSFPKLEEEILKFWEQNKIFKKSVSQREKESEFVFYDGPPFATGLPHFGHFIPSTIKDIIPRYQTMKGKKVERRFGWDCHGLPIENLIEKELGLNSKTDIEKFGIAKFNEACRAAVLRYVKEWRQTITRLGRWVDFDNDYKTMNSDYMESIWWVMKSLWDKGLLYEGHYILPYCPRCSTVLSNHELNLGGYQDVHDPAITVRFKIKGTGDWGLGNREEANPINAYFLAWTTTPWTLPSNLALTLGPDIIYVLIEDLPDPRSPVPSPQGGNAAPPVPSPCYYILAEARLPAYYKDNSQYKIIWRKKGAELKGIQYEPLFPYFAYAAEQNAFRTYLGDFVTTEDGTGIVHTAPGFGEDDARVLKGTGVPVICPVDAECKFTAEVSDYAGLFVKDADKAIMDRLKAEGKLVKREQVLHAYPHCWRCGHPLIYRAVGSWFVSVEKIKQDMLDANSQIYWVPEHIKEGRFGKWLEGARDWAISRNRYWGNPLPIWRCPDCGKTICVGSRAELQELSGVYPQDLHKHFVDDITIPCDNKDCKGTMRRIPEVLDCWFESGAMTYAQNHYPFEK

SEQ ID NO: 96192 - protein, 273 aa, Unknown
  Obtained from environmental sample
  DOMAIN (1)...(90): Anticodon-binding domain
  misc_feature (1)..(273): Xaa is any amino acid
YDALKTLITVAAPFMPFTTDAIWRNLRLEASRESDPASVHLTDFPLPKTERRDKALEFRMATVRRAVSMGRSLRSQYNIKVRQPLRMAELVTRNSDEKNALFEMAEIIREELNVKDVAFRDNEEDLVEYEVKANFRVLGKELGKDMKAAAARIEALNHAEIQGVLEGAALSLDIETSDGGTRTVVITADKLDIRRNEKANLRVINEGTLTVGLDTEITRDLSREGDIRDLIRGVQNSRKEMGFSVTDRIRLTIYGSDKLKEAWDNLSDTAAAE

SEQ ID NO: 96193 - protein, 460 aa, Unknown
  Obtained from environmental sample
  DOMAIN (22)...(460): Amidase
  misc_feature (1)..(460): Xaa is any amino acid
MFKGNALELSALIKARKLSVVELTSAYIDTIEKNDSRYNAFITVAKEEALARAKEVQSMIDKGETLSPLAGVPIAVKDNISTEGIETTCASKMLKGYTPVFNATVIEKLEKAGMVLVGKTNMDEYAMGGSSETGAFGPVRNPWDVVRVAGGSSGGAAAAVASGEIPLALGSDTGGSIRQPSAFCGVTGIKPTYGSVSRYGLLAYASSLDQIGPIGQNIDDCAALLSIISGPDTRDSTCVIDKPFEFGDGKTRAPFALQGVKIGLPRNYFSGGIDDEVKSAVLTVAKVFEASGAIIEEFEMPLMDYMIPAYYIIACAEASSNLSRYDGLKYGYRSANAQSLSEVYRLSRNDGFGLEVKRRIMLGSFVLSSGYYDAYYKKALQVRALIKDAYTRLFTKYDMILSPVAPTTAYKIGDNIGDPMKMYMGDIYTVSINLAGLPSAALPCGFDTTGLPIGFQLIGD

SEQ ID NO: 96194 - protein, 287 aa, Unknown
  Obtained from environmental sample
  DOMAIN (99)...(287): Bacterial extracellular solute-binding proteins, family 3
  misc_feature (1)..(287): Xaa is any amino acid
ESGSADLYFFESPTESVFDRYGDLAVHDFLPFIISPVSLSARNGEYKAVISIVQKILQNGGSVYLTRLYSQGYRDYLKHKLRTRLTDKELAYIAACPAVPFGAERDNYPISFYNAYAGEWEGIALDVLKEIESLTGISFEVKNNRHAEWSEIERMLADGEIAVVSELLRSKEREGSFLWPSTPILINYYTLISKSDYPNININEILFSKIGLIKGTIYATAFKNWFPDAETAEYEGAGAAFAALDRGEVDLVMSRQSRLLDLTNFRELVGYKANIVFGQPIESAFGI

SEQ ID NO: 96195 - protein, 224 aa, Unknown
  Obtained from environmental sample
  misc_feature (1)..(224): Xaa is any amino acid
VEKITKKDFSIPITQAFVDQAIQNLIKTWGTHFDSMMARLEEPRVRNIIQPLLLGNGATIDTRSEDYLYTRDLGIIRESGNKVEPANPIYAELIVRALNWGVQQSLLRGYEDYEIPRYLKDGKIDINYLLQDFQQYWRENSEIWIDCYKTQYYQYDEAATHLVMQAFLQRVINGGGHIIREMALGRMRADICVVYKDGKYPIELKILQNQRSLAESLKQTAAYM

SEQ ID NO: 96196 - protein, 406 aa, Unknown
  Obtained from environmental sample
  misc_feature (1)..(406): Xaa is any amino acid
AAKLADGAPCPVCGSTEHPAPAKLTDGGVTEAGLKNAKTAVDRAQNGRGQKSDECARLKSEIDTRENRFVDDLLMIIPNIDRDTAGRLLADAFTRAQSLVNELAVNKQNAEKNLSELAARREKVTKRSVDAETSYKSALTLADERGAREGEQRAAHDKARTDYINSLTVNGFKDEAEYTAVLVTEETLSGMAKRLADYEKIGEQLKRDINRLEGETAAKERPDMEKLAAESNAIMSAIGELNKSRDEVKIRNEQTKRVLGELRRSAETFVELDKEYAAAKQLSDAANGRLDFETYAQAAYFDRVLHVANLRLSFMSQSRYALLRKTESEDKRIKTGLDLEVSDAYTGKRRGANTLSGGESFMASLSLALGLSDVVQQSAGGVRLDAMFIDEGFGTLDADVLDLAVK

SEQ ID NO: 96197 - protein, 293 aa, Unknown
  Obtained from environmental sample
  DOMAIN (2)...(167): GAF domain
  misc_feature (1)..(293): Xaa is any amino acid
SDLDLLLERILLEARKVIRADAGSIYVKQAEKENNVTTEKIAIKYAQNDTLQRQLPPGQKMIYSVYSLPINEKSLSGYCAFTGKMVNVPDMYNIPPEEPYSFNAMFDKMTGYKTISTLTFPLATADGRLLGVIQLINKKNEEGEVIPFSEGDEFLITHFAANATVALQRAFVTRAMILRMIKMAELRDPKETGTHVNRVAGYAVDIYDRWAYNNKIPDTERESFRDVLRISSMLHDVGKVAISDVILKKPARFTPEEFLIMQQHTLYGASLFDDPQSSIDKIAGDIALTHHEN

SEQ ID NO: 96198 - protein, 345 aa, Unknown
  Obtained from environmental sample
  DOMAIN (229)...(338): FliG C-terminal domain
  misc_feature (1)..(345): Xaa is any amino acid
MPSALTPPKPSEESKTRRVAKFLILIGSNHAAKILGELDPQQVEEISKEIATIRGISPEEAETVLAEFKALFSPGNIGYSGASSGGVETARRILYAAYGPEKGEALLNKSVPDSKENIFDFLEEFNPEQLVFLLKDESPAAAALVLARLPPKVTAETLIKFPAALKPEILKRIAHQNEVSPEVLERVAEAIREKARHLSGSSQDIAIDGMQTLAAILKQGDYSLGDRIINELETESPDIGKNLKERIYTLDDVLAVFDRPLAEKLKTMPDKDIALLLKGRSGEFREKILSNVSSGRRDLIREEGEILGAVLKRDCDEAANNFIAWFRQARENGELILASDEDWVT

SEQ ID NO: 96199 - protein, 944 aa, Unknown
  Obtained from environmental sample
  DOMAIN (295)...(514): Bacterial extracellular solute-binding proteins, family 3
  misc_feature (1)..(944): Xaa is any amino acid
MALAAVLLLSAFSVCHKSAVHRPDKMPAFTSYRDIPGVTEDEIKAVEALREKTDSFIYGTIESTESFIRLDGKIGGYSTLFCEWLSQLFGITFKPVLYEWSDLLAGINEKKIDFTGELTPTEERRKIYFMTDATVERTVKTFRLADSKPILEIIRSRPLRCCFLKGTTTINDVTSRLNGKYNTITVNNYKAAYHALKSGEADAFFEENTSEAAFNMYDDIIAEDFLPVIYSPVSLTTKNPGLQPVISIVQKAMYNSSPGYLAGLYRQGETEHRRHKLFMRLSEEEKTYIREHQVISFAAEYDNYPISFYNKYEKQWQGIAHDILKELEALTFLSFEITNDNNTEWSDLLLSLESGEASMISELLYSEDRNGTFLLPQSVIMTDNFTLISQSNYPRLSINDILRVKIGLIKDTAYTSSFRNWFPEHKNTVEYENSNTAFDALERGEVDMVMANFSQLLMLTNYYERTGYKANFVFNFASESTFGFNRNEAVLCSIVDKALRLIDTRGISGQWMRRTYDYSVKLARSQRTWLISVTVLFSFILVLLFFLFQRNRRVGKQLEIQVQKRTNELVIQSATITAAFDATPDLIFCKNLNSQFIRCNKTFEKYFNIREEDIIGKGDAEALGISAEAEERYKERDRHVVREGRTLVFEENIPSADGITQLFETSKVPMVQDGQIIGLMSISHNITERKAMEEQAMSASRAKSAFLANMSHEIRTPMNAITGMTAIGKSATDAERKDYCFTKIEDASNHLLGVINDILDMSKIEANKFELSNDEFHFEKMLRRVVNVVNFRIDEKRQNFSMHLDQSIPRTLIGDDQRLAQVIANLLGNAIKFTPEQGKIVLATRLASEENGVCTVQISVTDTGIGISPEQQTKLFRSFEQAESSTTRKYGGTGLGLAISKNIVEMMGGKIWIQSEPGKGSTFTFTFQAKRGSGGRTGLLSEDV

SEQ ID NO: 96200 - protein, 456 aa, Unknown
  Obtained from environmental sample
  DOMAIN (80)...(145): His Kinase A (phosphoacceptor) domain
  misc_feature (1)..(456): Xaa is any amino acid
LGISAEAEERFKERDRHVIREGRTLVFEENIPSANGITQLFETSKVPMVQDGQIIGLMSISHNITERKAMEEQAMSASRAKSAFLANMSHEIRTPMNAITGMTAIGKSAADAERKDYCFSKIEDASRHLLGVINDILDMSKIEANKFELSPVEFNFEKMIQSAVNVVNFRLDEKHQNFTLQIDKKIPKNLIADDQRLIQVITNLLGNAAKFTPEDGSISLDARFLGEKNDLYTIEIAISDTGIGISPEQQKRLFNSFQQAEISTARRFGGTGLGLAISKNIVEMMGGTIGVQSELGKGSVFTFTVQAKKIVHVHDAADNPPGVKKDIAGLFAERRVLLAEDMEINREIVLALLEPALLEIDCAENGAEAVRKFSEAPQKYDLIFMDVQMPEMDGYEATRRIRALNLPKAKSIPIVAMTANVFREDIEKCIEAGMNGHVGKPLNFDEVLEKLKSYLG

SEQ ID NO: 96201 - protein, 357 aa, Unknown
  Obtained from environmental sample
  DOMAIN (133)...(201): S1 RNA binding domain
  misc_feature (1)..(357): Xaa is any amino acid
LGTDMSQAIRQLNQDRGIPEDLILRTIEDTLIAAYKHRFGNAENAVVQFDEDNLEVSIFARKKIVEQDGVYDPVTEIDLEEARELNPDAEVGDEILVEIDPKQFDRITVQSAKQKAHQSIRDIQKDSLYSEFKDKEGEIIIGYYQRDRNGAIYVDLGKMEGILPKKYQSPRETYRVNDRIKALIAEVKKDSSGLHVVLSRTHTEFVRAIFELEIPEIYDKTVEIHKIVREPGFRTKLAVYSNREDVDPVGACVGLKGVRIQAVIKELEGEKIDILKYDPDPRRFIKNALSPAEVRDVIILDEGKHQALAVVSDSMLSLAIGKQGLNVRLANRLVDWNIDVKTETQFSEMDIAAESRR

SEQ ID NO: 96202 - protein, 246 aa, Unknown
  Obtained from environmental sample
  DOMAIN (96)...(206): Histidine kinase-, DNA gyrase B-, and HSP90-like ATPase
  misc_feature (1)..(246): Xaa is any amino acid
MIISGYATLLMKSKELNEKDRGMVDNIAQTTAKLQEFSLSVLELSRSKVMHENKEIELMQTLRACIDVSFNKQASKFVLNCTQRGSALNEGIFINGSPEKLDRVFVNAFSNAIEAGAQNISVRLSVCNTIVLIAIEDDGVGCDVENLSNFFTTFFTTKEGAGGTGLGLCVIRSIIETHGGNINIYSKNLLDNGKHGMVMQIALPASKRMSYEAAKHEFLLIKQGLDDANIILEKLKKPENNPPHRP

SEQ ID NO: 96203 - protein, 88 aa, Unknown
  Obtained from environmental sample
  DOMAIN (2)...(88): Ribosomal L18p/L5e family
  misc_feature (1)..(88): Xaa is any amino acid
DGDAEHRRLSAQIIDDDKGHTLASISTLEKDLRGVKATVAGAAQLGELFGKRLLEKNIKSVVFDRNGYLYHGIVKALADGTRKAGIQF

SEQ ID NO: 96204 - protein, 510 aa, Unknown
  Obtained from environmental sample
  misc_feature (1)..(510): Xaa is any amino acid
ASGTVAESEPESEPAPQNLSKPKEPPPEFDPHGYAKMLILLPPDESVSSNIADNLLPKSMDERARKDLADKITEVLGSDDRGVADVTELLIPFTVAVRDTVTVMALDASERLWVGTVSGLWRNGNGKWRRYNAAADDEDGVLPSERITAVAVSKGGSVAVGTDNGLAVMKDSEWYRLTVGDGLPDSYVTSLAFVGERLYIGTNKGLAVTSDDKRVTVFDTSSGLLTLSVTALFADSKGRLWIGGDNGITIYTSSVRTWTRYKFPGSTVYSFAEQSGGVIWIGTNKGVVTHKAGKVVTGKDGKQVNVPEWKTYHSKNALKNDNVTSITACGKDMWVATDGAMHQYAHAERQVMLFYEQILPAFGMTDLWHGFPAVVIPTEDWGTLAFSVNYINMGENEQYDETEVYTGTSKSWEGVFGLSYGFPVREDLSLGLNAKYVYSVLDSRSGGTGQTFAIDAAVLKRNFLVDKLDIGFMLQNMGPSIYYMTPEAADPVPFSLRLGLAYRPIPHPFP

SEQ ID NO: 96205 - protein, 232 aa, Unknown
  Obtained from environmental sample
  misc_feature (1)..(232): Xaa is any amino acid
MAIISASASVDARTGLSVPKPRSLLLKSASQKDIVETARNHQWSIDFVKSGEDTVKIIAVRVEFEPDTSALTTGNGRFGLKGDNKELRYYNADTVYRYDGLPHDSVYFYRQLTALKNYYAKASSGKLALDFSIYPSGGGETGYRVARPMTYYSPGWKRKQESIDEYWDRKTRGLMLFVRDAVVAADKGGDSPFRGLHRDGGGILREAATGRKAAILILHAGASYMTDGGSTG

SEQ ID NO: 96206 - protein, 221 aa, Unknown
  Obtained from environmental sample
  DOMAIN (32)...(221): FHIPEP family
  misc_feature (1)..(221): Xaa is any amino acid
MADAARVGGEGALSKNPFGNTKDLFIAVGVILVVVMIIIPLPTFLLDTLMALNVIFSLLVLLIVLYAQKPTEFSLFPTVLLVATVFSLALNISSTRLILYKGAKFDGKMIRAFSTFVVGTGGTQGLVIGFIIFIIIIAVQAIVITKGATRISEVAARFTLDSMPVKMMAIDTEYSSGSITEEEAQKRKAQVQRESDFYGSMDGASKFISGNVKVGIFVTVI

SEQ ID NO: 96207 - protein, 276 aa, Unknown
  Obtained from environmental sample
  DOMAIN (1)...(115): Histidine kinase-, DNA gyrase B-, and HSP90-like ATPase
  misc_feature (1)..(276): Xaa is any amino acid
DEVRLRQIFFNFLSNAVKYSEKGHVGLIVSADKRDDKQVWLKITVSDTGKGIKPEDQAKLFSEFVKVDIKKNQNVEGTGLGLAITKRLCIAMGGDISMESEYGKGSIFTAVIPQGIEKEVPLAVVKEAEKKKILVYEGRAVYAKSVCWTLENMGVPYTMVTNQDDFAAALYREDWFYVFSGYGLYEKIEPVMGQSSASFFGGKKPPLALMVEWGTETRIPGVRFVSIPIQSLSIANILNGKEDNKGYIKSSGVIRFTFPRARILVVDDIATNLKVV

SEQ ID NO: 96208 - protein, 269 aa, Unknown
  Obtained from environmental sample
  misc_feature (1)..(269): Xaa is any amino acid
MKRTVFLSLALFALMAVGVYAQTEADFEVRKSPDGKSITIDKYNGKATVVNIPAKIQNLPVTSVSGFMGNTSITGVTIPNGVTTIGNKAFGLCEKLTSVIIPNSVTKIGDDAFAKCISLTSVTIPNGVTSIGNMAFQECKLTNVTIPDSVTKIGDAAFENCTSLTSVTFSGSIPSSGFNDDAFWGLGDIRDKFYATDKTKGTAGTYTTTAPVGKNSVWTKGGSTTAAPTAAGTPGLEYKLTSDGKGYIVSRGTLHPTSTADVVIPATYN

SEQ ID NO: 96209 - protein, 458 aa, Unknown
  Obtained from environmental sample
  DOMAIN (210)...(378): Glycosyl transferases group 1
  misc_feature (1)..(458): Xaa is any amino acid
MKIVMFSDAYWPRVNGVTVSVDSYSRALIKAGHEVLVICSSYPEGIDATPSFSVDRKQDGEGPKIVRVPSLPAFITKEDRIAKFSKWHWVFRQVESFNPGIIHINTEFVIAEIGFLYAKTHNLPTIYTFHTMWEDYAPNYFPMFPVFFVKFFIRGILKNVLRRSYKVIVPTKQIEAVVYKYKPNAETFLLPTGIDPELFMHDKAEIEAFKEAFNALFPETYGKKLLLMAGRVVREKNIGFLLKILPDILKKSPNTALVIVGNGQDMELFKNEAKENGVETNCIFTGYLDRYQLSLIYSISHIFVFPSLTDTQGLVTLEAMFSGVPVVAIGAMGTLMVMGGDNGGFMVKDDPKEFTDRVLQLLNDEELYRQKSEEARIHARAWSLSEVTKRLTDIYKETISSYTKDYGKPRSPVWKLLMNKRWWEINNKVIKKKTKKKLQEIHSKIKETSKNIKSLPQE

SEQ ID NO: 96210 - protein, 73 aa, Unknown
  Obtained from environmental sample
  misc_feature (1)..(73): Xaa is any amino acid
TQIVQLWMNCGVYAKKSNFPLVAFGGINKTNIPQFAGTGIDGIAVVSAIVSQEDASEAARELITLIKNTIGKK

SEQ ID NO: 96211 - protein, 220 aa, Unknown
  Obtained from environmental sample
  DOMAIN (4)...(189): haloacid dehalogenase-like hydrolase
  misc_feature (1)..(220): Xaa is any amino acid
MKAFKAYIFDLDGTLLDSMGVWGQVDSDFLAKRGIAVPPDYMDAISSMTFHETAAYTIKRFSLTDNIEDLMREWNDMAAYAYAHTVRMKPHAKEFLITLRDSGAKLAIATSLSAELCAPVLRNNGIDNFFDVICRTDDVGHGKSHPDVFLLTAQKIGIPPQDCLVFEDILSAVKSAKSAGFCVCAVYDKTSENDWEQIKAEADYSIVDFHEMLIRINTVE

SEQ ID NO: 96212 - protein, 309 aa, Unknown
  Obtained from environmental sample
  DOMAIN (75)...(309): Cellulase (glycosyl hydrolase family 5)
  misc_feature (1)..(309): Xaa is any amino acid
MKKLLRLLGIIVITAIIGFSIITCDDSNNYYIDDYDYTTVLPIPPAPQGPSAPKPFNDITATQLVANIKVGWNLGNTLDAVKFGSDLTVSDLETAWGNPVTTTGHITAIKNAGFNAIRIPVSWAKCADADFNIRADWMERVTQVVNYAVENDMYILLNTHHDESIFKFTNKEKDASINAFRKIWMQIAVNFQNYDEKLIFEGLNEPRTRGSSAEWNGGTSAERANLNDHYAVFVKTVRACGGNNNKRFLVINTYAASGEAVAMSGLQIPADTAQNKIIASYHAYEPYYFALHEGSNSVKTWSQSKLSDT

SEQ ID NO: 96213 - protein, 370 aa, Unknown
  Obtained from environmental sample
  DOMAIN (199)...(364): GGDEF domain
  misc_feature (1)..(370): Xaa is any amino acid
MLRSTARICVSTIIRAEKTKSTEQAMKVISRHETIKDIINKVSLIFLSENKEKVEDTMAAGVRLIADIAEIDRMILCRNHIAGDILYVSEVYRWDRCFGGSTELTDIFINITYAGLIPDWEGHLSGGNHINSPTKLMSEKAAAVFKSFGVLTAAVIPIHISSVFWGFALFADTRTERYLEEDNIHMMRSAALLFANAFIRNEVDYDALTGIYNRRFLDNNMKRIIRFLSRSDSLLSMLMIDIDFFKRYNDTYGHVEGDNCLKIVAQTLFNSITRADDFAARYGGEEFVVVLPNTNKQGVQIVAEKLLYNIRNCNVTHEQNDAAKCLTISIGATAGKVLHTHTTDDFVKKADEMLYKAKQNGRNKYFFEQL

SEQ ID NO: 96214 - protein, 341 aa, Unknown
  Obtained from environmental sample
  DOMAIN (81)...(270): Adenylate and Guanylate cyclase catalytic domain
  misc_feature (1)..(341): Xaa is any amino acid
VPLFIIVLTVAGSSLRDLFVLQSGKVPLFWMAPYSFVLMVIIIYGMLMTEENFIQGAFSRYLAPEIITEIVKDPNKLNLGGEKREMTALFTDIRGFSAISEQLDPAQLVRLLNKYLTGMSNIIMENLGTIDKYMGDAIIAFFGAPLFNPEHSALACRSAIAIKAAEKELNEIIISEKLSPVPIFTRIGINTGEMVVGNMGAEKKMDYTIMGNAVNLASRIEGVNKYYQTGGILISEYTRAKIGGEFSLRRIDRVRVVGINTPLRLYELLPMDTDQGAVETWEKALDLYERRDFRKAFSLFVSLLKRYPNDNAAKFYALRCKAFVETPPPDNWDAVRNLTNK

SEQ ID NO: 96215 - protein, 299 aa, Unknown
  Obtained from environmental sample
  misc_feature (1)..(299): Xaa is any amino acid
APSLSGTIAISPPTGVNINNELTATYSGSEAVTLIYQWEKDGSNVGTNSNKFTPTQAGGYTVTVSAIGYKPKTSAIVVVNDPSLLTLGGTITISPSSGVRTYTELTATYSGSEAVTYHWEKDGNNVGTTSDKYTPTEAGSYTVTVNMTGYNPKVSPAVTVTAITFNAASDNPKNTTAIDITLSSGVTGLTENDITVVSGTGAVTKGALSGSGTSWSLGVTVITSGNVSVSFSKSGIEGTKTVSVAVQGDGSSAKPFLVFDDTDLSHVGDNPPAGAGDYANWGLDKHYKQMDNIDLSSIS

SEQ ID NO: 96216 - protein, 216 aa, Unknown
  Obtained from environmental sample
  misc_feature (1)..(216): Xaa is any amino acid
MKTFFYSLLPIVLLFAFMSCSNNNSDNGDEIGGNSGNSSSGGGNSSSSDGGNGGSSSSGGGNSSSDDNSNIQVPECGNNVDEILQCAVNELKKENWDEAISYYNEAYNKDNNNPKAIIYSVMANLAKISTDPKMVTLMKEHFGFTTYPNKLNALLNDEWMKEYEDVTLPTIKTPEWVKGKGSIYNEALLSGNVMSVQNWSISFLANVLDKNSNGFN

SEQ ID NO: 96217 - protein, 319 aa, Unknown
  Obtained from environmental sample
  DOMAIN (7)...(314): Glycosyl hydrolase family 26
  misc_feature (1)..(319): Xaa is any amino acid
MSAYLPCNPNASPEARNVLDYLSGLRGRGILLGQHTQTPSQEELAYIREVTGKEPALCGFELLAYSPNINYSESGQECLIEVEENKNTLETARTWAERKGLITFTWHWFSPLYGADKAFYQKNTPFDARLALNENTAERSAFISDMDSMAERLKPFCRERIPVLWRPFHEANGEWFWWGSRGPDTARKLWLDMFERFTRVHKLDNLIWVWNSPLKEGYVGDIFCDVISCDMYLPEHTHSDYREIHEELLMITSSDKITALGETGPVPGLASLAESHIPWTWFMTWSKNLCREGYTSREELQAAYNSDYGVTLDKLPALY

SEQ ID NO: 96218 - protein, 254 aa, Unknown
  Obtained from environmental sample
  DOMAIN (7)...(253): Isocitrate/isopropylmalate dehydrogenase
  misc_feature (1)..(254): Xaa is any amino acid
MAKIEMKTPLVEIDGDEMTRVLWEVIKEKLLLPYVDLKTEYYDLGLSSRDNSNDEITVKSAQAIKRLGVGVKCATITANSARQKEYNLKHLHPSPNATIRAILDGTVFRKPISVSRIKPSIITWKAPIVIGRHAYGDVYKAAEMEIDGPGKVELVYTKKDGTERRIPVADFEGRGIVQGMHNYDESIRSFARACFIYAIAEKLPVWFATKDTISKTYDGRFKAIFNEVYENEFREKCAAAGIEYFYTLIDDAVA

SEQ ID NO: 96219 - protein, 455 aa, Unknown
  Obtained from environmental sample
  DOMAIN (135)...(278): ATPase family associated with various cellular activities (AAA)
  misc_feature (1)..(455): Xaa is any amino acid
KRITEKNPPVQVKEKAEKEIKRLRKLQPLSPEAAVLRGYLEWIADLPWSNFTTDSVNLAEAEKILDEDHFGMKKAKDRIIEFIAVRQLQVDEALKNEMLKDDVIKDDTLKDEAIKKEDPKNNAKTSVPQSVKGPILCFVGPPGTGKTSLGKSVARALGRNFVRISLGGVRDEAEIRGHRKTYVGALPGKIIQSMCKAGTTNPVFLLDEIDKLSSDFRGDPASALLEVLDPEQNSTFTDHYLEVQYDLSKVMFLTTANSLHSIPYPLLDRMEIIEVPGYGENEKLSIAKQFLVPKELRENGLSSAKITFRDDTIKNIIRYWTMESGVRNLERETARCIRRIARDAVNKGYGKDKPVKEFNKIITPANLEKLLGKKKYKRDVVFREARVGVTYGLAWTETGGTILPVETIRYSGTGELVITGNLGDVMKESARIALSYLRSTGNKYNFLAKDLLKSD

SEQ ID NO: 96220 - protein, 706 aa, Unknown
  Obtained from environmental sample
  DOMAIN (101)...(179): Cache domain
  misc_feature (1)..(706): Xaa is any amino acid
EKQIIEENSEKTLYVARSLQSFINAAYKAIEDLAFSGDVISMNTQRQTPALAGSAQRNDYFELLYAQGMDGMQTGRSSGNLGNRKERWWFVQMEKIQKPFVSESYYSVGTNMPVTSIFYPIMNEGQMIGIMAGDIKLSALHDMVVEMAVEGSYSFILDGKGVVVAHPNSTYQEEMYNFAKFIKTVTVKDADGKPMQNAQGNITEEQPLIISDAYKSAIEDMMKGNKGSVKFNENGKTIYLNYQPVTMNGSSDPWYVLSVRDRDIAMRSRNTVITVILASSAVIIVLALFIVFFIARTISSPVKAIRLVLEKVKDGDFTKKVTVQSNDEIGNLAAYFNLTIENIRNLVGAIKYKINGLNHTSFELSVNMRKTSTAVEQIASNLDNMENLVVQQENGALVAGEAVGAIKTNIDSLNRMIEQQAESVDMSSSAIEEMTANIHSVTQTLAENSKNVGVLVEASENGKTGLQTVAQEIREIAHDSEGLLEINSVMNSIASQTNFLSMNAAIEAAHAGEVGKGFAVVADEIRKLAESSSKQSKTTAVMLKKIKTSIDNITKSSNDVLNRFGAIDSSVKTVSEHEQNILNSMEEQETGGKQILESISRLRDITHSVKKGSDDMASSGETLVKETDEFIKTSQEVAEGMNDILTGINQIKVSVNHVNEMSLENNRNFDALKQETEKFKDTVGNERKKILIVDDDDIHLEMIETV

SEQ ID NO: 96221 - protein, 690 aa, Unknown
  Obtained from environmental sample
  DOMAIN (552)...(627): Hpt domain
  misc_feature (1)..(690): Xaa is any amino acid
MGETDSQYAEIGSVVKLATLGNIGIGYFSISGIPRMCAYRPISGSKEGWFLGIIAPLPESPVKNLDRGFLAVGLIAFIFSLLGAIIASYFIKKPFEETAKLKEEAEAHLRSKTDFLANMSHEIRTPLNVIIGLTDLVLEDDTLDKTVTENLTKINSAGDTLLSIVNDILDFSKIESGKLTISPVEYYLSSVLNDVVTLVITRLGEKPIIFSLNIPDELPAKLLGDDLRVKQILTNLLSNSIKYTHRGSIELKVNCTREDNIVWMYITVSDTGIGIREDDIKKLFLEYFMVNAKANRYIEGTGLGLPITKKLVELMNGEIQVDSEYGKGTTFRLRLKQGFVEDTSLGKETAEKLRSFRYTDDKRIAAKKLLRLNLSYAKVLVVDDMQTNLDVASGLLGKYNIHVDCLNNGHDAVNRIYSGNPVYDAIFMDHMMPGMDGIETADRIRALGTEYAQKIPIIALTANAIHGTEEMFYKHGFQGFISKPIDIMEMDSHLRKWVRDESIERARAANEPEVIMSNGSSSENEGIEINIPGVDTKRGIALYAGEMDIYLPLLRSYVANTPNILNKLKAVSKETLPDYVISVHGLKGTSAGIGAQKVREAAFELETLSRAGNLAEVLEKNNNLIKGAETIVANISMWLEHYDSINAKPRKKSPDREVLAGLKQSCEKFNMSGIDNAMAELEKYDYDEGA

SEQ ID NO: 96222 - protein, 765 aa, Unknown
  Obtained from environmental sample
  DOMAIN (600)...(675): Hpt domain
  misc_feature (1)..(765): Xaa is any amino acid
TIPGTYFNERVNTFTVWKTGHIFIDDAEETIIANIRDEWVQQRANLIRMGETNSQYAEIGSVVKWASLGNIGIGYFSISGIPRMCAYRPISGSKEGWFLGIIAPLPESPVKNLDRGFLAVGLVAFIFSFLAAIIASYFIKKPFEETAKLKEEAESNLRSKTDFLANMSHEIRTPLNVIIGLTDLVLEDDTLDKKVTENLTKINNAGDTLLSIVNDILDFSKIESGKLTISPVEYYMSSVLNDVVTLVITRLGEKPVIFSLNIPDELPAKLLGDDLRVKQVLTNLLSNSIKYTHKGSIELKANCTREGNIVWMYITVTDTGIGIHEEDIKKLFLDYFQADAKANRNIEGTGLGLPITKKLVDMMEGEISAESEYGKGTTFRLRIKQGFVEDTPIGAETAEKLRSFRYIDDKRTAAKRLVRLNLSYAKVLVVDDMQTNLDVAAGLLRIYNMHVDCVSSGEEAVNRIYSENPVYDAIFMDHMMPRMDGIETTDRIRALGREYAKKIPIIALTANAIHGTEQIFYEHGFQDFISKPIDIMELDTVIRKWIRNEEKEKELGTNVFITPDVTAEDEKNADLEIVIPGVDTEKGLSLYGYDKKIYLTLLRSYVPNTLENLKKLKTVSKETLPDYVIRVHGLKGTSAGIGAEEIRAAALKLENLSRAGNLDEVLALNDKLIKDTEIVVNNIKEWLASYDLHNKKPLLKKPDRKILARLRQCCDNFDMAGIDKAMTELESFNYEEDAEMVAWLREKINISEITEAAMQLAKILI

SEQ ID NO: 96223 - protein, 275 aa, Unknown
  Obtained from environmental sample
  DOMAIN (202)...(274): Cold-shock' DNA-binding domain
  misc_feature (1)..(275): Xaa is any amino acid
GRSLAKDMGEKVQSERTFEDILMRENIVSHYLPLRYAGEGTIGQEKGIDVWLALEAYELAIYKHFDILVLIAGDGDYVPLVRKLHTLGTQVMLICWDFSYHNENGDIVETKTSRQLLSEVYYPVQMSQKIDQNNCEHMKDLFVTERPQEWTFNFGSKAASSALTDASASADMPTWTSSPSWANAAALHEKQNTSPETPEAIELVSTIFSVSPNGFGFIKDEEKNNIFFHYSRLTNCDFSELKTGMKVRCTIEEDPERSKREEMPVYRATRVTLIE

SEQ ID NO: 96224 - protein, 153 aa, Unknown
  Obtained from environmental sample
  misc_feature (1)..(153): Xaa is any amino acid
NWQLREVCALSGMAPTTACLSVISEYRYHGEEGESCTWHRMVNGRSEAVYPAEYQAWFTASAREGSLDYGSRPLEIVSPREGFVYLSSPGIGRDEIPVEVIGGGGDELRVTFNGNTFSVGRPFVFSLFREPGSFTLRVQNGGEEEEVNFTVEP

SEQ ID NO: 96225 - protein, 314 aa, Unknown
  Obtained from environmental sample
  DOMAIN (9)...(314): Periplasmic solute binding protein family
  misc_feature (1)..(314): Xaa is any amino acid
MKKSILILITLAVFLFGISGCKKNKNAVTRNADGKLNVTATNFPPFDFVRQIAKDKVNLYLLLPPGAESHSFEPSPRDIITVQNSGIFIYVGGESDAWVDRILESLDTSKMIIIKMLDTVEAVEEEIVEGMETEEEEETAYDEHVWTSPQNAILIVKAINTALCEADPANADFYRKNTASYIEELAQLDAAFKGVVAGAKRKTIIFADRFPFRYFSDAYGLRYFAAFPGCSTETEPSVATVAFLIDKVKAEKIPVVFHIELSNERMANTICAETGAKKLMFHACHNISKKDFDAGLGYLDLMRVNVENLKEALR

SEQ ID NO: 96226 - protein, 75 aa, Unknown
  Obtained from environmental sample
  misc_feature (1)..(75): Xaa is any amino acid
GKLKININELYAFTQKYDFTELPLTGDCLKAYLDLPNIHKDPFDHILLAQALTFPMRLITGDSLLADYSSLVMVI

SEQ ID NO: 96227 - protein, 437 aa, Unknown
  Obtained from environmental sample
  misc_feature (1)..(437): Xaa is any amino acid
KELQKNAKDIFAKIEKENKDAGLNLNLGVKCHDGGVWADQAIIAGCSGGIFSNIMAAADILKGHSTGNGNFSLSVYPESQPTYLELVKNGAVETFMKAGALVREAFCGPCFGAGDTPANNELSIRHVTRNFPNREGSKPNDGQIASVALMDARSIAATAACGGKITSATDIDVKYGKYKFFFDKNIYDKRVYSGIGNPKPETDLTFGPNIKDWPKMPALPENLLIKVVSFITDPVTTTDELIPSGETSSYRSNPLKLAEFTLSRKDPSYVKRAKDIQTLEQMRAAGEGEIGFLSMPIQALPGCAELKPANFAIGSAIFARKPGDGSAREQAASCQRVLGASANFALEYATKRYRSNLINWGILPFLISDETALSLGSYIFFPGIKKAVKEKAETITGYVLNEQPVKIAVSLGELTDAERQIIIDGCLINHYAGVKSC

SEQ ID NO: 96228 - protein, 71 aa, Unknown
  Obtained from environmental sample
  DOMAIN (1)...(70): Elongation factor Tu C-terminal domain
  misc_feature (1)..(71): Xaa is any amino acid
FSNYRPQFYFRTTDVTGTIKLAEGVEMIMPGDNAQIEVELIAPVAMEKAMRFAIREGGRTVGSGVVTAIIE

SEQ ID NO: 96229 - protein, 69 aa, Unknown
  Obtained from environmental sample
  misc_feature (1)..(69): Xaa is any amino acid
MKEYKAYIFDLDGTLLDSMGVWEQIDVDFLAKRGIAVPPDYMDAVSPMSLREPPPIRLSDSLYRTPLTA

SEQ ID NO: 96230 - protein, 429 aa, Unknown
  Obtained from environmental sample
  misc_feature (1)..(429): Xaa is any amino acid
MSSKQTQMLFEKEQFRMSGLQVFNWGTFSGLHKVPISPKGFLFVGGSGTGKTTLLDAFSALLIPPRWIDFNAAARESEHRKGKDRNIVSYIRGAWAEKEDEVSGDISTHYLRSGTTWSALALTYQNETGQIVVIGQIFWIRGNSNGTADVKRYYFIFERTFDLHEFEDFGKSDFDIRKLKQSFPDIFIINEFTPYCERFRRLLGIENEVALRLLHKTQSAKNLGDLNTLFRDFMLEKPETFDAADRLVNEFGELSAAHQAVVTARKQIETLVPAREKHHQMEKIISQKNDLHELQAGIDFYREIRRMDLLKERIASLIVEKEGWEGEITRRQSHLDNQNDVLRELEHQHREIGGDQIEQWESDKRTLETQRADRVRKRDQAEAACRELGWALGETPQEFAELVGMARGEIEGMESRNKAAREDLLLYAG

SEQ ID NO: 96231 - protein, 163 aa, Unknown
  Obtained from environmental sample
  misc_feature (1)..(163): Xaa is any amino acid
MKAKISFSNYKNLSREELKKLPVEELAQALYEAIKEWDKLNQKLNQDSTNSSRAPSTDGPEAKAKRKAEEKTSKPKHGARKQGAQAGHKAVSRTLLPLGDGDIVINCKPEICMHCGATLADKSDPEPYRQQHYDFEVIRRTTEYRKHKIKCPCCGYTAEGKLP

SEQ ID NO: 96232 - protein, 173 aa, Unknown
  Obtained from environmental sample
  DOMAIN (1)...(146): DNA methylase
  misc_feature (1)..(173): Xaa is any amino acid
MLNLGYWILNDVTWYKTNPMPNFMGTRFTNATETLLWCSKRKESKKYTFNHKTMKKYNGDKQMTSVWQIGLCIGEERLKGEDGKKAHSTQKPEELLKRVILSSTKQGDVVLDPFFGTGTTGAVAKKLKRNYIGIEREPEYIKLAKNRIARIKEYFEEADWVEEKKTYSATAKE

SEQ ID NO: 96233 - protein, 317 aa, Unknown
  Obtained from environmental sample
  misc_feature (1)..(317): Xaa is any amino acid
KLGYRAEVQYGDANQATQNQQIQSFLTQKAKALVVGCINDGVSSVVAEAGRDKVVVIAYDRIIPNSADYDYYITFNNFKVGVLQAESIVKGLDLASATAKAPKYITLFAGSPTDGNAFFFFDGAMSVLNPYIDKDVLKVVGPYPKTSADRENFQRIATENWQAPIAKTRMENLLNNDASKVTLDAVLAPNDTLGRAIIEACKADAKYRNKLPVVTGQDAEFDSAMSIKNGEQYSTVFKDTAKLAEAAILLADQALKGQPINIPGAVLASGDLAKIGDTGKKVVKAYLLDPILVTKDNLNIPIDAEFYDRPQAVQLQN

SEQ ID NO: 96234 - protein, 508 aa, Unknown
  Obtained from environmental sample
  DOMAIN (290)...(485): ABC transporter
  misc_feature (1)..(508): Xaa is any amino acid
MSEYILEIQNLTKEFPGVRALENVNLKIKKGEIHSLCGENGAGKSTLMSCISGVYPRDSYEGKVFYKGHETNYNSVKDSEHEGLAIIHQELALSPYLSIYENMFLGHMETTFGIINWNKYIKESKKYLKIVGLNEPPETIVSKLGVGKQQLVEIARALSKKAELLILDEPTSSLNDDESEKLLNLILEFKRQGITSVIISHKLNEVLKVADTVTILRDGQSIRTYDVKGDKLTEEMIIKDMVGRDLTHRFPERKSSPGNTIMEVKNWSVYHPEYHDIKVVDNVSFFLRKGEILAFCGPMGAGRTELMMSIFGNSYGNRSEGELIINGKRQKFKSPHEAISSKLGYISEDRKSLGLVLIQDIKTNITHSSLNKISNFLGIIDDHKEVMEAERYRNDLNIRTPSINQIVRNLSGGNQQKVVVSKALFADPEILIVDEPTRGIDVGAKTEIYGIMNDMITAGKSVIMVTSELPEALGMADRIYVMNEGHIKGVLNKSEATQEKIMHLALVG

SEQ ID NO: 96235 - protein, 321 aa, Unknown
  Obtained from environmental sample
  misc_feature (1)..(321): Xaa is any amino acid
IIAKGEYPSELNIPFPFALVNNNVHKNRLEVMPAYFWLHNLYALERNSWKSKTRDKRKVKNQRIETDYLAPDTAEEVIHALSILNGWLGEAGYSAQDMTGVDGIHVRMILCRHLEHSKRGQVIIKPLEAIAGYRQMLRYYAVKTLAEFFDAHPELDYQGFLELLGPPSVQERVIEWTNMGGQIVPSFRVDELRKSIRQNEIKSWDEIHRVYGHWDEAYPFDKCSHAWSTLALLRNSEEAVSAPAFRTEIALIQGIRHWIDKQIYDSRAKDFHSSFKRATYRNVAEMEQILGGPGDNQFLHIVQKESDEFFEMTERVTARLK

SEQ ID NO: 96236 - protein, 735 aa, Unknown
  Obtained from environmental sample
  misc_feature (1)..(735): Xaa is any amino acid
MNILPADRYGYDFITAEYIPKDLSGKNTFGVTALSYNEYWQRNAQQAELFSKKPDSWRNLKLEELETLKQYRNYCSNWNNFLVTDPFDPKLIRDSSFYGLVRIGALRNVLLKHNDFCVPSGIRNSVIISCDIGDDTAIQYCAYISHYIIGDNCILSKIDEMQTTNHAKFGNGIIKDGESEDVRVWIDVMNEAGGRSILPFDSMITADAYLWAAYRDDTVMTEKLADITQKQYGSLRGAYGVVGSGATIKSCSVIKDTAIGSCAYIKGANKLKNLTIHSSSEEPTQIGEGVELVNGIVGYACNIFYGAKAVRFVIGRNCSLKYGARLIHSVLGDNSTVSCCEMLNNLIFPVHEQHHNNSFLIASLLQGMSNMAAAATIGSNHNSRANDGEIRAKRGFWPGLAVSLKHSCVFASFVIIAKGEYPSELNIPFPFALINNNVHKNRLEVMPAYFWLHNLYALERNSWKSKTRDKRKVKSQRIETDYLAPDTAEEIIHALSILNGWLGEAGYSAQDMTGVDGIHVRMILCRHLEHSKRGQVIIKPLEAIAGYRQMLRYYAVKTLVEFFDAHPELDYQGFLELLGPPSPKERVSEWTNIGGQIVPSFRVDELRKSIRQNEIRSWDEIHRVYVHWDEAYPFDKCSHAWSTLAFLRNSEEAVSAPAFKTEIALVQGIRHWIDKQIYDSRAKDFHSSFKRATYRNAAEMEQVLGNPSDNPFLHIVQKESDEFFEMTERVTARLK

SEQ ID NO: 96237 - protein, 329 aa, Unknown
  Obtained from environmental sample
  DOMAIN (27)...(162): Bacterial flagellin N-terminus
  misc_feature (1)..(329): Xaa is any amino acid
MRITFATVNRNVQRNLSRRYSDVVGLQEQLSTGKRLRKASDDPVDVANAIKLRAKEAQLGQYKRNIQDGLAVMGVGASAMASMNELLHRARELAVQAANGTYNDSDRLYMQQEVDQLFRQMMSVVNTQFKGSYIFNGTNGNVPPYKIMASGSERSDYENRTMATFGTVFARQADGKEWNTPNIPDPALVTAASHTANGDSLYLGYASNNLRVGDKVQLTWNSSVDPRVNGRKLEYIYPETMPLNQITINGQTFRNGVNETTFGIGTVNGPVTVGASTPIFRTGSVNQVRNITPGSFSITATDKSVPNSPTFTLVEGRDYTVNYASGSFT

SEQ ID NO: 96238 - protein, 58 aa, Unknown
  Obtained from environmental sample
  DOMAIN (2)...(58): SecE/Sec61-gamma subunits of protein translocation complex
  misc_feature (1)..(58): Xaa is any amino acid
MKISQFVKESYAELKKVIWPNKDEVVNSVKVVVVSTIIVAAILGLIDMLLLMGIRAVF

SEQ ID NO: 96239 - protein, 156 aa, Unknown
  Obtained from environmental sample
  misc_feature (1)..(156): Xaa is any amino acid
MADILYTIIISPIVQIIEFVYVFFFKVFKKEILSVFGVSLTVSFLSLPLYIMAERLQNAERDIVNRLKPIVKKIKSVFSGDEQFMILSTFYRQNHYHPLYSLRSSIGLIIQIPFFIAAYSYLSHLEVLRGVGFLSIKDISSPDSLLHIGNISINSC

SEQ ID NO: 96240 - protein, 379 aa, Unknown
  Obtained from environmental sample
  misc_feature (1)..(379): Xaa is any amino acid
MVIVSFSALCNMFVFPGDYGFISSDLVFAGTVTHNLQEISINILVMAVIFALLFFIYVRGGRKILSFLVITLFIALVPFSIKNLIFINTEFKKLSKYYQPEHKTEESISPIFHFSKTGKNILVIMLDMAESVFIPYIFDESSELYQKYDGFVYYPNTVTFNGWTSGGAPPIFGGYEYTPEGLNNRPDISLRKKRNESLLMMPVLFSSSGFSVTITDPPYADDNWIPDLRIYDNEKNVSSHITDGLYTDLWLKRNNIVLPPHSEVLKRNILWYAIFREIPLAFRQAIYYTGSWCAPFSEYRMRLFLNGYAVLDYLDELTDFENEKEKSAVFMVNNTAHENWFLQAPLYKPQLTVTDYGKSPFSKEVWYHVNTAAIKRLSE

SEQ ID NO: 96241 - protein, 210 aa, Unknown
  Obtained from environmental sample
  misc_feature (1)..(210): Xaa is any amino acid
MKHVITSIMLSAMPFFIFSCINIPVENKANIFSYDFTGKETALPVPTAEKLPSSWKGFNLLNMFYSGGQGTDIPFNEKEFKMMSDWGFNFVRIPIDYRILIRGNDWNNMNEAAIRRLDKAVEYGIKYDIHICINLHRAPGYTVASPAETTNLWTQAKPQEAFAHMWGVIAGRYKNVPNEYLSFNFLNEPAGVDEKIYADVIKKAADAIRA

SEQ ID NO: 96242 - protein, 434 aa, Unknown
  Obtained from environmental sample
  DOMAIN (38)...(135): Glycosyl hydrolases family 2, immunoglobulin-like beta-sandwich domain
  misc_feature (1)..(434): Xaa is any amino acid
VVSVDASRSPVRVPMHNTDWFNYGGIYRDIYLVRLPSVYIKDWFVRLAPDGKYSTVLADVYLAGADGASVNGEVRMEIPELGICQDIPVESGRGEASVSVKPELWSPENPKLYNVIFTYNAGSYIDTTRDRIGFRTISVNGQEIFLNGQKIFLSGVCVHEDHFASGKTTDEEIIQATIRDLKDMNGVYFRLAHYPHDARFARIADEEGVLLWEEIPVYWAIAFDNPETYSDAENQLAELILRDRNRASVIIWSIGNENADTDGRLDFMSRLAKKAKILDNSRLVSAACLIKHEKLKIEDRLAEYLDIIGINEYYGWYDPDFDKLPKILTNSNPDKPVLICEFGGDARIGQGGTTDELWTEDKQKKIYEQQVETFKKCPYIAGTTPWILYDFRCPRRLNRYQEGFNRKGLIDADRKTRKPAFYVMREFYSWVRNK

SEQ ID NO: 96243 - protein, 277 aa, Unknown
  Obtained from environmental sample
  DOMAIN (1)...(277): tRNA synthetases class I (W and Y)
  misc_feature (1)..(277): Xaa is any amino acid
MNEGPVTFYEGTDPTGGSLHIGHMVPYFAFRHLKDAGHKGLALLGGGTARIGDPSGKSEMRKMLSYEQLDANTESIRAQLDRFVSFDNDTARAVNNKDWLADLNYIDFLRDIGRHFSVNRMLSFEAYKMRMETGLSFIEFNYQLLQSYDFLELYRRYGCRLQIGGDDQWGNIVAGVELIRRVEGAEVFGITFPLITTADGKKMGKTEKGALFLDPALTSPYDFFQYWRNVQDADIRRFLLMFTFLQIGECEALTAPGKNPNEAKERLAWEVTALIHG

SEQ ID NO: 96244 - protein, 170 aa, Unknown
  Obtained from environmental sample
  misc_feature (1)..(170): Xaa is any amino acid
MCGGLKALGCELTVEKGGIRVFGGRPLRAAGAVNAGAAGTVLRFLLPLAALHCDRPVEFTGHGRLFERPLAPLLDALARLGAEWRPSESGRVGGVLAPAKVSANIADLGKEIDIDGRLSSQFISGLAMAVAGLGSGSCKLQIARYKRQTADPCSDVEPLGSTSIGFPGTD

SEQ ID NO: 96245 - protein, 87 aa, Unknown
  Obtained from environmental sample
  DOMAIN (9)...(86): Plasmid encoded toxin Txe
  misc_feature (1)..(87): Xaa is any amino acid
MPYKPKLLKKAEKDYEYWQKHDQGNADKIDELMEAIKIDPFKGIGKPEPLKHDLQGYWSRHITEKERILYEVVGDIVYVHRCRGHYE

SEQ ID NO: 96246 - protein, 232 aa, Unknown
  Obtained from environmental sample
  misc_feature (1)..(232): Xaa is any amino acid
MFLTANDLHFNMDNATPMIAPSDKSNMNNTDVWRAVSVTRSNNTTTMYVNGVQIATSKVQKSTANRTPSTGEFYIGRSNWPDPYPNMMLSDFRIYNRALTAEELMEMYGNMNEIPLDVAYFDGDRLPDKAYGYDVTWTAADGTSLKDNNVIVGGAEIKTVTVTAVFGPYTKTYTIRIFSIGTNPGLLNISKGNPVNGPPPNFIGDPAVAVVGDTLYLIGGFDRGTNGYNIPE

SEQ ID NO: 96247 - protein, 871 aa, Unknown
  Obtained from environmental sample
  misc_feature (1)..(871): Xaa is any amino acid
MLFEKEQFRMSGLQVFNWGTFSGLHKVPISPKGFLFVGGSGTGKTTLLDAFSALLIPPRWIDFNAAARESERKGRDRNIVSYIRGAWAEKEDEASGNISTHYLRTGTTWSALALTYQNETGQIAVLGQIFWIRGNSNGTADVKRYYFIFERTFDLREFEDFGKSDFDIRKLKQSFPDIFIINEFTPYCERFRRRLGIENEVALRLLHKTQSAKNLGDLNTLFRDFMLEKPETFDAADRLVSEFGELNAAHQAVVTARKQIETLLPAREKHCEMETIMKRRTDLKELQSGTDSYCEIRRIGLLKERIATLTVEKDGWKGKIDQCQSLLDNETNVLRDLERQHREIGGDQIEQWELEKRTLESQRIERERKRDQATAACAELGWTLSGTPQGFAALIGKAREEIEGREEKSKAARDELLVQYGKKKEAENEFAIAVKEYRALQSQRSNIPADMLELRNRIASAIGVSVTALPFVGELIEVKPEQSIWQGAIERVLRGFALSLLVDEHYYSALSNHINSTHLGQRLVYYRTGRAEPLQEKPVSTDSMVFKLNIKEGNYAEWLKVELRQRFNYTCVESVQAFRTADRAITREGQVKHSKTRHEKNDKYAVGDRRNWILGFNNREKLALFQQQAQELADAISDLDNKLNALSEQDNLNAKRALQCQTLVNLQWQEIDALPLIERISAIENQIREMRDGNKVLLEIAGRINMQKSIVSRADEDLRNARMEHGNTIRQLKEANADLGRLQNDPSIVPLTPFQKKGLDDYFARITDNIRLDNLGDITTSVVQVLGEERKDVSRDIAGYEKQIENIFSEFKRSWPQDAGDLDASLSSAQDFFSRLTRLETDGLPAYEQRFFDLLRDQSNQNLAALSTYLN

SEQ ID NO: 96248 - protein, 451 aa, Unknown
  Obtained from environmental sample
  misc_feature (1)..(451): Xaa is any amino acid
GAIERVLHGSALSLLVDERYYSALSNHINSTHLGQRLVYYRTGRVESWQEKPVPSDSMVFKLNIKEGSYAEWLKAELRQRFNYTCVESVQAFRAAERAITREGQVKHSKTRHEKDDRRAVGDRRNWVLGFDNHEKLYLFQQQAQELADAISALTEKINVLSEQDNLSRKRALHCQTLVNMQWQEIDVLPIIERISAIEKQIREMRDGNKVLREISEQISRQKSIVSRADDDLREARMEHENTIRQLKESNTDLGRLQNDPSIVPLTPFQKKGLDAYFARITDNIRLDNLGDITTSVVQVLGEERKDVSRDIAGYEKQIESIFTEFKRSWPQDAGDLDTSLSSASDFFSKLTRLETDGLPAYEQRFFDLLQDQSNQNLAALSTYLNDARKTIHERMELVNESLSQVPFNKSINQQTYLHIDASDRQLPEVKEFKQDLQQALSHAWGEERDLA

SEQ ID NO: 96249 - protein, 282 aa, Unknown
  Obtained from environmental sample
  misc_feature (1)..(282): Xaa is any amino acid
WARHDKTNAEVFHVLNDDIENLFAFAFATTPQDDTGVSHILEHSVLCGSERYPLKDAFLVLAQGSLQTFLNAWTFPDKTVYPASSVNERDYFNLMSVYGDAVFRPLLAEWTFLQEGHRYEYGKDGEGLSVTGVVYNEMKGAYSSPDSYAHMWSVKAVLPDTPYSYESGGAPEHIPELTWEGLKDFHRRRYSPANCRVFLAGNIPTEKQLAFLNDNFFSLIEGGKAPARIGKQKRWDAPKELIVPCPAGAAGDAPSNDDAPSVDGGEYKSTGFSVMASLRRDR

SEQ ID NO: 96250 - protein, 453 aa, Unknown
  Obtained from environmental sample
  DOMAIN (198)...(334): ATPase family associated with various cellular activities (AAA)
  misc_feature (1)..(453): Xaa is any amino acid
VIKKEQGTGCAIQKKIQKEINEKIEKSQRDYFLKEELKAIKGELGMTTDAKSSDYQRFKEKIDAFKFEGEIKEIVDQELEKFNLMEPNSAEFIVTRNYLDMIVSLPWTEPKSESFNMKNAQAILEADHYGLKDVKSRIVEYLAVRKLRSSLAESTSPVKNKTAVEDKVSSEGKASSEDKTSSEAKISIGTSVSQGSIICLVGPPGVGKTSVGRSIARALGKQFFRFSVGGMRDEAEIKGHRRTYIGAMPGKIIQGLKIVKTKDPVFMIDEIDKMGASYQGDPASALLEVLDPEQNSAFRDHYLDLPFDISHVFFIVTANTLDTIPQPLVDRMEIIQLPGYIDTEKLEIAKRYLVPKSLEKNGLKKNQVKYTKDSLLHIANAYAREAGVRNFEKNLDKIHRKLAMQIVESEEAGNNAVVSTDTVSPDAAPKEARNIQFTIDKKLIEKHLGKPLF

SEQ ID NO: 96251 - protein, 78 aa, Unknown
  Obtained from environmental sample
  misc_feature (1)..(78): Xaa is any amino acid
MDKNVIYSIKSLYRESMNIIGYTFGSGEHSCCVVGALRGNEIQQMAICAQLIDTLKRLEEKRMHSKWQKHNDNSRVQI

SEQ ID NO: 96252 - protein, 426 aa, Unknown
  Obtained from environmental sample
  DOMAIN (295)...(423): ABC transporter
  misc_feature (1)..(426): Xaa is any amino acid
MAIAGYLIARAAEQPEMAALSLGIAGVRFFGISRGAFRYVERLFSHSLAFEELKKFRLHLYKILEPLVPYKLAGVSEGEMLSRISLDAEEYKAWLPRAGVPLFAGTLSLMASLCILAYLNLYYAICFFWASFFLVAISVLAFFIIKKRAGQWGSLNEEFSEFSLSVAQGMAEKKSWGIFGKILNTWENLGNAEEEKRKKTYSVYYVAEMFSTTAPFLCLAGMFFIGQGNYSFPVWIGILLGTLTSFELLQELPSIALQSALSKSAYERLKKTTLNSQLSTLNFQLSSDFITLNKGDALILSAPSGAGKTLLANTIAGFLPSSEPIERTSNFVFLEQEPFLFTGTIRDNLLFANPNATEEEMQSVLQRTGLENFSLDLWIGERGFALSGGERQKLAAARIILCNADLIIADEPGAHLPAEDEKKLLT

SEQ ID NO: 96253 - protein, 476 aa, Unknown
  Obtained from environmental sample
  DOMAIN (1)...(159): Carbamoyl-phosphate synthase L chain, ATP binding domain
  misc_feature (1)..(476): Xaa is any amino acid
DILRSKQENPVLIDKYLSGREIEVDAICDGTDMLIPGIMEHIERTGIHSGDSIAVYPALNIDDELAENIYQVTKKLCMALNVKGLVNIQYVFYDNDIYVIEVNPRASRTVPYISKVTGVPMCELATGVSVGKTLSELGCKSGLAKIPPYVAVKVPVFSFEKLTGVDTHLGPEMKSTGEVLGLGKNLQEALYKGLIAAGYKMKKKGGVLITVRDGDKGEIAGVAEKLDKRGFSLYATRGTARFLERKGFTVNAVDKISANTENNTAALLESGKISYIISTSEKGRDPAFDDVKIRRKACTLGVPSLTSIDTANALADSLLSDYSEINTELVDINKLRDKRMKLSFAKMHGCGNDYIYINCLETEINSPESLSTFLSNRHTGIGSEGVVLILPSDTPEADARMRVFNIDGSESGMGGNAIRCVGKYLYDNGIVDKRHLKIKTPSGIKNLYLSTRDGEVSSVKVDMGPAELRPEKIPVK

SEQ ID NO: 96254 - protein, 418 aa, Unknown
  Obtained from environmental sample
  misc_feature (1)..(418): Xaa is any amino acid
MLLGRMFAEMGNRAHAIQIFEELSKADPNDTEALTAVAELHKEAGSVEKALRTADTLVNLQGKRATAEDLSDLNKSLKLYEGAVHAYSSSVREVWDRNLKLVSEEGEKEITTEDDLSLLMGSNILSGIDEEPEALFTEEADFIPGEDEVDLFLGSESYGEMPESSDFSEEMEKPKYDDPLDALADPALAEEPALEDLARDNTDKAADNKPYEKPYEEMPELAEEIPIESAKEIPKETPEEFLKETLKEIPGEIPKETPIEVSPPPVNNTHPPNYRSYPPPIVLLGISAMPQPQTPPPMGQQPPERMQPRKPEPVPFEEEEETLEELELEQEKEEIEEIPSEEPIKEPVLEKLPEEKISEPIEDNKQEDLSKVLDLLGFLHGLTEALPEERRKTYTEGKLQTAMGSVIDSLKNLTIIKE

SEQ ID NO: 96255 - protein, 207 aa, Unknown
  Obtained from environmental sample
  misc_feature (1)..(207): Xaa is any amino acid
MIVIFAGIVFFQALALLFSMPPETKLQVKEKLLTVAALLVIIVTGGILFLKPIQEQAAQMGGGLLEPKFFSFDFSKLLKLDPEISVKNDLILIVKKENDDHILLRRAVLSGYSKRNGFYQIEELDEKTHPQKLPGRQVSFFPPAFKDEDVNLSTQEYFLVNVESTAFIGMKEPVKVTPYENWDASSFKSAYAVDSLVSGADISDLII

SEQ ID NO: 96256 - protein, 481 aa, Unknown
  Obtained from environmental sample
  DOMAIN (90)...(248): Peptidase family S49
  misc_feature (1)..(481): Xaa is any amino acid
MKLNAKLLVLGAYLLMARPLFAQNIFLELNLNNQKTQNITRSIRPKPALDLFRVIEQAGNDRKIAGIILNISSCQLGQETLWELRNALEKFKAKGKKVCVFISNANLDLYCLATVGDKIVMDDQGVLMLLGYAWGRGYVRHSLEKLGIGARELRYLKFKSAAETYTRDSMSEADRAQYGEILDDIMGITRDTVTRARSWTAEEFDTIINNEFMFSAKNALARGLIDSSGRKEAVLEAVKEMSNGKEAKFFFLYGDAESSLTGSKFIYKPGKAGGLFSRPPVIAVINANGVTDMERGIAAWTLASTIREMSEKRRVKAIVLRINSPGGSAEAADYVAEAVKAAKERVPVVVSMGAVAASGGYWASMSASHIVATPITLTGSIGVIASWFYDNGLNSKLGLSVDTIQRGAHADMMTGMIVPRRDLKPEEEARYKEYILDLYSDFTHRVAANRGMDIERVESLAQGRVYSGLGALNAGLIDSIG

SEQ ID NO: 96257 - protein, 92 aa, Unknown
  Obtained from environmental sample
  misc_feature (1)..(92): Xaa is any amino acid
LAAFFELVFDIPTDHSFTYLIDDKAEAAAGKRAMVAFGKRDCLGYIIAQRDNPPEGIKEETVKKIRRVVDGEPLFDDNDVEIARWMAGYYLC

SEQ ID NO: 96258 - protein, 663 aa, Unknown
  Obtained from environmental sample
  DOMAIN (401)...(428): NAD-dependent DNA ligase C4 zinc finger domain
  misc_feature (1)..(663): Xaa is any amino acid
MTIFKQRIDDLRDKIDEYNAAYYGRSESLISDVEYDALFKELGDLERLYPEHDSPDSPTHRVGNDLTKAFVKVKHAVPMMSIDNTYSAEDVSEWVGRVEKALAGEDIKFLGELKMDGAACSLVYEGGRFVRAVTRGDGIVGDDVTANVRTIKSIPLVIPYTEPMEVRGEVFMTFGDFSALNDSLVEAGQKPMQNPRNTVSGTLKLLDPAEAARRKLSFAAYFLLSSDPDRAVSLHDNAKFLAGLGFPVVERSGLLSGVGEIMSFCGDWESKRHTLPFPVDGVVIKVDSFEQQGRLGFTSKSPRWVIAYKYAPERAATVVDGVDWSVGRTGVVTPVARLRPVFLGGTVVKNASLHNYDEIKRLGLRVGDTVEVEKSGEIIPKVMRVCVDERFAGSAPYEPPAECPSCGSLLAKLGDEVALRCLNRSCGAQLAASIEHFVSRAAMDVRGVGPAVVKQLMDGALIKDAADLYDLTVEKLLTLERFAEKSAANIVEALEKSKARPLDRLIFGLGIRMVGASSARDLAGTVDDISEFYKMEVEELERTEGVGSLTAQSIRLFFDRSENVDMIERLRAAGLNMKGGKGQGGEVSGSFAGKTFVLTGTLERHTREQASEIILRGGGKVSSSVSKKTDYVLAGSEAGSKLDKALSLGVRVISEEEFEGMIN

SEQ ID NO: 96259 - protein, 329 aa, Unknown
  Obtained from environmental sample
  DOMAIN (7)...(280): CTP synthase N-terminus
  misc_feature (1)..(329): Xaa is any amino acid
MNGSAMTKYVFVTGGVVSGLGKGITAASLGRLLKQRGLKVAAQKLDPYMNIDPGTMSPFQHGEVFVTDDGAETDLDLGHYERFTDTCTRRTDSVTSGRIYWNVLTRERQGGYNGRNVQLIPEITDEVKNFLRSDAQGEDFIIYEIGGTIGDAEGLVFVEGMRQFINEVGRANAMLIHLTYVPYFKPSEEIKTKPTQQSVRLLLEDGLSPHIILCRSEARVPMPEKKKIAMFCNVAPEDVISAPDVKDIHEIPLVYHDEGLDGRILAHFGMTAPEPDLSAWREINESVAAAKKEVVVGIVAKYHGFSDAYKSLVEAVHHAGIALKVDAKI

SEQ ID NO: 96260 - protein, 234 aa, Unknown
  Obtained from environmental sample
  misc_feature (1)..(234): Xaa is any amino acid
NAVTRICKELGRVRMVKEVFAAAKETNPAASLLINDFDLSTKYEILIDGCLQAGVPIDAIGLQTHQHQGYMGLERLEEILDRYSHFGLPLHFTENTILSGHLMPQDIVDLNDYQIPEWPSTPEGEERQARELVEMYERLFSHPSVEAITNWDAKDGYWLGAPSGLLRKDNSPKPAYHALMAKIKGEWWTTETLRSDEKGEIAFEGFRGDYEALVRNKGIPFTLGKSQEQIELRD

SEQ ID NO: 96261 - protein, 443 aa, Unknown
  Obtained from environmental sample
  DOMAIN (1)...(307): UvrD/REP helicase
  misc_feature (1)..(443): Xaa is any amino acid
GNVDFGDLIKKPVEILRNEPEVARRFRDRFKVILVDEYQDANIAQSQLLKELYGSDTYICVVGDDDQSIYRFRGAEVKNILQFPNQYENTDIIRLERNYRSTTPILDTAASVVDHNRGRLGKKLKSERGDGKIPVLAFLPDQDTEAEFCAELIKKGATAAKTVPYADWAVVYRTNAQSLGFETEFLRRKIPYRIVGSLKFYEREEVKDTLALLSFLVNHRDEVAFRRMVNKPSRGVGLATVERIVEEAAKEEHNGNLAFAAQSLANHLSAKARAGVDAFLKAIKAGKAALSPSQENYDDSEASGPAAENPLAASGTKNFIPPSAGTLRAGVGLSACVINLVNKSGIAEYHLTRDELTGNQRLGNLQEVANAASLYEASEAGLLEFLEHIELDRSIEDASDGGENAVTLITLHNTKGLEFRRVIITGVEQGIFPRQDKSGEELE

SEQ ID NO: 96262 - protein, 291 aa, Unknown
  Obtained from environmental sample
  DOMAIN (146)...(290): Methyl-accepting chemotaxis protein (MCP) signaling domain
  misc_feature (1)..(291): Xaa is any amino acid
FTVILVAVAIVVTAAIVYFVLHSTTKPIVKVAENLKDISEGEGDLTRSIAISSKDEVGDLALYFNRTLEKIKSLIIIIKNEAVSLSSIGNDLASNMTETAAAVNEITSNIQSIKGRVINQSASVSETHATMEQLVANINNLNGNVEDQATTISKRSAFIQTMVDNIHSVNETLMKNMENVKTLKDASEVGRTGLSEVAADIQEIARESEGLLEINSVMENIASQTNLLSMNAAIEAAHAGEAGKGFAVVADEIRKLAENSGEQSTTINTVLKKIAESIKKIYSATENVLTK

SEQ ID NO: 96263 - protein, 150 aa, Unknown
  Obtained from environmental sample
  misc_feature (1)..(150): Xaa is any amino acid
MQADYMDSLKLTEELFAFLLGEGQKNGNELAELSPPFIKITMEEAFRRWASFDLYKAAESPSAMEEEARKLGLCPPTGLSVPELYDLIFIHAVEPNLKLERPVAIIDYPAFVPCLAKKGSGGALGGKTVERWELYVRGIELANCYSEETS

SEQ ID NO: 96264 - protein, 384 aa, Unknown
  Obtained from environmental sample
  misc_feature (1)..(384): Xaa is any amino acid
MWVILLLFSVLAVFAQTPYLPNAKIEKGTMPLVMERSDSLAAMRKEGHLRLQGNVKFRHDSVTFGTERAHWDKNSDAVYSENGFDFRYPKGNIKAEKGNYMRRTNTAIAENNAEARDSAGKGAFFGEKIIYNRGTEFLEIPLQPLAHYYFMEKGKLDTLAIRSKTMTYDQNKQIAIAADSVLITRREVVITGDTGVYNQKDGFLSLKGNPICHMSDYVVSGDSMFVKLKNNEVESVLVVKNAHGTQQTVSTGKKPAQYSEVFGDTLFLAVKNNKAQRLYVNVNAKGLFYEMDLPNYVNKMNGDRMDISFDLGRMKLAEVNGHAESLVFNITPSRKVDGKNESTGKSILIAFDSTQVSKIKVKGNMASGIYYDMSKMKNKNANDS

SEQ ID NO: 96265 - protein, 60 aa, Unknown
  Obtained from environmental sample
  DOMAIN (35)...(57): MORN repeat
  misc_feature (1)..(60): Xaa is any amino acid
MAYLKETLEDWSFFEGNLEDGTGNGKITYTDGTVYEGDFVNGEYHGKGKLTEANRTVYEG

SEQ ID NO: 96266 - protein, 453 aa, Unknown
  Obtained from environmental sample
  DOMAIN (35)...(320): Protein kinase domain
  misc_feature (1)..(453): Xaa is any amino acid
MAELKAGDTLETTIGFKKVTVKRPKSKKPGEADYLGEGGQGWVYLVDYGDKPMALKWYKPGVLKNPGKFCANLQNNIKKGAPTKSFLWPLDLVKKGDDFGYVMELRPSDYKDFSHILLGRELEGDQIVKLRWPGISPKVTAALNITAGFRALHAKGYSYQDLNDGNFFINLSDPAKLGDVLICDNDNVSEFGYASGIAGKARYMAPEVVLGNADPNPKTDTFSLAIVLFMLFVTNHPLEGKAVLAQPCMTDVWEKKFYGENPVFMLDPNDKSNEPVPDKHQGAVKRWPFLPPYLRDTFIKAFSKEAMKDPAHRVLEKDWVKVFVRMRSETWKCPSCGEVYFADPVTPNPCPSCGKPHAFPFYIKTSSGYNVPAHQRTVLYQCHTTTDAAGEDFDIKTGEMMVKGDEIGLKNISSERWSRIKDGVQAPVEPGRAARLEKGVKLDFGRGASAEII

SEQ ID NO: 96267 - protein, 275 aa, Unknown
  Obtained from environmental sample
  DOMAIN (1)...(271): Domain of unknown function (DUF323)
  misc_feature (1)..(275): Xaa is any amino acid
MGNQSVSGSRPEHQVTLTKGFFMGMYLITREQYIKVMGYDPNSNKDKDYLPVNRVTWLDAIMFCNNLTDMENSEKGTSLQKVYDIDKSSIVLADGSKWQPSSSQTIISAKVTINWDANGYRLPTEAEWEYAARGGKGSPGNFDWSGSNTASEVAWYGGTGGTVTDRVTHPVGEKNPNILRTFDMSGNLCEWCWDEFGSGYYTTSSPSIKDPKGPGPDTVVINNPGQDTPRVRRGGSWNHGINNTRTFIRDSFQPTDINMQNFWTIGFRVIRGPLQ

SEQ ID NO: 96268 - protein, 243 aa, Unknown
  Obtained from environmental sample
  misc_feature (1)..(243): Xaa is any amino acid
LNNRGLPLADSDIFKAKIYKSYKSEEEKKAFANTWKEMTETCKAANITIDDMFRSYMHVKRARNGDNSKEVGMRKFYENNKNYLVESDLVEEIKKLTIFWFYANKQEVFPDANEDGFSFSIETKKWLHCLSWYPNEYWKFPVSVFFLKYKNDENFDNKFCILLKKLITMLFTRFIIQPTVNAIRDDIFKYYISIEKETNFDIKTSFNKSELKRKFDEDIFGAPRIERALILLDAYITLGTNDL

SEQ ID NO: 96269 - protein, 326 aa, Unknown
  Obtained from environmental sample
  DOMAIN (100)...(323): Binding-protein-dependent transport system inner membrane component
  misc_feature (1)..(326): Xaa is any amino acid
MAVMLFLLGLAVFGLMALAPGDIVDQIMMQQLFSENQGKAGQNTQSMSADQLATRRTELGLDQPFYVQYFRWLNRVIVHKDLGVSLISRAPVSFLIASRILNSLLLNIISLVLITFFSFAAGIYFSTKAGTKADYAVTFFALVLHAFPGLLLLILLQLFASVSGLFPVTAYPPFPFSQAPGKFVFSYMHHIFLPLFASFLSGIGGSLRMIRATMLDQLGQPYIMSLRSRGIAEWRVYFAHAFRNTLNPYITGSANLLAGLFSGSLILEIIFAYPGVGRLMYEAVLQQDINLVLANIMFISFLVLTGMVLADIMLALVDPRIRYGKE

SEQ ID NO: 96270 - protein, 60 aa, Unknown
  Obtained from environmental sample
  misc_feature (1)..(60): Xaa is any amino acid
MHAKAIAVANQKGGVGKTTTALSLGAAMAMRGQRVLIVDLDPHVCASVHLRFYPDDCVYT

SEQ ID NO: 96271 - protein, 134 aa, Unknown
  Obtained from environmental sample
  misc_feature (1)..(134): Xaa is any amino acid
MDIHDDAQTAMTLSRFSSEDPDELRSAASDAATWGLVEAVPRLVRLIQSSNLGVQEAAEEALRTIRGPEAVRGVAPLLRSDNASVRNSAMDILREIGEDDIKVLAGLMHDQDPDMRIFAADILGTSGEHSAITL

SEQ ID NO: 96272 - protein, 507 aa, Unknown
  Obtained from environmental sample
  misc_feature (1)..(507): Xaa is any amino acid
TPSTTGIINGTGTGAPTNGTIGGNTISTVAGSTVVVIVEDPDVSKVEFGRNGAANDNGTVTWTNLTKTNDANTPSSLTNKRWVGTLAQANTTTSYRFWVRITAEDGTTANIYRYTLTLGGTTSYGTLTSLSIGGQTLTGTALGTTAGWWNTTVAPSLTAGEVTLPSGDNVAIAASWSLGSTNSAYSYVIIPHTITLPLREGDFTGAYTSGNPSSISGLNDGDYILLRAQCTSGSATSVPIVGNALIKVNIQPPAPVWGVTAGPGSSYTFPILTPGYTQQPYRTVTLSNSGNQPTGNLTVSLTGTNSASFEFESAVNTVSSIAVGQSATIMVRPKTGLAAGNHNAAINVSGGNNISASYPISVTVSNQRPPSYIAVTSDVHWDRSTSSTTSGQTQIFESWMTKLKTHYPNNLDYMLFGGDNGSAYTTGVTHWNNIAELIPIADSFVTSGFIRNSNIFITGNHEYQNTAGGALLDNLDKPLTLSGSSFTTVRSVAERLNYNKHFQAVPN

SEQ ID NO: 96273 - protein, 219 aa, Unknown
  Obtained from environmental sample
  DOMAIN (4)...(219): Type I 3-dehydroquinase
  misc_feature (1)..(219): Xaa is any amino acid
MAKICICLTGKTLARDLELLESNRKYVDLAELRVDCLDPDERFHIRRFPEMAGLPVILTVRRSLEGGHYVGGEGSRISLLAKGLAYAAADQRRNFAYVDLEEDLNVPSLEEAARTFGTRIIRSWHNMEGVDQDLSGKIKKLRRVGDELVKVSVTANSLADVVRVYKAAKETAGIDKILICMGEYGVNTRILSEFLGSRISYTSQACDGLNSAAPGQLEP

SEQ ID NO: 96274 - protein, 267 aa, Unknown
  Obtained from environmental sample
  DOMAIN (15)...(262): ABC transporter transmembrane region
  misc_feature (1)..(267): Xaa is any amino acid
LRILIKYLKPFTLLLFLAVMILFLQVFCDLSLPNLMSRLVNSILAQSAAQNAPETSAEDSNIIRLGLQMLIIALAGGAAAVSVSFLSTRIAAGIARDLRFAVFQKVESFSSREFDTFSTASLITRCTNDINQVQGIFIMGIRMICYAPIMGIGGIIMAVNHAPGMSWIIVLAVVVLICLVIALVSLVMPKFKMIQNLVDRMNRIARETLNGLMVIRAFGAQDHEKKRFDGVNRELTKTSLFVNQMMILHMPLMQFIMNSAIIPDIWT

SEQ ID NO: 96275 - protein, 346 aa, Unknown
  Obtained from environmental sample
  DOMAIN (206)...(345): ABC transporter
  misc_feature (1)..(346): Xaa is any amino acid
MDLFMSLMALILIPVIFVFSFLYFRKVSKEFTKADIAEGIMQAAAQENYTGVRVVRAFGREFHEMEKFSEKTKTYQDIWIRIGKMLGLFWGAGDFMAGLQLFIIVGAGIWRSVQGRLTPGTFLAFYTYCNWMIWPVRQLGGILSDLSKALVSAGRVRDILQTEPETDPPDALKPRIKGEICFQNVSFNYGKGEPVLRDISFTLKPGESMAILGATGSGKSTLVHLLSRLYDLKDSDGLITIDGIDIRRISRPYLRRHIGLCLQEPFLFSKTLRDNISIARPEMEFAELRAAAAVAMVDETIEDFAEGYDTIVGERGVTLSGGQKQRVAIARMLAGNAPVMIFDDSL

SEQ ID NO: 96276 - protein, 440 aa, Unknown
  Obtained from environmental sample
  misc_feature (1)..(440): Xaa is any amino acid
NIISCNDGDYLRFSKIWNAARPVGLLAADYEDILTEVFSEIPREKLNKFIKPLSEFMTIVADVKDSTVITRLIIKDFESSGLANHVNGRSLYNNAIVNIFARLNTAGRGLTDQEITLAWLKTGWREVNVESETKLDCGEALEGLLAELNDNDAIKQMSLDNLVNILSLFWIIIENSGDNKSKLVLDKKDLVDGEIMKDIGKCTYKNWELIKEVIIDCNEIFEKRSLNECFDRATNAFYIICGWKFIAAISSQQNEGRVRETQCKFDTQINTAFDNFIDKWFFSTQLSETWSNLSNYPNYVGKLCKLHKIIVSCHDPNQSINSLSGELDAILSDLRQSTVRRINDLRAYERKEVIIYKNTLWFWNRLTLDRWSEVQKPMKRNRAAPRLEVDHAIPVDIWEEKVEDEYPISSSRDSTGQEISFDINGVSYTRSSLLSEINIW

SEQ ID NO: 96277 - protein, 315 aa, Unknown
  Obtained from environmental sample
  DOMAIN (10)...(298): Dihydroorotate dehydrogenase
  misc_feature (1)..(315): Xaa is any amino acid
MSDNTNNKLDMSVEIAGVKFNNPVIASSGTFGKGREYSNIFDISLLGGICTKGLTFTPRSGNPGERVWETSSGLINSIGLENPGIKSFIENDLDYMRRLGPVIIANLSGSSSDEYVKGAAMLDNSSVDMIELNISCPNIKGGGIAFGLDPGTSAALVVAVRRVCRHKPLMVKLSPNCPSIASVALACVNAGADALSLVNTFRAIAIDTVKRKPVFDNIIAGLSGPAIKPIALRIVWELYDSLKDLRVNIPIVGMGGISCTNDAIEFLMAGSRAIQVGTSTFSNPHTMLEIIDGIHKYMAANKIAKLSDISIRDKY

SEQ ID NO: 96278 - protein, 618 aa, Unknown
  Obtained from environmental sample
  misc_feature (1)..(618): Xaa is any amino acid
VSLKENDGSVMEAAIQIRQNSETLFHFERSRLNNLFMEAVKYPLVVVCAGAGYGKTSAVHDFLEKYEATTAWVQLTDMDNDRAHFWETNVHAIGQINQDLAKATNKFGFPDTKEKLNYYAAIMQKHTDLKRRIIVFDDFHCIDDPLIIRFVEECVLSKIPLGTSVFLISRSPPHIKVASMIYKDQIFNISEDDLRFTESELAQYFHSRNNSIQPESLREIIQDTGGWAFAINLIARSFQKAPGYGGYLQNAMKTNIFQLIETEIWNEISERLQVFLIRLSLIDHLSIDLISILAEGDETLIAELERQNAYVRRDSYVNAYLIHHLFLEFLYKRQGLLSEDQKQKTYAVAGDWCSKNGFRIDALSYYEKTKNYQGIVSILDELTTQMPHSIAQFAAPILDRAPEDTFDKVEFLAEMHLRTHMCQGHWHKSLDLLRFYEAKFLKLPEDDIVRNRTLAQLYDCWAYIRALMSTIDDIFDFGIYIEKANKYAPNMGEPSKFGPYYPGTWSNYSGSSRKGSPDEFVAAQTRIVKSMPRVFFEIKLMGQLELLQGELGFYRGDVNSALSLLTLAVKEARAGKQFAFMNRALIYMLRIAVSQGNFVLAEQALKEIKAQLDETAYL

SEQ ID NO: 96279 - protein, 316 aa, Unknown
  Obtained from environmental sample
  DOMAIN (253)...(310): Bacterial regulatory proteins, luxR family
  misc_feature (1)..(316): Xaa is any amino acid
MGQLELIQGELAFYRGDLNAALSLLSLAVKEARSGKQFAFMNRALLYTLRIAVSQGNFALAEQALKEIKAQLDETAYLHRFIDYDIAISWYYCFLGMPEKTTGWLQEDFSPYIHAAFIENFGNQIKARFCYATRNFSPILAYIEEMKARESILFGRIEMLAMEACIHYKIKNKKKAFSSLAEAYENAHPNGILMPFIELGKDMRTLTAVALKQPGGKIPKPWLEDVNRRAASYAKRRTHVIAEYKKAYGINDGIVLSPREAEILTDLSHGLSRVEIATNRNLSVNTVKMVINMLYTKVGAENLADLIRIAVEQKLI

SEQ ID NO: 96280 - protein, 331 aa, Unknown
  Obtained from environmental sample
  misc_feature (1)..(331): Xaa is any amino acid
VSQKESYTGSIEAVLQVRQNGETLFHFERSRLNDLFMEAVKYPLVVVCAGAGYGKTSAVHDFLEKYEATTAWVQLTELDNERAHFWETAVHAIGQINQTLATATNKFGFPDTKEKLKHYTAIIQNHIDMKRRIIVFDDFHCIDDPLIIRFMEECILFKMPPGTSVFLVTRTAPRVNLAGMIYRDQIFDISENDLRFTESELAQYFHSRNNYIQPESLREIMRDTGGWAFAINLIARSYQKAPGYGGYLQSAMKTNIFQLIETEIWDEISERLQAFLVRLSLIDHLSVDLISLLAEEDETLIAELERQNALVRRDSYVNAYLIHPLFLEFLR

SEQ ID NO: 96281 - protein, 318 aa, Unknown
  Obtained from environmental sample
  DOMAIN (3)...(311): MraW methylase family
  misc_feature (1)..(318): Xaa is any amino acid
MTEFLHTPVMLEETLNLLSPRGKDELMIDCFTGEGGHSYYFLSRFKELKMVCIDADKDILAIAEERLKEFKDRVYFYYGWSHDFFTEYPSELKRPDTIFFDLGVSSYHYKKSGKGFSFEKDEYLDMRLDTSGGVTAADLLTRLPERELANLLYNNAGERFSRRIAARVINQRQKGNVTTTSALAELVERAVPASYRHGPIHPATKTFQALRIAVNGELSRLPSLLEAALRTLEPGGRLAVISFHSLEDRIIKQFFREMNKDCTCPPQAPICRCEGRRSINVLTKKGISPGKEEIERNPPSRSARLRVVEKILDEDAHD

SEQ ID NO: 96282 - protein, 419 aa, Unknown
  Obtained from environmental sample
  misc_feature (1)..(419): Xaa is any amino acid
MTVGSPYGTLPNVTRAGYTFDGWYNAASGGAKIDPSGPFSGNVTTIYAHWTAASGITVTFDSRGGSEPNPASKAVTFGSNYSLPAVTRPGYKFDGWFTAASGGTKVDGATKVSNTANHTLYARWTANSITVAFNANGGVAPSPANKALTFDSPYGTLPTVTRGGYKFDGWYTEASGGTKIEPSSRFTGNVTKLYAHWAVTVTFNSNGGSTPNPATKQLTAGSRIGALPTVTRSGYIFDGWYTAATGGTKLTADHSYSGTYTTIFARWTANAPAPKTDPAPAPATPDTKTVTFNSNGGSAPNPATRQLTVGSRFGALPNVTRSGYTLDGWYTASSGGTKLTADHSYSGSYTTVYARWTANAPAPQPPAPAPPQPAPAPAAPVTKTVTFNSQGGTPSSTTKQITVDSRFGTLPNVTRDGYT

SEQ ID NO: 96283 - protein, 434 aa, Unknown
  Obtained from environmental sample
  misc_feature (1)..(434): Xaa is any amino acid
DLPRVGSTNFNIDYRLAPQSSSTLRFDSNKWKEYSDIDWGDISNIRTNFRGDANVNLNFSHSEGIYSNSFSFAGNGAWSQFSYLNEEAQEYLSGTETDRRQKISNDKLQEARSSFFSTSYGATTTIRPFYKNAIFGQSSIAYNLRGIAVRSKFIEKDLSAITNPGDKADLLESWAENPEWELEWADWDKDKISAHSLAATLSASVLEKTQTLSMTADLPPRDAKLSWNTGINIWITSTNASWGIQLPEKREEWKLDPFTFRESFNFGSYGSLSFNMTMDTEGWDSPETGKMEKRLSSITTSLNLTKWGVSASYSASRMLGYEYKVGTSNADTGWFQRTGDENMILRPMNFNLSYSKNIAMKELWKKNIDFTVNTKSSLNINLQQYTSSNFNFSLGFTLGINRLLSMSVAAESSNSRIYQYFHDWPGFDDAPIEL

SEQ ID NO: 96284 - protein, 623 aa, Unknown
  Obtained from environmental sample
  misc_feature (1)..(623): Xaa is any amino acid
MNLYAQEEPPLGQAPPEGAPFEQTPPAVEVRILTPEQNRIDMDIRTSTLSELAAWCRSLGLSEGGTSADLARRLRDYFNLSGQAPQEGAAPSGEDKRKVITIESARSTEYFKIEAVDEDYARLSGEVKISLKDGDAVHQISAWNILFNRTRNILTASGGVEYIKTEGDKIETFRGDSITVDIDNWSSVFLGGVSERSLLSDNTTYLFAGTVISRDEEEVTVLNRATISSANNPESLWSLNASRVWLLPGSDFAILNAVLKVGEIPVMYIPFFYYPADEVVFHPVIGSRTREGHFIQTTTYILGRPKASSTSQSSLTKILGNSADMEKKREGMFLRSTGKKVKDADKVSLKAMFDHYVNLGTYIGADLTLPAYKILGITNLSVGIGLTRTLVLKDGSYTPFFNNDDETDWNHSNLFSFDVPFRFRFKTANSISGKYGSFSWSIPYYSDPFVDGDFLKRSEEMDWINMIQQGAASMEAQNTSESRQSHEPWTFTGQLNPKFPNMAPYINSISIGTISSTIAFREVRNNYSTNDIKYYSPSSFFFAPDTATLYQVSASVSGAPLSLGGNRASRSSAPGTDGVEAEDPLKGIGVPRSPFEAKTEEKNIIKDTADRLVPPALTQRFEL

SEQ ID NO: 96285 - protein, 304 aa, Unknown
  Obtained from environmental sample
  DOMAIN (1)...(304): pfkB family carbohydrate kinase
  misc_feature (1)..(304): Xaa is any amino acid
MRKSSFLALCMNPTLQKTLVFSGLVTDSVNRTGEYRLDASGKGVNVCRVLTQLGKEACHLTQLGGTLRPLFLELCDRDGLSVEWVESASPIRFCYTLIDKEQKTVTELVEESEKVGTHTGERLFEMFLKLIPDYSVLIISGTKAKGFSDNLIPEMVHTARERGCRIILDVRGQDLLKSLPFGPNLVKPNLYEFISTFAPELLTEKNTDTVKKTIGKIWAELYEKYPCALVLTRGAEPLWYAEKGELEEYAFEKVEPLNTTGSGDAFTAGLAAALEEGASLLDAVAEGARCGALNAALLKPGVIR

SEQ ID NO: 96286 - protein, 210 aa, Unknown
  Obtained from environmental sample
  DOMAIN (2)...(202): CYTH domain
  misc_feature (1)..(210): Xaa is any amino acid
LAIEIELKAHIRDNLQNIETLKRLLFEKAEYLCAFEKEDTYYFPSGPSDIPRSGIRLRGETKTLPDGTVNKAAFVTYKTKEVRDGIEVNDEKEFEVCSSQCSPIIVFDEFLKMAGLEPGFSKHKKGWAFSKDEIYAELLEVEKLGWFLELEIVLDDIEDIEGDTTKETTIEEKKKMLMDFLSDIGIEKNAIESRYYSEMLKELAEEPSGS

SEQ ID NO: 96287 - protein, 88 aa, Unknown
  Obtained from environmental sample
  misc_feature (1)..(88): Xaa is any amino acid
MDTAINAANEKLNFVTRDKEFLRYYHLRQMAMSDRTTEINAAIEKGLQKGMKKGRAEGRQEGRAEGILEIARNALAEGASIEFGRRLP

SEQ ID NO: 96288 - protein, 654 aa, Unknown
  Obtained from environmental sample
  DOMAIN (558)...(636): BRCA1 C Terminus (BRCT) domain
  misc_feature (1)..(654): Xaa is any amino acid
MKNDAKRIEQLERDIKKYQKSYYGGEAEISDGEFDLLWDELKALAPNSPVILGIGDDADNVDGFPKAKHLIPMGSQEKAANPQEFREWADKHPMPKFIAQYKLDGASLELQYEKGAMVRAVTRGDGNIGDDITANALRMAGVPGKIDLPFSGGVRGEVVMPREIWRQKYPSKANCRNAANGIMRRKDGCGCEDLKVITYDATASDNDGYFPDEVKKIEWLGKRGFETTVTKICKSADEVISYRDKVAKTRDKLPFDIDGLVIKDIAIDMADLRRQRPEKQIAFKFELETAFSILRKVEWSETGATYTPIGIVDPVRLAGTTVQRANLNNPGMIRSMGLQIGSAVSVVKRGEIIPKIEGLAPSGALPLESLEAKEPIEFPVNCSVCGSALVDSGTRLYCPNTGCAKRLLHRLEKWISVLDIRELGDKLIRQLFDKERVRRIADLYTLTAGELADYERMGELSAAKVVRHIQTKRELSLAAFVAGFDLEGVAETTMDKVASAGFNTMEKLRKASAEDLAGVYGLGEITAKVIVEGLAETAAEMDAVLASGVISIAPPPSEESQPMRGLSFCFTGELASMKRSQAEEKIKTLGASAKSSVVKGLSYLVTNDPESGSSKNKKARELGIPIINEDEFLALLASPAGVKNQATSVQGELF

SEQ ID NO: 96289 - protein, 313 aa, Unknown
  Obtained from environmental sample
  DOMAIN (1)...(282): Periplasmic binding proteins and sugar binding domain of the LacI family
  misc_feature (1)..(313): Xaa is any amino acid
MKNICLLLEGVAGLYYASLWPGIVDCAKENDCNVVCFAGGALRISPQNPYEVQRNVIYNHIDTSKFDGVIISGTLNNFISEMEFAKFMERFSALPTVSLAPALEHIPAVIVDNSSGMKGLISHLVHSHNCKKFAFISGPKGNLDADQRLDFFRKYLKELSITCAEERIAVGDFSRSGGYKATLELLKNGIEFDALVSANDETALGAIEALLENNVRVPEDVAVTGFDDIEESALTTPPLTTVRQPLYEIGRTAVELLITKMKGEEVPRRTALQTPLSIRQSCGCFINPNHTLDRHTFSIIQRLSNNIDHLKEH

SEQ ID NO: 96290 - protein, 838 aa, Unknown
  Obtained from environmental sample
  DOMAIN (5)...(276): Periplasmic binding proteins and sugar binding domain of the LacI family
  misc_feature (1)..(838): Xaa is any amino acid
LLEGVAGLYYASLWPGIVDCAKENGCNVVCFAGGALRISPQNPYEVQRNVIYNHIDTSKFDGVIISGTLNNFISEMEFAKFMERFSALPTVSLAPALEHIPAVIVDNSSGMRGLISHLAHLHHCKKFAFISGPKGNLDADQRLDFFRKYLKENGIACDEERIVTGDFSRSGGYKATIDLLRRGIEFDALVSANDETALGAIDALLESNVRVPEDVAVTGFDDIEESELTTPPLTTVRQPLYEIGRTAVELLVTKMNGKEVPRRTSLPTPLSIRQSCGCFINPNHALDRRTFSIIQRLSNNIDHLKEHLTSELFSFVAMEMGASIDDEDLREIASSFFDEVEGTRTGVFLSALNRMVRAATLAAAESNDILQWQKILVTIRKFTIGLDDAKTETADNLLHDSYNLFSEAAARQQAHKRLQAEQKAALMRSVGHSIANSFDIPTLSQAIVKMFPRLDINNFSLSLYDKSTKEFLNSKPIIALRRGKKDIPTQDMFFPTKDLVPGGLRDSEQPYHVIVQPLHFKNEQLGMAVFKDGPLTGYIYDIVGEHLSGALQGALLMKKTQEQAVTLEEANKELEKLRQQEHLRLEAIQRELQIGRTIQESFLPESMPQPEGWESRAFFMPAREVSGDFYDAFALEDGRIAFVIADVSGKDVGAALFMSLIRSLIRAFSEHSAEGAANPLNAVELTNRYIVHHHHTSKGRFMYATMFFALVDPESGEVAYINAGHNPPALLQPEGKIAKWLPPTGPAVGVGIKDDLKYREEKLTLQPGEMLLMYTDGVIEAKNEKGEFLQQKRFAELIEKPYSSLDDVVDRVKDALKEHCAGADPYDDVTMVGIYRKG

SEQ ID NO: 96291 - protein, 330 aa, Unknown
  Obtained from environmental sample
  DOMAIN (158)...(292): ATPase family associated with various cellular activities (AAA)
  misc_feature (1)..(330): Xaa is any amino acid
EIPYSVFTKALELNEITDVTIYDNNIIEGIRRNEGNRQLFRTQIPYQDPGLLQMLREKGVSVSGATGGISPLRLFLDILPWIIGFGFIWFMFRNMQGSGNKAFQFGKSRAKRYQDEGKKITFQDVAGQKDAKYELEEVVSFLKDPQKFTKMGARIPKGVLLVGMPGTGKTLMAKAVAGEAKVAYFHMSGSDFVEMFVGVGASRVRDLFDQGRRSAPCIIFIDELDAVGRTRGAGYGGGHDEREQTLNQLLVEMDGFDSKDGVIILAATNRPDVLDPALLRPGRFDRQVVVAMPDIKEREDILKIHAAKIPLDGEVDLSRIARATPGMSGA

SEQ ID NO: 96292 - protein, 470 aa, Unknown
  Obtained from environmental sample
  misc_feature (1)..(470): Xaa is any amino acid
DRYAQWAKNTLEMGLWSEAHSGLERAADFIDVSSDIGYLLALTRAHENKPRPGILEALNMALLVDRWIIYNAELASLLKAETLIALRFYPEALQELSIIRKSPMQASLTLKALVNYRLPDFRRYMRETLDFYPRETEPVRIFLNFLSKEEAAGRNPEREELDLLEIIIRRLPILIQNDPELAWMAAPFIRDSEESRRLVMAYRAVNKPALHSIPVSLQLGVIDEETALDELFNLSVYFLDIALLDKVWELFRSENTKTLLKNRLASYTGMITEDIDRDGIPETTAMYNRGLLEYSFNDVNQDGIYDLVIYYEAGIPWRGTALLPPENSGRKQAEIVWERYPSILEVRMDGVKFIPRPLDHFFNPVRFVELFGSRTLFPRWDPLNPPLTRRVLVSKSLRVERPSLEFPGGIEIVELEQGIPVRAREYVGSLMVSETDFLRGRPQHQRLDLDFDGKMDTVRFFKKEYRQMSS

SEQ ID NO: 96293 - protein, 495 aa, Unknown
  Obtained from environmental sample
  DOMAIN (35)...(228): Calcineurin-like phosphoesterase
  misc_feature (1)..(495): Xaa is any amino acid
KEGFRYVHILRGQEEVDSAEIVRTKLWNDKRDETGPFDIIGDIHGCYDELTELLEKLGFSVDRKSHTAQPPSGRRAIFLGDLCDRGPANADVLRLVMNMAESGAALCVPGNHDVKLLRKLRGSDVKLTHGLDLTVKELEQESQEFIDKVTQFIYGLVSHYVLDQGKLVVSHAGLCEKFQGRSSGRVRGFCLYGDTTGETDEFGLPVRLNWAEEYRGRALVVYGHVPSAESLSLNNTICIDTGCVFGGKLSAYRYPEGELVEVPAKREYYAPIKPLNYGAAITANGCNEPDIADVLGKRRVNTRMYRDVAISEEASSFTLEIMSRFSANPRWLIYLPPTMSPSGTSKLDSFLEHPLEAFGYYKKHGVSKIICEEKHMGSRAVIVLCRNSETAKTRFGIDSDSLHEDVPGIIYTRTGRHFFAGAEKTHEQAILSRLQTALNNSGFWNAFSTDWVCLDTELMPWSAKARALILEQYAPTGTAGRGGLAKAVSALAAAK

SEQ ID NO: 96294 - protein, 322 aa, Unknown
  Obtained from environmental sample
  DOMAIN (117)...(322): Glycosyl hydrolase family 3 N terminal domain
  misc_feature (1)..(322): Xaa is any amino acid
MRLTPVFTIFLLLLFFACSGEKNTAPEPTEEETAEIITPNVDSVKRERAARIASALDDSQLAAQVIITGIDGKGSLTRDMKSLLSECPAGGVMLFRYNLNTDNSAIQKLIAESVALIMEGVTIPPFVVVDHEGGKVNRFLPGAADLPAAYSYWETAQNEGRGAAIAQILRDSFNTGKKLKRLGVNFNLAPVAEFLNKDNSAFLEGRSYGPDPVFTVEAVRTFIVGMEFAGVICAVKHFPGSAGADPHYFPGKLNGGKDALAELVSPFAALIQGNQTRAIMVSHSAVPAWDTKNIASLSPVIMGEWLRQELGFKGLIISDDFP

SEQ ID NO: 96295 - protein, 584 aa, Unknown
  Obtained from environmental sample
  DOMAIN (357)...(554): tRNA synthetases class I (E and Q), anti-codon binding domain
  misc_feature (1)..(584): Xaa is any amino acid
MINENDAGAKSDVLGTDFISEFIKEDLAAGKFNHVHTRFPPEPNGWLHIGHCKAFYIDFTMAERFGGKCNLRFDDTNPEKEDISYVEAIKRDVKWMGYDWEDREFYASDYYEYLYELAVKIIKKGKAYVDDLSDVEMSEYRGTAVQDKNNITITPPGKNSPYRDRSVDENLDLFARMRAGEFPDGARTLRAKIDMAHPNLLMRDPVMYRIRRETHYRTGNSWCIYPMYDFQHPLSDAREGITHSLCSLEYEIHRPLYEWFIREAEVFPSRQIEFARLNLTYTVMSKRWLLKLVQDKYVSGWDDPRMPTIAGLRRRGYTPQAIRSFVSQIGIAKTDSTVDIAFLEYCLREDLNKRSLRVMAVLRPLKLIIENWDETKTEELEAVNNPEDEGAGSRRVPFSRELWIEREDFEEVPPPKYFRLFPGNSVRLRYAYIVTCTGFDKDADGNINAVRCTYDPQTRGGNAPDNKKVKGTIHWVSAAHAVPLEVRLYDYLFKTEKPMEISPRPDGSAGEFTDNLNPNSLEVIENTWGEPSLANAAHSDVCFQFERLGYFARDPDTGRDGRPVFNKTIGLRDTWAKIANQNTK

SEQ ID NO: 96296 - protein, 81 aa, Unknown
  Obtained from environmental sample
  misc_feature (1)..(81): Xaa is any amino acid
EHQIELLDFLKAWVKENDKTLIGVFHDFNLARRFGDTALVLHNGTTAAAGNTDDVLKSKTFNDVFGIDVRTYMLGSFEKWK

SEQ ID NO: 96297 - protein, 473 aa, Unknown
  Obtained from environmental sample
  DOMAIN (149)...(176): 4Fe-4S binding domain
  misc_feature (1)..(473): Xaa is any amino acid
MSHHIPDPNKNVSLTIDGMAVTVPEGTKILEAARKANVIIPTLCDHPDLCRRAVCRLCVVECDGKGKLLTACANDVWEGVKIVTNNSRIISIRKTIVELLLANHPQDCLNCAANTDCKLQSLARIYGIRETPFKCEVINRQPPNGQSGLIRDMDKCVKCGRCVEACQEIQTVRAINSSHRSVNYRISTAYNQPYTDSSCVFCGHCETVCPVGAIYEHDQSAEAWAAINDSERRTAAQFSTTLCAELDNALGLHAGTVSPGKTVTALKRLGFDQVYDAQFTIDLAASELNYELQNRVKNGGKPLPIISACSQSAVKFIENFYPDLVANLSPCRSPRVIFGSLVKEEKTTVISIEPCISNKSKIKSANEPDLTLTVKELARMFRLAGIDFASLPESPFDSIKTEIDLIHMKEQALDIRTKCLVANGLGKARTILDAVRKGECDAALIEIRSCPLTDGRARCASIGSIIPEAIQII

SEQ ID NO: 96298 - protein, 487 aa, Unknown
  Obtained from environmental sample
  DOMAIN (281)...(398): Response regulator receiver domain
  misc_feature (1)..(487): Xaa is any amino acid
MSSSEIGNEGAMVIFNDVTAIEHAREDAELASAAKSEFLLDMSHEMRTPLNAIIGMTAIARKSDSAERKEYCLKKIEDASTHLLDVINDILDISKIETNKLELSLESFVFERMIQKAVNIINYQVEEKHQYFSVNLNDNIPHTLTGDSKRLIQIITNLLSNAVKYTPEGGSVHLDARLAATENGVHTLQIEVTDSGIGISAENQSRLFHSFHQTDANSSHKFGEAGMGLAISRHLVELMGGRIWVDSELGMGATFGFTFLAKPGDESENKILSNNSYWANKRALVVDDAPNILVFFRSEASRLSISCDVMLSGEAAIEQIEKNGLYDIYFIDWKMQGMNGIETAGKIKGLNAGKPRPSIVIMSSAAEWKLIEADAKAAGVEYYLQKPLFRSDIVDCLNNFFGLKNIEESQAQEIKDNFEGFRILLVEDIEINREIVLAYLEPTGLTIDCAVNGKAAVKMFTSAEKPYDMIFMDLQMPEMDGYEATYK

SEQ ID NO: 96299 - protein, 251 aa, Unknown
  Obtained from environmental sample
  DOMAIN (31)...(222): ABC transporter
  misc_feature (1)..(251): Xaa is any amino acid
MSEEKLKVTNLNLFYGEFQALKNIFFDLNTNEAAALIGPSGCGKSTFIRVLNRMNDLIPSCRITGEVILDGENIYGSMDVSELRRRVGMVFQKPNPFNMSVFDNVAYGRRMQGLKDKRKLAELVELSLYKAALWDEVKDRLRKSALSLSGGQQQRLCIARSIAMEPEIILMDEPTSALDPIATGRIEGLIGDLKKDYTIVIVTHAMHQASRVSNKTAFFLLGELVEFGDTRDIFTNPRDKRTEDYISGRFG

SEQ ID NO: 96300 - protein, 455 aa, Unknown
  Obtained from environmental sample
  DOMAIN (123)...(202): Toprim domain
  misc_feature (1)..(455): Xaa is any amino acid
GSRRLLQSRGLSAETVKEFGLGYAPDEWRALTDYLVGKGISPRRIAECGLAVSKDGAPPYDRFRNRVIFPLCDLNGRVIAFAGRGLDADAQPKYLNSPESALYKKSGVLYGLYKARDAIRELEYIIIVEGYMDYLTLYQAGVRNAAAASGTAFTEEHAHLIKRFASKATLVFDGDRAGLSAAQRAALILAPLGLQVSILALPGDDDPDSFVKREGAQAFLSLLAKARPAADFLIDKLMSESDGSPHGKSKAMDELMPYARALSDEVVRHDFLEKLAQRLRIDRRLVANRFSGGADYRLSRGGAQPEIRQDQGRPLKVGALEEGFLSMLIAAPELIATARQYLAPEILTDPIAENVYSIILETYDRDGGLKGLLDACLDDAGLKSFVSMLAVKPVILEHIEGELVQKISLLRQKYFKARIADVRAELAACSDGDKGPLMERLRYYGEQLKESDLRE

SEQ ID NO: 96301 - protein, 285 aa, Unknown
  Obtained from environmental sample
  DOMAIN (5)...(102): CHC2 zinc finger
  misc_feature (1)..(285): Xaa is any amino acid
MSPRYNDDAEERVRQRIDMVAVVSRYVSLKQRGRLMVGLCPFHKEKTPSFQVNPEMGFYYCFGCGKGGDVFKFVQEMEGLDFREALETLAETVGVELPRYERRESSGEGSRGGGASKTDLLGVNALAAEYFQKRVRDNPRAVDYFKSRGLSAETVKEFGLGYAPDGWRGLIDYLNGKNITPQRVVECGLAVSKDGGSPYDRFRDRVIFPICDLSGRVIAFAGRGMDADAQPKYLNSPESALYKKSGVLYGLHKARDGIREHGYIIIVEGYMDYLTLYQAGIRNAA

SEQ ID NO: 96302 - protein, 317 aa, Unknown
  Obtained from environmental sample
  DOMAIN (170)...(315): Phosphoenolpyruvate-dependent sugar phosphotransferase system, EIIA 2
  misc_feature (1)..(317): Xaa is any amino acid
LEILRRQRVDAEQIRFACAASATALTRRFAALIARQFHPDRLRERLKRLAEVQPLHLLHKFEDVAAFAATEAVVEAHLRIDLKGGRLLLVEGAKTHHQAPALFQTDVAGDDGDHVDPLPYPLLCVVIVSGAHILQKYNNDRYASYYFRYIDVGVDVDFLKTEQNMNNISDLLDPDCIQLELAAHGKEAVIKELVHLLADAEKLEGSADHYVVEVMGREKISSTGIGNGIAIPHVLVAEVDEIMMAVGRSAKGIPFDSVDGKPAHLLFLIIGPQGRNNEYLKILSTLSRYLNDRAFFEALMKVETPEEVITLVEERER

SEQ ID NO: 96303 - protein, 152 aa, Unknown
  Obtained from environmental sample
  misc_feature (1)..(152): Xaa is any amino acid
MQVKFSEKENIKTNGFVCDPTGDKKAEIESGILQKYKGRLLVMASNECALHCRFCFRKNLEKKKIQNLPAKLHKILREDKSIKEVILSGGDPLMLESNELQAIFDSIPKNIRIRIHTRLPVALPSRFTPTLLQLFKQFGQRLIFVVHGIILM

SEQ ID NO: 96304 - protein, 123 aa, Unknown
  Obtained from environmental sample
  misc_feature (1)..(123): Xaa is any amino acid
MKKIIILPLLFLSLVSCEAMKPAPQSPEALQKKADSLATELAEVKSVLGFVLERGMGSSFEQVKKEIESANKVHDLQLDVGSPSIGNPKAKIVIVEFSEFQCPYCARITPYLDSLTKANPDKI

SEQ ID NO: 96305 - protein, 513 aa, Unknown
  Obtained from environmental sample
  DOMAIN (43)...(507): Nitrogenase component 1 type Oxidoreductase
  misc_feature (1)..(513): Xaa is any amino acid
VTAKEKVLDKYSAKVYKNRKDHLIQLEEDNKAQPIAANTRAIPGVMTARGCCYAGCKGVVVGPLKDVCVITHGPVGCGFYSWGTRRNKAKPDEHTDKNFIPYCLSTDMQESDIVFGGEKKLEKAISEAMEIFSPKCIMICSTCPIGLIGDDVQAVARRTEEKYGVKAIGFSCEGYKGVSQSGGHHIANNGVMRYVIGTGDKKPKTKFSVNILGEYNIGGDGWEEERILKRCGIEVLNLFTGDASYESLKSSHLAHLNLVMCHRSINYIAEMMKTKYGTDWLKVNFIGIGATCKSLREIAKYFNDPALTKKVEEVIADETAAVSESMEYYKSKLKGKTAGIFSGGSRSHHYQVLLEDLGMKTVIAGYEFAHRDDYEGRQIIPEIKEDADNKNIESITVTPDEKLYREVYSEKQIEALRKEIELDTYDGMIPEMGKGDVVVDDYNHFETDELIKAVKPDIFLSGIKDKYSIQKAGVSSRQIHSYDYSGPYSGFRGAVIFARDVTMALYANAWGLV

SEQ ID NO: 96306 - protein, 432 aa, Unknown
  Obtained from environmental sample
  misc_feature (1)..(432): Xaa is any amino acid
KNGEVALQFDLAANDYSGGSVCLYNMMYDLTPYIASGALQFWVKGANGAEIAWAALVDDENGDGKKTVVRLPMNNYGGITNDWTLVSIPLVDFGKRGVFWDAKKRVEVPEPFQWDKVCEFRIEIKKNENPSFRIWVDDIFIVSNVFEAKVVEDVKYWDDNDEVLEDVPVANKPAVKETDKFLAGGDPVGFAYVYGGKTAFKVQKTKSGAPVFANYMDGSEYSGVTVSLGEGRFANLTNARTAKAAGIAFWGRGGEGVGNVGVGLLDNQGKNSAGVEVKVQTKVLLGDFGKIEPVWKYYMIPIRSFRPEGLYWDDSKNAEVSGKVDWTKIQEVRFSVGKGENKVPEGEPVTFYVKDLSVIEEIPGYVNPDDYWNAFKSNAPEVKLHDMETEAEQKWESSNGPKSEVSFKYSESGAPNGGKSALEVTYRLGDWV

SEQ ID NO: 96307 - protein, 257 aa, Unknown
  Obtained from environmental sample
  DOMAIN (6)...(68): ATP synthase alpha/beta family, beta-barrel domain
  misc_feature (1)..(257): Xaa is any amino acid
VLEGKVRRISGPIIRATGLGGAGLFDVVEVGEKRIIGEIVRLEGEEAVVQVYEDNTGLQTGAPAISTGRPLSVLLGPGLIGSIYDGIQRPLELLYGKSGAFMTPGERGNPLDTERKWHFVPDASLSERLARGEKVPATAGLVLGSIKETESVSCKIMVPPGVNGGNIAIGNTIAKGNNIASLSAEGDYTVLDEAAKTTLSEGIPIAQWWPVRIPRPTSGRLPPDQPLITGERVIDVFFPLSKGGTAAIPGGFGTGKT

SEQ ID NO: 96308 - protein, 74 aa, Unknown
  Obtained from environmental sample
  DOMAIN (4)...(74): GTP1/OBG
  misc_feature (1)..(74): Xaa is any amino acid
MEKFVDEAIIEVSSGSGGNGCVAFRREKYIPLGGPSGGDGGRGGDVVFTVRRNVHTLAHLRYKHKFKAKNGQDG

SEQ ID NO: 96309 - protein, 399 aa, Unknown
  Obtained from environmental sample
  misc_feature (1)..(399): Xaa is any amino acid
YAQNAVIRDFTFEYDGSAINVSTGSDGSYIGGLAGNLKNTTVHNLITTGKTLEVTASGTGIVNLGGIAGYVENSLINNCRADLNVKLVLNSTSAGNVGAVAGFAESGSGGSITIDIDYKNPKDKGPNITLTNLAIDGVTVTANVSGNTSGTGGLNIGGMTGSNLNNTMRDIIVSVGGVSFDITGNSGNTNIGGVIGYANNSSMEDCSFTNGAIGTDGDVGIIKNLKDDAWINFGGLIGISYVDDGDVYINNCHVRGNVGVKVESYGNINIGGVFGSSIYEKSTVTITNSFFEEGNITASNNSGAIQSGGFSGIIYEEDYWTKPVSERLNSHYTNNCGVMAGTVNIYVEVYGKYITAGGFTSSFIGDISNCFSRANVISRGSGNSNEEGGWASDYTFQAG

SEQ ID NO: 96310 - protein, 433 aa, Unknown
  Obtained from environmental sample
  DOMAIN (39)...(104): His Kinase A (phosphoacceptor) domain
  misc_feature (1)..(433): Xaa is any amino acid
NASGHLEHQTEIKHLLELKTEEVKLREAAELEADNTSRAKNDLLSHISHEIRSQLNAVIGMISIAKEKKDIESVKVYLEKAGDAAKHMLSVINNIVDIPKIDVPKIDSYKLELSKSEFDFGKMITKVVDVTGISAQEKHIQIVFNISPNIPSIVIGDELRLAQVIINLMTNAIKFTPDNGKIQLNAEKLEEKNDEVTVKIEVVDSGIGISPEQQKKVFSAYNQADHTITKQSNGSGMGLAISKRNIELMQGNIWIESELGKGAKFTFTIKVKKGKHSAVSATADGTANGTADGKADGKAADTPAPTPIIKDSDLQLQGYTILAAEDMNYHREVLSMYLKKTGVNIDYAVNGKEAVEKFKANPEKYKLILMDIRMPEMNGDEATKIIRSLDLKNAKKIPIIAMTADVFKEDVQKCLSAGMNDHISQPVVPNIIY

SEQ ID NO: 96311 - protein, 123 aa, Unknown
  Obtained from environmental sample
  misc_feature (1)..(123): Xaa is any amino acid
MSFNKIYDVASSALSAQRLRIQLISANVANSETTRTPEGGPFVKKDAVFQVHKMGETVDGMPLVGVRVPRIHTSKDPFVYKYDPNHPDANEDGIVTFPNVNPIEEMVNLTEATRSLRPTGRVR

SEQ ID NO: 96312 - protein, 512 aa, Unknown
  Obtained from environmental sample
  DOMAIN (317)...(511): Glycosyl hydrolase family 67 C-terminus
  misc_feature (1)..(512): Xaa is any amino acid
RRRACQPAANGYHWDNIDGTIERGYAGPSLFYHNGRFDYEKQRIEDYARLLASIGINRISINNVNVRGNAKLLITSEYLEDVAALASIFRPFGIRLLLSINFGAPWSLGKLPSADPLDPVVAAWWKERADLIYHYIPDLAGFLVKADSEGEPGPFQYNRTHADGANMLAKAVKPHGGEIIWRCFVYNCQQDWRDKSVDRARATYDHFMPLDGAFDYNVILQIKFGPYDFQVREPVTPLFGALKKTRHIMEHQITQEYTGHQIDLCYLPWLWEDIMRFDTAGEPQGRIKDLVGPYSAGHSRIEGFAAVVNTGRDRNWTGHTLAQANLYGYGRIIWNPSLSAGEIAREWSVLSFGSDPATKTVTELLLKSYPAYEKYNAPFGVCFMVTPGLHYGPNIEGYEFSRWGTYHRADARAIGIDRTPSGTGYTAQYQAKNAAMFADPATCPENLILFFHRLAYDYKMKNGETLLQNIYDTHFEGYEEVATMLEKWKSLKASLKEEVYQSVLSRFERQLV

SEQ ID NO: 96313 - protein, 295 aa, Unknown
  Obtained from environmental sample
  misc_feature (1)..(295): Xaa is any amino acid
GCPREEIEKIAAYLINLKGLHTCIKCNPTLLTFETARKLLDEMGYGYISFDDHHFKNDLQFNDAVEMLKRLQAQAKKRKLDFGVKLTNTFPVQIKRNELPGNEMYMSGRPLFPLSINVAKKLSRAFDGEISISYSGGADYFNLKDILETGIRPVTVATTLLKPGGYERLPQLAELAEETVKDISMAAPVNVNALNALAESLPKKSRYRKEYRQTGLRKTGSPLPLFDCAKAPCMDGGCPICQRIPEYLAAVAAGNYDEAFRIIAADNTAPSITGTICDHQCQYRCTRLDYEDPLQ

SEQ ID NO: 96314 - protein, 85 aa, Unknown
  Obtained from environmental sample
  misc_feature (1)..(85): Xaa is any amino acid
MYLSVKKVKPLSDYNLELTFENNEIKIFDVKPYLDTGLFKTLKDEKIFKMVKVSYDTIEWSNKVDLDPEVLYEKSKAKVRKKETV

SEQ ID NO: 96315 - protein, 277 aa, Unknown
  Obtained from environmental sample
  misc_feature (1)..(277): Xaa is any amino acid
VLLTAGCPAEPETPPPAQTQTAATPTATPAGGEVADNTAITLATATAEAAIHYTQDGTEPTAASPLYSADAKPVITAGRLTLKAVAVKSGMNNSATLTATYTLTPPNTVATPVAEPPAGTYATAQAVTLTSSTEGAAIHYTLDGSAPTASSPVYNTPLPISQSSLLQAIAVKEGMTASGTLIAQYTITPALTADAGEDFTHDIIKDGASFTLNGNAEHGTIAWACTASPAAATQPAIANPATAQPTVSGFDKLGEYTFTLTVTNGTESKSDTVKVTL

SEQ ID NO: 96316 - protein, 317 aa, Unknown
  Obtained from environmental sample
  DOMAIN (35)...(169): Histidine kinase-, DNA gyrase B-, and HSP90-like ATPase
  misc_feature (1)..(317): Xaa is any amino acid
MAVKYDESSIKSLEWNEHIRTRPGMYIGKLGDGQSPDDGIYVLVKEIIDNSIDEFVMGAGKRIDIEINEHSAKIRDWGRGIPLGKVVECVSKMNTGGKYDSEAFQKSVGLNGVGTKAVNALSSYFCVVSHRDGKCKKAEFKYGDLIKQYPEKPSSEKNGTEVYFEPDKDIFKNFRFLPAYMEERIWNYAYLNTGLSLNFNGKIYESKNGLFDLLSSQAKDSMRYPIIHCKGKDIEIAFTHGELYGEHYFSFVNGQHTTQGGTHQAAFREGIVKGVRDFFKKDFDGSDIRNYMLAAVSVRIQEPVLKAKQKPNWQHNC

SEQ ID NO: 96317 - protein, 504 aa, Unknown
  Obtained from environmental sample
  DOMAIN (1)...(278): Glycosyl hydrolases family 2, TIM barrel domain
  misc_feature (1)..(504): Xaa is any amino acid
VNRHEHDEKTGKTLSTEGMMKDIRLLKTHNFNAVRTCHYPDDERWYELCDRYGIYLVDEANIEHHCFYDQFCWDTAWSYAYSLRIQRMVERDKNHPSVIIWSLGNESGDGANHNMGAAWIRRYDSFRPINYEGAVRPERNGGRFTLDSLNRSKNLTDIISPMYPEIELITDFIKYREDHRPLIMIEYSHAMGNSNGSLSDYWKVIESHHGLQGGFIWEWIDHGLEGFTSDGRKYWKYGGDFGDLPSDYDFCCDGLLFPDQTPKPAMAECKQVFAPVRLTPVPGKPFTFILENRYDFSTLDALVLNWKLCTENAGAEIGEKILHNGSMAVPALKPGEKQEIEITPAGTLDNVLAQHSGAVYFHADFALREAVPWAQAGHIVAQAERILREALPVSLRGELCGSVNAESANALESFAGSFVPSMFRAPVQNDGLKTVAHLRGNPEAAFYFYKKAMYPWLDLDLLHMRLLDEKTENITYEGRPAIRFAAMLAAGKDAVDPPACGRTP

SEQ ID NO: 96318 - protein, 272 aa, Unknown
  Obtained from environmental sample
  misc_feature (1)..(272): Xaa is any amino acid
MESWLKQTPDRVLSKRPELYTLRGGSRIQVRTETSRQNRDEFAIVLAREQNGAYPGWAQGSWVLTRRRDNNPAGSRIRIFLRSDYNIYVQFRPFSDEKSFMDVVIYDSYLIRALPIPVPLERLYVMSVEDALNLAGDRFPRRYFDPEPGAYRDSRAFVSAVRSRLHELTFLDDGAMDENGQFVFINTLQAQNNRFGNGQVKGGVNCSGFAKWIVDGILKPLTGERLPIAPLKAPFGVRGTPFTELWEEQRDPFFGLDWIRNLASIARTTLLS

SEQ ID NO: 96319 - protein, 344 aa, Unknown
  Obtained from environmental sample
  DOMAIN (51)...(127): Helicase conserved C-terminal domain
  misc_feature (1)..(344): Xaa is any amino acid
TVTVEEVEQILYHVSSNDKMKLLLGVLKNENPESAVIFCNTKRYAEIVAKRLRLNGFDCEFIMGDLPQKKRLKIIDDIKAGKLHLLVATDVAARGLDIEGLAMVVNYDLPNETENYVHRIGRTARAGKTGKAVTLASEQDVYALPGIERYIGRKIPSETVASELFAEDKSEGRHIHTEFYEERGSHRTEGHRSEGRPADHSRRKAGGGINANSKKHDASHHVRKDHHSPMEQKRGEKKNRIDFPKGIKLSELSLEERMAYYKQKYDKSVTACSSITAASSSRKVEQGKLEHKKPRDSSNRKQKKHKQAKPQPSAESTSSSQAAAVEQKAPKKGILTRLFGAFKK

SEQ ID NO: 96320 - protein, 385 aa, Unknown
  Obtained from environmental sample
  DOMAIN (21)...(335): D12 class N6 adenine-specific DNA methyltransferase
  misc_feature (1)..(385): Xaa is any amino acid
LSCVLFDDLIIDTPETQAIKYTGSKLKLLPYILSLSKKADGGYSNTAVFDGFSGSTRVSQAYAKTGYKVYANDTAPYSKVFNTAFLMNTKAPEDYQPLIEHLNTLNPVDGWFTEHYGGDGTQNISATRDGLKKPWQKKNTRKLDAIRNEIDNLNLDEVSKAVAITSLIFALDQVDSTLGHFASYLNEWSPRSYNDMKLEVPDLWINENNNCVMNYDIFEALKKLPDNINICYYDPPYGSNNEKMPPSRVRYASYYHIWTTICLNDKPDLFGKAKRRSDTSDTIACSVFEEFRKGSSGKFIVIEAIEKLIRLTPMNYIILSYSSGGRATAQELNDVLNAYGRIIEIEKINYKKNVMSGMKWTNDWIKDAEEDNYEYLFLLEKKKYS

SEQ ID NO: 96321 - protein, 147 aa, Unknown
  Obtained from environmental sample
  DOMAIN (47)...(144): LytTr DNA-binding domain
  misc_feature (1)..(147): Xaa is any amino acid
MILKLEQNAAQNDIEILISYPVKNRIVERIASFIKSIDSQIECYSDDIVKLVNVSDINYIESVDKRTLVFCDKGSYQIRKRLYQVYDELADNGFVQISKYCIMNINKLEEIKTLANSHLEAVLSNGKCLYVTRKYLANIKRHLQEDQ

SEQ ID NO: 96322 - protein, 80 aa, Unknown
  Obtained from environmental sample
  misc_feature (1)..(80): Xaa is any amino acid
MRRISTDMPNVDSQFYLRRHEEKLAKIQSQIGSQSRIQELRDDPLAASHAVRYESYLARLERFEKTPSTQEIITISPILT

SEQ ID NO: 96323 - protein, 442 aa, Unknown
  Obtained from environmental sample
  DOMAIN (34)...(433): Aminotransferase class I and II
  misc_feature (1)..(442): Xaa is any amino acid
MRRDILHPGAGKLRYEIREIVGFAKSLGKWNIPIHWENIGDPVQKGEPVADWIKDIVRAKAGENLSYAYSETEGVRSTREFLADLANKRPVLELPGPNPRPVVKAEDILFFNGLGDAVAKVFGFLRREARVLGPSPAYSTLSSAEAAHSGYEHLTYRLDPQHDWMPDMNDVELKVKYNDSIAGILLINPDNPTGAVYPVEVLLEFVRIARNYGLFIICDETYANIVYGGSKTAALSQVIGDVPALALRSISKEVPWPGARCGWTEIYNRKADPRFDAYVKSLLDSKRLEVCSTSLPQLCIPAIMGDSRYSKHLETRAAMFEKRADEMEKAFAGVSGIRIKKPNGAFYVSAVFDDVIKKNPGSHSLPVIDLSLRNYISAEIAGLKPDKQFAYWLLASTGICVVPLSGFASDLPGFRFTLLEHNDEKRKWIFKTIAEAIQNYLR

SEQ ID NO: 96324 - protein, 443 aa, Unknown
  Obtained from environmental sample
  DOMAIN (118)...(349): Transposase DDE domain
  misc_feature (1)..(443): Xaa is any amino acid
MSEYETRLRIEQLLSEIHSEWIRKEARLIGDFSSWTRQRDMPLEDILLCTLAKKGLSTAMEVRHFFQAMEKVEQTVSKQDYLRRRQKLNPAVFKILNRNYLRRFYGGQEVVQWQGYLVMAVDGSRAEIPNSEENRQVYGESINKYGKQVARTNLSAVHDVFNRFLIDIGMHHYRSSEIEDAKAHIEALKEIVGERPVLIMFDRNYESLEFMDFLEQKGIKYLIRLHKGNYETEKTQMHSNDEEVELVYTRARMGHLRAKSPERMRELAKQKSKRVRIIKTKFANGEEAAFITNVREGTTAQILRLYRKRWAIEQKYHTLKNKMKFESVTGKASIYVQQDFWAQMLVFNIVQDLITAAQRRAARGAKKKKYIYEMRINENIAIGLFKEQFIRLMMTEDDQMKGALFKQLIADMEQYIVPVRKLKSSPRKWKRLNKYKCNQKPSF

SEQ ID NO: 96325 - protein, 433 aa, Unknown
  Obtained from environmental sample
  misc_feature (1)..(433): Xaa is any amino acid
MNSQFRINRLQVFNWGTFSDLHDVPISERGFLFVGGSGSGKTTLLDAFSTLLIPPRWVDFNAAARETERNSRDRSLVSYIRGAWAEQKDEGSGVIATRYLRSGTTWSSLALSYQNKTGQTVVLVQIFWLRGSANGSADVKRHYFIFEREFDLRELKDFGESNFDIRKLKQSFPDSFSRDEFRSYCDHFCHLLGIENEIALRLLHKTQSAKNLGDLNTFLRDFMLDKPETFDVADRLVNEFGELNAAHQAVVTARRQIETLVPAREKHHQMELMMRRRNELDELQVGITSYRERRRISLLKERIASLTVEKEGWEGEIARRKSLFDNQSDVLRELERQHREIGGDQIEQWEGEKRTLEGQRVERVRKRDQAAEACGELGWALSGTPQGFAELVGRAREEIEGMEDRNKAARDELLLHYGKKKEAESDFVIARKE

SEQ ID NO: 96326 - protein, 71 aa, Unknown
  Obtained from environmental sample
  misc_feature (1)..(71): Xaa is any amino acid
DFIAKLQDERILIVEYKGAHIADNQDTKEKALIGEIWEKQSKGKGLFLLAVKNKDGKSIDQQIKEKIGKSS

SEQ ID NO: 96327 - protein, 198 aa, Unknown
  Obtained from environmental sample
  misc_feature (1)..(198): Xaa is any amino acid
MRIITYGVPMIPLHKLTQLPRSQRLRKAANLVRGAERHFVFFGRLEAGETEYLEKLVILLTEDEAFPSAALEALKTARKNLADCKTDEKGIRRALNTVHQVLLAETGRYQADWDFFEPAGALDPLKRHTFPGLQLYLEDIRSPFNVGSMFRAADSFGAEKIWLSPLCASPQHKRALRTAMGCVDVVPWEFLPMIHLTI

SEQ ID NO: 96328 - protein, 411 aa, Unknown
  Obtained from environmental sample
  misc_feature (1)..(411): Xaa is any amino acid
MNLNGIWQLKKIAMRNLARHKVKTLLTSAAIMVSVAVFIFLNGWLRGMVIDSRRNIVNYELGAAKLQTKLYFEKKDEMPSYENFTDWEKYHCALDGEGYYSAPRYVFSGTLFSITGSAPIVFYGVDPAFEAETMRYVQYVDFGRYIQNGDFGIALGTYAAEKLKVGIPTRPYRQELEELIVSASHNDSVRDADFIRSLYEKSSGKKSFWDVNKKTTEVSERMILKKDASRSDLDLYWNLLDASGRNDVRINAVIDIKAVPETIRADKWEGELFPALSDEDRPLVEAAYEYQDFIEGYLLVEDDEKALNEVLAAMIRAGFSGAVRHVNQVLDVKVIGIINSPAPLPNGNTAYIPLDILQDEAGMMLEGAVTELVIREKNAPDSRLPGKSESADVISAVLERGLAKEGNVMPD

SEQ ID NO: 96329 - protein, 57 aa, Unknown
  Obtained from environmental sample
  misc_feature (1)..(57): Xaa is any amino acid
SAVLVNTAIAAAPNSGIMAKCFKLAVESGRLAFETGLAEQRDEAAASSPLTSFLPTQ

SEQ ID NO: 96330 - protein, 74 aa, Unknown
  Obtained from environmental sample
  misc_feature (1)..(74): Xaa is any amino acid
MGATVGFVCYEFVISVSIHAPVMGATPSAVVSGVYVGVSIHAPVMGATVTTVPVYAVRRVSIHAPVMGATKRTL

SEQ ID NO: 96331 - protein, 295 aa, Unknown
  Obtained from environmental sample
  misc_feature (1)..(295): Xaa is any amino acid
LVETPITSALYTSTTYIGFLDALETDSVYDSVAAVCTPEEEWTTHQILARFRNGKTRYINHGLTAVGDIEEIIKTGASFVFTTGNDDSDMRLRNMLDAVNIKHATLLEWTEEGYATYLEWIKFFAAFFNLDEEADRIFENKLARLDELYEIAANVSNRPTVAYGVIWGGSVYTQAGDSTLARQIEKAGGIYALKGLEGSGSITITMEEFLKQCRDSDIIIYGSSPQYCPDKAFLLETEPLMAEFRAFKNNNIYVYDLGYYMNNAKVVEKFEDMVSIFHPELFPGRKLVMHMKLPD

SEQ ID NO: 96332 - protein, 290 aa, Unknown
  Obtained from environmental sample
  DOMAIN (40)...(290): Tryptophan synthase alpha chain
  misc_feature (1)..(290): Xaa is any amino acid
MSNIAKAFDNKNGKALDNKNGKALDNDKGKALDNDKGKALDNDKGKAFIGFVTGGDPCIEKTKEFILEMFRAGSDLVEIGIPFSDPIAEGPVIQEANIRALRAGATVEKLFTLVEDVRKATDAPLVFLTYLNPVFHYGYDAFFKRCGAVGLDGIIIPDLPFEEQADVREAASKYGVDLISLIAPTSEARIKEIAKTASGFIYLVSSMGVTGVRGEITTDIASIAASVKSVTELPVAVGFGIHTPTQAGEMARIADGVIVGSAIVKIVAEHGENAGSHIFQYVSEMKKAIM

SEQ ID NO: 96333 - protein, 269 aa, Unknown
  Obtained from environmental sample
  DOMAIN (2)...(115): Response regulator receiver domain
  misc_feature (1)..(269): Xaa is any amino acid
MITILIVDDEKNYHLPLTALFQDEGYDTLSAYSGREAWEILTGRDVDLVLSDLNMPDGGGLELLTRLKAVKPEIPVILLTALGEVKLAVEAIKLGAFDYLTKPCPNDEVLRTVAKAMKVGLDRQVKELNPALAGRHRFDRLIGKSKPMLELYHMLEKVAPTKANVLITGESGTGKELAAQAIHNNSSRSDKPFVAVNCSALTPTLLESELFGHEKGAFTDARTGRAGRFELAHEGTLFLDEVGEMAPNLQVKLLRVIQERRFERVGGGQ

SEQ ID NO: 96334 - protein, 72 aa, Unknown
  Obtained from environmental sample
  misc_feature (1)..(72): Xaa is any amino acid
MIMEQTGDTLEEYHERIKHYSYGHNPLKYDFSGSKIEISYLPADKETVTFEIESNVPYSVSGNNIDGFIITV

SEQ ID NO: 96335 - protein, 422 aa, Unknown
  Obtained from environmental sample
  DOMAIN (37)...(197): AIR synthase related protein, N-terminal domain
  misc_feature (1)..(422): Xaa is any amino acid
YYFFTELDEVNIEDDALRESYKNYLETRAFTGRDNKPVTLMDIAVIGAKMLKKRGLLKDLDESEEINAYSVKIKADVDGKEQDWLLMFKNETHNHPTEIEPFGGAATCLGGAIRDPLSGRAFVYQAMRVTGAADPLQNASCAIEGKLPQRKICRTAAAGYSSYGNQIGLATGHVHEIYHSGYAAQRMEIGAVIGAAPSENVIRNTPMPGDVVILLGGRTGRDGIGGATGSSKSHTTLSLETCGADVQKGNAPEERKLQRLFRNPKASRLIKRCNDFGAGGVSVSVGELADGLMINLDKVTKKYEGLDGTELAISESQERMSVVTTAEDAKKFIRLASGENLEAVIIAEVTNEKRLVMNWNGKTIVNLSREFLNSNGAEKHAKARIACARFNCQKFEPDAAGFEKFIGGLNICSQKGLVDRFD

SEQ ID NO: 96336 - protein, 98 aa, Unknown
  Obtained from environmental sample
  misc_feature (1)..(98): Xaa is any amino acid
MDPIVQLAEKTIERFVLGAQDSIPNSFMDAIPLKRAGVFVSIHLVSGELRGCIGTISPTCKSMADEIVQNARWACSRDNRFNPVEASELGDLKIKVDV

SEQ ID NO: 96337 - protein, 369 aa, Unknown
  Obtained from environmental sample
  misc_feature (1)..(369): Xaa is any amino acid
LTDSGLETLRQNMNLAMDLSDLQFCQIYFKKTERRDPSVTELRVLDTYWSDHCRHTTFLTELDDVKIDDTVLRESYENYLKLRKSLGGDNKPVTLMDIAVIGAKALKQKGLLPDLDESEEINACSVKIKVDVDGKEQDWLLMFKNETHNHPTEIEPFGGAATCLGGAIRDPLSGRSFVYQAMRVTGAGDPLKSASCALPGKLPQRKICRTAAAGYSSYGNQIGLATGQVCEIYHSGYEAKRMEIGAVIGAAPAQNVIRKKPEPQDVVILLGGRTGRDGIGGATGSSKSHTSSSLETCGADVQKGNAPEERKLQRLFRNPAAAKLIKRCNDFGAGGVSVSVGELADGLEIDLSKIPKKYEGLDGTELAIS

SEQ ID NO: 96338 - protein, 110 aa, Unknown
  Obtained from environmental sample
  misc_feature (1)..(110): Xaa is any amino acid
MTHYVLDACALLAMLKGENGAKEVDNLFQQAVRGNALLSMSIINLLEVCYGFIKDIGFTETQDMMKKINHTPLVIIDTISQRVYDEAARLKGIYHRISLADAVGVATAIE

SEQ ID NO: 96339 - protein, 793 aa, Unknown
  Obtained from environmental sample
  misc_feature (1)..(793): Xaa is any amino acid
MTLGQNNLTWGAGALEHGKTYTVNVTAYSGSERVSNKTRDFNYDTQVPTATVILPTWLDQVTGMVTVRGGSGDDNAISMVEYAIGRTTGAMNSGTYNWKNAALNTNNPDDEFSGGLYSWTYDLNATKNGKFVNATESRQVLVNGTTIADSPVDKPTNVWQLPFRIRVTDSAGNQGVNTVDPITGKFQLNGADYFILLDPDADQPKAAITYPNPGDHLSGQVRISGTASDNTWIHAVLVRVAKGTKDNHDPWYTDGYPTNADGWGLATIVSPGLSVVWNLTINGYEFVNTDKTKTEQSVYIEVMAIDSKEYSDNYEKATPPTVTEMNGWDPETQHKQGKPVGCEFVIDTSLPSITDQKIQRAGASAGDFETPGITYTDGIKAAGTFKITANVTGSTGIGRIMWRSSTLTDGNYITMMDLVANPNNPVINYSVPVTDTHPSWGYTLGMPATMVTSGNLQKGRKYIIAKLGTASNWGSIGIGSGGPLSTIENEPNTTYAKRWTTFVATGTTGPTANTGWELYAADGYDANNVPATVTYTGAQEQRFTYPITITVVSTEPFPVAGSSTKPSSGQIRVDIQAEDIPSAGAANRAQDGMNIRADNYYPTSVYGTPLNASTQRQRIKGQAVDFDEAKFSGPIYGFDPTVTVGTPPVLISKAEVLVYFERSGTYYNPYGSPWTSANYITKTVIEGNTSSKVPVPLDRYPDMGSELGKTPATENISTIPHRPPGIAEGITLRPAASINQTNGLDGDSDGYANEEFTGSAGKYDWGFDFDTYNFTDGPITLHYIVIDEAGTLP

SEQ ID NO: 96340 - protein, 604 aa, Unknown
  Obtained from environmental sample
  misc_feature (1)..(604): Xaa is any amino acid
VEADEPEDGGVLSYQWYSNTSAVNSGGKIIKGATSEEFELPINNSTAKRYFYYVVVTNTNNYVTNPTSTTVSRVAEIAVAAPADSKAYNATFTVQLGGTNQYQFVRGFGGMDVAWGNFPNYDEDDYENMYNPDILGYNMLRVMILPTYVDVNRTLTELIGNQIYTTMDRSRYYENIRTVNRYGGYVLASPWSPPAAWKTNNSINGGGELRKSDYRNYANYLKAYAQNMLNNGAPVYAISIQNEPNYVAGYDGCEWSAMQMRDFFYEVGRFTEGVQGYGGGKIIPSVKTMNGESANDVSINNPAFSLAGARNNIDVFGRHNYGVRQSNGANISFTVGTSSYQYNWIYNANNPREIWMTEHNLNSNSGTSYPNDHTWNYIWLFMNDVDMCIRINHESAFIWWSSKRFYSMLGDGTYGARDNEILPRGWGLAHYSKFAKESYRVGVSYSGTTADNTPLTEGTDPENSTGNINGRFYKDFTSQTVKVSAFMKLKDRDKYVNQWGNEVNWRNQNVPISDIEEITMVMFTPTESSLAGGGGYNMGTVKLQLPQGFKISSATAMRSDSTIFNAGTTDRGTPVWETVEITGDRNAAFVNLPRSTILSVRFTQ

SEQ ID NO: 96341 - protein, 315 aa, Unknown
  Obtained from environmental sample
  DOMAIN (211)...(257): Bacterial regulatory helix-turn-helix proteins, AraC family
  misc_feature (1)..(315): Xaa is any amino acid
VEGVSIQEKYDKKSEGVFDETISPEEFEQRILAFPPADDEKIKSLSEMLHLCAETLSTGNENYHEMLSLRFEQQASLSALIDELKTKYPKGSGFPVYPLEKERQLVALLRRGNKQEAEKLLDELLSVIVFCNQDHFRYIQLRTIELAVLLARAGTNSIGSAGTENKARYIKQIQDAKTVEELAAILHNMVEKIVVQIVLFQGIPHASAMRKAEFFIKENFTRKISLREVAKIAGLSAPYFSTIFKEEMGENLSKYINRQRVEKAGRMLLETDLSLSEISNACCFEDQSWFSKIFKSFTGISPSKYRSQGGKISIA

SEQ ID NO: 96342 - protein, 416 aa, Unknown
  Obtained from environmental sample
  DOMAIN (318)...(364): Bacterial regulatory helix-turn-helix proteins, AraC family
  misc_feature (1)..(416): Xaa is any amino acid
MPKTNIIQRRELNPLWSKASIMAQHYEKAGNCVASVMGADFNSVINSKHPNPMLFCSFCKRYQNNSGNKAAGEYPCSKMHNEAIKEASRLGGSFVYTCPNGLFFWTSPFFAEGRFAGALMAGGALAIKRKQALKRFFDFCKGKISLAEIDKYLEGVPERSSEEMKALSRMLRLCAEKISSSGACYHDLEEQENGHDCSNQQSYLNDKERLLIACMRRGDSTEAQDIARDLLADFSNLADGDFEFFKMKAIELVVLVSRTGTNSENEAELVEANSRNIKQIEDSNTAGELADNVCLILERMAGKIFSFQGIRHASALRKAERFIWENYTRKISLKEIADASGLSAPYFSTVFKNEMGENLSNYLNRLRVEKALVMLGETDSPINKISADCGFEDQSWFSKVFKSYTGISPYEYRKYG

SEQ ID NO: 96343 - protein, 111 aa, Unknown
  Obtained from environmental sample
  misc_feature (1)..(111): Xaa is any amino acid
MKTGFQSVKLSIAGFIVPYMFVYAPALMLINTTFWGGLQVTATACVGVALIGVAVEGYLFTNAKLPVRILAGAGALALIHPGLYTDLMGLGALAVVVLIQRVLTVRMKRAS

SEQ ID NO: 96344 - protein, 243 aa, Unknown
  Obtained from environmental sample
  misc_feature (1)..(243): Xaa is any amino acid
DDAVYEKLRGQPLRALKEQAIANCADYRIGVTLVPTLVPGVNTRELGDIIRFAVKHSPAVRGVHFQPVSYFGRSPLLPQSSPRYTLDELLRDITEQSGGLAEADDFSPSRCDHPLCGLHGDFIVLPDGSLKALKQYRNAQETSSCCEPCCDSGAAAKNRAFVGRFWQRSQSAEPEDENCCCSGHEELDLTDMGQFAARVKSHGFTITAMAFQDAATLDIARLRQCSLHVYENGKHVPFCAYYL

SEQ ID NO: 96345 - protein, 697 aa, Unknown
  Obtained from environmental sample
  DOMAIN (634)...(691): Bacterial regulatory proteins, luxR family
  misc_feature (1)..(697): Xaa is any amino acid
MPEKTTVFLISRSISRLNIADMFSRGQVFNINENDFLFTKNELGLYFRQQGMSFRPESLREIMQDTEGWAFAISLIARSCQRAPGYGGYVRNAVKLNLFRFLETEIWDGISKRLQEFLVRLSLIGHLSVDLISRLSEGEEGLIAEMERQSAYIRRDSYINAYLIHPLFLEFLKTKQELLSEKQKKETYAVSGDWCAHNGFKIDAISYHEKTGNYQAILLILTGLSTQIPQDIAKYAADILDRAPEDAFDRAEFLADMHLRTYICQGLLEKSLELVKHYEAKFLKKPDADPVKNRTLTRLYICWTYIRCLMSVTDDIFDFDIYLEKACELAREADSGKLDIYYPGAWINFAGSSRKGSPEECIAAITRNRDHIQKSYMKGFMAGELELARGELEFYRGDMSAAESHIVLAVKQARAEKQFGLMHRALLYAMRIAAAQGDFAIMEQTLKDIKAQLDEPSYLHRFMDYDISLSWYFCFLGLPEKTSEWLQEDFSSYSHAAFIENFGNQIKARFFYSARDFAPLLAYIEEMKTRESFLFERIEMLVMEACIHYKNKNKEKAFNALREAYTNAAPNGIVMPFIEMGKDMRTLASAFLKEKGTTIPKAWLEDINRKSASYAKRRANMVSEYAQANRISDSPAITPREADILSDLSHGLSRAEIASSRDLSINTVKMVINSLYFKLDAQNVADLIRIATNQKMI

SEQ ID NO: 96346 - protein, 274 aa, Unknown
  Obtained from environmental sample
  DOMAIN (13)...(273): Dihydroorotate dehydrogenase
  misc_feature (1)..(274): Xaa is any amino acid
MSEINNTQEFQCDMSVNIAGVKLRNPVIAASGTFGKAREYSSMFDVSLLGGICTKGLSLNPRKGNKGARIWETPSGLINSIGLENPGIQSFLADDLDYMKRLGPAIIANLSGSTSDEYVKGAILLNESVVDMIELNISCPNVKDGGLTFGLDAGTAAALVIAVRRVCKHKPLMVKLSPNCPSIASVANACVNAGADALSLVNTIRAMAIDVENCKPVFDNIIAGLSGPAIKPIALRMVWELKDTLKNMKDIPIIGMGGISCTNDALEFLMAGAD

SEQ ID NO: 96347 - protein, 350 aa, Unknown
  Obtained from environmental sample
  DOMAIN (178)...(298): HD domain
  misc_feature (1)..(350): Xaa is any amino acid
MVAAHSLKMGTIIIDQRSRQGFGTGIFYERYLNENLRSTLTHLNMEMDLARVRMIVVASADARLAADKVGKELNENCRIIKREDYIKFVEQLRNYSIEDCMHNFGIPYADAEGLVLGLLVLKLFLEQTGAANIAVPLVTIRDGYLVDLASGVDSSMQEEFFSQIIASAVNLGRKFHFDEPHSLNVAKHCMTLFDALVKEHGMDSRQRMMLKTAAILHDIGSFIKTSGHNRHGQYIVSNSEIFGLPRDELDIIANVIRYHQGREPTQADIEYISLQREERIIVLKMASILRIADALDRGHTQQLKNLSVERKPETIALHAQGAYDISQELIALEEKADYFQAVFGYKVVLN

SEQ ID NO: 96348 - protein, 69 aa, Unknown
  Obtained from environmental sample
  DOMAIN (18)...(68): Plasmid encoded toxin Txe
  misc_feature (1)..(69): Xaa is any amino acid
MFFTDLFTHLNKFVTPPFSERALAEYMEWQAADKKKRKPISVLIEDIQRNGFLQGIGKPEVLKVKRVQP

SEQ ID NO: 96349 - protein, 255 aa, Unknown
  Obtained from environmental sample
  misc_feature (1)..(255): Xaa is any amino acid
ALCTLPGKCANRPAQLVFDKDMFSKHLFLLGGIGTGKSNALYHLVKRIKASMTANDVMVIFDTKGDFRDKFFAAGDVVISNDANATGPRGKDYWNLFNELSAGSPDRLDESAIEIAKTLFYEKTSQSNDSFFPNAAKDIFFAILLHGVRSREIFDNETLKRFLSQTQVGDLQLILRAHDDLSAMTSYVQNDDSKLAQGIMAEIQQLSGEIFIGNFKKSGALSIRKLIRDKGRKTVFIEYDLSIGNLLTPVYRLLY

SEQ ID NO: 96350 - protein, 656 aa, Unknown
  Obtained from environmental sample
  DOMAIN (225)...(386): Type III restriction enzyme, res subunit
  misc_feature (1)..(656): Xaa is any amino acid
IRQTAGQARNDGGVDAGVGIDTDKDGAITVIGAVTAARAEFYGRPKFRVTVEGDGGGTLDAIWFIRNMKIEVGERLMLTGRVTAAKSGRPLMVHPVLEKSADGADHRPILAVYAVREPMREAGINQRLLRYSIEWALGNVNDGGYPRLLPEVIEKKKGFPPLSDCLRQVHLPDALSELGAYKARLKYEELYRIALDLRWSRRKFALPGYSMSPGDLADRLRAALPFKLTESQEAAVRVLFADAARPTRMHRLLQGDVGSGKTVTALFAALPALNSGRQVAWMAPTEILAKQTKSAVEGYLADLGIRVEYIGAGDAPEKRRALGGLASGALRFAVGTHALFMPSVKFSNLGMVIIDEQHKFGAAQRLKLQEKGPASDFLLMSATPIPQTLAKTLYGDLDAVEIGSRPGRAPVSTRIVPEGRRADMEGFILERICAGARVFYVVPRIEQQRSDDLEDAEGGGSGGGKRGRPASDGGGQADGLPVKTVEGVAEALKKGPLAAVPIYIVHGRMPADERDEAIRAFREGPPGVLVSTTIVEVGVDVPDAAVMVIENPELFGLAQLHQIRGRVGRGEAASYCFLLPGAEACRDERTMGRLKFLCGCSDGFEIAEWDLRNRGPGDAAGYRQSGWDDLAAADILEDAETFLCILSEMDILFAKG

SEQ ID NO: 96351 - protein, 216 aa, Unknown
  Obtained from environmental sample
  misc_feature (1)..(216): Xaa is any amino acid
MLKERFAAPLPEFHERRIVFWRDKAGEFKDYVDELNLPNVNVVKLTGTNNFAVKKLLSNDDLTGDYLVYDPLSYEEDQSDDWLLDIRLYSGDEFRADLVSLQMEELRVEPSPEMRDTMKMYDKFFQNKDRRVKLRRIGRTYQTPFQLHIDIMAVLCDISGGSAQDVIIQNVIIAVLKAGFGKESNSALIAIEKFGNIDKFWALIHKYTGYINKNDQ

SEQ ID NO: 96352 - protein, 275 aa, Unknown
  Obtained from environmental sample
  misc_feature (1)..(275): Xaa is any amino acid
MMKARRYNPRIFTENVKPQVYYPSGFADGEEYGSLVKATTLPPKPVEKSGQLNIFENVAYELQLNAWNFKRLLAQKYDVVVTNPPYATAHDVNKKLSDFLKNEYPDTKGDMFAAFIERCLLFSKTNGFTAMITQHAWMFLGSYKTLRNTIQTDDTILSMIHLGNGSFGFADYGLTSFVIYAHAVPDYSGLYVKLDDNNNPEWKEREFLSGNRRFAVNNSNFSKIPGSPVAYWISHAMIAAFETAVSLEKLAVSRVGLQTSDNDSFIRLWHECAYP

SEQ ID NO: 96353 - protein, 255 aa, Unknown
  Obtained from environmental sample
  DOMAIN (12)...(179): short chain dehydrogenase
  misc_feature (1)..(255): Xaa is any amino acid
MGILDAFKLDGKTAIVTGCGRGLGQGIAVALAEAGANIFGVGQAQNAAGTAEVIAKTGRKFEYLSANLSSQKPIPDIISGALAMSGHVDILVNNAGIIRRCDSVDFCEADWDDVINVNLKTVFFLSQAAAREFIKQQSGGKIINIASMLSFQGGIRVPSYTAAKGGVRTLTMLMANEWAKHNINTNAIAPGYMATDNTMPLRQDAERSAAIMDRIPAGRWGTPDDVAGVAVFLASPAASYINGYTLAVDGGWLAR

SEQ ID NO: 96354 - protein, 177 aa, Unknown
  Obtained from environmental sample
  misc_feature (1)..(177): Xaa is any amino acid
VLNYELAFVLTTITLVIILALLQNFLRSSYGRAIKACREDEIAANANGITIFRYKMLGFVIAAFIAGIGGCLYAMVNGFVKPDVAQFLRSIDYLIYVVLGGMGSMTGSILSAYVLTYLQEFLRFLQDYRLLIYPVILILVMLFRPQGLLGMKEFSIVGFVDKIRGRFFTKGAKGGQA

SEQ ID NO: 96355 - protein, 140 aa, Unknown
  Obtained from environmental sample
  DOMAIN (6)...(129): Biopolymer transport protein ExbD/TolR
  misc_feature (1)..(140): Xaa is any amino acid
MKRSRSKSLNQEMNLTNMIDVVFAILIVFLISAPLMSQGIKVDLPNAEAPTLEQKKMLKVTITKDEKIFVSDMEVHLNDFNEIFKSLWQDEMPVVINADESVHYGIVMKIVSLVQLAGVKQLGFLTSDKGITPNREKKKK

SEQ ID NO: 96356 - protein, 318 aa, Unknown
  Obtained from environmental sample
  misc_feature (1)..(318): Xaa is any amino acid
LFNEGAKYYPDDFRFSWSLGNLYYNRRLYNLAWDEYRKTEKIIPWETDILLQLANTAGYLNKNEASAIYYERLLAIDPDNREAVGSLAWMYFKLHRLSEGERLLLDAMKYMGNDIDFAMTLGTIYSGMFRYAESKDSYLKAIHGAEAIGDRLYAALSYYNLSILETRFYQFALAFDCTNSSLEMIDRASGKLARGELFLARLELSRALADYQEAYKTDSSPLSKLNLAQAFQVGGRLSEAAAYANDCLKAGDDSWMMNYGIDPVRYKRDIHEILKDTYKGLWKAEAFSCHGSLKEKVQSLFRKITYRFRFALHTHCSI

SEQ ID NO: 96357 - protein, 262 aa, Unknown
  Obtained from environmental sample
  misc_feature (1)..(262): Xaa is any amino acid
LALCLNDRAMGVVDNVITNSVNDSGLPYGETNKPLSRFARDGGHCELSEAIPCVENNNINTDPINADNELLDDEVNDISAISAKSSVIFAVPDKREDYYPLLFVACGTAVASFMYEIGWIRMLSLVLGSSTHSFELMLSAFILGLALGSFFVRNRLDTVKNAPRFLGIAQIVMGASAIATLFTYSSLFKIMVFTIDALDRNASGYVLFNIISHMICAITMLPSTICAGMVVPLIIHMLYRRGYGEAAIGKVYAVNTAGGILG

SEQ ID NO: 96358 - protein, 290 aa, Unknown
  Obtained from environmental sample
  misc_feature (1)..(290): Xaa is any amino acid
VLDATFLLSEKDIVTLEKLLEIPNCEINLQVHFTPIKGDLRDKLFALCRKHRERISLEFGLQTIHKKEMEVLKRKNDIEHIKSVMAELNSLNIRYEISIIFGIPWQTVASFEDTIKFIEENGCKEFRAFPLRLPQNSKMKENIEELKIIESQSRDELYSLHVVTECCSFTYSDWEKMYSIANKYTKKKTVGEDSDKAVVAIIDKAVRYYFMGGLRNIIDSNAHINILSDNKIKRKLHLRIVEHLQNNTASNDIVLSGFGIDNYIEAIKNILSDNAILDICAKDPSLAAHI

SEQ ID NO: 96359 - protein, 638 aa, Unknown
  Obtained from environmental sample
  DOMAIN (55)...(134): Cache domain
  misc_feature (1)..(638): Xaa is any amino acid
LEGDDQQYIGTKGTGSDGRFSPYYYWDGGKVYLNVLEDLEDPAYLLAKNSGNPIILDPYEYNVGGKKVLMTSICVPIHVNGKTVGVVGFDLPLTEIQEISQTQKPFPDSVTAVFSNNGTVTACFDPSRIGKNMRDTEADMAGPYLNDFVNAVKAGTPFSFTNYIAAMKTDMTIFLIPITLGSTKTSWSYAVAIMRNTIMAPVNQMIVLAIAVSVAVLALLVLASLFLSKSISKPIVHVAGTLKDISEGEGDLTKRITIRSADEIGDLGRCFNITMEKIRNLVGAIKYKINGLNHTSFELSTNMGQTSTAVQQITANLDSMKNLMVKQESGAEEAGKAVGDIKESIDSLKKMIEEQTESVNKSSSAIEEMTANIHSVTQTLAENSKNVSALTEASENGKSGVQTVAQEIQEIARESEGLLEINAVMDNIASQTNLLSMNAAIEAAHAGEAGRGFAVVADEIRKLAESSSRQSRTTATMLKKIKASIDNITKSSNDVLTRFGAIDSGVKTVSQHEQNILNAMEEQETGGKQILDSISRLRDITYSVKKGSDGMAESGNSLVKETNEFIKTSKETVDGMNEVLKGINQINISVTHVNDMSLENKNNFDALKQETDKFKDTVVDGKKKILIIDDDTIHLEMV

SEQ ID NO: 96360 - protein, 210 aa, Unknown
  Obtained from environmental sample
  misc_feature (1)..(210): Xaa is any amino acid
MNTIPTIFNEKITSYTAVGSKGRAASTGISAVVLNRSGQYQPRAFFSDLEAGGFDNVISIESCAPHYDIEELSGRFPFVRFILPEKELNIGEQINLAASEIESPLFYVLRSDMKIIAGGTAKRMAERLTVFEDKNNASTDIGFKRLCTVPVIMNSNYEVLPSLIAPMTRKSKMKPVFMEPENEGDLSLYPFDGAGIYDRKRFINTGGFDI

SEQ ID NO: 96361 - protein, 525 aa, Unknown
  Obtained from environmental sample
  DOMAIN (234)...(411): Radical SAM superfamily
  misc_feature (1)..(525): Xaa is any amino acid
MKALSVLFCGRLCDEAFEPVFEGKNSVTLALEQAKKFPFSEKTVLLAPLGATPLGNYPFPGGVQIEQKEWTKRNLLEKIAELQAGFDCVYFAFADCPFLDPALAGVLSQRHISERADYSYADGFPYGLAPEILSPGTAGILAKILGDNDGPVERDILFSVIQKDINAFDIETEISSVDLRCHRINLCADTKRNFLLLKNFISAANGKLPFADEVENIVENHPEILRTLPAFYPIQVYGGCPQKCSICPYPMFTDAAGRKDFMDGEKFKSLLDKITVFSGDAVIDLSLWGELSLHPEKMKLIEEVLRRPELALIIETSGIGWKNEDIEKCAELCGNLEKSAVVRKNALPPLSWIVSLDTSDPQRYAGLHGNGFAEAETLVKKLFSLFPNDCYVQAVRVKGAEDDTEKFYRYWKTASPKNEKNIIIQKYDDFCGVLDKKQASDISPVIRQSCWHIMRDMPVLINGDVPLCRENLSVLKGEKKDILGNIFTEPLEDIWQKGDKYYKEQCMKKYVGLCVECDEYYTYNF

SEQ ID NO: 96362 - protein, 75 aa, Unknown
  Obtained from environmental sample
  misc_feature (1)..(75): Xaa is any amino acid
MNFEIEFEQEADGRWVAEISEIPGVLAYGTTPLQAGAKAKALALRVLAERMENENSMPGINSIVFANHYEPVAVH

SEQ ID NO: 96363 - protein, 71 aa, Unknown
  Obtained from environmental sample
  misc_feature (1)..(71): Xaa is any amino acid
MEKGTFTDPRDGKAYKTVKIGNQIWMAENFAYDAPGSKCYDNNPTNCQKYGRLYDLDTALKVCHSGWHLPS

SEQ ID NO: 96364 - protein, 142 aa, Unknown
  Obtained from environmental sample
  misc_feature (1)..(142): Xaa is any amino acid
MPKIEAKLTRTWFSDKRTLGVLELLSDGEPALSCYTCEDAVRGNGDPARVKEWKVQGQSAIPYGTYTCKFTHSLKYKRNMWELQNVPGFQGIRIHSGNTENDSEGCILLGERIDPNYGGILDSKKAVEKFEAMLAKNGNAQS

SEQ ID NO: 96365 - protein, 499 aa, Unknown
  Obtained from environmental sample
  DOMAIN (51)...(434): ATPase family associated with various cellular activities (AAA)
  misc_feature (1)..(499): Xaa is any amino acid
NKLTPKEIVSELDKYIVGQKKAKRAVAVALRNRIRRLKLDPELREDIAPKNILMIGPTGVGKTEIARRLAKLAGSPFLKVEATKYTEVGYVGRDVESMIRDLMAAGFQMVKQEMQETVLQEAKKRAEEELLDLLLPSNSKKPKEKKMKPVVRPMGAFSINPEHSNGSIIGTTLQVGIPFMNNKEENEEEKNAEAKEESANEGEDEKFKATREKFRVMLHEGKLEDRPVELMVNQNPQFPTIEMMGAGMEELENSLSGIAGFFGGGKKKKVVTVARAREILEAEEAEKLVDRDRVSDEARQRVEETGIIFIDEIDKIAVKGDRGGGPDVSREGVQRDILPIVEGATVNTKWGPVNTDHILFIAAGAFNVSKPSDLIPELQGRFPLRVELDSLGKDDFLRILTEPKNALIKQYTELLATEDVKINFTPDAVEHLAALAADVNSKLENIGARRLHTIMEALLEELSFEASDIAPANIDITVDYVNEKLAEIVKDQDLGRYIL

SEQ ID NO: 96366 - protein, 267 aa, Unknown
  Obtained from environmental sample
  DOMAIN (2)...(179): Aspartate-ammonia ligase
  misc_feature (1)..(267): Xaa is any amino acid
DIKETQNNAQIVQSLAKWKRMALHKYGFPVGKGLYTDMNAVRRDEELDNLHSIYVDQWDWEKVIDRPSRNEDTLRKTVSVIVNAICDTMDKIKKMFPALSVSLSRDVSFVTTQQLEDRYPELSPKNREDAYLKENKTAFIMQIGDKLKSGTRHDGRAPDYDDWQLNGDIVFWSDLLNCAFEVSSMGIRVDEKSLDTQLTKALCDNRRDLPFHKSLLAGELPLSMGGGIGQSRLCMLMLQKAHVGEVQVSVWDEGTLSGCEAAGIKLL

SEQ ID NO: 96367 - protein, 309 aa, Unknown
  Obtained from environmental sample
  DOMAIN (8)...(309): Ammonium Transporter Family
  misc_feature (1)..(309): Xaa is any amino acid
MFSSVDTMWVLVAAALVFFMQAGFAMVETGFTRAKNAGNIVMKNLMDFCIGTPTFWLIGFGIMFAGSGPFIGGIDFMVRGNYDSTFPTMAFLIFQTVFCATAATIVSGAMAERTKFSAYCRYSFIISALIYPISGHWIWGGGWLAELGFHDFAGSTAVHMVGGVASLVGAAIVGPRIGKYAVTKDGKKGESRAIPGHSLTLGALGVFILWFCWFGFNGGSTVSMEKVIEDGVVTANNIYGAGKIFVTTNLAAATAAVFTMFITWIRYKKPDVSMTLNGALAGLVAITAGCDVVDPLGAFFIGIVAAFVI

SEQ ID NO: 96368 - protein, 253 aa, Unknown
  Obtained from environmental sample
  misc_feature (1)..(253): Xaa is any amino acid
VGILDSLKKVAAETIKSVAEDAIKNTSGTAASPPQSASAKAEALVGSKAQGAVPNTPAAPAPNSVASAKAAALVGSRAALIEQSHVAQNQQPYTAQYQQQYAAQYQQQYAAPNELSRAEVEAIIEARARSKNMQHANWRSSIVDLMAVLGMDSSLSARTALAARLNYSGYSADGSAEKNMWLHGELLRILAQNRGDVPWELMAAVNTAPQPVPPTPVPMPPMPNPAVLSSNVAASVTAAALAASKAAAWRRER

SEQ ID NO: 96369 - protein, 362 aa, Unknown
  Obtained from environmental sample
  DOMAIN (1)...(75): Histidine kinase-, DNA gyrase B-, and HSP90-like ATPase
  misc_feature (1)..(362): Xaa is any amino acid
VQIEVTDSGIGISPENQARLFHSFHQANLHTTREYAKAELGLAISRHLVEIMGGRMWVDSELGLGATVGFTFPAKRGDENENRLLSNNNYWADKRALVVDDAPNTLVYFRGEASRLSISCDVALSGEAALDLIGKNGPYDICFIDWKMPGMNGIETAARLREQGAARPLIVLMISAAEWKLVEDDAKKAGVEYYLQKPLFRSDIIDCLNNCFGPKPAEDAQPQVKKDNFYGFRILLVDDLEINREIVIALLEPTGLAIDCAENGKVAVKMVTGADKPYDVIFMDLQMPEMNGFEAAIKIRQFEESSSERNVKQIPIIAMTASVSRVDIEKCLETGMNEHIGLPMDIEEVLEKLRFYLNPQTF

SEQ ID NO: 96370 - protein, 333 aa, Unknown
  Obtained from environmental sample
  DOMAIN (3)...(318): Asparaginase
  misc_feature (1)..(333): Xaa is any amino acid
MKNILFIATGGTIASLQTEHGLAPGISPNRIIEAVPAVQKYCHVDATTILNLDSTNMQPEHWLKMAGCIQSNYEKYDGFVIAHGTDTMAYTAAALSYLIQRPDKPIVLTGSQKPVGTDITDAPKNLIDSFYFCANCGHGGVFIVFDGKVIVGTRARKVKTHSYDAFDSINFPVFALTGDHRIVEYIATQPLNGQAKFYSELNPKVFLLKLIPGMEPDILDYAGRFYDTIIIESYGSGGLPFNEERNFTNVVQELSANGKIIVLATQAMLEGSDIELYEVGKRIQANTQILETCDMTVEAAVAKLMWILPITHKFDEVKKLFYTPVNYDICWGA

SEQ ID NO: 96371 - protein, 330 aa, Unknown
  Obtained from environmental sample
  DOMAIN (2)...(84): DNA mismatch repair protein, C-terminal domain
  misc_feature (1)..(330): Xaa is any amino acid
SGTRRLQFVYANNRRIQDYSLLQALEYGLQGWFPNGTHPVGVVFITIDPALADCNIHPAKREVRFADPGAIHHALSSALRDFCRHAALAEKTSEVIAEMEFEPTELTSDQSRKLDQSQWLDQRPSLDAIFAAEEAMPYSAFEPAPKPEANKSKARYLGRLFDLFILIEKNDALYVIDQHAAHERILYDRFMSGKIPKQELLVAIPFITESAGDDSFLEEKKEELAKLGIAIKRNEDEWLIEALPSGWKLSDKETVEEILNLKNANENPAERWAATYSCRSAVKDGDFLDERTALALAEEALALPISRCPHGRPIWLKVSRDDLFKAVKRT

SEQ ID NO: 96372 - protein, 60 aa, Unknown
  Obtained from environmental sample
  DOMAIN (1)...(52): Peptidase family M23
  misc_feature (1)..(60): Xaa is any amino acid
FSSLYGHMQSTRVSVGDTVQKGQIIGSIGNTGLATGYHVHYEVILGDTQIDPEPYLTSKF

SEQ ID NO: 96373 - protein, 100 aa, Unknown
  Obtained from environmental sample
  misc_feature (1)..(100): Xaa is any amino acid
MGEIMQQGERLRQSPTRQAFLRYKAMISRFLKRVLDLAVKTGKTRRRDREYVFADVIDERLLDLGHYLLLEEADSLAVAAAIDEIRGLLYDSLKMAKGEV

SEQ ID NO: 96374 - protein, 630 aa, Unknown
  Obtained from environmental sample
  DOMAIN (587)...(625): Topoisomerase DNA binding C4 zinc finger
  misc_feature (1)..(630): Xaa is any amino acid
VLLASDPDREGEAIAWHLKNAILSKLESLPVQRISFNEVTPVAIREAVAHPRPIDEALVESQKARRVLDRLVGYSLSPLLWKKVKNGLSAGRVQSVALRLICEREKEVESFIPDEYWSLDADFKIGRSNFTAQLVKWNNAKPELPHEAAAKAIIDALAGADCEVSDIKETDKTIKPKPPFITSELQKTAANRLGYTSRKTMQVAQQLYEGVNIGLTRIGLITYMRTDSVRVSETALEELREWLGKNHPKELPEKPLEYTSGKKAQDAHEAIRPTYVSYTPDSVAEYLNRDQLRLYTIIWERFVSSQMTSAKTRTVSVEIKAVSGKAASGGGDEGLFRVSGTKLVEKGFYKVIKLLSSKEEKGNPYPPLKAGDKVAIDKFHPEQHFTQGPPRYTEASIIDMLREKEIGRPSTYAPIISVLLDRYYVTRSNKQLVPTLLGKKIYEMLVEYFPGYVDVDFTASMESKLDKVEESQLKWPDMLKEFWGPFKARVDEVGKTLESFKGSLDEPTDYVCEKCGKPIVKKLGRNGFFLACTGFPECRNTRSVPLAICPKCGGDVVARKTKGRGKEFYGCARYPECDFVSHYKPISQNCPKCGKFMVEKYDKKNGSHKACINPECDYLHSADDADEAPQ

SEQ ID NO: 96375 - protein, 223 aa, Unknown
  Obtained from environmental sample
  DOMAIN (2)...(222): Prokaryotic protein of unknown function (DUF849)
  misc_feature (1)..(223): Xaa is any amino acid
MDDGTPTQDKAVFKKAIDLVRSKCDIVIETTTGGAVGMTPEERLQPVTLKPEMASLDCGTVNFGDDYIVNTLPIMREFAKAMRDNGVRPTLECFDLGHVYASQMLIKEGLLEEPYHYGLVLNVPGAAKYEVDVLDFMVRKLPKGAFWTAMGIGGKANLDAIYGALSLEGNVRVGFEDNIWYSKGRLAKSNAELVERATRIAKDCGREIARPDDVRSMLKLRKG

SEQ ID NO: 96376 - protein, 156 aa, Unknown
  Obtained from environmental sample
  misc_feature (1)..(156): Xaa is any amino acid
MKCESVDWRSTDTFKDVTPEEWHDWHWQLKHTINGIEELETVLPLTDEEWDNITKCLKKFRMQITPYYAALMDTEDPHCPVRLQSVPRILELHDDISESSDPLDEDVDSPVPGLTHRYPDRVLLLITNMCSMNCRHCTRRTLVGDTDVHMSEYNLQ

SEQ ID NO: 96377 - protein, 147 aa, Unknown
  Obtained from environmental sample
  misc_feature (1)..(147): Xaa is any amino acid
NSSYLEEDDLAIDSFDDVKMPPEEDVAQILSEPLSDDIDADIPADDLHLSDFDDLETDTLDAEEPQKPAVSAKKPEPVKQPVQAQPQQKAGGKGNFELPVKLKSELRNILSYMDQLLDSLPEEKIEEFAKSEYFDSYKKLFKDLGLV

SEQ ID NO: 96378 - protein, 259 aa, Unknown
  Obtained from environmental sample
  misc_feature (1)..(259): Xaa is any amino acid
KIDRYFLDGNHYSKNKLVILKPCVIRKNYRVIKNCSDDIVKAKKDKKEKKTQSELVILNNQNKSSNWFCIDIEYANPNFRGRFDIIAISKTKKPKHKVALIELKYGHDAIGGKSGIYEHIKNFIEFRKEGYYNKQMKQEIVGIIKSLDNLGVEIPFAIPEESSISDNPDFYFITLNNNAEKTGAGTPKQTMAAYLFTDKRWDCKELSEKYNVQRDFKIDVTKKNNKFYAVFLFSTQTLKDGITINDIIDSKDYKRIVPK

SEQ ID NO: 96379 - protein, 234 aa, Unknown
  Obtained from environmental sample
  misc_feature (1)..(234): Xaa is any amino acid
MKITIHRGTKQIGGCVTGIESNGYKVFIDFGDQLPGAENDNNKLLEVDGLTRGDVSKSALFITHYHGDHIGKICNTVLDLSIYAGKTALKIYSCLEERLAHIQNPTEAEKHKSIIERIKIINTFKPLQKTRVGEIIITPLFIDHSAFDAYMFIVEVDGKRVLHTGDFRGHGFRSKALVPVLRKYAQSIDLIISEGSNIRRPNAALQTEQELQKDFETQFRKNKFNFVLVSTTNM

SEQ ID NO: 96380 - protein, 247 aa, Unknown
  Obtained from environmental sample
  misc_feature (1)..(247): Xaa is any amino acid
MRIGGRNPAFFVHTKAGGRLPLPQFLFMLLVLMFVPSAFAAPHDGDRFDLAQPDGSMVPVRVFGDEFYQEVESLDGFTLIRGSDGWICYAELSADGSEYVSTGLRYTGGDRKSDGLRKGLRIGRGSALIKHRRNRDILGYDELTAPRPELRRPQSLSKSAATVRRVVGLTLLVEFPDQRSNIRQTDMYDFCNRAGGVNGSNVAGSVHDYYRDVSDGLLEYTNIVTSFIMLDSNFTYYDRGEDYQYVP

SEQ ID NO: 96381 - protein, 285 aa, Unknown
  Obtained from environmental sample
  DOMAIN (2)...(175): Bacterial extracellular solute-binding proteins, family 3
  misc_feature (1)..(285): Xaa is any amino acid
MNAPITRTLLTTAVALSLALAGAGCGKDGKQDSTGAKSAAGKAAIGPKWANGEYDKEEFADKTLAILDGSTFDAVARDKVGAKLYKYYESRGKCMEAILAGEADGMLVEEPVARKFAAQHPDSLVVLYPRVDREDYANLFCKKDKGKMRGEFNAFLKAINADGTYKEMVERWIEMPESPPMPEIVLNPDKKPLVFATSDCDLPFSFKDGNGAIVGFDVEMALRFAQSGGYGLEVKVMAFPDIIPAVASGSIDFAANLIAITDERKNFVDFSEPVYFGGTVMLARK

SEQ ID NO: 96382 - protein, 330 aa, Unknown
  Obtained from environmental sample
  misc_feature (1)..(330): Xaa is any amino acid
MNTFFHSAKTTTAIIWVAVLLFLSFAATAEDMGTVVDERDGQGYIWVTIGTRKWITRNLNYKPDSGISHCYQSAGYPDAEANCDKYGRLYDWTTAMNVESKYKTYWWEGNTSNHQGICPDGWRMPDTGDWKALLAFVGDPSVAGTKLKAEIGWSFFVDETTGHRDNSGTDDYGFSALPGGEMRGGSGSFNGIGGSGHWWAINQDKRVNDMGNRVAMYYILASAHAVYNTHVLKDRELSVRCVAYTENFNVYVNSNGSTNPTGSGIYKTGDTVTVTAGTANEDMRFLMWTVQNGSVTLRDAKKDTTTFIMPRNDVTLTAIFERSYTVVLMN

SEQ ID NO: 96383 - protein, 389 aa, Unknown
  Obtained from environmental sample
  DOMAIN (11)...(376): Sodium:dicarboxylate symporter family
  misc_feature (1)..(389): Xaa is any amino acid
LPDNQRVMDSLVWLEQFVLSIGRYAIIPVLVFSLTISVYELRQDGQFWLLVIKNILLIAGISMLVIGIGVLSTLAFPTTRIPVIAEEQLDVIRLNVTENIKDLFPYNMFSALAGEGVYLFPVYVFAFFFGMGLSYDKSYSKPILSITDSLSRIFLYILSFFIEILGFMMIVLSAYWMIRFKGVLQAGIFFNLVFLLGLIAVVLGFGILPLFLYFIRPKVNPWMVLYGSLGPAIAAFFSGDINFTLPVLIRHTKENFGVRRRSNVVSLSLFSSFCRAGSAMVAAVAFIFIFKSYNRMPIGSSVIMSIGFRAFVISFLLARHPGDGAYTALAVLCLGYGQGFEAGCLILKPMAFYLIAVGTFLDVMIASFSTYAIARLNGYIEEKKMKHFV

SEQ ID NO: 96384 - protein, 167 aa, Unknown
  Obtained from environmental sample
  DOMAIN (27)...(164): DEAD/DEAH box helicase
  misc_feature (1)..(167): Xaa is any amino acid
MTPKNQMPESFHPVIRSWFTETYGKPTAVQAEAWPLIESGAHVLALAPTGSGKTLTAFLSAISRFCSNDTANSSGTAYPEGTKYPANKLTVLYVSPLKALNEDIRRNLLKPLGAIRSRFEQAGLQFPDIRVETRSGDTPQSQRRRFYLHPPSILALTPESLAILLLN

SEQ ID NO: 96385 - protein, 265 aa, Unknown
  Obtained from environmental sample
  DOMAIN (3)...(212): Cytidylyltransferase
  misc_feature (1)..(265): Xaa is any amino acid
MLAIVLQARVDSSRLPGKALLPLGGKPMILRVMEALNRIPAEMRVLACPEDSLSAFAELAGEAGFTLFAGPKEDVLDRFCLCLRKFGIRHIIRATGDNPFVFADAAYTIITEALALGADYAGYGGLPPGAGVESVNAKALLLAGTEAVSQYDREHVCPYLYTHPEKFLLHRPLAPQHWQYPEIRLTVDAQQDYEQAQVLYAALDSMEKAGKLSEGERYKGEVIIRAYKGFRVQGSGFGDQEQGFRVQGSGFGDCCSQSDRVGNQQ

SEQ ID NO: 96386 - protein, 412 aa, Unknown
  Obtained from environmental sample
  misc_feature (1)..(412): Xaa is any amino acid
MTADNNLPQYPVPRTPYPILVVPACEPGRGGGHLVRSMTLVRELRALGREAWLYLTSSNADPVLDTAQFDRSWLLDESGLREKNWKCIILDRFQTSADELARWQKIAPVIGIDEGGKHRSNFDFLIDILPNCNKIAPNITDPSLLPLPKNKPRPPARAETAPLKILISFGMEDSAGLGPALAKKLVDQQNIEIILLKGKLSNEKNYSSFLILNSSLKESIPNLKEHLTDYELIITHYGLTSFEALYAGVPVLLASPTVYHQKLAKTAGFCTLGIGKKNAVKKINNLLKKSDFFSSYLSDIKKHCASLAVKFDLDHEPKQSLAELVNNYTPDVSRNCPVCGATLNRQVLARFPERSYLRCKRCGAISMNRITLMPIEYGKEYFFEQYQKQYGKTYIEDFPNLIVMAKRRLAII

SEQ ID NO: 96387 - protein, 395 aa, Unknown
  Obtained from environmental sample
  DOMAIN (2)...(389): Isocitrate/isopropylmalate dehydrogenase
  misc_feature (1)..(395): Xaa is any amino acid
MTNLIVEIDGDEMTRVLWAVIKDKMLLPFIDLKTEYYDLGLTNRDNTNDEVTVKSAEAIKRLGVGVKCATITANAARKTEYNLKYLLPSPNATIRAMLDGTVFRKPISVSRIKPTVTTWESPIVIGRHAYGDVYKAAEMEIDGPGMVELVYTKTDGTERRIKVADFNGNGIVQGMHNFDESIKNFARACFIYAISEKLPIWFATKDTISKIYDGRFKAIFNDVYETEFKEKCKDAGVDYYYTLIDDAVARVVKSEGGFLWACKNYDGDVQSDMIASASGSLAMMTSVLVSPSGIFEYEAAHGTVQQHYYRYKKGEKTSTNPTALIFAWSGALAKRAELDNLPDLANFAKRLEEAVIGAVEDGIMTGDLAKLSNPQPDRTYNSWEFIDAIVERLKH

SEQ ID NO: 96388 - protein, 493 aa, Unknown
  Obtained from environmental sample
  DOMAIN (133)...(213): Cache domain
  misc_feature (1)..(493): Xaa is any amino acid
MVILSYKFSGRIVKLNLARYAENTLDTMEAQIYSELLESRTILDDFAHSIQNLIRSGDDAAKLTSYNADISKYLLAKDNDTFSSNGPFGYIKDSPKGSFFINGIGWEMPEDFFPEERLWYKAALKTPNDIAETIPYTDYVTGEIVFSFSRCIYADDGSFLGVVAIDVNADRIGLKIIKNAIEKNDSYGVLTGQDLTIIGHTNPAYVGKKMYDPEVPLSALVEELLREGKLSEVEWNNWKGEPVIGFFRTLPNGWRLGLFPLKKVYYQPLYNMLIILSLLGIVLASVLIIVLVRVDEAKNKSDAENRHKSAFLANMSHEIRTPMNAIIGMTTIGKSAGDFARKDYCFTKIEDASNHLLGVINDVLDMSKIEANKFELSPSEFEFEKMLRRIVNVINFRVDEKLQKLSVHIDSAIPRVLIGDDQRIAQVITNLLGNAVKFTPERGVISLTARLVEKAEDLCTLKISVSDTGIGITPEQQEKIFHSFEQAESSTTR

SEQ ID NO: 96389 - protein, 485 aa, Unknown
  Obtained from environmental sample
  DOMAIN (85)...(201): Histidine kinase-, DNA gyrase B-, and HSP90-like ATPase
  misc_feature (1)..(485): Xaa is any amino acid
SRANIERKDYCFTKIEDASNHLLGVINDILDMSKIEANKFELVPEEFDLEKMLRRVVNVVNFRIDEKHQKFSVHIDRSIPRMLIGDDQRIAQVITNLLGNAVKFTPEHGSVTLAVRLAGKANDLCTLQFSVSDTGIGISPEQQAKLFQSFEQAESSTTRKYGGTGLGLAISKSIVEMMGGSIWIQSEPGKGSTFIFTIQAHCGTEEKRTLLSADINLKNLNILIVDDDPDILSYFLEITQGFGLFCDVAISGEKALQMVDQNGGYHIYFIDWKMPVMDGVQLSREIKAHATENSIVIMISAVEWSVIADEAKAAGVDKFLSKPLFPSAIAEIINECLGVDKQQAEKSKSVEIAGIFAGKRILLAEDVEINREIVLTLFEPTKLKIDCAENGEMAVNMFADDPLKYDMIFMDIQMPVMDGYEATRRIRALDNPHAKIIPIIAMTANVFREDIERCLEAGMDSHVGKPLDFEEVLVKLRAFWNTPVL

SEQ ID NO: 96390 - protein, 498 aa, Unknown
  Obtained from environmental sample
  DOMAIN (1)...(498): Polyphosphate kinase
  misc_feature (1)..(498): Xaa is any amino acid
LTPLRVEETENLPSIDNNSLYAGFFLKAETALDEKPPEEHISIIRIPPTSERIIFLPGEREEHGDDEMGQTYWALIEDLVETWGHYLYPGYKVTESLVFKVNRDADFSVDEQRDEDFIEAMEEVLEDRGRSMPVRMVYSPGSAKIRDCLAQKLSLAESDLFELKGPLNLEKVYDLIRGYDHLREKPWKIFSHPAFSEDQSLWDRISQGDILLHLPYQSFDPVVRFFQDAAADPAVAAIKTALYRTSGDSPIIRALEQASLAGKHVTAVVELKARFDEGRNISWANRLEKAGVIVVYGLARLKIHAKITLVMRREYNRIKRYVHLSTGNYNDKTAKLYEDISLFTAREDIAFDAGLLFNMITGYSSVQAMNRLVIAPTALKRKLLELITREINRSSMEAPGRIMAKMNALADPEIINALYRASQAGVKVLLNVRGICTLVPGIKGLSENIRVVSIIDHYLEHSRIYYFSNGGAEELYLASADLMTRNLDRRVELMFPVL

SEQ ID NO: 96391 - protein, 294 aa, Unknown
  Obtained from environmental sample
  misc_feature (1)..(294): Xaa is any amino acid
MANVIRNLSKPTLVLTHNKTLAAQLYHEFKAFFPENAVEYFVSYYDYYQPEAYIVSSDIFIAKDAAINEEIDKLRLRATKNLLTRRDTIIVASVSCIYGLGSPAEYFELMVRLKVGEERDRDSILRELVAIQYDRNDYALERGTFRVRGDRIDIYPSYDDIGFRIELFGDTVEKLSWFHLVTGETIKNVNEIIVAPAKHFVTREESRIRITEQIQRELNRRLVELQAEGKDLEATRLNSRVRYDMELIRETGICPGIENYSRIIENRMPGTRPYTLWDYFGKDWLLIVDESHAS

SEQ ID NO: 96392 - protein, 414 aa, Unknown
  Obtained from environmental sample
  DOMAIN (47)...(313): ABC transporter transmembrane region
  misc_feature (1)..(414): Xaa is any amino acid
MFKRKKQVQEKHKGRNKYDVDEYLDEKVSLFNMKRCLIYLARVKWNMLLALALSILSSLIGLSGPLFIQRAIDEAVPAKDISLLIQMGVFLACSIVFSIALGAIRNIIVARTGQNIIHDIRYDLFAHLQKLPFSFYDSRPHGKIFVRVVPYVNSVSDALSNGIINFVIEVLNIFFIIFFMYKVDPHLATVTVIGLPLLAIFIWTIKPAQRRAWQAVSNKNSNLNAYIQESIDGVRITQAFDRQEKNLEIMNDLTDERNNAWMKAIYISNTVWFSTESISQLVWSFVYIMGVFWMNPMASFGMLLVMGNYAWRFWQPIINLANIYNTFITAMAYLDRIFDTIAEPVTIKDIPNAVEFPFVRGHVEFKNVSFSYDGVRKVLNNISFNAHPGQSIAIVGPTGAGKTTIVNLLSRFTI

SEQ ID NO: 96393 - protein, 252 aa, Unknown
  Obtained from environmental sample
  misc_feature (1)..(252): Xaa is any amino acid
LNKTKLLLDKDYTIAPLGKRLYSTFVEHLGRCVYEGIYEPGHPTADKDGFREDVRALVRELNFGVLRYPGGNFVSGYNWLDGIGPRNSRPKRLDYAWFSIEPNEIGIDEFCDYAKSVGSEVMYAVNMGTGTPQDAGYVVEYANFPGGTYYSDLRKQNGHKEPHGIKLWCVGNEMDGPWQICHLDAHDYGKKALEASKIMKWVDPSIELCICGSATSSMPTYPEWDRVVLEYVYDKVDYISLHRYYENLGDEI

SEQ ID NO: 96394 - protein, 365 aa, Unknown
  Obtained from environmental sample
  DOMAIN (304)...(365): Alpha-L-arabinofuranosidase C-terminus
  misc_feature (1)..(365): Xaa is any amino acid
MNRIIVNPAEANVKISRHIYGHFSEHLGRCIYGGFWVGEDSPIPNIRGIRKDVVDALKRIKIPNLRWPGGCFADEYHWKDGIGPRAERPKMINTHWGGVTEDNAFGTHEFLDLCEQLSDSTGKRCEPYICGNVGSGTVQELSQWVEYCNFDGVSPMADLRKKNGREKPWQACFWGVGNESWGCGGNMTPEFYADNYRRYAVYVRKYGNVVPYKIACGASDINYNWTKVLMEKTCGERGNLIDGLSLHYYTVPGDWAHKGSATQFNEEEWLVTIRKAYLMDELVHKHGAIMDEYDPKRKVSLVVDEWGTWYDVEPGTNPGFLYQQNTLRDALVAGIHFNIFNNYCERVGMANIAQTINVLQSVILP

SEQ ID NO: 96395 - protein, 80 aa, Unknown
  Obtained from environmental sample
  DOMAIN (2)...(51): Oligopeptide/dipeptide transporter, C-terminal region
  misc_feature (1)..(80): Xaa is any amino acid
DKLLKESVPAPDPADKTGWAKRIGLSTTEVKEYSREGCKFHGRCPNAMEQCMQAEPPDVEAEGRVVKCHLYAKKDAKQGS

SEQ ID NO: 96396 - protein, 111 aa, Unknown
  Obtained from environmental sample
  misc_feature (1)..(111): Xaa is any amino acid
LKNFNYVIYVLLVVLGLLGGWLIFGEKSHKNHNDIKSAKETIYTCSMHPQIRLSDPKSKCPLCGMDLIPVAIENENSVQDDDSFTMSAAAVALSNVEILKAKKSEPQKMLR

SEQ ID NO: 96397 - protein, 341 aa, Unknown
  Obtained from environmental sample
  DOMAIN (137)...(340): Protein of unknown function (DUF1460)
  misc_feature (1)..(341): Xaa is any amino acid
APQNFLKPNALTRLLTSMIRQEKGDIYFASLAIPGVSGAGKRLNVEFKDRIRFKTGFIESVHGLAGYIVADNNDTLAFALYLNKAEYVKEDLARNILDTLVGRIAKHHNSEAAQLEHGKVLWQGAAEIKNTHERINYFSNKLKGKSYFLGPMGEGLSIYPSYKPRVNFKEMDCLTYIEHVLALAYSENYNDFFGILQNIRYKNGVIDYKARNHFLIADWLANNGFVFRPGGWELGSEEVFEKEIDKKKFLADSSLLNPKVNIMYLPKARAIIYADTAKFAKDTIFGLAILSDLPGLDAAHTGFVIGSAKKKGLMFRHASQLKGKVIEQPLSEFLKTTKIKT

SEQ ID NO: 96398 - protein, 141 aa, Unknown
  Obtained from environmental sample
  misc_feature (1)..(141): Xaa is any amino acid
MCAAPLEKWRSAEVTERRTRKKKRVTVDVPDAEYNVLVMDNLDIPTMGSLYKAFPPEEAKRIRDKLEVHYTPKHGSWVNMAEIENNVLINHGLSKRIPTIEQMKKEVAAWTEARNQSASTINWRFTTDDARIKLKRLYPQL

SEQ ID NO: 96399 - protein, 233 aa, Unknown
  Obtained from environmental sample
  misc_feature (1)..(233): Xaa is any amino acid
MPEAEWRKLAHATFVHERGERSNPDERGTWSLKSGTPDRWLVSYKHSGLDIKLRLGLTSFKHVGVFPEQASNWDFIYSAAKKFKKRDAKVLNLFAYTGGASLAARAAGADVTHLDSIKQTVTWANENQQVSGLDGIRWLVDDALKYVQRQVRRGTKFSGIILDPPAYGRGPDGERWLLGEGILELLCGVEKMLEPRDSFLVLNLYALGFSSVVCDTLVRSVFGDSKQRESGEL

SEQ ID NO: 96400 - protein, 302 aa, Unknown
  Obtained from environmental sample
  misc_feature (1)..(302): Xaa is any amino acid
DEVKILKKSGVPKSQLANVKSYLYHQLLTGLRQSAVNDYDDVSLREQLDFARILYAKGMYKQSLKILDRAKAQAMDKLQFTTALEVVEFEKLIESQFITRSSTSRADDLTDEVQKLSYTIQKANEFSNLAIQLYALYLKRGHVRNRNDIVFVEDYYAKNRPKFDPRNQGVYEQLYMNLSSYWYSYIMQDFVACYRHTQRNVDLFNAHPMLKRSLPDLYFKSFNYLLESLFYLRHYAKFKEVLDVLHEEVIGQENIQNQNAEILARSFYYANRMNLHFMDGTFSDGLEIVPELLDFIEKIRTK

SEQ ID NO: 96401 - protein, 328 aa, Unknown
  Obtained from environmental sample
  misc_feature (1)..(328): Xaa is any amino acid
MANADTTVNIGTNDRENPSLDRLCGDVLALRAPYDDVAEQIEDAAYFEYEQGGLEHAIELLTGLARFFEGLRNKNEEMSRDLAQVYLLIGQIYSYAGNFEESIAWINNSIVVDDMYPVSYHSLALAFRSIGDESMSIKSLEQEIRVAPGNYYSYLMLADLYEKNGDFASFEDVLRRLLERAPDNVQGLHRLIRHCERVDGGADVELLRRRLLGNDKGLSRIEAVIRAYHLAQGGREREAVEFLEAWGEEAPDVSINHLANAHIYGRMHLHSKKRNELSRFRMKNRAREDVMEIKIAEFASVFGEEAAEKIRRSLRVAGIGKGFGYNNN

SEQ ID NO: 96402 - protein, 267 aa, Unknown
  Obtained from environmental sample
  misc_feature (1)..(267): Xaa is any amino acid
MSESGSDLETAAWCVKNLFTNCYVSGYHLEKPDLSTIPPGCNPKDIFVLLQAVLNRLPQKEITFKESVFSWCELKLTAAEVLAKMLLCIAIPKNRDNELLDKFLEFTNKMGVNTREGLVKHFLSNPANDQQKTALLEALGDRSSGVRQCAREVIKKTNLTAADFLLIEGLLQYKYDDLRKNCLVLLLKQDTDAILPSVERLFASDSENKRLGAIELVASMKGKQDFAAIYQKCENLLTTPTKLTQAEKIRISEITNHDARVYTLENG

SEQ ID NO: 96403 - protein, 536 aa, Unknown
  Obtained from environmental sample
  DOMAIN (426)...(508): Helicase conserved C-terminal domain
  misc_feature (1)..(536): Xaa is any amino acid
VQKINDLEAQMQALEDAELPLRLAEYRRQHEEGRRLNDLLPEVFALVRETSRRRLSMRHFDVQLVGGMALHEGKIAEMKTGEGKTLAATLPVVLNALSGKGVHVVTVNDYLARRDARWMGEIYAALGLTVGVIVHGLDDDERRDAYAADITYGTNNEFGFDYLRDNMKFYARQLVQRPHHYAIVDEVDSILIDEARTPLIISGSSEQSTGLYRQMDEIVRKLKPVEHYTVDEKARTAMLTEGGVARCEKLLHVENLYDPLNITAQHLVLQALKAHHVFRRDVDYIVSNGQVVIVDEFTGRLMPGRRYSDGLHQALEAKENVKIEAENQTLASITFQNYFRMYEKLAGMTGTAETEAVEFRQIYSLDVVSIPPNKPMIRKDFPDQVYRTRQEKFQAIINSILELYAKGQPVLVGTISIEISEYISGLLHKAEVPHTVLNAKHHAQEAEIVAQAGQAGHVTIATNMAGRGTDIVLGPGVVELGGLHILGTERHESRRIDNQLRGRSGRQGDPGSSRFYLSLEDDLMRLFGSERLSSIM

SEQ ID NO: 96404 - protein, 429 aa, Unknown
  Obtained from environmental sample
  DOMAIN (16)...(422): Nitrogenase component 1 type Oxidoreductase
  misc_feature (1)..(429): Xaa is any amino acid
RRESPRSISCERESVSGAVSQRACVYCGARVVLNPITDAYHIVHGPVGCASYTWDIRGSLTSGEDTFRNSFSTDLRETDIVFGGAKKLTAAIDELMEKAVPSPKLIFVFATCIVGVIGDDIEAVCRLAEKKYGIRVIPVKAPGFSGTKSQGYKLACNAIMNLIRPHAKQPKRFGINILGDFNLAGEMWIIKGYLEKIGIPVISTITGDSSYKKLIQAPSAMLNIVQCAGSSAYLSELMETEFGIPSLRVSFFGIEDTTASLLRVADFFGKMEISENARKFAAEQTANIMPVIEKYKPHLEGKKAAIFVGGGFKAISLIRQFNELGMEAVVVGTQTGKKEDYEVMGSLVNSNAVILDDANPAELERFMTEKQADILVGGVKERPLAYKLGMAFCDHNHERKHPLAGFEGIENFVKEIHKSINSPVWKYVC

SEQ ID NO: 96405 - protein, 536 aa, Unknown
  Obtained from environmental sample
  DOMAIN (155)...(339): Radical SAM superfamily
  misc_feature (1)..(536): Xaa is any amino acid
NGALPVLAATGSISPKLQEMLANEAEDCKKFHFAEEIRVLDDSDFSAIEKGCVELGANLLIGSSDGRRISRKLNIPLIRCAFPIHDYIGGQRTRILGFDGSLNILDQAANAMMEKTESSFREELHKKFYKPQTADKTATHPCFGEQACQNARVHLPVAPKCNIQCNYCLRNYDCMNESRPGVTSKILSPAEALERYIKLKANMPSLTVVGIAGPGDALANFDKSAETFRLIREYDPSVTFCIATNGLLLPQYAQELRELDVSHVTVTMNAVDPSIGAKIYKYVQYMGKTYTGVEGASILLANQLAGIKMLSEAGIMCKVNCVTLRGINDHHIYEVTQTAASLGAFMTNIMPHLPVKGSAFEGLERVTNKEIAVLREQCGANIKQMTHCRQCRSDAAGTLDRDVSIEFRESTPEKPQPEKFRRFAVATQTGAVVDMHFGQANEFYIYESDEKNARFVETRKVIKYCNGPQCENKEERWNSVIHAISDCEAVLAVRIGPTPEKRLKENGIGAITTYERVETAVLQAAKEKRRNTHGTT

SEQ ID NO: 96406 - protein, 449 aa, Unknown
  Obtained from environmental sample
  misc_feature (1)..(449): Xaa is any amino acid
VSYRLDISGKEPFLQGWAIVDNDSDADWNGVELSLVTGRPVSFIQRLYPPYRLSRPVVPLAIAGFAESRTYESGYDSGARAPAAAPSAAMRTQSMADTARAEMDYYYEKESAAAGSVAGGAIDTASGRAAGDQFEFTLKNPVTLDRRQSAMLPLVEGAIKAEKVLVFSGSRALGGATINPAISAELTNTSGMKLPAGPITVYDGGTYAGDALIEFFPENEKRLISYGEDLSVGGSVASSGTRFVTAVNISGGVMTITRRQSYEKVYTIKNASSQAKKIIIEHPITSGSELAEPKSADDKTASLYRFNRDLPPNETITFTVREETPIQERITLANLRADTFLSYASNQEIPADVRAALTRAIELKKVADNAATAQATLETQKSRLISDQDRVRRNLEAAGNQTPQGQEYLRRMVSLDDEIDSINKQIETAAQETQRTKAEYENYLATVKI

SEQ ID NO: 96407 - protein, 295 aa, Unknown
  Obtained from environmental sample
  DOMAIN (1)...(159): Alanine racemase, N-terminal domain
  misc_feature (1)..(295): Xaa is any amino acid
ISAPILLFSQPLPSEIPEIFENSLTPLVSDGEFIEMLAKTAAEVKIRLPIHLKIDTGMGRMGCKPAEAPVLARQIACFPALEYAGTATHLAVSDSAAPQDMAYTEQQIAGFKEALERIRAEGVDPGIVHAANSGAVVLHPDAWFDMIRPGIILYGYNPAETLSPEVKPVMELRTNVALIKRVKKGETVSYGRTWTAPHDTAIAVLPVGYADGLPRLVSNKWQAVINGKTYPLAGRICMDQCMADLGPDTNVRRWDEASIFGGPAPDAGILAGRIGTIPYEITCNINKRVPRVYES

SEQ ID NO: 96408 - protein, 189 aa, Unknown
  Obtained from environmental sample
  DOMAIN (129)...(184): ANTAR domain
  misc_feature (1)..(189): Xaa is any amino acid
MENVLLVSDSGKDTALYTTFLKAASFHQVIVSKSCGDARKLIQKQDFDLIVVNSPLSDESGESFSRHAAAQGVSQVILLVKSDSFNSVSAACEADGVLTIAKPVDQSLMWGALSLARSIQNRLKRMRTENTQLKQNIEDIRIINRAKLILISALSMTEQEAHRYIEKQAMDIRSSRRFVAEEILKRYEN

SEQ ID NO: 96409 - protein, 198 aa, Unknown
  Obtained from environmental sample
  misc_feature (1)..(198): Xaa is any amino acid
MNNLCSDLQKERYAYAPKLPENIAADFHDILAEYGESTESISDQDELKKVFPNTYGKPVARFLRQKGKGTIKTEALKVGVILSGGQAPGGHNVIAGIFDGLKKAHPASSLIGFLGGPSGILKNSFIEITEETLAPYRNTGGFDIIASGRTKLETEEQFAECARVLKSHSIDALVVIGGDDSNTNAALLAEYLLREKHA

SEQ ID NO: 96410 - protein, 284 aa, Unknown
  Obtained from environmental sample
  misc_feature (1)..(284): Xaa is any amino acid
AFGIARLNLGLMLGNSGLGPFTFGLGLDLRSLFPTFGFDLSWAMVPFSYGGTREVGHFLTMNLIFGPRDYVPPAPDMQSRSRYFSPNGDGIQDTAIFDLHADAKQEIASWQITIKDADNRVVRQLGNQNESEQRLTLGKFFSLLFASRRNASVPSSWEWDGRDDRGKKLSDGTYLYQLKVQDARGNEGVSLTKPVEIRTIQPEADIDIKLSLFSPNRGRGKDLLVIDQTLAGRDTRWTGYITDANGKTVRTFPWGENAPSRFTWDGKDENGKTVPDGNIYTCWK

SEQ ID NO: 96411 - protein, 315 aa, Unknown
  Obtained from environmental sample
  DOMAIN (1)...(292): tRNA synthetases class I (E and Q), catalytic domain
  misc_feature (1)..(315): Xaa is any amino acid
IRIIEDGMSWCGLDWDEGPIQGKPKEWKGPNGPYRQMQRMESHYRPALEKLLEMGLAYRCRCTKESLEERRKKAETGGIPFQYNRGADAGNGCRDKNYDASQPFSVRLKMPYGSEPWLENGCIVLRDKIKGRIDFPAQSLDDWVMARTGEGGQAGVPTYNFCVVIDDIGMEVTHVIRGDDHVANTPKQIALYQAIGSEPPIFAHVPMILGADGAKLSKRHGATSITEYQALGLLPSAIRLALAKLSWCPKIDGKASESAEEEILTDAQMIELFDLDEVQKSPARFDMDKLNWINQKLIQRSSYQELEPFPATLPF

SEQ ID NO: 96412 - protein, 475 aa, Unknown
  Obtained from environmental sample
  DOMAIN (316)...(467): tRNA synthetases class I (E and Q), anti-codon binding domain
  misc_feature (1)..(475): Xaa is any amino acid
MTRFPPEPNGYLHIGHAKSICINFGLAQKYGGKTNLRFDDTNPVKEDVEYVDSIREDVRWLGFSWEGEFFASDYFQQLYDYAEYLIQQGKAFVCDLSENEIREYRGNFYTPGRPSPFRERQPKENLELFWKMRAGEFPDGSKVLRAKIDAQHPNMNMRDPLMYRIRRANHHRTGDEWCIYPMYDYAHGVCDAIENITHSICTLEFEDHRPLYEWFLEQDKEEKFFRRPLPRQIEFARLNLTHTVMSKRRLLQLVQEEHVSGWDDPRMPTICGLRRRGYTPGAVKAFAERVGVAKRDMVAEVGLLESCIREDLEANAPRRMAVLRPLKLTILNLPPDQSFEVVLPSHTEKPELGTRKLRFGREIWIDRDDFREDPPKKWFRLAPGAEVRLRGAAIVRCQEVVKDASGDIIELRCTWDENSKGGDAADGRRIKGTIHWVGADEAIDAEVRLYEQLFLADDPMDVPEGQDWRQGINKE

SEQ ID NO: 96413 - protein, 86 aa, Unknown
  Obtained from environmental sample
  misc_feature (1)..(86): Xaa is any amino acid
NCECGYKGNTGKFCAECGKPIPVDKGWTCSCGTVNKGKFCMECGKPKPAGAAKYKCDKCGWEPKDPSKPPKFCPECGDPFDEKDIV

SEQ ID NO: 96414 - protein, 303 aa, Unknown
  Obtained from environmental sample
  DOMAIN (18)...(289): ABC transporter transmembrane region
  misc_feature (1)..(303): Xaa is any amino acid
MEQVKWVWNYMKGKRAVFMGGLFLTVVTSSIRVINPLLGKQIIDIVIVKHDTSPLIKLLVIMMIVQLSRLLLNYLQIILMEIASTDVMTRLRRDMYQTVQWQDYKFLNRFPTGNLMTRMTQDLDRLRHTVAWVSYQFIGAIALFAATFIFYLFLNWRLALCLVGITPFILYISSRFVKKIRPRFQLLREKLTDLGTAVTENIDGNRVVKAFAREEYEKEKVEKQNAEFRDISCENALITAKYQPFLETASQLLMVIMVVAGGFFLIKEWMTPGEYMAFSSLTWALAMPMQMLGPLLADLERWT

SEQ ID NO: 96415 - protein, 747 aa, Unknown
  Obtained from environmental sample
  DOMAIN (12)...(638): tRNA synthetases class I (I, L, M and V)
  misc_feature (1)..(747): Xaa is any amino acid
MAKYPFETIEPKWQKYWEDNKTFKVTEDSSVPKDKRRYVLDMFPYPSSQGIHIGHPEGYTATDIYCRYLRMNGYNVLHPMGFDAFGLPAENYAIKTGTHPAVTTKANIDCFRLQLKALGFSYDWDREVDTSSVEYYRWTQWIFLKLFEKGLAYEAESPINWCPSCKTGLANEEVKDGLCERCGEKVTRKRIRQWILKITAYAERLLADLDSLDWPEPVKLMQRNWIGRSEGANVVFKVDKSNLTVLQKEKLHDKDLSIEVYTTRPDTLFGATYMVLSPEHPLVEILTTPEQKEAVTAYIEAAARKSDLERTDLAKDKTGVFCGAYAINPVNGEKIPVWIADYVLISYGTGAIMAVPAHDERDWDFAKVFNLPIIQVVAAEKPQPGKDYSAEPVECTAADGYSVNSSTFTGLPTAEAKKRVTEWLEEKGAGKKAVNYKLRDWVFSRQRYWGEPIPVVHCEKCGIVPLPESALPLKLPDVKSYAPTGTGESPLAGIDEWINTTCPKCGGKAKRETNTMPQWAGSCWYYIRYLDSKNDKAFAAKEKIDYWLPVDLYVGGAEHAVLHLLYSRFWHKVLYDLSLVNTVEPFQRLINQGMILGADNQKMSKSRGNVINPDDIIKEYGADSLRVYEMFMGPLEVSKPWNMAGVVGVSRFLERLWAIGEKPLCDAVQGSDEAGGVELQKLLHRTVKKVTQDTESLNFNTAISQMMVYSGELARLAEIPRAMWEPLVIMVSAYAPHLGEELWEKRR

SEQ ID NO: 96416 - protein, 142 aa, Unknown
  Obtained from environmental sample
  misc_feature (1)..(142): Xaa is any amino acid
MPNNKTSKKRKPQAVENQNVEWKESWHDEYLKWICGFANAQGGRLEIGRNSKGVLVGVLNAKQLLEELPNKIRSTMGIVTEVNLFKKNGLEYIIINVITHPNAISYRGKYYLRSGSTNQELTGFALDELILRKYGRTWDSAP

SEQ ID NO: 96417 - protein, 131 aa, Unknown
  Obtained from environmental sample
  misc_feature (1)..(131): Xaa is any amino acid
MKCLFDNNLSPKLAKTLSCLEGNDGIVVEHIKEKFSPDTPDIEWINKLAKEGDWFVITEDTQIRKKPHERKAWQESHIPIVFLHKSWVKQNFWDIAWRFVRYWPHLKESVSHNSKAKSFELTINGKINIGK

SEQ ID NO: 96418 - protein, 410 aa, Unknown
  Obtained from environmental sample
  DOMAIN (63)...(409): Glycosyl hydrolase family 10
  misc_feature (1)..(410): Xaa is any amino acid
ASVDADGKVTAVGVTDSLTDKYTVNPATGSAVITAKTGDGEYEASIEITTTLRPQVDVMTLPPLKDQFSKYFLLGNIATASDANSGGTAITRQSLLRHYNVLTAENDMKPNSYGNNANSLTYASSDRFVNAARGSGFKVHGHVLLWHSQNSAWINNHANSSRDASLAAMKKYITDVCTHFKGKLYSWDVLNEAFPDSVKAADDWKTVMRPENPWFKSIGSDFVYEGFLAARLADPDAILYYNDYNTDSPGKAAMIRDMVKDVNEQYKKAYPTETRLLIEGIGMQEHHNTGVSANAIKTTLNMFKALGVKISVSELDVLIVSYQEFESSGGHGPNKQDSIKGDKRTNGLKKQAELYGEYFKVYLEFSDIIERVSFWGVTDDKSWRSVGLPLLFDPDGNAKEAYDSVIKALK

SEQ ID NO: 96419 - protein, 392 aa, Unknown
  Obtained from environmental sample
  misc_feature (1)..(392): Xaa is any amino acid
EGSAIDNEVGSVCYDNKESNCDKYGRLYYWVTAVGLPADCKGQIMSLDCIIPKGTQTQRQGICPSGWHLPDSSEWQTLMNYAGIKVDQVYGSKLGTKLMSESIGGTDKYGFNALLGGYHVPSNNRLFTGIEDVGWWWTTDRGEVGVYTIEIWGNKVEISQTLPSVFLSSVRCVQDDPSLPVIAATSSSSVKATPSSSSASSSSAITKPTFANTFIDERDGKKYGYVEIGEQTWMAENLNYAVSYSEGVGDGLAYDSKCYKNLESNCDIYGRLYTWGAAVNSLCPAGWHLPSDAEWAKLTNFAGSNAGKKLKSKIGWDSSGNGTDNYGFAALPSGIGIAGSGGFVRIGTATFFWTSTEDDYFHQSVFNRNMTSSRDSVGRNYTYKNDYGSVRC

SEQ ID NO: 96420 - protein, 296 aa, Unknown
  Obtained from environmental sample
  misc_feature (1)..(296): Xaa is any amino acid
DAITLKAVADVSGKDNMNVNVLTHLEYDKVIKLAKEGKSFGEAKKQAQKEVLTALGVSESVTRNSEDMGLFGGNSNDNVLLTVSVSLQGNRTTKDVSSLLSEFSSQINDNGALSGSVKSEVDKGLAGVDLGKVRNNILALEPSAKVPDTFPKTSGSGSGSGSGSGSGSGSGSGSGSGSGSGSGSGSGSGSGSGSGSGSGSGSGSGSGSGSGSGSGSGSGSGSGSGTTPTPTPIPSSSSAVVLTSSSSSSDNLPVCDANRTQNCVSICADRGQYDPKTEICEGGYLNQSQSICARVL

SEQ ID NO: 96421 - protein, 432 aa, Unknown
  Obtained from environmental sample
  DOMAIN (229)...(391): MatE
  misc_feature (1)..(432): Xaa is any amino acid
LLVFAIPMLLSNIFQQLYNTVDMVIVGHFLGETSLASIGACAAIFELLIGFTIGISRGFSIVAARNYGAGNQDMFKRTVAGSVAAGILITIFISVTVSLFMMPLLKLINVPAYIIDTAYSYISVLIAFSVVTFTYNLCAGLLHAIGNSTMPFLFLVISSILNILFDVIFITSFNMGVRGAAVATVAAQSISTALCLVYIFRKCPILIPGKKHFRYDNALYKEIVAQGLSMGFMLSIVSLGSVALQRAINGLGYLVIAGHIAARKINNFCMMPMSTIAIALSTFVSQNKGANQLSRIRKAVRYGNCIVVTWGVFISVVLMFSSKVLIRLLSGSNESIIIENGARYLMINSPFYTVLGMLFIFRLALQGIGKKIVPLISSVIEFVSKILFSFLLVPVLGYFGVIICEPIIWCVMFLQLLYSFYTNPYIKGKIII

SEQ ID NO: 96422 - protein, 83 aa, Unknown
  Obtained from environmental sample
  misc_feature (1)..(83): Xaa is any amino acid
MFYKVKTVKALPDFHLHVTFHTGEQKIYDIHPLIKKYEPFQSFLLTHRLFEQVKVAGGGYGIYWNEDIDLSSDELYINGKQAS

SEQ ID NO: 96423 - protein, 283 aa, Unknown
  Obtained from environmental sample
  DOMAIN (69)...(193): PAP2 superfamily
  misc_feature (1)..(283): Xaa is any amino acid
METSYIQMLAMEPQSIPGIYLWGIEIVKVIQRLKSPALTAVLTFITEFGTDIFYVPAILFFFWWIDEKKGVRLGILIILSAWINAFLKNLFNQPRPFDFDPSLGLAYEPTNGIPSGHAQFSLCFWVPIAAWLAGEKAGRRRIVVWTAVIFFLLLIGFTRLYLGVHFLTDLFVGWIVGAIILLLRYALSPLYVKRLTGQTRAQNILAALAALVMISVYPNDRSLPALFLGFCLGYNIMKKEFPFSTQNEIAEKKLSTVFSRCLIGFAGLVAIYVYSGFASRRSK

SEQ ID NO: 96424 - protein, 382 aa, Unknown
  Obtained from environmental sample
  DOMAIN (16)...(289): ABC transporter transmembrane region
  misc_feature (1)..(382): Xaa is any amino acid
VIKILKYLKPKEWLMAALSLIFIVAQVWLELKLPDYMAEITRLTKTPGSAMSDIWLNGGYMLLCTLGSLAAAIIVGFFAARICASFSQRLRSLLFNKVESFSMEEINRFSTSSLITRSTNDIMQVQMLIVMALQLVIKAPIMAVWAITKILGKGYEWSMATGVGIMILLVMVTILMIFVMPKFKKMQTLIDNVTRVTRENLTGLRVVRAYNAEDYQENKFEAANKELTGTQLFTNRALALMMPVMQLMMGGLSLAIYWIGAYLINEAGAMDKLTIFSNMVVFSNYAVQVIMSFMMLVMIFIMLPRASVSAKRINEVLDTKPQILDGGEIGGQPNISGEIEFRSVSFRYPDAAKPVIEDISFTAKRGQTVAFIGSTGSGKSTL

SEQ ID NO: 96425 - protein, 262 aa, Unknown
  Obtained from environmental sample
  misc_feature (1)..(262): Xaa is any amino acid
MEGYKSFAVTVQGGSHINSGTVCQDYSDWYEDESVSVAVVADGHGDSNCFRSDRGSQFAVTCAIEGIKQFVKEHEPLFKSSLIKKADPPTHRELEKLIREKLIKQTAASWNMLVMEDHNKDPFTESEMEGASDKYRKRYENGENVNKAYGTSLIAAAITPWYWFGFHIGDGRFSVLYQDSSGGQPVPWDPKCYLNVTTSICDDDILDREEEGVRSYLSIHTEQPPPAAIFLCTDGIDDNYPVDEKENAECLYSLYRKIALTF

SEQ ID NO: 96426 - protein, 452 aa, Unknown
  Obtained from environmental sample
  misc_feature (1)..(452): Xaa is any amino acid
SQSIEKIDISGGEVTAYGGYGVDNTAASEVSISGGKVSVTSGRAVNNRALKGTASEPGNSVIISGGEVSATSGVAVYLSNGRALIKGGTVMSENITANQGTVFVEAANEVTDAGATLTRGALVINGGVVENTSEEGNAVYNASKRLISISGDTDPDTDETTYPTVRAKGGKAVYIKDDNSGARILNIGQGALVEATSGYAVYNIGGGEVLISDLVEEEPPEYAAIPLRENQTTVRIDSGRAVYTQGGDLKIYGGIVEAKSGTAVYVAGDGQVEIFTVVPDPDDLFDLTAVVTAADPAVDISTATVVRATEVSGIAINSASFLTFTDATSIHIKIDGQPFVTSNNRTDLQGTILLGDFGPLNSLRLTILGGTVENKGQGVAIYNASIGAINVGPEHDVVIASFPPVPILIDSNNGNASQGTVVLARNLGATPENSNPLKLRRALSATPPWRSR

SEQ ID NO: 96427 - protein, 530 aa, Unknown
  Obtained from environmental sample
  misc_feature (1)..(530): Xaa is any amino acid
MNHRPFAIILAFLFLPAVIFARDIEVAVEDEDLDMPLEGAVIVLRGGRQFTCNSKGIALVTLPDDKPTVISITYPGYETFRLSIPGANPANSTQAEKFKVALRLGGIMQGQELVLEAARPETSETKSGRSVAISDRELTRTAEIGIIEDVMNSVKLLPGVGYTGMFSAMPSIRGGDPGDLMAVLDGFYVERPYHWMGSISIFDPKMVSSARLSHGVFSARYGHTISGLLEITSKSPSQTETELEAAIGSSAASFNLSVPLSGKGGVLFMGKVTYWDTLIWAAQGLSRVVDNEILDMVNSIKTAPYIRSAALAADYHFTQDMEWRLNAFFGSDGIGLDYKTDYNNDSDETVEGTVDIKADYNNYQGFIITGLSASPTPKVALRLSGGFGFQETKTEDYFNNKITATYNDEFVDLFKPFQLYALETYFGVKIEKGGKYSAPNVNAEIDVENTVFNAQGRFDTDIELGKGFIAAVGVQELYSMWKLREDINLNFLEIQILDKDGNYKIDPNKLPPEVAGAIYALQGIPNLTII

SEQ ID NO: 96428 - protein, 342 aa, Unknown
  Obtained from environmental sample
  misc_feature (1)..(342): Xaa is any amino acid
MKYHIFIGSTLDDLKNERKEIPRIIMELGHLPVTAEYLDSTAKNYDKLLEKIIEECDYFIAVIAHKYAPKGAKISPLESECNIAHRKNVPIISLIIDEKARWKATKKEKEADLVKKVEDFKKRLRPGISDTWLNSTDLCQKLQSLLIQQINLAPRNGWVKADQAIAPSVANELSRLSTENEQLRHQIKIESGEIVAKLRVQMKNAFKVLALNKVMLSFYYASGNKWENNRNFRYLRIFKLLVPELATGKTTAEISHFLGTALNPDPNKHVRKDYPTPQNTIKKIMADLSLLKLVRCAGKSKGANANSGDNDVWEITEYGKELYSAYRMRQLNKALGRTGNKE

SEQ ID NO: 96429 - protein, 885 aa, Unknown
  Obtained from environmental sample
  DOMAIN (378)...(460): B12 binding domain
  misc_feature (1)..(885): Xaa is any amino acid
CGVQDDPAGVAAKVSAFVKNKGVAVVGGCCGTAPEHIKALADVLKGVNTFKRDDSRRTCFLSTGISGTELESAERPIIIGERLNTQGSKKTKEFVVNRNFDELYQIAKEQVDKRSNLLDVCVAANELTVGESEMMCDVVVFLRERVGAPFCIDTTEPAVMEAALKVSPGSVLINSINLEHGGAKARRILPLAVDFGCPVIALTIDDVGMAGTVDRKMEVARRLIEIACGEYRLPEHYLYIDPLVFTLATGDAETANAALNSLEALRRLKAEFPNVRTVMGVSNVSFGLKPAARRILNNLMLHHAVKAGLDAAIFNPLHVDDVNTYDKDVRELGEALLLNRSADSLQKFVEYFVALEASSSQSVQKGKPNAGTKTKANQSPEERLRSAIIDRDKRNLPELIDKLLSTHKAPDILNNILLPAMSEVGDLMARGEMILPFVLQAAEAMKEAVSILEPHLKESGGGAVKGKMVIATVYGDVHDIGKNLVASILRNQGFDIIDLGKQVAVQTIVDAVRREKPNMVGLSALLVTTSKQMGECVKEFARLGIDVPIIIGGAAVNKDFAARISALDDGNKYAPGVYYAKDAFGVVKIFDSFGVNNGIDTNGTNDVNSNDGHCERSEAIRKAANKDVSKSTKKTIKHDYIMEPPFYGTSEILTFDAAALLAGIDREKLFKTRFGGGKLDADAYADARRNEFEPAFERLSSDIIKNSLLDARGFYGFLPVIADGETVIILDPSDYHTERLSFLFPRMEKSGVSLADYIRPEGDIFSPQAVTIGAKIGELSRELLVKQERYSDGYYLNGICNYLVEDVADKLSAEIRRALGLPRDSGRRYSFGYPGMPSLEEQAELLEFLGVEERLGITLTPGFQMQPEHSTVAIFVHHPEAEYIS

SEQ ID NO: 96430 - protein, 531 aa, Unknown
  Obtained from environmental sample
  DOMAIN (346)...(529): Pterin binding enzyme
  misc_feature (1)..(531): Xaa is any amino acid
MKHKYIEMIDRREPVVFDGAFGTELQKAGLSESDFGGYAGCNEYLNITRPDIVEGIHASYLEAGAHVIETNTFGGSRVKLGEFGLGERAYEINKAAAEIARRAIEKFVSIDNNDGTGRFVCGTMGPTGFLPSSSDKELSKIKFDELTDVFTEQAKGLIDGGADVLLIETSQDLLEVRAVAIAVKRLMSSMSKYVPIQAQITMDGSGRMLLGSDISAFLGAVHGLGVDVIGMNCSSGPDEMGPYIDKLLELSTIPVSMLPNAGLPVNVDGKAVYKMKPREFADKVSAFVRDKGVAVAGGCCGTAPEHIKALAEALQGVSVFKRDNSRRTCFLSTGISGADIERAARPIIIGERLNTQGSKKTKEFVVNRNFDELYQIAKEQIDARSGLLDICVAANELTVGEAEMMRDVVVFLRERVGAPFCIDTTEPAVMEAALKTSPGSVLINSINYEHGGAKARKILPMAVDFGCPVIALTIDDVGMAGTVDRKMEVARRLIELACGEYGLPEHYLYIDPLVFTLATGDAGTASAALDS

SEQ ID NO: 96431 - protein, 175 aa, Unknown
  Obtained from environmental sample
  DOMAIN (57)...(147): Cyclic nucleotide-binding domain
  misc_feature (1)..(175): Xaa is any amino acid
MGGQFAYVSDYLDSYLFIKMRRARISAGGNGHQKLFSISNAVNRLFLSADGSLRKYHRFHKKGETIFFQKDKSDEIYYILEGEVETLVLSGPDNYTQTGTIGADSFFGEMGYLLSEARTATIRAKTDVSALALPPRVFEDILRHDASLDRALIENLYRSLKDKNAQLAGTGNNKE

SEQ ID NO: 96432 - protein, 265 aa, Unknown
  Obtained from environmental sample
  misc_feature (1)..(265): Xaa is any amino acid
MYNKSIWKNKVVFCNCDDPVDDDERHTSAFPLYFIKYFNNLGLKKLICTHYSGVVDLFNQGSKGYIFTKDGFREFKEYPEGYTGSFDHPQSLKILEEETDIVCTNPPFSRAADYWKIIVKSGKKFLIISNITNPITPAFIQYFKDNNVWAGFNEVDWFLTPKRELTRAAGHWYTNFPIKDRPKYKQLKIMSLKDIPEKYKKYDDSKKLVVDNGYIPNDYKKPFAVSARPILNGLLEKGYKIIQDTQYFPYENGKKCFGRVLVQRI

SEQ ID NO: 96433 - protein, 542 aa, Unknown
  Obtained from environmental sample
  DOMAIN (68)...(313): Iron only hydrogenase large subunit, C-terminal domain
  misc_feature (1)..(542): Xaa is any amino acid
MERIPLTSVIRIDEQKCVNCYACITGCPVKYCMDGSKEKVIINSDLCIGCGNCITVCHHEARHLVDDTSHFFSDLKRGDKIIAIVAPAVASVFPGKHLNLNGCLKSLGVKDFFDVSLGAELTVVSYLNYIQAKKPKLVIAQPCPAIVSYIEIYHPELIPYLAPADSPMLHTARMIREYYPQYRDHKIAIISPCIAKRREFDETGVGDYNVTMFALKKYLETENIDLDSCQPLGYTGLLAERAVGFSSPGGLLDTAERFVPGIRRNTRKIEGLHSIYHYLAEVAELLNDKDVQFPLLIDCLNCEKGCNGGPGTGNSKKPLPVLENPIRKRRAKLEEYHKPEKGEWVYKKYHKTLGKFWKENLYNRSYLNLCENNYIKKPGEAELTEIFHRMKKFEAEDIYDCTSCGYGSCKTMATAIFNKLNKPENCAHYNLALLKEEMKLGELNRLLRENISDASAIIDDIDKTVNELNASIASQSRFVEESSQKTEKMISSLNTTSEISRNKRETIQELLANAAGGQESMRETIQSVQGISQSVDGIASAI

SEQ ID NO: 96434 - protein, 355 aa, Unknown
  Obtained from environmental sample
  DOMAIN (23)...(340): Receptor family ligand binding region
  misc_feature (1)..(355): Xaa is any amino acid
GSDSVSIGAIFPLSGSVAFYGNESRDGAQLAIDEINAAGGLLGKKLVLLSEDDEGDAAKAVNAFTKLTTRDKVSFVIGSSTSGPTQAMSTLAQNSKVVLVSPSATNINVTKAGDYIFRACFIDPFQGVVGADFAYGTLGSRRAAILYDAGADYNAGLADSFRNQFKAIGGQVVADEAYQSGDVDFNAQITRIKTANPDVVYLPNYYNDVSLQAKQLRDQGITCALVGGDGWDSLTDNAGDEILNGFWSSGFASDTTDPKGVAFVKAFQTKYNRLASQFAALGYDTMMLVIDGIKASGSFDPSVVKGAIAKISGSYVTGNIRYDSDRNPIKGAAILEIVKQDGKLINAYKTTVNPK

SEQ ID NO: 96435 - protein, 453 aa, Unknown
  Obtained from environmental sample
  DOMAIN (383)...(453): Elongation factor G, domain IV
  misc_feature (1)..(453): Xaa is any amino acid
VERALRVLDGAILVLCSVGGVQSQSITVDRQLKRYSVPRLAFVNKCDRSGANPYRVAQQLREKLGHNAIMIQIPIGLEDKLEGVVDLVTMKAVYFDGKNGETVRDAEIPADLLEEAKKKRDEMLDAVSMYSDELAESYLEGTETVEQIMTAIRKGTLSLELTPVLMGSAYKNKGIQKLLDAVVDYLPNPNEVENKALDLDNNEAPIILKADASAPMIALAFKLEDGQYGQLTYIRVYQGTIKKGVELTNTRSGKRFKVGRLIRMHASSTEDINDAGPGDIVALFGIECASGDTFTENGLNYAMTTMYVPEPVISLAIKPVDKQSSDNMSKALNRFTKEDPTFKTFVDPESNETIIRGMGELHLDVYIERMRREYKVSIETGMPQVAYRETVTTAARFDYTHKKQTGGAGQYGRVAGILEPNHEQDYEFVDNIKGGVIPIEYIPSCEQGFRACL

SEQ ID NO: 96436 - protein, 377 aa, Unknown
  Obtained from environmental sample
  DOMAIN (292)...(368): Surface presentation of antigens (SPOA) protein
  misc_feature (1)..(377): Xaa is any amino acid
MSDGALSQDEIDALLAGVDSSSGGGHGGHGAHAATMAPPAASAAAFDVDSLEKFFSSTTGALSSNLAALTGTTVTLVGPEVQATTRDSMLTLLPGMVTVVNTNFTSGFPGEHCFIFSEESAKAIASLMTKESDIQLDEMAMSVIGEVVSQIAGTQITALTDKTGNKSIASASPTAANVPKAAAALPAGNFAVMTYGLDMGDGLSHQIWEVLGPAPAADISSGLSGKAQSAAPAAGLGGMNMGGMNMGGMGMQGMGMGGMGQGMSPNVGSANVQPVQFPNLMQPRLGPHEAGNIGLIMDVSMEMTVELGRTRKLIKEILGMGEGTIIELDKLAGEPVDILVNHKLIAKGEVVVIDENFGVRVTEIVSPMERINDMGYN

SEQ ID NO: 96437 - protein, 401 aa, Unknown
  Obtained from environmental sample
  misc_feature (1)..(401): Xaa is any amino acid
GAYRYPEGELIEVPARREYYAPIKPLDYTADADADNACNEPNIADILGARRVQTRLYSDIAISEEASSFTLEIMNRFSANPRWLIFLPPTMSPSGTSKLESFLEHPMEAFDYYKKRGVTKIICEEKHMGSRAVIVLCRNSETSKTRFGIEDDSPGIIYTRTGRHFFLEEKANEQAILTRLKAALDKSGFWEAFSTNWVCLDTELMPWSAKARSLILEQYAPTGKAGQNGLAKAVEALRAAKVSHNGKDSSGITLVSGTPGDMNLAAVLADYQNRQECIERYIEAYRRYCWPVNSVDDYRIAPFHILATEGKVWHDENHPRHLAVIRDYITAGNDPVFVATNHLTADLNNETSIAEAVDWWLNLTKSGGEGMVVKPAGFYRPQQKHPSATGGKVPWPGIPAH

SEQ ID NO: 96438 - protein, 291 aa, Unknown
  Obtained from environmental sample
  DOMAIN (10)...(135): Miro-like protein
  misc_feature (1)..(291): Xaa is any amino acid
MKIEIPDLCLVALVGASGSGKSTFAKKHFKATEVLSSDYFRGLVSDDESDQSATEAAFESLYYLAVKRLERGRLTVIDATSVQPFARKKIIELARSQDVLAVAIVFDVPEGLCLERNRLRSDRTIGPHVVKNHIRDLKRSLRALQKEGFRYVHILQSQEEVDSVEIARTKLWNDKRDETGPFDIIGDIHGCYDELTELLEKLGYEVDRESCTARPPLNRRAIFLGDFCDRGPANAAVLRLAINMAESGAALCMPGNHDVKLLRKLRGNDVTLTHGLDITVKELEKEPKEFI

SEQ ID NO: 96439 - protein, 487 aa, Unknown
  Obtained from environmental sample
  DOMAIN (293)...(404): Methyltransferase domain
  misc_feature (1)..(487): Xaa is any amino acid
MLLTITYTGDNAADLGYLLHKNPSRPQTAEFNFGKVHVFYPEVSANRCTAALLLDMDPLDLARGKPGSAGGGLFDYVNDRPYVSSSFMSTAISRVYGSAMSGRCEKRQALADSVLELSATLVMLPCRGDTAMLEKVFAPLGYEVKWESGLLDECFPEWGNSCYVNLTISGKVKLQELLRHIYVLIPVFDYRKHYWIGNEEVDKLLAHGSGWLENHPEKNFITRRYFSKLGHFTRQALERLNRLDNGEGGAENPAIEEEQEAEAATPIKAPRINDQRLHAVLGELKASGAKSVIDMGCGEGNLLRLLIKEKDLAAIAGTDVSAAVLNRAAERLGLDRLGEKQKNRIALFQSSLFCRDKRFKNYDAAAIVEVIEHLDENRLSSFASVVFGDTAFSIVIITTPNADYNVNYPWLTAGNFRHGDHRFEWNRSQFRAWADAVAARYGYTVRYEDIGEQDEEHRTPSQMAVFRKNASQKANPSERDAATGAAQ

SEQ ID NO: 96440 - protein, 56 aa, Unknown
  Obtained from environmental sample
  misc_feature (1)..(56): Xaa is any amino acid
REMLEWIIAFEGTIPGASAKECGNWQEQNLEMAKWEARRYAALLEKAGRENFIYPA

SEQ ID NO: 96441 - protein, 392 aa, Unknown
  Obtained from environmental sample
  DOMAIN (54)...(392): Aminotransferase class I and II
  misc_feature (1)..(392): Xaa is any amino acid
MPCHIWRELLFDMIVLQKRRDWLFSDMRLSNRLPDSFDPNPLALLLDQFKRESTPFFDLTVSNPTACGFDYPEDAILGAVGDRGALRYDPDPKGLAKARAAVAEMHGHGLRPEQIQLTSSTSEAYGMLFKLLTNPHDCVIVPSPSYPLFEWLARLEGLECVKVPAARHEGWHLDFDAIETACGPRTKAILVVNPNNPTGQFLTGVEWSGLLELAAKKGLPLIVDEVFAPYPIERQAEALGTILDGPEPEAPVFLLSGLSKVALLPQMKLGWIAMLGPAMEASEPLAFIADQYLSVSAATACATPRLLALAPGLQKMAIGRVKENIATLDGLLKGCAHLGRCPVHGGWTALLRLPDIENDEACALRLLSDHRVLVYPGHFFDIQKNGFLAISL

SEQ ID NO: 96442 - protein, 288 aa, Unknown
  Obtained from environmental sample
  DOMAIN (1)...(288): Peptidase family M3
  misc_feature (1)..(288): Xaa is any amino acid
VRDGAFTVANKLYGITFHQRFDLPVYNPEVQTFEVKEKDGSHLGVFMADYHPRAGKRGGAWCSAYRGAKVGEDGAKVTPVIVNVCNFTRPVGDAPALLTSDEVRTLFHEFGHALHSLFFEGSYRGIAGTPRDFVELPSQVMENWATEPQVLKMYAKHYLTGEVMPDALIDKIQAADKFGNGFAKGEYLAASYLDMDWHTLGDPKEANAAGFEKKSLEKMGLMREIPPRYRTAYFNHIWASGYSAGYYAYIWAEVLDSDAFQAFKETGDIFDQKTADKFRKEILRPGGT

SEQ ID NO: 96443 - protein, 317 aa, Unknown
  Obtained from environmental sample
  DOMAIN (52)...(314): 4Fe-4S iron sulfur cluster binding proteins, NifH/frxC family
  misc_feature (1)..(317): Xaa is any amino acid
MEDQAEKLREIMRQKKSSSGKFDQADGASRSDAMSGRVSQFNAEGAEGRKTRIITVTSGKGGVGKTNLSVNMALAFARLGRKVVIMDADLGLANVNVMFNMIPKYNLYHVIKKQKTIREIMVETEYGISIVAGASGFSQIANMGKKERHDFISELESLSFADIIIIDTSAGVSSNVLDFIAAADDAIVVTTPEPTAITDAYSIIKIIATEYNTLNMELKLVVNRARGAAEANIVADKMINVTGQFLHVKMEYLGFIYEDHTVLNAVRQQKPFMVVDPKCKASQSIQHLVVRMDKNQTNEPAGLSAMFRKMFNRSQGA

SEQ ID NO: 96444 - protein, 447 aa, Unknown
  Obtained from environmental sample
  DOMAIN (228)...(426): SRP54-type protein, GTPase domain
  misc_feature (1)..(447): Xaa is any amino acid
MAEILVVRGASRGDCVHKIVNQYGIYFNILRERTISPSGLHKLFSKKEEVELEFSLYPQLGGLGIPSRQPQLKKHPAAENDENEDNDSDPNLVDFTERKKQILTAAGKDPGKIMRQMKEHEDREAGQQLIINKLNEIMEKQEQLNAKSAPRQDHPSLLRITQILRQNEFSERYINGLLDRARKELPLETLDDYAAVQNQFLVWIGESIKIFSMPQKEEGSSGSADIAAGRVLILVGPTGVGKTTTIAKLAVVYGVGSVDRAALSVRVYTIDTFKIGGTEQLEKYCEIMEVPFGIINNQTGLRKEIDMYREETDLILIDTIGSSPNDPKKLGEMQALLNVCGSKAEVYLVLSASTKTNDIEHILRQFEPFNYQAVLLTKMDETRTVGNIISALAEKGKPISFITNGQQIHKDIKKANIVGFLINLQGFTNVDRDEMEKRFPAAQADII

SEQ ID NO: 96445 - protein, 278 aa, Unknown
  Obtained from environmental sample
  DOMAIN (11)...(260): Phosphomethylpyrimidine kinase
  misc_feature (1)..(278): Xaa is any amino acid
MVKIATIAGSDTSGGAGLEADLKTFEEYGLYGMAAVTLIATMDPDNNWGHGVFPIDEKTLKAQLETIFKGVGVTAAKSGMLGTFYAVELTREYISAYKVKNYVLDPVMVCKGNDEALNPELNQAITEKLLPLANIVTPNLFEAGQLSGIKEISSVEQMKEAAKIIAEKGAANVFIKGGSKLPGATEAVDLLYDGKNFELIKAPLIKTGWVHGAGCTVSAAIAAGLARWLSVYDAVVLAKKFISQSLNGSFALNKWVGPGNPANWRKNNLFSKELFYGN

SEQ ID NO: 96446 - protein, 104 aa, Unknown
  Obtained from environmental sample
  misc_feature (1)..(104): Xaa is any amino acid
MNLYHYHFTTGEYTGASVATESPLEPGVFLIPAHATKTAPPETATGQAACFEGGAWALKEDHRGERRWSTATGQPVEIKELGALAEVAPDTTDQQPLEPQAGQR

SEQ ID NO: 96447 - protein, 222 aa, Unknown
  Obtained from environmental sample
  DOMAIN (4)...(216): HpcH/HpaI aldolase/citrate lyase family
  misc_feature (1)..(222): Xaa is any amino acid
MFGAVALFVPAVSEKKLAKAIGLEADSLYFDLEDSVAPAQKEEARAVLRQVLDSCAFQAAALLVRINGFGTPQWERDIEALARHQALSALLLPNADREAVQALSRELDRLDSSLKILPLIETARGLEEAQEVVLASARVTGLQFGGEDYTASLGIKRTLEGEEIGFARARLANLAHAYGLEALDTPFTNLQEMEWLRKDCQRARAMGFTGKAVIHPAQIEVV

SEQ ID NO: 96448 - protein, 635 aa, Unknown
  Obtained from environmental sample
  DOMAIN (311)...(515): Pterin binding enzyme
  misc_feature (1)..(635): Xaa is any amino acid
MEFLRRLEKERLFFDGAMGTMLQDELAPGESPVLLNIKNPDSVLNVHKAYIKAGCHILKTNTFSANRLALSGSGFSVNQIVSQAVSLAKKAAEGNDAFTALDIGPTGKLLAPFGDLDFEEAVDIFSEMIKAGVQAGADIVLLETMTDTYEIKAAMLAAKENCDLPVLVTFSTDESGRLLNGADIQTAVCLIESLGACPLGFNCGFGPAQFKSLLPELFRHSSIPVIVNPNAGIPERINGKAQYNLPPQEFAAEMAELAPDAHIIGGCCGTTPEHIAAAICACKNTALFAVTQKEVTAVCSYGETVVFGGKTVIIGERLNPTGKPRMKKALIENDMNFLYREGLLQTEHGAQILDVNVGLPDINEEEMLAKLVYGLQSVTKTVLQIDTANANAAKRALRIYNGKPLLNSVSGKKESLEAILPLVKKYGAAVIALCLDDGGIPETAEGRVKIAEKIIAAAAEYGIPKKDIIVDALTLTISTGADNARITLDTVEYLRRKIGVHTVLGVSNVSFGLPGRESVNAAFFSLAMRAGLSAGIVNPMNSAIMDSVYVYHAISGADENCEDYIARFSSQERTAAAAAKETAQEVNLQEAIFSGLKEQAARTAASMSENTPPMEIINSHLIPALDRAGKDFESQ

SEQ ID NO: 96449 - protein, 276 aa, Unknown
  Obtained from environmental sample
  DOMAIN (200)...(276): B12 binding domain
  misc_feature (1)..(276): Xaa is any amino acid
MTISTGANNARVTLDTVEYLRRKMRMHTVLGVSNVSFGLPGKENINAAFFSLAIRAGLSAGIVNPLNNAIMDAVYVSQALNGTDVNCARYIARFSSREQAAAYSVAAEKSARQEVSLHDAILRGLKEQSAKTAGRMGDDMLSMEIVNEHIIPALDKVGKDFESQKIFLPQLLMSAEAAKAAFEAVAARMTKHGGFQRKHGKILLATVKGDVHDIGKNIVKILLENYNFEIIDLGKNVDPALVLETVLKEKIILAGLSALMTTTVVYMEETIKLLKE

SEQ ID NO: 96450 - protein, 167 aa, Unknown
  Obtained from environmental sample
  DOMAIN (1)...(166): Glycerate kinase family
  misc_feature (1)..(167): Xaa is any amino acid
VKIPLADGGEGTARAITMAAGGEFVEVTVQNPLGKKIKAEFGLIKKGKVAVLDMAGASGIELLKREELNPMKTSSYGTGELIKAALDSGAKELIIGIGGSATNDGGIGIISALGFKVLDENGKPVGQGGQALAQIASVDASGADKRLKEVSVKVACDVTNPLLVPKA

SEQ ID NO: 96451 - protein, 476 aa, Unknown
  Obtained from environmental sample
  DOMAIN (186)...(216): Putative Fe-S cluster
  misc_feature (1)..(476): Xaa is any amino acid
ACVKKHLEAQNIDLSSFPEVEYTSPIPERAAGFSTPGGLMDTAERFVPGISRKIHKIEGIHTIYQYLVELSELLHTDVELSPLVDCLNCEKGCNGGPGTGNHNKPLPVLENPIRKRKAKLEGQLKPQKGDAGIKKYNQNLEKYWKKNLYNRTYKDLSGNNALKTPNEEELKAVFKRLKKYEKKDIYNCTSCGYQSCELMAKAIFNNLNKPENCAHYNIELLKEQTKTEELNRLLKEHISRTTGLIEKISQTVHDLNETIEMQAQSVKDSSQKTASMIESLASTSEVSRNKQNDIQELLDNATQGQKSMKETIQSVQSISQSVDGISSAIKIITAIAANTNLLSMNAAIEAAHAGDAGRGFAVVADEIRRLSDTTRENSHNISKTLKTIIDNITVTSKQSGDTDSRITEMSKEINSFAETMTNLINTLNKLSAESRDITTVLNSLRDQSAEVRTSYTSMITMTDNLRDAMEELAALS

SEQ ID NO: 96452 - protein, 494 aa, Unknown
  Obtained from environmental sample
  DOMAIN (24)...(199): Type III restriction enzyme, res subunit
  misc_feature (1)..(494): Xaa is any amino acid
MKDIEIINQNEDPLSEAVGRLFGLSYLFPYQRLVITNILEAAEADASSDRESCGRQIVILPTGAGKSLCFQLPAMLLEGLTLVIYPILSLMADQERRLRERGFSPVIIRGGQSKEERDEIWGKLESGQSKFIIANPEVLLTPQVKSRLEKISVMHAVIDEAHCVSEWGESFRPSYLEIGSILRSLNPPLITAFTATASSPVLEKIKKYIFGDLEACQIVGNPDRPNISYSAKGCVNRNLAVRDLIFQNSRPAIVFCSSRPGTEKLSRYLRDSFGEMGLSWSNEIRFYHAGLSREEKAGVEKWFINNPEAVLCATCAYGMGVDKADVRTVIHRDCAPSVEAYLQEAGRAGRDGGQSSAFLLWGPEDEASLSRAKTEADKSRVSALLRYARDTTHCRRHSLLSLLNYDSGGEVPEKLCCDVCEKKASAVLREETTVLTFFQKNKRRYTPEKAATILASSKPLHWQEEEASAVINYLIKDGKLKKCKRFPWKNKITL

SEQ ID NO: 96453 - protein, 254 aa, Unknown
  Obtained from environmental sample
  misc_feature (1)..(254): Xaa is any amino acid
MSMGSSDAQVLFKYFIHAVMLALGLIAIVPIYLLLLNATRSTEQINSGFVIVPGKDAFVSSTSIIIADWESDIESGTVKYLDLDIPRTLKEETNKKGVTEKIVVKAFTESLQPRISILNDEEQIIATFIFNNNTVLYVNDGDTIKKGATVAKLVKAPNIVYNWGSLTGRGFQIWQGFGNSAFISICTTLLSIYFSALTAYGLHVYRFKGRMFLWTVILIIIMLPSTLSIIGFYQFMSTLRLRDSIFRSYSGNSR

SEQ ID NO: 96454 - protein, 360 aa, Unknown
  Obtained from environmental sample
  misc_feature (1)..(360): Xaa is any amino acid
DIIGQETETQPGEERENDLQNNISLNNENKKLKHRKSIGHEAMTNRWGYFFVAPFIIVFCVFNLWPTLYTFILSFTDLEGLRTDFKFNGFVNYIKLVKDQYFWGALGNTFIIWTFNFIPQLGLALILSIWLSDIRLNLTGKSLFRAVVYMPNLLTAVSVALLFRSIFGFNAFATSPANQFLSSLGIRATKIDPITGELIKDAFDFFRSVAFSRGLVAFIQWWMWYGYTMIILMAGITTIPISLYESASIDGANSSQTTLYITLPLFRPIMLYILVTSMIGGMQMFDIPFLLTDMQGAPNYKIRTTTVYQYNVALGRGANDYAYGAAISIGIFIITILLALLIFFFLQDRSELKKNKGGAV

SEQ ID NO: 96455 - protein, 265 aa, Unknown
  Obtained from environmental sample
  DOMAIN (5)...(246): NAD dependent epimerase/dehydratase family
  misc_feature (1)..(265): Xaa is any amino acid
MSKTAMVSGVTGQDGGYLAKFLLEKGYRVLGLYRRGSTDTFSKLREHGIFDRIELLDFDLLEFSNICRLLKRHTPDEFYNLAAQSFVAASWEEPLYTAQADGIGVLYILEAIREFSPKTRLYQASTSEMFGKVQETPQTEKTPFYPRSPYGIAKLMAHWACVNYSESFGVFAGSGILFNHESPMRGKEFVTRKITSHFARLFTGQTEAPLELGNMNAKRDWGFSGDYVEMMWKMLQCDKPDTYVIATGETHTIEEFVEEAGKRCD

SEQ ID NO: 96456 - protein, 258 aa, Unknown
  Obtained from environmental sample
  DOMAIN (1)...(156): Peptidase family U32
  misc_feature (1)..(258): Xaa is any amino acid
VILPRELSIDEVREAAAACQGGPELEIFVHGALCWCVSGRCYWSSYLGGKSGLRGRCAQPCRRMYRQRGREGRFFSCLDLSLDVLVRSLLKIPRIRAWKIEGRKKGPHYVYHTVAAYRLLRDAGEDARARKDAESLLDMSLGRPTTRAGFLPQKAATPSSPDNQTGSGLLVGKVLLDAAGKPSFKPRQELLPQDYVRLGYEDERWHATLPVARHTPKGGTVTLRLPKHKTPKTGTPVFLIDRRDPEMMRQLAEWKERF

SEQ ID NO: 96457 - protein, 207 aa, Unknown
  Obtained from environmental sample
  DOMAIN (16)...(178): Na+/Pi-cotransporter
  misc_feature (1)..(207): Xaa is any amino acid
MAIIPILLRLAGGLCMFLFGMKMMSDGIQQSAGDRLRKTLNYMTGTRFAGILTGFVVTGIVQSSSAVTVMVVSFVNAGLLTLTQSIGVIMGANIGTTVTAWIVSLIGFSLNISSLAIPAVGIGFIMSIVKWKHKSIGDVIMGFGFLFLGLFFLTQEMSGINAVIPLDAIGAFSHMGFKAIMIGAGAGFVMTLLIHSSSAATAIVLTM

SEQ ID NO: 96458 - protein, 266 aa, Unknown
  Obtained from environmental sample
  DOMAIN (129)...(236): Nucleoside recognition
  misc_feature (1)..(266): Xaa is any amino acid
AKFFANRSRAKAKAAATAQTTVEEDSASISTAAAADEAKTEEPELSPPGIVGKIAAYLSIIAVIAAIPYSIYHKYNNGGLPNGVLDYVTSGSTWLIPLLIGGLLLGGYLCGVKVYETATDGAKEGFNTVVRIIPFVTVIFVAIGMLRASGALELFTSFAGKYTMWEVNGKWIGMPPECLPHALLRPLSGVGAFGYMAELVNKAPDSLGAFVSSVLHGSTDTTFYVLAVYFGSVGIQRIRHALVAGLTADFVGMLAAVLFANLFFGR

SEQ ID NO: 96459 - protein, 404 aa, Unknown
  Obtained from environmental sample
  DOMAIN (315)...(404): Histidine kinase-, DNA gyrase B-, and HSP90-like ATPase
  misc_feature (1)..(404): Xaa is any amino acid
VQKNIDLEEWKKPSLKSLADSLSHLNPSQDAVVLVGVELNGSIRNPQKLWQDMTKYVDSNSTAPVYSFWDIGIQNGVIGGNIILASLIGKNIGLIAEAILAGNNAYNSGFRRSSNMPMADDHAAEIRKLKLNRLPPETIRLNNKESSIIIKYQNFVYNMRNAIIAELVIILLLGFSFYSYFKYSNRKLLQEKNAVEKASKAKSLFLANMSHEIRNPLNSMLGFSELLLSKSTNLNDEQREWCNNIEISSYHLRDTFNNILDFSKIEAGNLKIEDEWVDVFSLCDDLISVCSHYLIYKSIKFYVLPSIYMPKFIKTDPVRLKQVLVNLISNAMKFTTEGSVKLLINPETKGDDNKISFEIIDTGIGIPKDKIKKIFEPFEQIDSGHTRKYGGSGLGLTISQNILH

SEQ ID NO: 96460 - protein, 69 aa, Unknown
  Obtained from environmental sample
  misc_feature (1)..(69): Xaa is any amino acid
MHKDALSKGDKVLLLDDVLATGGTISAAARLVEKQGALVSGMVFLIELDFLQGRKNIKVNCPVHSIVHY

SEQ ID NO: 96461 - protein, 396 aa, Unknown
  Obtained from environmental sample
  misc_feature (1)..(396): Xaa is any amino acid
MFRFLIFILISAIFAFAGTETEGKTAAWITLEGDVDPGMNDYARRAIAEAVKRKPDLIVFEVNTFGGRLDAAFDIVDTITALKIPTIALVQKKAISAGALIALSSDKLYMLPSTTIGDCAPIVQSSDGQPQIVGEKIQSPLRAKFRNLAERNGHPRLLSEAFVSPDLGVMELSNKDTTIYVNAVEYSDMPEAEQKKWTKKTLVRTGELLTMTNEEAYYLRFSRGTPENIEAFKKELGIAKTIIIEISWAEKLTRFIGTISGVLMILGFGLLYMEFKTPGFGAFGIIGIALLAIVFLGQYASSLHDKLPLILLCLGIALMLLEILVLPGLMICGILSIVCFIAALVMSFDISSLPAFAPEFGSLSNWQYGLLYTMLCAVLALSLPILVSKYLLPICL

SEQ ID NO: 96462 - protein, 435 aa, Unknown
  Obtained from environmental sample
  DOMAIN (89)...(433): DctM-like transporters
  misc_feature (1)..(435): Xaa is any amino acid
MIGKKIGFINDKIYGIAMPIGFTVIAIRFILKLQNTRDKILASAVFLIGCIAALPAIAKIIWGLDGSNTPEPYFSWINYLYDAASVINILVIILLIIAGFAGMPIFAAIGGIALIMLQAAGREPETAIGQIFSALTDADLIAIPLFTLTGFFLSESKAGERLVSAFKIFFGGLPGGIIIATVIICAFFTSFTGASGVTILALGGILYTILNENKYSERFSIGLLTSSGGIGLLFPPSLPIILVASSTNTILHFMNLPIDYTIIHYFIGALIPGFILVLVTIIAGLILSSKVKIQTEKFNGKNALRSLKESFFEILLPIILVLGYFTGFLTLIEVSAVSVVYVIIVEVFIKKDILFKDIPKVFLKAVPIIGGILAILAMAKALSYAFIDSGVPESFSFWMQSTIKSKYVFLLLLNFALLVLGCIMDIFSAILFSFR

SEQ ID NO: 96463 - protein, 470 aa, Unknown
  Obtained from environmental sample
  DOMAIN (141)...(229): MGS-like domain
  misc_feature (1)..(470): Xaa is any amino acid
MALNVRGLVNIQYVYYENDIYVIEVNPRASRTVPYISKVTGVQMCEIATKVSVGQTLVSLGYTSGIAKIPPYVAVKVPVFSFEKLAGLDTHLGPEMKSTGEVLGIGKNLEEALFKGLVAAGYKILRGGGVLITVRDGDKGEIAGVAEKFVKCGYSLHATRGTARFLAGKGFTVHAIDKICDNDMVNTETLLASGKISYIISTSEKGRDPAFDDVKLRRKACSLGVPCLTSIDTANALADGLLSGYSEINTELIDINRLRDERIKLAFTKMHTCGNDYIYFNCFNTEIVESPESLSVFLSDRHTGIGGDGVVLILPSDAADAKMRMFNVDGSEGSISGNAIRCVAKYLYDNGIVRKRDMLIETKSGVKKLYLSTRNGTVSSVKVDMGHTELRPEKIPVNLTGENVIKRKVIISGIEYEITCISMGNPHAVVFHDKIDDLNLSKIGPLFENDPLFPDRVNVEFVNKIKNLKN

SEQ ID NO: 96464 - protein, 265 aa, Unknown
  Obtained from environmental sample
  misc_feature (1)..(265): Xaa is any amino acid
KTEALCLAAVQEDGWALQCVPEALKTEALCIAAVQQDPRAFESVPDALKTEAVCLAAVQEDGYWLQLVPTARRTEAICLVAVLNDLSTQEYVPKNLKASVEAALKKAFATEALCLAEVQKYGMTLKFISAALKTEAVCLAAVQRSGGALEYVPEALKTEALCLAAVEDDWDALQDVPTALKTEAVCIAAVRQSSNANAFVPKRMWTEAVCLAAVSQDSRILEELPDSLKTEAFYLAAVQLNGDALFRVPEALKTEALCLAAVRQD

SEQ ID NO: 96465 - protein, 64 aa, Unknown
  Obtained from environmental sample
  misc_feature (1)..(64): Xaa is any amino acid
MNGYEAAEKLKSSDTYREIPIMFLTSMNDEESKKKGFSLGAVDYVQKPFDATSLLQLLEKHLSS

SEQ ID NO: 96466 - protein, 435 aa, Unknown
  Obtained from environmental sample
  DOMAIN (158)...(223): His Kinase A (phosphoacceptor) domain
  misc_feature (1)..(435): Xaa is any amino acid
MDNERKKIIAVDDNVENLTALKNTLKNIYEVYPCPSAAKMFDLLKHVHPELILLDVEMPEMNGYEAIIKLKGDDVFKDIPVMFLTSMSDAQSEMEGLRYGAVDYIRKPFVAPLLLQRIKTYLAIMEQQAEIKHLLDLKTEEVKLREAAELAAENASQAKSDFLSHMSHEIRSPLNAVIGMISMAAETDDVQIIKDYLKKAYNAGRHVLGLINDILDMSKIEANKLELSCVDFNFMEMLTGIVNEASVRAGEKQQSIIVNVNENVPPVITGDELRLSQIITNLLTNAIKFTPDNGRIEVKADKTDEKDGETTLRIEVADSGIGISPEQQIKLFTSYNQANSGIAQKFGGTGLGLAISKRIIELMRGRIWIESELGKGAKFIFTIKTGKGLVKASEESSRQDGSGGSGFNFNKYTILVAEDDEINREIMSALLGKIG

SEQ ID NO: 96467 - protein, 279 aa, Unknown
  Obtained from environmental sample
  misc_feature (1)..(279): Xaa is any amino acid
ARKIQEKDENALVPFHQFYDTVHTFLESHIRRVFDRCRAAADNRDGIEPRDVDVLKLLYLIRYVEDVRANVDNIAILMIEDVRADMSALRESAAKSLERLLAQHYIARNGDVYAFLTDEEQDIAREIYNTSVDRASILRKIANIIYDEIYPTRKFKYGRYEFAYDAYVDDVLSGSAGSGMRLRVLTVAHGYYSVTENELPGISGLANEAIVLLGGEIPYFEELEQALKIRGYVKWKDTAQQPESVRDILAKRLKEAGEFEKRAKEYIEKSIENATFYVC

SEQ ID NO: 96468 - protein, 731 aa, Unknown
  Obtained from environmental sample
  DOMAIN (5)...(717): Inorganic H+ pyrophosphatase
  misc_feature (1)..(731): Xaa is any amino acid
MKLSIDTLFFLVPVGSILALLFAAYQARKVLKFSEGNDIMRKISASIRKGANAYLKRQYTGVGLFFILMFVVLGILALTKFLTPFVPFAFITGGFFSGLSGFIGMKIATSANARTAQASSESLNKGLRVAFSSGTVMGFTVVGLGLLDLSIWFFLLKYVFYTPDSAAILELVATGLTVEAAQIQRISLAMLTFGMGASSMALFARVGGGIFTKAADVGADLVGKVEAGIPEDDPRNPAVIADNVGDNVGDVAGMGADLYESYVGSIVATMALAVSAGHNFNGAVVPMLMAAVGTVASIIGTFFVRCGEKADQKSLLGALRKGTYISSAIIVIASYPVIRLALPGNQGVYFAIVSGLIAGVLIGFFTEYYTSDHYNPTKNLASASLTGPATIIIGGISLGMLSTLLPVIIVGASVLTSFLVSGGLGFFKTGATPAEMLSAFNHGLYGVGLSAVGMLSTLGITLATDAYGPVADNAGGIAEMSHLPHEVRERTDALDSLGNTTAATGKGFAIGSAALTALALIVAYIDEINIHDPSFVLKLEITNPPVLIGLFVGVMLPFLFSSMTMSAVGRAAQNIVKEVRRQFKEIKGLMEGTAEADYATCVDICTRGAQKEMILPALTGIISPIVVGLLLGVNGVAGMLAGATASGFVLAIMMANSGGAWDNAKKHIEGGKFGGKGSDPHKAAVVGDTVGDPFKDTSGPSINILIKLLSMVSIVFAAFILKFSLFTFFFK

SEQ ID NO: 96469 - protein, 146 aa, Unknown
  Obtained from environmental sample
  misc_feature (1)..(146): Xaa is any amino acid
MAWETKIVDAIYTSPSGKEATFKFDETSRETQLKTGVFTFPDRDGARVQHQGAGAKTHPMICIFEGADCMTLADDFEAMLIERGIAEFQHPIYGILKVVPTGNIVRKDNLVATLNQSIVTVTLTETITDENVPELDAVTADNINSM

SEQ ID NO: 96470 - protein, 209 aa, Unknown
  Obtained from environmental sample
  misc_feature (1)..(209): Xaa is any amino acid
MSRVHKVVTGDTLGAISIRYLGTFGKWRSIVTANPQLTGRRTAIDGSPLIFPGDLLTIPDEDVSATVPAASQTFQLSDNEEAQDVSIVIDGKKFTGWTGYEIVLNYDSLDTFSFTSPYSELLKELRETIMPFTFKPCQVFYDKKLLFKGTLLTPDPELTDTEKEINLQGYPLCGILQDCTVPPGLYPGHYEGLTLKEIAEKMGNAYGIK

SEQ ID NO: 96471 - protein, 210 aa, Unknown
  Obtained from environmental sample
  misc_feature (1)..(210): Xaa is any amino acid
VFEYQCKILRTKRKIDIIQAFLNREQSYNIAEIEKQLDKEYREYTEKLLEKQKEIQSARLKNSSFGNVLTEEEASELKKLYTLIVKKLHPDINPNTTEKEHYQFIDAVNAYKNANLSELRIIYLLLDKTTVTETTNSMDNLKTKKELLLNEKKYLLDEIQKIKETFPYNVKDMLQDKETLQHKIDELSNLLTEYQEQYGNIENRLQNMLK

SEQ ID NO: 96472 - protein, 302 aa, Unknown
  Obtained from environmental sample
  DOMAIN (57)...(234): Trypsin
  misc_feature (1)..(302): Xaa is any amino acid
VDVRQRRTAAFFLSVIEGIGGGAQIPQELKTYAQGRDTPTEMIKGVATVWVERGVKIQQGRGIPDNVLGSAFFVDATGLLITNYHVISSEVDPSYKGYSKMYIRMGDSTSARIPARVIGWDKAMDLAIIKTEIVPEYVYSVVDWIIPNVGETVYAIGSPVGLEKTVTQGIVSALGRRIVQIGDVIQIDAAVNRGNSGGPVVDMAGRLVGIVFAGIEQFQGLNFAVPAERLAAALPVMIAGGKAERPWLGFSLCESLDGAEILYVAPFTPAAEQQIREGSVIKTINGEAVNATQGALIPALQD

SEQ ID NO: 96473 - protein, 571 aa, Unknown
  Obtained from environmental sample
  misc_feature (1)..(571): Xaa is any amino acid
MSKKVELIRALANALVFATEDNFRQWFVHLPPLTQSVLARLMFTEFTPVSVLEKEFKEKFLVQEKHYSWQTTSRLNENLNLGFLFLDYCNGHYTCTLPIFLRKVLSPWLMPPPEADIANCASDDTDPGWDNSQLIADSYPLLCDTVKQLFADISETEREKTAKGFKKKQMVELRASSGFLDFDMDNTLCPDSIDLTLRFMLCMKNFKPVRPKDAYEEIRNMITGFFGKDSLYKKTWYYPDRNYLEYNVCIDHLSKTPGYYLENYEGLPTSRETFHEILLEVAKDGRRFDADKLAEHIKVTAKRFGFSGSEFERTLRIKASLLEVDGIAYSCGHYEDFNVYGILRYPLFVKPLFKAYCYIFAALGLLEITCKTPPLALTKISKQFPISPYDSLKTIRVTKLGLWCLGLSSEKPPLPRHEYQAIADKELLLVTVQGKSLERTVYLDRIGIKLGEDRWRVSPASFISGCETKKQIEDRIERFKKLIDPAPAPHWLELFDKALTRAGLFGHYRSDVLVYNLGENRKIAEELLRDPELKSIAFRAEGGMLIVPAKNQKKFLALLSEHGIASFFGEK

SEQ ID NO: 96474 - protein, 938 aa, Unknown
  Obtained from environmental sample
  DOMAIN (481)...(641): DEAD/DEAH box helicase
  misc_feature (1)..(938): Xaa is any amino acid
LHPRLIRVEQTIIQKAKNPRDKEGLYFTVGRTGERSFLSFHSPKGVKQALDFRRFTGSVRELLREFLARKNERNFSFIINFDEAEDDGYTLYNPEDRLIEQALAAGLLRNEKNELLSMAEGEYRCAVRIENLPNANTLTEQYVNISVELQNESGEMVTQFYTISPRMAISGTSVYRIRSLGLRWAETDRIYSRLQKTELSAFLSLVFSGFSNLELLYEGWSVKKIRPASALPALLFMDIDKYGYLHVRPVSFLRGFPPCFLENEEIITVVEIFENEKIFGVAEVIFPEPPEDQFRAILGRGNKVIAKNSVHEENGRFIIAPKFAREFFAENIIDLSRHFVLLEAEVLAGYKLSFSRPKIRLSIGKGIDYLSGNAVVEIEGETFSFAKFMAEYRKASCITLADGTRSFPDKRTMDRLDRLVTQIKGNENAVELSYFDIPLLLQDEAIEIEGAAWEEARPFFSKYNSIQDRKGTWSLENGQLRPYQEYGVRWLDYLREYKMGACLADEMGLGKTIQVISLLRSINKAGVKGNCLILCPKTLVFNWVSELERFAPELSRTVHYGTGRDSAKLEADSFRIILSTYATLRRDIEDFQKINFLYIILDESQNIKNLTTQTTAAVLSLKGVYRLALSGTPIENNLGELYSLFRFLNPSFFGSERLFVQRYLHPIQDDNDEDALKDLKARIYPFMLRRLKRDVLKELPAKTEETAYIELEESHLAVYHRRRQEYKQLIDNIIARGEAAKSQFVIFKALGELRRLASVPEADGEYAGPSAKRQYLLDRIAELVENNHKCLIFTNFLATVDIISEDLAGLGIQNLTMTGATVDRQTLVSRFQTDDNVKAFIMTLKTGGIGLNLTAADYIFIMDPWWNNAAENQAIDRAHRIGQQNPVFCYRLIAKDTIEERILELQKRKTDLAGALLADDPGALKALSPEEVAYLVGN

SEQ ID NO: 96475 - protein, 155 aa, Unknown
  Obtained from environmental sample
  misc_feature (1)..(155): Xaa is any amino acid
IDPVTGEKKSVTSDDAAFFMANFDNGAMGIFQTSRISIGKKNWLALEINGTKGSLCFNLERINELEVYIKEENTEIEGFRTVMITNPEYMYIKNWWPAGHVIGWEHTFIHQYYEFFTAIATGKQVPTTFEDGLKVQKIISSLVESGKNRQWVKIN

SEQ ID NO: 96476 - protein, 308 aa, Unknown
  Obtained from environmental sample
  DOMAIN (10)...(294): Dihydroorotate dehydrogenase
  misc_feature (1)..(308): Xaa is any amino acid
MSSKNTATIDLSVTIAGVRLQNPVIAASGTFGYGREYAGIIDVSRLGGICTKGLTLNPRPGNTGIRVWETPAGLLNSIGLENPGIATFMEKELPFLRKLGPAVIANLSGSTVEEYAEGAALLNASSVDMIELNISCPNVKAGGMAFGLDPKAAASVVVPVRCVLDKPLMVKLSPNAPDLAAVARSCVNAGADALSLVNTFKAMAIDIQKRKPVFDNISAGLSGPAIKPIALRMVWELCRELNPAVPVVGLGGIACADDALEFLMAGATAVQVGSATFAHPSTMLEIIDGITDYMRRSGITRVKNISLI

SEQ ID NO: 96477 - protein, 85 aa, Unknown
  Obtained from environmental sample
  misc_feature (1)..(85): Xaa is any amino acid
EELQLLSALMSARPARILRLADRGSIAAGMRADIVIVDTQAAGKVDAARFKSWGKCSPFDGKELRGKVLMTLNGRRIVFEGDNIV

SEQ ID NO: 96478 - protein, 214 aa, Unknown
  Obtained from environmental sample
  misc_feature (1)..(214): Xaa is any amino acid
MAAEKKRIGLVLASIHTGISLNVWDSFVRTAAAENTSLFIFPGGRLDARQNFENLRNAVYSLVNDENLDGCISWSSTIRYTETEEEFELFHRCFDPLPCVTLGFKLPGHTCVEFNAYSGMKALVSHCISVHGAKKIAFLRGPEFHRSAHDRFKGYCDALAEAGLVPKNTVKEIVQSPLVSGPFNWDAGAAAAEQLYKDRSLIPGRDFDTLVGSS

SEQ ID NO: 96479 - protein, 426 aa, Unknown
  Obtained from environmental sample
  DOMAIN (7)...(416): EPSP synthase (3-phosphoshikimate 1-carboxyvinyltransferase)
  misc_feature (1)..(426): Xaa is any amino acid
MSSDVKISPRKLNGAVRAIPSKSQAHRALICAALADKQTNIECEGGSDDITATADCLSALGAKIEHKSGVYVVYPLKRDANSNIASLSCGESGSTFRFMLPIVGALGRKASFVLKGRLPERPLSPLYEELVSHGAELSPQGTVPFLAEGKLVPGSYSLNAGVSSQFISGLLFALPLLDGDSELQLTGQVESFPYIELTLAMLETFGIQTDFKNDIFSIPGRQTYCSPGKVQVEGDWSNAAFWLSAGAIGTGSITCTGLNFKSRQGDRAILDILTKFGACVEIIESDSRVTVSGGKLRGIEIDARDIPDLVPILAIVGSRAEGTTVIRNAARLRTKESDRLAAVSDILHALGVDAKETNDGLVIHGGKTFKGGEVSSRGDHRIAMSATIAATICAGSVVIHGAQAVNKSYPCFFDDLRLLGGSIQEL

SEQ ID NO: 96480 - protein, 238 aa, Unknown
  Obtained from environmental sample
  DOMAIN (9)...(236): Chorismate synthase
  misc_feature (1)..(238): Xaa is any amino acid
MSSQYGKKVKISIFGQSHSPAIGVNIDGLPAGIKIDIDELRTFLKRRAPGQNDISTARAEDDAPEILSGLVDSVTCGAPLAIIIRNKDPRSADYRELRDIPRPSHADFAAHIKYGGFQDVAGGGHFSGRLTAPLCAAGGICLQILRGLGISVGAHILRIGNVQDVPFDPVAVSSADFETILKNPLPVLKCEAGEAMKQQILEAKEKGDSVGGIVECAAIGLPVGLGDPMLTALRTASP

SEQ ID NO: 96481 - protein, 208 aa, Unknown
  Obtained from environmental sample
  misc_feature (1)..(208): Xaa is any amino acid
MFLRKIILIISLIFFISAALWAGDVASFIDMGFSPDGRIYMFGQYGVLSPALKPYAEIYVVDVSTNNFVPNGKIVYTHDSPILAGQDGSGVFYKLVANNSAITGRYNINFQNQGLPLYISRDVNPPSNGERIEFRDFLSGNAYKAELVPFKEGSGQNVRSSFYINLESRAQNGQIRNYTIGNPQIKRSKIETYNINRVLMTPEGNLSS

SEQ ID NO: 96482 - protein, 61 aa, Unknown
  Obtained from environmental sample
  misc_feature (1)..(61): Xaa is any amino acid
RTASRVGFVTSAAPSATLGFNLGLAIVPVKMKEIGTRIMIDIRGKACPADVVPTPFYKRAK

SEQ ID NO: 96483 - protein, 127 aa, Unknown
  Obtained from environmental sample
  misc_feature (1)..(127): Xaa is any amino acid
HVDFYEVESGRLLRAKVSLHISGNPIGVREGGILEKPLHEIEVECLPKDLPERIEVDVSTLNVNQALHVRDIQLGEGVKLISAPDQVVALVKFAKAEVVAAPTAEEAAAAAAGAAGAAPAAGFPDAD

SEQ ID NO: 96484 - protein, 687 aa, Unknown
  Obtained from environmental sample
  misc_feature (1)..(687): Xaa is any amino acid
SEEEGVPYEDMAVSVPELEEMEADLLKEFFLRQVPVTRRAGKKLGETGAGRLFALANECAASDFSFNSLKALILNDHIPWKEPEKNRALVSFGIKYNCVSAYVQDGKDVDIWEEAFREAYSSSGRELRDYYRKIKNSVKQIAASKNFSDIQKNYFIFRRSLLDMKKITAEDNDVLGRCIAELGSLIELEEKFIDPPIVPSSAFGFFLSYLSGKEYVRKEQKSGVNIFRWRVAAAAPFACHFVLNASQSAASVLYRPLKFLRQDKRKALGLEDADASGAFFLLCDTGRDTVGAKDFKTNARISASEQTFSGWAIPHSFFVQGKTVEPPASSGDPYAEERRFWREGTALGEIFPLQKSSYERWKDTLVQQGSNFSFFASPVSVSSAGRIRELLESAIRGGDGCLTVTPTRDLNVYYNCSLFWLYDRVFGAEEFSLEAALLDDTSLGILYHKILEGIFAKIKNEDRVFYSTRVDVYKNWTLEITREAIKEHPAFRGPLAIPLVSPQAAGMSKKIERLLELEADNFNGYEVFELELPVSFRAGDLCIKGIIDRISVSPDGAPVIIDYKTNYLPEQTAAEDLPVIPLSEFQMPLYIKLYEELAARKEEAPRKVQGAFFYSVNGRRIKAVVGETAGGRSKAPNRDEYEPFLEAAEKQIEEFGRKVKALDFTPREIRIGDCLGCAYKTVCRTVY

SEQ ID NO: 96485 - protein, 256 aa, Unknown
  Obtained from environmental sample
  DOMAIN (131)...(254): RadC, DNA repair protein
  misc_feature (1)..(256): Xaa is any amino acid
MQNANLCPNTYMSDIDYSRCIADFQAIYMDTRKQAGKGLLDLPPAQRPRERLISNGPDALSDAELLAVILNTGIKGKGVAELAGELLSMLDNNKEIPTVEKLSKLSGMGMSKACAVAAMLEFGRRRWGAVGSAIRQPAEIYALIRHNADRKQERFLSLSLNGAHEVLSVRVVTIGLVNRTIVHPREVFADIIQDRASAFIVAHNHPSGRVRPSGEDDEITEQLARAAEILGLHFLDHLIFSDNDWWSYRQNGRIIK

SEQ ID NO: 96486 - protein, 110 aa, Unknown
  Obtained from environmental sample
  DOMAIN (1)...(98): Ribulose-phosphate 3 epimerase family
  misc_feature (1)..(110): Xaa is any amino acid
LGKKAGISIVPSTPAGMLSELLPYLDLILIMAVNPGFGGQRLIPECLNKLRFLAEERRKHGLDYLLSVDGGINGETAASAVAAGADVLVMGSAFFAANDKKAFVDRLRSE

SEQ ID NO: 96487 - protein, 427 aa, Unknown
  Obtained from environmental sample
  DOMAIN (333)...(427): Thiamine pyrophosphate enzyme, C-terminal TPP binding domain
  misc_feature (1)..(427): Xaa is any amino acid
MEAALGVSFAGKRAIVTMKHVGLNVAADPYMNSALLGINGGVVIAVADDPGMHSSQGEQDSRYYSAFALAPCLEPRNQQEAYDLCREAFEVSERYHLPVMLRLSTRLSHARAAVKPASAGKQNGLSKMKDRTYWTLLPAYSRRNYNELIEKQVQLVSWSCAHSVNKLEMGDASFAVITSGLGGNYYEENLEDLVSSRSGKAPSRLHIGAYPLPVESIRKLCEKAEKVLLIEEGQPFIEERIKGILPQTIKVSGKLDGTLNRAGELDPDNVRKGLGLAPRPSVLDSGVKIPELPGRPPQLCQGCPHGDSYTAINKALAELGSGQGSPDCAITSDIGCYALGFSPPYSTIESCVCMGASVSMARGAADAGLKYAVGIIGDSTFLHSGITCLVDAVQSDTPMTLIILDNSIVAMTGCQETIVPSAQLKDL

SEQ ID NO: 96488 - protein, 350 aa, Unknown
  Obtained from environmental sample
  DOMAIN (25)...(253): Respiratory-chain NADH dehydrogenase 51 Kd subunit
  misc_feature (1)..(350): Xaa is any amino acid
KIEPRLQSNNTTGMCIIIEAEDKNIDEEFLPPIDPYICSKQDALARIREAGIVGMGGAGFPAHVKLLPPPDKHIDTIIANGAECEPYLTTDEAALISRPHLLVKGLAIVMHITGVKKAIIGIEDNKKELIPLIERELRINEIKADITVGLCRTLYPQGGEKMLITALTGREVPSGGLPMDAGCIVQNVGTIIAVAEAFWPGKPVIDRDLTISGGACNTPKNIRAPIGMSIKDIPPEFMDIDYSKIAKIVFGGPMMGNAVHSLEVPIQKNTSGVILMTKEETIAEEEGPCIRCCRCVRNCPCRLSPVIVNNSLEAQDYNYALKAGLLDCMECGSCSYVCPARIKLVQRFRV

SEQ ID NO: 96489 - protein, 305 aa, Unknown
  Obtained from environmental sample
  misc_feature (1)..(305): Xaa is any amino acid
VYMSVQQLIPCERVREHFDSQMGLPLSGGTVHNFKEEAYHLLEGYETWVKARIRKCKIIHCDETGIVIEGKRVWLHVASNEHYTLYYPHEKRGKAAMDETDVLSAEEGVLIHDHWKPYFTYGNKAHGLCNAHYLRELTAASEEGQKWSERMVELLTEANNHTVEGGGKLGEDEQRRVRRKYRRILGEAEKENPISPWQGEGKRGRRAQTKTRNLVDRMREHEENILRFMTDVDVPFTNNQAERDIRMVKVQQKISGSFRSWDGAKFFCRIRGYLSTCEKHLISAADALKILFNSKLPDFMSSLAE

SEQ ID NO: 96490 - protein, 340 aa, Unknown
  Obtained from environmental sample
  DOMAIN (171)...(340): AIR synthase related protein, C-terminal domain
  misc_feature (1)..(340): Xaa is any amino acid
MNYEDAGVSLARADKAMVGVKKSVRTTFNAGVLGDIGNFGGLFTLSHLGLKQPVLVSSVDGVGTKLKVHFGLKSHNLPGQDIVNHCCNDILVQGARPLFFLDYLATGKLESGVLEAVVEGMALACRENDCVLIGGETAEMPGMYHEGEYDISGTIVGVVERDEIIDGKSIVPGTVVLGMPSTGLHTNGYSLARKALFEVGGYKLDSKADGIEGTIGEALAVPHRSYYHSLIDLVHAKKLQGLVHITGSGFQGNIPRILPKGVSVQINRSAWKVPEIFNLIQKCGNVEQDEMYSTFNMGMGMLVFAAPNDAVEIRKFLEGKGETVIECGKVIEGNNNVVFS

SEQ ID NO: 96491 - protein, 431 aa, Unknown
  Obtained from environmental sample
  DOMAIN (18)...(411): Major Facilitator Superfamily
  misc_feature (1)..(431): Xaa is any amino acid
MAQKEYSVGYALFIACAAAIGGFLFGFDTSVINGTLDALRFKLGANDAQLGLAASIAVLGAAGGAFFAGALADKFGRRKVMITSSVLFLVSAIGSGNPYFFTTAGSAANMIEFIVWRVIGGVGVGAASIIVPAYIAEISPAPLRGRLATMQQFAIVIGIFAALLSNYFLGEIAGGGAVVMDHTTRLASDVTKIGSFETWQWMFWIECIPAALYGLLVLFIPESPRYLVARKQPQKAGEILGKILSPSIVAQKIEDIKKSLRSEVAPKFSDLLEKVAGKTRLAPIVWVGIGVAALQQFVGINVIFYYGNVLWESVGFTQQDAMKTSVLSSVVNIASTVIAIALVDRLGRKPLLLAGSVGMFVTLGIMAAIFGTAGLDSNGNPEISGAVAYVAVISANFYVVFFAFSCGPVCWVLLGEMFNNRIRGAALALGG

SEQ ID NO: 96492 - protein, 675 aa, Unknown
  Obtained from environmental sample
  DOMAIN (278)...(506): Methyl-accepting chemotaxis protein (MCP) signaling domain
  misc_feature (1)..(675): Xaa is any amino acid
MITDEHGYICLQDGDLIDQKGDSISYNYEIVDKVSATMNILATILIREQNDYRRITTSIKDASGNRVVDTLLGSGSPAYTKIQEGNKYIGSASLLGKDYLAAYYPLFQPDTKDVIGILFIGTEMSHIEDTIQHNSIMAIKRILLIAAGLIIISILLSSLGSKFIIVNPIVKIVHVAKIVAKGDLTHNADVNANDEIGDLAEDFNLMITEIKELIETMKHKIDALTNTGHELSANMGKTSRSVDHISVNFDGMKGKMSKQEESAAEADKAVKNIKYLIDNLNKLIEEQSEGINTSSSAIEEMTANINSVTKTLIENSKNVTELAEASGNGKVGVQAVAEKIQEIAKDSEGLLEINAVMDNIASQTNLLSMNAAIEAAHAGEAGKGFAVVADEIRKLAESSSEQSKTTAAMLKKIKASIDSITASSNEVISRFEAIETGVKTVSEHEQNIRNAMEEQEIGEKQILDSIGRLRDITYSVKKGSDDMELSGKTLVKETDEFIKISKETVEGMNDILAGINQINVSINHVNEMSAENNRNFESLKHETDKFKHTSGNEKKKILIVDDEEIDLEMVGSVLQKDYDMFTAKSGKEALGLFYQGLVPDLILLDLIMPDMDGWDTYGRIKVIGGLHDIPIAFFTVSDDPKDIQHAHEIGAVDYIKKPYDKDDLLNRIKKILMKT

SEQ ID NO: 96493 - protein, 369 aa, Unknown
  Obtained from environmental sample
  DOMAIN (1)...(362): Peptidase family M50
  misc_feature (1)..(369): Xaa is any amino acid
NAQGIEPVKGTFLGAAPWRRIIVSFAGPLFNLVFAALVLSCIWGIGFEVQTLDSRIVLASELTTNTLYPADAAGFKTGDRIIAVNGKKTAYYHEVQENIATNPDKLLPVTVERQGETITLYVTPNLDKSTGAGKIGVYFWNDPVVTALVPDGDAAIAGLLPGDRIIRVNGEMVANTIDLMKALETHSGVAEVDYTRNGAENRAEVVISRPDGDGLGIIWPRVQYRTPRLSPPAAVAKGISESWKTLVISLRSLSLLFKGIELTEAVSGPVRITYMVGDIAAEGFGQSFGAGLRSLADFLALISIALCVMNLLPLPVLDGGMIILFIVEMLRRKPLHPRAINVFQTVGVALIFGLMIFAVFGDILYLSRR

SEQ ID NO: 96494 - protein, 570 aa, Unknown
  Obtained from environmental sample
  DOMAIN (262)...(338): Helicase conserved C-terminal domain
  misc_feature (1)..(570): Xaa is any amino acid
MKFNEFNLHPDLQKGIDEAGYVDCMPVQEQVLAHAFGGQDLYVQSQTGTGKTAAFLVVIFQRLLTEDFLAGKKALIMAPTRELAVQIEEESNMLGKYLPIKTGSFYGGVGYTQQEKLLRDKVQIMVGTPGRVLDLNKSGRMNLMEIAFLVLDEADRMFDMGFYPDLRKLIKVVPPVDRRQTMLFSATLNAWVKNLAWEYTRSPFEIEIKPELVTVEEIDQILYHVPSEEKMKLLLGIFEREQPESAIIFCNTKRYTEIIAKRLRLNGYDCEFIIGDLPQSRRLKVINDVKAGKTKILVATDVAARGLDIEGLAMVVNYDLPNEAENYVHRIGRTARAGKTGRAITLASEQDVYELPAIERYIGKKIPSEIAAQELHAEDKSAGQQIRTEFYEDRGEKRHPHIAHTAHGAHGAYSGAKAARPGSRRPDSRGDSKSRAVRPHGKADDRPHEGHRQSHAPVPALKNDASRGGKKGENHRQGQQQEQRQDRRQGTQDMSHLSFEERMALYKQKYNSGTPAPNRQNKQAGRKHPGKAQTPPRKPENLNRPQKQPEPAPPAKKGVFSRLLRAFKRK

SEQ ID NO: 96495 - protein, 324 aa, Unknown
  Obtained from environmental sample
  misc_feature (1)..(324): Xaa is any amino acid
AKALKNGKFPLLFEHAEGAFPGVFISLIYAAAGGRILAVVPTDTEAALLEQDLRSTDIPVSIFPWWGGMPYRDMAPLSAVFGERMRVLSGLVTGNNGIVIASERAFLTPLPPPDYIRGLLVTLKPGSGITIGKESMDFDPTALAEILVSYGYTRVPRVQLRGEFALRGEVLDILMGEESEAYRILFDFDRIESIKRFEPLTQSGMEKRPELVIHPFKELVWTEDRVEALKANLESFEEFPSNGKEILEELKTRRAINGEEYLFPLAFEKPATLADYFFGFAGKSEGKGEALGCAIVVYLERERLENAQESLEKEYQSLYSKTRR

SEQ ID NO: 96496 - protein, 434 aa, Unknown
  Obtained from environmental sample
  DOMAIN (48)...(322): Amidohydrolase family
  misc_feature (1)..(434): Xaa is any amino acid
VSGFVLEKGIVVTAGKKPRAGNIGVLGDKIISAKSGGGTILDLKEKSCVYPSLINTHDHLQGNYRPPIGPKEGTFYLTWQPWDKDLKASATFAERSKLTREELYLLSSYKCIFSGVTTVNDHFPQAINGHILPTLPIRAILEYGLAHEATSYDLKWGDGVVAEHKKAVKNKWPFITHLCEGFDEEAMHGLETLEKLGVLDSHCLLVHCIAMSDEDIVKVAKAGASISICPTSNMRMFNVTGKIRKMIKAGLNLTLGTDSSASGSANLFEEIRNLRDLYRNMYGEELEPKKIFEMITINAAKAFWMQDKIGSLEEGKLADIMVLKARKDDPYENLACASMEDIELLVLAGKPIYGETRFIDIFSDSKIPEGYTEIVVGKRPMFVIGDHAALYREIRRRTGFKKILDFFPFELSESNQEQAKKPGKSTAKTRKELT

SEQ ID NO: 96497 - protein, 369 aa, Unknown
  Obtained from environmental sample
  DOMAIN (193)...(368): Magnesium chelatase, subunit ChlI
  misc_feature (1)..(369): Xaa is any amino acid
MHVLAFTPQGSEGIIIRVEADIRRGIPGIDITGLAEGAVREAKERVRASFRNSGFAFPQDRILINLAPAWLRKEDASLDLPIAVSVMAAAGMVAVPDKLMVLGELELSGRVRPVRGALAALSSAITNGISEFIVPLENSSEAAVLSGIRYFAAATLAEVFHALLVRAEIGELPSSSPANTSAGDLQGEIWAGDFSEVQGQQRYKRALEIAAAGGHNLLVFGPPGSGKTMLARRFPSIMPPLLPEEAVEVTRLHSLARRISGEESGLIRQPPFRSPHHSASTEGVLGGGRNIRPGEITLAHFGTLFLDEAPEFRSPVLQSLREPLEDKVVTIVRAESNHKLPADFQLILAANSCPCGRLGAVFPAVDELE

SEQ ID NO: 96498 - protein, 319 aa, Unknown
  Obtained from environmental sample
  misc_feature (1)..(319): Xaa is any amino acid
NEQGVLLLDFYSQKELEAYIRKSISEGKDGALPPWMVIQGIIGERWFFRREHYLPICAKMIGDLQPQIKATLIKRWSRLIKEYLSEPAMEKDPEYEKLLKKLTNNINPLLQTILEDPKLLWAYQDLESSLGTVPQNMRLFNRGALFPFYVLYSLRRKDVIAEIKSELPIWYSNPILLAILKFFKNLGRKKSPRSREESEEKPPAAGKKPDKMKSSALQIKSDIVPEGKTVDEHLDSLEKRWCSLRDADTRKNLIVGVKALMKDKLRQAIKLKKMTLIRRSDLREIADYIISQNGTLVKLKDQESLRTYMELYMLKLVLR

SEQ ID NO: 96499 - protein, 378 aa, Unknown
  Obtained from environmental sample
  DOMAIN (137)...(378): Respiratory-chain NADH dehydrogenase 51 Kd subunit
  misc_feature (1)..(378): Xaa is any amino acid
MPYNHFILTCGGTGCESNKGDEIYRSLIAEAEKLGVKEEVQIVKTGCFGFCERGPIVKVLPEDSFYVDVKPDDAKEIIAEQILKGREVKRLLYKGDGEKKNTTAVEDIEFYQKQLRVVLRNCGVINPESIDEYIAREGYVGLEKVLFNWSQEQLIEEMKISGLRGRGGAGFPTWLKWDLARKAQGSPKYVICNADEGDPGAYMDRSTIEGDPHSVIEGMITAGKAIGSNHGIVYIRAEYPLAVERLKIAMAQAEDYGLLGKNILGSGFDFEIEIRLGAGAFVCGEETALIKSVEGNRGMPVPKPPFPANKGLWQLPTIINNVETFANVPVITARGGAWLARIGTEKSKGTKVFALTGKVKNSGLVEVPMGTTLREIIL

SEQ ID NO: 96500 - protein, 386 aa, Unknown
  Obtained from environmental sample
  misc_feature (1)..(386): Xaa is any amino acid
VYSSVSGSAQSVGATAFHIGIATLGYGQSEDEIRGAEALVAQYGSVDRGGMIKHVVLPDNFAEEQATVISNIAGFADDPLMKAVIVNQGIPGTAAGFQKIRDAGRKDIILLTSMPQDDPNVISRVADVIVNSNDFGRGYYDIVRARDMGAKTFVHMSFPRHMSVEFLSRRRNVFEEVCKDFGIQFVFVTVPDPASEVGISGAQQATYDMMPRLINQYGKDAIYFTTNTALHEPIIKRVYELGGMFLNQDDMSPNVGYPGALGLDLSAQMGDWWGMTQAIEKVVVANGQGGKMGTWAYSFLYCGTTGLFQLAKDMIEGKGSGNVQNDLLAAYQAITPGCKWLPELYTDASGRTINNYYLLSMETYIFGKGYTDVLNTAIPAKYFNIK

SEQ ID NO: 96501 - protein, 162 aa, Unknown
  Obtained from environmental sample
  DOMAIN (4)...(140): Peptidase C26
  misc_feature (1)..(162): Xaa is any amino acid
AARGCEVWSFPYNAPADEILKINPRGVMLSNGPGDPADPANDSMIEAVRAITKKEVPIFGICLGHQLLALANGYKTQKLKFGHRGANQPVKETATGRVYITSQNHGYAVVAENGSFINVNDGTCEGMDYGVSFSVQFHPEAKGGPLDTGFLFDRFIERMEKQ

SEQ ID NO: 96502 - protein, 278 aa, Unknown
  Obtained from environmental sample
  misc_feature (1)..(278): Xaa is any amino acid
MRNDAFFTSAKKTAAIISAAVVLCFVFAASAQPSGSAAVTFRAVGGHGTLTATVDEVPIASGSSVALDKIVIFTAVPENGYGKVSWWLNGAEITNGASLYTLPVRIDNADPKDVVVSFEWMSSSLCAVVTFHVDRYFGTLTASVDGVPIVSGDSVGIGKNVVFSAVPEKENGKVRWVVNGTEIANDTIVNTLPVKILNNAPLDVTASFEVYIEPPESQIEPLSGVLTFGPSPVRSGGEMAVFWEGNKEISGDLLIFSALGDMVARVNVGGMGKIGAWN

SEQ ID NO: 96503 - protein, 148 aa, Unknown
  Obtained from environmental sample
  misc_feature (1)..(148): Xaa is any amino acid
MALSGCTVSEPGAAVTKDEGVITLMTWNINNLFDGADNGFEYDEFLQSAGWSAEKYKGRINTISDAVGRLKPQPDILMFQEVESLVVIEDLASSLPNAYSWRHFANNHGAAIGLGIISRLPLTETKTHSITIDGETTPRPVLEVRVKP

SEQ ID NO: 96504 - protein, 542 aa, Unknown
  Obtained from environmental sample
  misc_feature (1)..(542): Xaa is any amino acid
VVDKDSESEGVVIPSFADNGVGSLSVTLDATRLSLLDSAVTYLFRYPYGCMEQRSAAIMPLVIFGEYLDALGLRSEVANPRQVVENELKSWAKVQLSSGGFPYWPSGTRADFYVSLRIAHIIAIAKSKKMNVPSSLNIAELNSYLGREYQELQKWRNDSSSYYYQSYLQSYMLYVQSLLGEKVDPSRLAEILSRDNVDPSVLAFVGMTYRALRQNTDASNTAQRLRNLVRMTARGADITDPLEENRFNYYGGMVEQLALTLQFFVDQYPGDDINTRLLFSLLESKRSGSGYWESTAVTIRVLSAVDALIRAENLTNLDVNGTVTLAGTELLKGAFKGLGAKPVTETLDFTGPVLSGLPRDSQQSLNFNRRGRGNIYYTVSLRYAIPFEIQTFRDEGIGVFMNVYDINTNEEIRGTALQNGKTYRARVRVSTNRDRTYVALRVPVPSGAEILDATFVTTASYGDKGGTSGDGQTRSSSWLSNQFIMDNEVQYFWDQFNKGESTVSFLFRTARRGVYPTPPVQAECMYEAEIFGRSSGLLYTIE

SEQ ID NO: 96505 - protein, 306 aa, Unknown
  Obtained from environmental sample
  DOMAIN (6)...(290): Dihydroorotate dehydrogenase
  misc_feature (1)..(306): Xaa is any amino acid
VGANVDLSVRIGNGTLANPVGVASGTFGYGGEYEGLVDFSDIGAIYTKAVTLEPRAGNVPPRLVETPSGILNSIGLANVGVEKFISDKLPYLRTLPCAVIVNVAGATEDEYLRVIERLESSDTGVFGYEINVSCPNVNHGGLAFGTDPVQVERLTASLRKLTKRPLIIKLTPNVTDIAAIAKAAEAGGADAVSLINTLVGMVIDVKTKKPLLGAKTGGLSGPAVRPVGVALTYKARRAVSIPIIGMGGITCADDALQYIMAGASAVQIGTANFINPKTASLVLAGIKKYCGNNNVSSLEEICGIID

SEQ ID NO: 96506 - protein, 124 aa, Unknown
  Obtained from environmental sample
  misc_feature (1)..(124): Xaa is any amino acid
VSAALKDNDINIRALTIAESQNYGVLRMIVNRTDDALSVLKNAGFIVKKNPVLAVEVDDREGILHDIMELCGSAELNIEYLYSFVEQVSGKAILFMRFEGTEAAEKVFTDKGYRLLSEEEVCLI

SEQ ID NO: 96507 - protein, 262 aa, Unknown
  Obtained from environmental sample
  misc_feature (1)..(262): Xaa is any amino acid
GFEESSGLRLRAAILHVLREAKYDGGHSFMPPEILLQNALNFLRITPSFPDDDIFDYLYTALSDLKKAEKVIIQQERVWLPELYEAEKYIGTFIRSALNSGHLETLHSDAEINAAASSLEISYSNEQLKAIKDAVSNMFFVITGGPGTGKTTILKGVLHILNLQKKKVMLAAPTGRAARRMAEVCRFKASTIHRLLEIDPISGLFYRDEMNPLEANVVIIDESSMLDNELAADLMRALRSGTQLILIGDADQLPSVGPGNVL

SEQ ID NO: 96508 - protein, 258 aa, Unknown
  Obtained from environmental sample
  misc_feature (1)..(258): Xaa is any amino acid
MALSKEQKEWLKRISDHYKNTKEVPKELLTDEFCLAAVQQDGRVLSFVPEALKTEAVCLEAVQQNSRLLQHVPDTLKTETMCLAAVQQNGSFLSFVPDALKTEAVCIAAVQNDKENYSNVFKSIPEVMKTEAVCLVAVQRHGWALEYVPDAMKTEAVCLAAVQENGWALKFVPDAAKTKAVCLTAVRQNGLNLEYVPDALKTEEICLEALRSQGDVGYKYCYGITPTALEYVPDALKTEEICIEAMKHSIFSAYVRYG

SEQ ID NO: 96509 - protein, 458 aa, Unknown
  Obtained from environmental sample
  misc_feature (1)..(458): Xaa is any amino acid
MALSKEQEKWLKEISSSNYIKNVPKELLTEEFCLAAVQQSGYQLGEIPEALRTEAVCLAAMRNWGEFRYVPDAAKTEAVCLAAVQKRCEALRYVPDAVKTEAVCLAAVRTQPENRPYSSSPLQYVPEVFRTEEICLEAVKNHSTAFYYVPPVQMTEAVCIEAMKYPVPKGKYGGPPLHEHWLSMVPEERRTEAVCLAAVQHNTWALEYLPDALKTDAFYVAAMIRNDKVREDIPANLKASVEAAFKNAFATEALCLAAVQQNGMALKHVPKALKTEAVCLAAVQQDSCALEYVPEALMTEALCLVAVQDNGYTLQYIPDALMTEAVCLAAVQENGYTLQYIPEALKTEAVCLDAVQNDWRALEYVPDAKKTEALCLDAVQQDYKALEYVPDALKTEALCLDAVQQQGRALEFIPDAKKTEALCLAAVQQNGWALEFVPEALKTEALCLAAVQQTGTAL

SEQ ID NO: 96510 - protein, 229 aa, Unknown
  Obtained from environmental sample
  misc_feature (1)..(229): Xaa is any amino acid
MALSKEQKEWLKKISDDSINMKKVPKELFTDEFCLATVQQNGEALEYVPDALITEALCLSAIQQAVGALKFVPDTLKTEALCLAAVQENGYALQYVPDALKTEAVCFAAVQQDGDALRYIPDALKTEALCIEAMRHSSVHVTLLYRGGMGMQKPPPPTHPLQLVPDELKTEAVCLAAMLSDQRAYIPSNLSALDFMPEALRPQVGYLAEVFRSAISSGSGGSGYGIELI

SEQ ID NO: 96511 - protein, 216 aa, Unknown
  Obtained from environmental sample
  DOMAIN (7)...(122): Dynamin family
  misc_feature (1)..(216): Xaa is any amino acid
MSKAAFVALAGRPSVGKSTLVNLLCGAKVVIVSAVPQTTRNAVRGILTRPEGQLVFVDTPGRHASEKKFNKKLMNVADRALDDSELVLYVLDASRPPGPEEEAVAERLKASIDRTIAAINKCDAPGADPKKLASFLEKSLPGLPASRCFEISCHKNEGIQPLLACLFSMAAEGEPFYPEECYTDQEVSFRIQEIIREKAINRLREELPHSIYGKWR

SEQ ID NO: 96512 - protein, 299 aa, Unknown
  Obtained from environmental sample
  DOMAIN (10)...(191): Patatin-like phospholipase
  misc_feature (1)..(299): Xaa is any amino acid
MKTNKSGWALVLSGGGAMGLAHIGLLKGMEEAGFPRPSLVAGTSMGAIVGGLYAIGMSPEEMECFILDEFNITDYLDSFVFKIDGPFGRIIQTGQALAILAGKPGIDPGQRALELLESLTAGKCFDETEIPFRCNAVDLISGREVIFNSGSLAMAMRASMSLPVFFEPFDYNGMCFVDGGLLNNMPVSIARNEGFDRILAVNVTNFSQAKPENLRNGPQVIIRSIDCFIHAQDEGGKAQADLTITIKAGAALFSFYKQKELIDVGKKAVSENMSALEDFFHSDFRLSNRPPVVVGNDNE

SEQ ID NO: 96513 - protein, 510 aa, Unknown
  Obtained from environmental sample
  DOMAIN (112)...(504): Glycosyl hydrolases family 38 C-terminal domain
  misc_feature (1)..(510): Xaa is any amino acid
GELYLEPHGGTYTIQARAKGNNRLLEFSLRRAEFYCSLAALEGKGEYPREILLDFWKHALTYQFHDIIPGSSIGQVYKEAEEDSAKILTKLAQAADSGKRRLVKAMYTSNNMAVFVFNDLSWKRVTAVTISEDLAGKAAALQSVDGAVYPVQRYIDHDGNMQAVFFPETPSMGWTRLTVLKDINEEKSPFIWKDNVLESPFYTITFDTEGRITSLVDHRQGREMVAPGGVLNALITAEDARDAWDIDADWIKHIRQETRLVSTEITAYGPVCFRLRRTYEIGEASRLVQDMVCYAADPRIDFDTKVYWHEKWRLLKAEFDTAIDAAQVRCEVQYGHILRNTHRNLMQDRARFEICAHKWISLEEEGCGIALMNNCKYGHDVEGGRMRLSLLRSPIAPDPEADRGEHYFTYSILPFAGHFGDSGVIRSAYELNSPAEALVIPVSQIADDHDAESFCTVDGNQVIIESVKAPEDKTPNELILRLYECLGGKSRYSFCISAGNCALRPRPICW

SEQ ID NO: 96514 - protein, 372 aa, Unknown
  Obtained from environmental sample
  DOMAIN (40)...(357): Receptor family ligand binding region
  misc_feature (1)..(372): Xaa is any amino acid
LALCVVAMAFAGGSQASGGDTVTIGAIFPLSGGVAFYGNESRDGALLALEQINAAGGLLGKKLALLSEDDEGDATKAVNALTKLTTRDKVSFVLGSSTSGPTQAMAPLAQSSKVILISPSATNINVTKPGDYIFRACFIDPFQGVVGADFAYDTLNSRRAAILYDAGADYNTGLADSFRNQFRARGGQIVADEAYQTNDVDFNAQVTRIRAANPDVVYLPNYYNDVSLQAKQLRDQRVTCALVGGDGWDSLTDNAGDEILNGFWSSGFASDTTDPKGVAFVRAFQTRFNRPASQFAALGYDTMMLVIDGIKAAGSFDPSVVKNAMAKLSGTYVTGNIRFDSDRNPIKGAAILEIVKRSGRLVNVYKTTVNPN

SEQ ID NO: 96515 - protein, 263 aa, Unknown
  Obtained from environmental sample
  DOMAIN (51)...(239): ABC transporter
  misc_feature (1)..(263): Xaa is any amino acid
MANLKNIIEHETKFQLETSFHHETLLKVENLVVNYGAIRALKGVSFEVAKGEIITLIGANGAGKSTTLNAISNVIKKASGSVVFDGRDISSVPPDSIVASGLIQVPEGRRIFANLSVRDNLEMGAYSRRSVTATEKQAIRKDMERVFEIFPRLKERMRQVGGTLSGGEQQMLAMGRSLMASPRLLLLDEPSMGLAPILVDEIFSVIKGINETGTTVLLVEQNAYKALDLASRAYILETGEIVKNGLTAELMKDEAVKAAYLGG

SEQ ID NO: 96516 - protein, 279 aa, Unknown
  Obtained from environmental sample
  misc_feature (1)..(279): Xaa is any amino acid
FFAVPFAAVSHAVYYNKTIFNKEGLSIPQTWEDFLALCGALVSKGYTPLANGIADEWDILEVYFLGMLPNFIGGAADRAQYESGAKKLNDANFTAAFQAMADSAKYLPKGYTSVTYNDSQALFNTQQAVMFMDGSWTAGVYAGASFEWGVFAMPAPQGKKTAITFHPDMAITWNSKTKYPQESKDFLAWIASPEGATTASAALPLGFFPMINSPIQLTDAHANEFLGLNAGKETDARFVWPKFMDLYSPMNQAVIQVIKGEITPRQAADAMETAAAKLR

SEQ ID NO: 96517 - protein, 168 aa, Unknown
  Obtained from environmental sample
  misc_feature (1)..(168): Xaa is any amino acid
MKIKNSGASWIPWLAPALVFYVFFMAWPLLDSLRLSLFTGSAGTGRSFVGLNNYKQLFTVETYSDRYWGAFGHTVIFFIVHMAVQNCLGMLFAVLLTSKTMKGRQFYQTVIFLPTTLAVLVTGYLWKLLLNPVWSGPFLHLLGWIFSAGPGWETGIPHCSACRWYPAG

SEQ ID NO: 96518 - protein, 290 aa, Unknown
  Obtained from environmental sample
  DOMAIN (1)...(209): S-adenosyl-L-homocysteine hydrolase
  misc_feature (1)..(290): Xaa is any amino acid
EVQWVSCNIFSTQDHAAAAVVVGKHGAPKNPKGISVFAWKGETLEEYWNCTKRAMEFPNGKFPNLILDDGGDATMLIVRGSQFEDAGKIPAFNSKNDSEEWGVFLALCKRQFAKDPKHWSRIRREIKGVSEETTTGVHRLYEMSKKKELPFPAINVNDSVTKSKFDNLYGCRHSLIDGFNRATDVMIAGKVAVVCGYGEVGKGCAQSLRGQGARVIITEIDPICALQASMEGYEVRCLENVVGIGDLFVTTTGNTNIILASHMETMKHRAVVGNIGHFDNEIDMAGSKKI

SEQ ID NO: 96519 - protein, 550 aa, Unknown
  Obtained from environmental sample
  misc_feature (1)..(550): Xaa is any amino acid
LVFFTFATCLWAQGIQENHIRLKKVVILSSGLAYYEHSGYVNGQINVNLPFKIDTVNDALKTLVISDPSSSNPSVTYQSSNTLIQTLRSLSIDLSDMPGMAVILSRLMGAETEIASPSVYTGRIAGIEYRQFFNANGMSNEPWLTLSTKDGLLSFNLKEISSIKFKDAEIQKDLDRALDLISASRNSLSRQLSVNLPGSGRRNVSISYVIPSPVWKVSYRLDLGASKPLFQGWAIIDNDSDTDWNNIELSLVAGRPASFIQELYPPYYVYRPVLPLSIAGAASAASYDTAVAASADSNTARKSMAMEETARMEAPAPMERFRYSEENILTGGVVNTAEGNIAGGQFEFTIKNPVSLNRRMSAMFPLVESTIEARKILIYSGKGRFPRLGAELTNTSKMKLPAGPITVYDGGVYSGDALIEFWNENEKRLISFGEDLSVTASTSNTNANVINKVNVSLGVMTITRHVNYTKTYTFINSSSVSKQLITEHSKTANTELVSPKADEQTISVYRFNVTLAPNRETVLTVTEQRPISEKITLLPLRLDALLSIQI

SEQ ID NO: 96520 - protein, 552 aa, Unknown
  Obtained from environmental sample
  DOMAIN (73)...(346): Phosphofructokinase
  misc_feature (1)..(552): Xaa is any amino acid
LSISSLQKARYSYKPKLPAILSGSINDVSVSLGAPTEAISDKEKIREIFKNTYGKPIATFAKGKNDNINHELKVGVILSGGQAPGGHNVIAGLFDGLKKGNPNSTLYGFMGGPSGLIDNKTIILTQEIIDEYRNTGGFDIIGSGRTKIETKEQFAASLETAKKLKLDAVVVIGGDDSNTNAALLAEYFVQNGASTHVIGCPKTIDGDLKNEYIETSFGFDTACKTYSELIGNLCRDTNSAKKYWHFIKLMGRAASHIALECAFQTQPNICLISEEIEAKGLSLDKIVDQVCASIVKRAENGDNFGVVLVPEGLIEFIPEIKKLIEELNDVIAAEENAFADITNFIDQLYWLSTRICEPSYRIMQSLPPEIAQQFLMDRDPHGNVQVSRIETEKLLVGMVEKRLADMKAKNLYNGKFSALTHFFGYEGRCAFPTNFDADYCYSLGFSAFILIASGLTGYLSSVRNLIAPADQWIAGGIPLTMMMDLEHRHGTQKPVIKKALVELDGKPFKKFAAIRDHWAEKTSFLFPGAIQYYGPPEVCDQPSSTLKLEHEI

SEQ ID NO: 96521 - protein, 236 aa, Unknown
  Obtained from environmental sample
  DOMAIN (12)...(192): RNA pseudouridylate synthase
  misc_feature (1)..(236): Xaa is any amino acid
MKSPVICHETENFAVVFKPPRMHTAPIGQDNNETLLDWYAKIFPPVMELSGKKEREGGLLHRLDFETQGLVLFAKNQQTLENLLIQQKQGILIKEYNATCQKSEPQPGAVEFSVDRRPPLVIESYFRPYGPGRKEVRPVIKEHLKGKEIAKDGDAYYKTEIIGVERKQEVLFLFTVRLRRGFRHQIRCHLAWVGFPVLNDPIYGKGEVNGFLELRATGLFFDDPKSNKPVQFRIEP

SEQ ID NO: 96522 - protein, 199 aa, Unknown
  Obtained from environmental sample
  misc_feature (1)..(199): Xaa is any amino acid
CTASIANIVVMGMGEPLLNLAELRRAIAVITCAKGLKFSRRRITVSTCGIVRGITGLADEGPAVRLALSLTTADESLRRRLMPITAKEPLAAVKKALRHFQDTGGGRITLEAVLLGGINTRGEDAASMAQFARGLDAAVNLIPWNPVKGLEFEGKALREPSAAEIESFTQRLKALGLNVTRRYRRGRGVMGACGQLGNQ

SEQ ID NO: 96523 - protein, 439 aa, Unknown
  Obtained from environmental sample
  DOMAIN (76)...(267): ATPase family associated with various cellular activities (AAA)
  misc_feature (1)..(439): Xaa is any amino acid
VLSHSSGNEGGKETADTADDEQADGQRAKQGKKTALERYAADLTELARNNKLEPVIGREEELDRTVQVLCRRLKNNPIHVGDSGVGKTAITEGLAQRIVAGDVPPTLKGFSIFSLDMGALLAGTKYRGDFEERVKRVVEEMMKKEKAILFIDEIHTLVGAGAVSGGALDASNMLKPALTSGKLRCIGSTTHEEYGKHFEKDRALSRRFQKIDINEPSEEDAIAILHGLKSKYEEFHKVRYSDEAIEGAVRLSVQFISERRLPDKAIDIIDEAGAFARIRAGKAEKAASEETTTDNVIEIVDIGLPLIETVVSKVARIPERSVGESEKDRLRLMETKLKEKIFGQDSAIEAVVKAVKRSRAGFRSGGKPVANFLFAGPTGVGKTELARQLADIMGVAMFRFDMSEYQEKYTVSRLIGSSPGYIGYDDGGQLTDSVRKQPH

SEQ ID NO: 96524 - protein, 426 aa, Unknown
  Obtained from environmental sample
  DOMAIN (101)...(426): Hsp90 protein
  misc_feature (1)..(426): Xaa is any amino acid
MNDTDLIESLGTIARSGTRSFLEKLAEDAKRDSNLIGQFGVGFYSAFMVADKIEVISRKAAEDKTWKWSSDGKDSFEIESSGAKDSQGTTVILHLTEEGLEYANRWSIEDIIKRYSNHVAFPIYLTYDEKEWDDKGKEKGSKIKTDRINSGTALWRRAKTELKEEDYNEFYKQIGHDSEPPLHYIHTKAEGSLEYSTLFYIPKKAPFDLYNVDYKPGVKLYVKRVFITDDDKELMPVWLRFVRGVIDSEDLPLNVSREILQQNKVLINIKNASVKKLLTEFKQMADNAVSVGDEAREKWDTFVREFNRPLKEGLYQDFANREALMELVRFKSTAAEEAEGKPVWTSFDGYVSRMKSDQKHIYYITGGDEKTLRSSPLLEAYRAKGIEVLIMDDDIDDIVIPTLHSYRKETTGTDGKTETQTWELKA

SEQ ID NO: 96525 - protein, 300 aa, Unknown
  Obtained from environmental sample
  DOMAIN (31)...(145): Response regulator receiver domain
  misc_feature (1)..(300): Xaa is any amino acid
KAQFLPLQVEMKRGEDKKHKLGERPINRNDIRVLVVDDSKVILDYFREVTRKLGIYCDTAITGEDAIALVERDNNYHIFFLDLQMPDMDGLQVSHALKPLVSEDSEVIMMTANEWTTDAEEAKNAGVDKFLSKPLFPPVIEGVIDEYLSAKNNEDTNEHNLDVVYEGRRILLAEDMEINREILLALLEPTLLEVDCAENGLQAVSMFAEAPEKYDMIFMDVQMPEMDGYEATQRIRALEIPSAKNVPIVAMTANVFREDIEKCLDAGMDSHIGKPLDFHDLMDKLNKYLIKRKVFKGGEN

SEQ ID NO: 96526 - protein, 187 aa, Unknown
  Obtained from environmental sample
  DOMAIN (49)...(151): PAS fold
  misc_feature (1)..(187): Xaa is any amino acid
MLIGCLGVLLAISAAAVLLMYIKNTKLAKTLEDESALYKKKIYWLQSILDAVNSPITVTNKDMEWTFINKAVEKFLYLKRENVTGRKCSQWGSNICNTRNCGIIRLRNGFKETYFQQFGRDYHVLVSYLYDEKGEVDGHVEVVYEDTAVIDKEKKKFESLAHWYESILDAIPFFIFVTDKNMNWTFI

SEQ ID NO: 96527 - protein, 322 aa, Unknown
  Obtained from environmental sample
  misc_feature (1)..(322): Xaa is any amino acid
MNTTLAKGQILRCGFEILDVRELPEFGADGLKVHAIWARHQKSGAEVFHVYNDDSEDLFSFNFATPPTDSTGAAHILEHSVLCGSASYPLKDAFLILAQGSLQTFLNALTYPDKTLYPASSVNEHDYFNLMSVYGDAVFRPLLSEWTFMQEGHHLFFSAEGKLQISGVVYNEMKGAYSSLDAYAGLWSFKSVLPGTPYEFESGGDPECIPELDWQGLKDFHRAWYSPANCRIFLAGNIPTEKQLAFLDEKFFSSLPAGNRNVPIQKTERWQSPRSFRIPCPAGAEQKPTVLLSWLCGDVSDTVETLALTTLTEILLGHDGSP

SEQ ID NO: 96528 - protein, 324 aa, Unknown
  Obtained from environmental sample
  DOMAIN (208)...(317): FliG C-terminal domain
  misc_feature (1)..(324): Xaa is any amino acid
MVLIGSDEASRIFSKLDPEQVEAISKEIVTLKTITAKEAEDVLEEFRSLLSSSYGYSGSSSGGIEQARRLLYAAFGPEKGETMLVKAVPDAAENPFDFLSEFSGEQLSLLFRDESPAACAMVLSRLPSKLSAAVLANTAPSRKLEIVKRIAKLKDTSPEVIARAAAAIKEKARHFGQSGAKAGEEIDGKGVLTAILKHSDIAFSGQLLDGLEKSDPSLSKEMKDRLYTLEDVANATDRPLQEKLRSMDDKEIALLLKGRSETFTQKIMWNISSARADRIREESEIMGAVPKIEAEAAAREFLSWFRESIDEGRILMLSDKDVFV

SEQ ID NO: 96529 - protein, 246 aa, Unknown
  Obtained from environmental sample
  DOMAIN (18)...(246): Pyruvate flavodoxin/ferredoxin oxidoreductase, thiamine diP-binding domain
  misc_feature (1)..(246): Xaa is any amino acid
MSDSQKMVPHDGNSATAHVAHAVTEVIAIYPITPSSPMAETAEEKSSAGEKNIWGTIPHVAELQSEGGAAGAVHGALCAGSLTTTFTASQGLLLMIPNMYKIAGELTPTVFHVSARALACQGLSIFGDHSDVMSVRQTGFAMLCSTTVQEAMDFALIAHAATLEARVPFVHFFDGFRTSHELQKIHELTLDDMKAMIDMDRVREFRARAMSPDHPFIKGTAQNPDVYFQGRETVNKYTDACPAIVQ

SEQ ID NO: 96530 - protein, 301 aa, Unknown
  Obtained from environmental sample
  DOMAIN (46)...(122): NC domain
  misc_feature (1)..(301): Xaa is any amino acid
MAEFREPKKGDVIWADRMDQGRPYYHCGIYEGGGYVIHFAAPEGSEINQKNAVVHQTTLDEFKDGCKLRIVEFPEGFLAEETVRRARSRLGEKGYNFVVNNCDHFATWCKTGEHRSVQADEAKKVITVLGGAAGEIICKAHDIAEDFKAPALNSIDMIQKPKEIAQSLDQNSIMTTPLVPVPEVIDVPQDPPEQEFFEKEPVDVMPEDEGETDEDDLPPAKKSWYEKVGDKLKGWTYPIAGALEVLKRREMLPPFLKQIDYHTLGAKVRNGIDRVVTAINVFTGILNPTQARQELANNETA

SEQ ID NO: 96531 - protein, 268 aa, Unknown
  Obtained from environmental sample
  DOMAIN (69)...(93): 4Fe-4S binding domain
  misc_feature (1)..(268): Xaa is any amino acid
MVEREATIGGKMAKLDKTFPTVDCSSCILGPKMVDVVQHNDITLHACSEVEDISGYVGNFTVRIRKRATYVDWKLCTGCGLCMEKCPSKKTPDTFNELVGTTTAINIPFPQAIPKRATINPEHCRHFTKGKCGVCEKVCPRGAIRHDMQDEIITEEVGAIVAATGYDLMDWKVYEEYGAGRYPDVITALQYERILSANGPYGGHIKRPSDGREPKIVVFIQCVGSRDRSVGRPHCSGFCCMYTAKQAVLTKDHIPDSKSYVFYMDIRA

SEQ ID NO: 96532 - protein, 551 aa, Unknown
  Obtained from environmental sample
  misc_feature (1)..(551): Xaa is any amino acid
DHGDLTYSLGTFTGNTDILAATPSIAQDGYTLSYKGNGKTSGTATLVINIASKNYTPITTTFTFNATAKQEIAITVTRATEYTYDGTPKNGYTGTPTAAPYTGALLIEYAGESGPPTNAGEYTIKISLPSDAPYVGVESYKFIIEKANPSYTTPTNLTATYGQTLANVAFPTDNWAWQEASTTSVGNAGARTHKATFTPDDTHNYNEKKDIDVTITVARANPDVTFPTTATITYGQTLADAVFTGQSGEGIFAYTAGATKPTVAQSGTAYPVTFTPTDAANYNTLTQTVAITVNKATGTFVSTSALSTTYTPTLKLSDLSLPNGYAWTTQSTALNAGSGQAFPATYTDPSGNYTAASGSITVNVAKANPTITWPTSATITYGQTLADAVFAGESGTGTFAYTNSTATPTVAQSSTAYAMTFTPTDQANYNTLAQNVAITVNRSSDLHATNPLSQKISKGDLSPNTFDLSTIVLNKTQADHGTLGYARGTFKNEAGILTAQPTLSGHTLTYTGTGKESGTATQEITITSENYNPITATITFEATPKTEGQSA

SEQ ID NO: 96533 - protein, 83 aa, Unknown
  Obtained from environmental sample
  misc_feature (1)..(83): Xaa is any amino acid
MFLEFPDDPACAYIDRQYMLGPDLLVAPVFSEDGEVSYYLPEGEWTRLLTGEKVKSGGGWKTERHGFLSLPLMVRGGKQIIAE

SEQ ID NO: 96534 - protein, 94 aa, Unknown
  Obtained from environmental sample
  misc_feature (1)..(94): Xaa is any amino acid
MVKPSLEEAEQIAKTGKYDVIPIAMEMFSDMVTPIDVLRKLMAVSKHCFILESALTSVEDTKNWGRYTFLGFDPKIEITCLERSVKISSPDGVK

SEQ ID NO: 96535 - protein, 222 aa, Unknown
  Obtained from environmental sample
  DOMAIN (111)...(221): Domain of unknown function (DUF323)
  misc_feature (1)..(222): Xaa is any amino acid
VKTDFFFIGWYTDNGTFLNLYDFNTRLTGNITLYANWDNPITVNFETNGGSPVPDPETKDYKTSRVVTKPTDPKKDGHEFVGWYTDNETFSNLYDFSTDLTAVITLYAKWILEDMVWVEAGSFKMGSFSTDSNAQKGESPQHDVTITKGYYMAKFEVTQDLYQSVMGYNPSSSSKGPGFPVETVNWYEAVEFCNKLSEQEGLTPVYSLSRRNPATGFPIKSM

SEQ ID NO: 96536 - protein, 503 aa, Unknown
  Obtained from environmental sample
  misc_feature (1)..(503): Xaa is any amino acid
VIFLFTDRGLYRPGETVTFRGIDRNLSRGQYTAFRGPYKIEVSTGAYQAPVIATLEGNTTGNGGSFGSFTLPQNLDPGQYRIIYRRAGTTVSGRERETEESIGFTVANFERLRFESSLRFTDPVVHQGEKLSASLSASWLAGGGLSGAPYTWYLTREPASVVPGGTEGPWRYWNFGPESDDGRSYVGEGEGTLGPDGKAGISGETSGEGIEGAAYRYRLETSVQDAARQEISSRASVLVHPASFYIAARLDSGTIKTAATGNATTGGAGAASTSSAFFLSAGQPATLSWALVSPNGDLAETSLTSQDLSIQLVRHEWKQARQQGSGGRVNLIWERVEEIAAQRNVKITSGNNSGVFNFTPDKSGLWELRLSGRDQKQRIAATRSRFYVTGAGWVRWDSDDVDTITLNTDRQSYAPGQTAKIMVRSPLEKGKYLLTLERENVISQKIIELNGSALTIDIPIEESYVPIIYAALSSYTVRSAAVQNSYYEPDLDKPKAGFSALRR

SEQ ID NO: 96537 - protein, 669 aa, Unknown
  Obtained from environmental sample
  misc_feature (1)..(669): Xaa is any amino acid
MSCRRYPRRAVTAAMTVMLTAFALYGLAQNYTGDGGKAISLTIYVPQSTGLAKEQSYIPALVQGEFVSNFSNYSAISILDWERLDDIYVKLIADEYDDKAEAKMDVVLGRMAPTSHFLTGNIIKTATGYNVKINITATANKTTAAAYSGTFSAAELENLTGVRRASLELLQKVGVKLTEIAKRELAGAVETNEVLAQTALAKGVTAQRAGTEVAALSYYYQAANFNPSLKEAVKRSTVVAANISSGNIGADIRNDIAWRKNWVAKLQETEELFYEMINAVDPPYTLTYFTDIKTKNVNYQKETADLGIAMSLSADKAWFTAAEQQLVAAAQASMAVLEGLNATKKRSEWGLSGWPKTGVSKTNPFVSDSRMQYDIAVVFELVNQQGKAIGAQKVKLNPAFNIKRGDDGRFTVGIAGEDIVTSVNFNGVKADEISDNLTVRIASVNGAPPQKARFSIVAMPLAEKAKPLTDARNGKKYNTVKIGGKTWMAENLNYQPQTGESWCYKDSSSNCDKYGRLYDWNTARQVCPKGWHLPDKWEWKKLVALVNINTGGKAGTALKTKSGWDNPFQGDSDSGRGKGTDDYGFSAVPGGQRNDRKDRGNAYHHRGGYGYWWTDTEYGCVRSMGKDRSCTYPYAYSWQITQYDDINRNVGEDDNADKKDGRSVRCVQD

SEQ ID NO: 96538 - protein, 292 aa, Unknown
  Obtained from environmental sample
  DOMAIN (42)...(212): DNA gyrase B
  misc_feature (1)..(292): Xaa is any amino acid
FDFDTIESRLRELAFLNSGVRIILTDRRVLEPHEVEFHYDGGIEVFVKYLDRSKAPSLPAPISFSAEKNGITVEVSMEWNDSYHENMLCFTNNIPQRDGGTHLAGFRAALTRSINAYVAENGLAKKKDIELSNEDMREGMTCVLSVKVPDPKFSSQTKDKLVSSEVRPVVEGVVGDKLKEYFEEHPVEARKVIEKIVEAATAREAARKARELTRRKSALDISSLPGKLADCQERDPANSEIFIVEGDSAGGSAKQGRNRANQAILPLRGKILNVERARFDRVISSEMIGTLI

SEQ ID NO: 96539 - protein, 82 aa, Unknown
  Obtained from environmental sample
  DOMAIN (6)...(71): DNA gyrase B subunit, carboxyl terminus
  misc_feature (1)..(82): Xaa is any amino acid
MELAFNTAKTGMAISRYKGLGEMNAEQLWETTMDPEARSLLQVKIDDAAAADETFSMLMGDIVEPRRDFIVENALSVVNLDV

SEQ ID NO: 96540 - protein, 89 aa, Unknown
  Obtained from environmental sample
  DOMAIN (33)...(87): Helix-turn-helix
  misc_feature (1)..(89): Xaa is any amino acid
MNWSEAKSIILKNEEVKNELKMNEAEYKIIEEIIMARKEKNLTQRDLAELIGTKQSNISRLESGNYNPSLDLLNRIAMAVGKELEVRMV

SEQ ID NO: 96541 - protein, 299 aa, Unknown
  Obtained from environmental sample
  DOMAIN (22)...(272): O-methyltransferase
  misc_feature (1)..(299): Xaa is any amino acid
VLFEIALGMNLVKILPETAPCKDDEPRFVLGKTGWFLLEDEMTKVNFNFANDVCYKGAFELKRSIEEGKPLGLEVFGRGGKTIYEVLSTLPEKVRESWFAFDHFYSDIVFEEALPVVFFNNPKKIIDIGGNTAKWAICCCRYNPNVEVTIVDLPGQINAARQKITQAGFSDRINTIACNVLDAQTAIPSGADIIWMSQFLDCFSLEEVTAIMRKIHCAAGPSAKVYILEPFWDKQRFEAASYSLQATSLYFTCMANGNSKMYRCGELAQAVERAGFEIVEAKHNLGSNDYSLLCCRIKP

SEQ ID NO: 96542 - protein, 325 aa, Unknown
  Obtained from environmental sample
  misc_feature (1)..(325): Xaa is any amino acid
MYAQNAFPRIVPDSKALDYYRMGGQSNYSWQVLAEISLWASGDSSLSGMDKIKTIAASLNAAVNPAFSDKEKAEFILNYMHKNVLKSYSLHQTRLDTLLSNGRYNCVSSAVLYVILCKSAGISTSGVMTKDHAFAMVHISGQDIDVETTNPYGFDPGNRKEFHDSSGKITGFAYVPPHNYRDRRTINQIELVSLILNNRAGDYERSNNYAGSVPLAVDRAALLSGGALNSEITSSDSLFIDPRKDVMDRLLNYGASLLKSNKEEECIRWSVFASSMYPDAKRWQELFLAAINNRVARLVKDKKISDAYTFLENQKIHITDADYAK

SEQ ID NO: 96543 - protein, 265 aa, Unknown
  Obtained from environmental sample
  DOMAIN (163)...(240): Polyribonucleotide nucleotidyltransferase, RNA binding domain
  misc_feature (1)..(265): Xaa is any amino acid
REGKATTKETLVSRLIDRPLRPLFEEGYNGDTAVTAQVISFDGQHQPDVLAIVGASAALLISEIPFHNAVAGVRVGRVKGEFVINPTVAQRAASDLDLVVAGTEAAIVMVEAGAQEVQEADMVEALLFGHDKIKKLVKLQKDLQAKVGKKKLTATAPQRNQEVYDKMVGKYATRLMDALTMKVKIESYKTIDALKKEAVAECKEVDATLVDETKACFDFLKETLFRNAILKQGVRLDGRQFDEIRPLNIEVGVLPSAHGSALFTR

SEQ ID NO: 96544 - protein, 110 aa, Unknown
  Obtained from environmental sample
  misc_feature (1)..(110): Xaa is any amino acid
KHIAAFYYQNTARVGYYRDVKHGREIDIVVNFPAGKILVEVKYRESASIGERDAIHALADSALSALVITKRENDYGIQPSQGSKNILRLPAFAFLYLLGNAEKHGYKGAR

SEQ ID NO: 96545 - protein, 97 aa, Unknown
  Obtained from environmental sample
  misc_feature (1)..(97): Xaa is any amino acid
MLINETAIREESLIQAAKQMATAARTAPKGRGIDQLAIVIVTGDEKTRLADAMIKIGQEKGLAGFTRDGENIRVSPVVLLIGTGTSSRKLKLCSLCG

SEQ ID NO: 96546 - protein, 306 aa, Unknown
  Obtained from environmental sample
  DOMAIN (45)...(305): Domain of unknown function (DUF323)
  misc_feature (1)..(306): Xaa is any amino acid
MEFKRYNKSYCFNGVVIAVATGTVTITATTVDGGKTATCAVTVIKQIEMVSIPGGTFMMGSPATEPNRRDDETQHSVTLSGYKMGKYQVTQEQYQAVMGSNPSNFSSNPQAGETQGKRPVEMVSWYDAIVFCNKLSIKEGLSPAYSISGSTDTAVWGTIPTSSNATWNAVVIVAGSTGYRLPTEAQWEYACRAGTTTAYNTGDTISDNTGWYGSNSGLKTHEVGKKPANAWELYDMHGNVWEWCWNWYESYSNGSQVDPTGAATGSSRVFRGGGHGDGARNLRSAYRGTSLPFYRNNGGGFRLVRP

SEQ ID NO: 96547 - protein, 436 aa, Unknown
  Obtained from environmental sample
  DOMAIN (10)...(435): Cell cycle protein
  misc_feature (1)..(436): Xaa is any amino acid
LKLRNILEIDYLLLLPVIILMMLGVFFIYSSGITSEGIQVSTEHYKQIVWASIGVVIAIVMSLLNYRRVYNLSLYIYLISILALIYTLLFGHEIYSSSRWIKIGPFSLQPSEFVKISVIIMLARFLADTDRNKELFSRFAISCIIAFIPMGIVLLQPDLGTALVYIMILLIMIFMAGVPMRYIAFMISCIALTGVLLVLPLWQSYILRKSIAFITALTRINVIVLIILFFGFISAIALFGYVKFKKRYFFWIVFVSAIVVFSLVASYGGRKVLKNYQLMRLIVFLDPNVDPRGAGWNIIQSVTAIGSGGVIGRGFMQGTQSHYRFLPEQSTDFIFSIFSEEAGFLGGLFVFALFMFICFRLLSTMKTVIDPFAKYFCGGLAGMIFFHFIINVGMTMGIMPITGLPLLFMSYGGSSIMASMIGIGIVLSIYIRRFNR

SEQ ID NO: 96548 - protein, 304 aa, Unknown
  Obtained from environmental sample
  DOMAIN (134)...(293): rod shape-determining protein MreC
  misc_feature (1)..(304): Xaa is any amino acid
MQRGFFGKSPRQGGNKLPGAQINSSVFVFVILIIISTLMLLVSSRNFIFGVKNTGLSLFSGVRGGIYELSSLVSRTVLSIKELTNLRKEHADLLKQLDRYEELERSNAEIYQENIRLKEQLDFSKTLRYRRIPAQISGRDPNNLFSALVINKGSYSGVSNNMTVVAWQNGVQALVGKVIQTGVFESLVMPVFDINSLVSCRFSVSRFEGIVEGQGSSESSLIMRFVPRRARDEVNIGDIIITSGMGGIYPSGINLGRVSSINVLEYETTLEVDVIPMIDFSRLEYVFVIEAESQDFEYIGTSDD

SEQ ID NO: 96549 - protein, 445 aa, Unknown
  Obtained from environmental sample
  misc_feature (1)..(445): Xaa is any amino acid
SKEFKQIYEKIKQILTGERTYIFKFSDENDLKLFILKNFLIGKSDVSKIRIDKNNFISIYSKWLEAVKPTIAFNWDAAKKKGIFSGHFYIADLISDKNTSLKENLMIVLRATRYEMNRHKDEFGAFNSSEVHFNDKQRAHNAFWAIYERPPKEDYWDYIIERQDLLVPQDVRERKGSFFTPQIWVELSQKYIAEVLGEDWQDEYYVWDCAAGTGNLLAGLTNKYNIWASTLDKADVNVMHDRIDNGANLLKEHCFQFDFLNDDFEKLPQGLQKIINDPKKRKKLIIYINPPYAEDTTKTTITKTGKNKGKVAKNKIHDKYANLLKKANHELFAQFLIRIYKEIQRCKIANFAKLKALCASNFVDFRKNFQAKLKSLFVVPADTFDNVNGQFPIGFHIWDASQNEMFEEITADVFDKNGILIDTKKLSINDNIKSVNKWIKIYEYK

SEQ ID NO: 96550 - protein, 341 aa, Unknown
  Obtained from environmental sample
  DOMAIN (23)...(184): tRNA synthetase class II core domain (G, H, P, S and T)
  misc_feature (1)..(341): Xaa is any amino acid
MAALIEPKVLKGFRDFLPQAEMVRRNLTEKIEASFRSFGFAPIDTPALEYAEILLGKGGGETEKQIYRFKDNGDRDIALRFDLTVPFARFTALHQQELAFPFKRYHIGKVWRGENTQRGRYREFTQCDFDIIGSDSPAADFEIILMIRTTLMDLGLNVDIKINHRGLFNRFLSHIGQLENSVEILRTVDKISKVGMDETMKTLTGIAGDANGQKILEYINAGAEEKAASFELTLDRITQLSGGPSPESERLRLLHRFMKDTGGTFSLDPSITRGLDYYTGVVFETFLTELPEIGSICSGGRYDNLAGLYTKHAISGVGSSIGLDRMIAALESLNKLPPSSG

SEQ ID NO: 96551 - protein, 439 aa, Unknown
  Obtained from environmental sample
  DOMAIN (364)...(439): Anticodon-binding domain
  misc_feature (1)..(439): Xaa is any amino acid
ALRLPLTDRDIPLIFDAYVERGFGTGALKVTPAHDPNDWELAKRHNLAVINILNPDGTLNNEVPEKYRGFSVTKARAVVIEDLQAGGWFVKDEPINHSVGHCYRCHTVIEPFLSEQWFVRMKPLAEKALASWQKGEIIFYPKKWENTYKHWMENIRDWCVSRQLWWGHRIPAWTCADCGKMTVSRNDIDTCPHCKSKKIEQDPDVLDTWFSSWLWPFSTLGWENSNCNTDDFKKYYPTTALITAYDIIFFWVSRMIMAGLEFTGKAPFRDIYIHGLVRDKQGRKMSKSLGNGLDPLELVDEFGADAMKFTLSFMCAQGQDILVDKESFKMGTKFANKVWNASRYILMNLDGRTLQENPALTPADKWIYSRLNGAAKAMREAFLSYRYNDAAQTAYEFFWNDYCDWYVEATKLSMKDGDNAEKDRTTTVLLDILSQSLRL

SEQ ID NO: 96552 - protein, 77 aa, Unknown
  Obtained from environmental sample
  DOMAIN (12)...(65): Sigma-70, region 4
  misc_feature (1)..(77): Xaa is any amino acid
MKKSSREETFRILNQLKDQEKNVLIYRYELDGGKKHTLKNISTKLGLSTETIRQIELRALQKLRDNAKDLRFYVENT

SEQ ID NO: 96553 - protein, 278 aa, Unknown
  Obtained from environmental sample
  misc_feature (1)..(278): Xaa is any amino acid
MDETPVQVISDVKSADIKSAEVDNKETHNSYMWLTLGGSVGKKVTWYEYHPTRAGYHARTFLEGYSGYLQTDGYKGYDSALKDMPGIIHVGCFAHARRKFFEAAKINKNSKSAQEGIKHIRKLYDIENELREKFANNNNMFLTERKTRAGPVLDKFKAWLEKRKEEVPPSMLLGKAISYSIDQWDKMTAYLESPYLTPDNNACENAIRPFVLGRKNWLFCQSVGGVESSCGMYTLIETAKQNGLIPREYLTVLFEKAPYAATLEDWDKLLPWNIKLSV

SEQ ID NO: 96554 - protein, 281 aa, Unknown
  Obtained from environmental sample
  DOMAIN (36)...(281): Phage Terminase
  misc_feature (1)..(281): Xaa is any amino acid
KHQRAEKYAADRAVMFINELKHTKGIWHGKNFTLLPWQEKIVRDIFGTLKKDGTRQYNTAYIEVPKKAGKSELAAAIALYLTCADGEYGAEVYGCAADKAQAGIVYSVAMGMVKQSASLQARVKIMESTKRLVYPNTGSFYQVLSAETPTKHGLNVHGVIFDELHAQPNRNLYDVMLHGSGDARKQPLYFLITTAGVDRNSICYEVHQKAKDILEGRKIDPTFYPVIYGLDDGDDWTDEKNWYKANPSLGVTVDIEKLRQSFKEALDNPAAENLFRQLRLT

SEQ ID NO: 96555 - protein, 154 aa, Unknown
  Obtained from environmental sample
  DOMAIN (39)...(147): Phosphoadenosine phosphosulfate reductase family
  misc_feature (1)..(154): Xaa is any amino acid
MENKYTLADLKALQALSWERKVLISQTRIMEWYHRNSGRVFISFSGGKDSTVLLHLVRQQFPDVPAVFINTGLEYPEVVAHVKTFDNVAQIRPKMSFRQVIEKCGYPVISKDVALTVAGFRRGAQWAKERMTGTERDGTVHHFRERLYKRWRFL

SEQ ID NO: 96556 - protein, 52 aa, Unknown
  Obtained from environmental sample
  misc_feature (1)..(52): Xaa is any amino acid
IVLEPFSGSGTTIIACEQTGRRARAVEITPEYCDVAIRRFEEFTGKKAELII

SEQ ID NO: 96557 - protein, 375 aa, Unknown
  Obtained from environmental sample
  DOMAIN (1)...(216): Pyruvate phosphate dikinase, PEP/pyruvate binding domain
  misc_feature (1)..(375): Xaa is any amino acid
GLEKKPEEKDEISAKLKLVRRMLGMKGPSNELQSEEDSTPLPKKKSTLEYMDEYAKYFPKGFFDDADNQLMITLTEISRMLKMDEQNDTDTAILIQPMVYGNYGKDSCSGYFFSRNVITGEKKLQGNFFRGKFNEDGTEGHEINKIDPAHLSHLQKIAWTLEDKFKEIRQIRFTVENGKLWLIEQRLVDQKSTQSDIKLLLDLEKRKIINAKDVIKAIDPVRLNEILHPVINLSSVKGLNSWKGGIAGAPGAAIGRVYFSTDSLLEAKKTLAQRGEDNRTILVATSSFAEDVKAIEVSTGVLTAEGGYSAHASVVARQYGKVSLVSPDLKIKGNKATLGEFSFSEGDYITISVPFYGESTLYKGIAELIEPDPKE

SEQ ID NO: 96558 - protein, 589 aa, Unknown
  Obtained from environmental sample
  DOMAIN (64)...(326): Peptidase M16C associated
  misc_feature (1)..(589): Xaa is any amino acid
GPFSLVWMRCSLHTWLHGSKPWESLLLVPSIEKIKQRLAEDSRYFESLIQKYLLDNPHRALVTVEPQEDFLPKQEARLAEKLARTELDLSEADRQLIIDKAKTLDKIQSEGDSSEALASIPHLSRKDLSPEPELIPRQIEDLTGLPALCHDIYTNGISYTDFVFPIDILPQEDYQWIPFFTRAVFSVGLPGMDYAEVSSLLARTVGGLTVTSHTGSAAGNGSSVIKFPSGEFDLIGRDWIVYCLKCLDEKTAASLNLVLRLISEADFSDLRRIHDLVMEMKNEARSSLAPIGHHYAALRANRYASASTQIEETWNGLTQLFFIHRLAEMDTATIAAKLKNLREAIASNGLIANLAGSADALKSNGSLVAQRFKGFGPPKNRIQGKMVPGTFSSPEVFTSPSLQVGFAAMTLRAAKFDTLPQIAETVLAHQLTTGALWENIRMKGGAYGASASSNGIERCFSLSTYRDPNPLRSLDTFCSILKDSAKSHDAANDVEKMIIGCYASETRPRTPSEKSANDFLRFLSRIDDGCRRRKLERLINICEDDISAALGGIASQIDSQKPSRVVIAGTNSAEQAAKALGVEVQLLPV

SEQ ID NO: 96559 - protein, 684 aa, Unknown
  Obtained from environmental sample
  misc_feature (1)..(684): Xaa is any amino acid
TGRKLTDIQAGKIYVINNPGTARWGVFGAEGDESTWKKRGYAFIATVSGSELDQTAKDNIGAGSAWELTTSLPLSANTPNPTTAESAEFRYGTGAFTTIVDNTGPADAVFPPAASDAWTASWDSAHNWSLFILRVYDGPETNYFGDFTILRVRVNNDDKSLPFAQLYDINPKTEGDDRTNIAGDSMAVEERRSLSPMFIGEGTGSNRTKGGLWNISPDLGAVDKPGHIEPRRNGSGATATHPSLTSAQMGGAATSADAAITKPWANPAGFFVADTVSGRVVLRGYAEDDQRVHQVVLTIGTAAPITILDYQANGTGTNGSTANYESPRTGLLQIPSGTNTTGKVYFSDSIDLYRHRVEWAYIWDTETINGGAVAGDNVSVRVTSYNRTGSGATRKDPSALAASPGTAHTGISDATRPNTSPFNKEFPVGLNKYNSINFNLRPYITGFLRNKSQFAHDTRSRQGWYMLARGETAVVRGFNLGTGNITINGTNNTTSGVAAGAIGNYGIAAVNDNHYRQFTMSTSATTGNGIVTYSTAVNTGTERGQSGGHPYIQPWNKEYSPGKDGTELWDDYTQMHIWQSNNDDPGSADPGRFYVRDNGLIMNPAMSIDPTNGTLYESHNESGSGGNGWYNAGSTKKSGINSTSNETVTQFSDPVFFSDVYRSPGSGGNGAYTWASVSIIGRSS

SEQ ID NO: 96560 - protein, 248 aa, Unknown
  Obtained from environmental sample
  misc_feature (1)..(248): Xaa is any amino acid
DETNQRLKLAVSRSTSPVLASNWVIRDYVIPRTDKSSFGTGEFVSMKIDTIAGTNQNRVHIAAMNTSKRLVYVTGILNPTAGTGNSQQDENSGSNVLTGVTVQVVDSVGSVGRWCALSLDSAGNPWISYMDESYVGSRDGAKVAFLNKTTFYKGVTGGAYFAGKYIDVNGASLEGWETMHVPTTYRVENPVEGPGREHGRLGMECYPTRNYTGNAASKTWSGAVGYLSQDAAGNAGAMDRYRVAYYVK

SEQ ID NO: 96561 - protein, 612 aa, Unknown
  Obtained from environmental sample
  DOMAIN (24)...(565): ABC transporter
  misc_feature (1)..(612): Xaa is any amino acid
MRNIEIKGARVHNLKNIDVTIPRNSLTVITGLSGSGKSSLAFDTLYSESQRRYVESLSSYARQFLGLMEKPDVDRIDGLSPAISIEQKTSGHNPRSTVGTITEIHDYMRLLFARVGTPTCHKCGRVIARQSVQEITDRILALDAGVKFQILAPVVNNRKGVYKDLLAKLQKSGYVRVRIDKTIHNIDDDIRIDQNKKHNIEVVIDRLVNSPTVKARLAESIETALSVSAEETVIVDVAGKEELLFSQRLACPVCGISCDEPTPAMFSFNSPLGACEECHGLGFLMEVDPDLVAPDQTKTILEGAIIPWNGAYIDGGWNNHMLHAVCKRYKIPMDKPYKSLSQKHKDILLYGSNGEKVEVLFEGKDGKSRASFNRVFEGVAPNLLRRHKETASEDMRRWIEGFMAQRACPACKGTRYKKQPLAVLIDEMNIAEVSAMSIESALSFFKGYAPKGNAKEISKPVVREILQRLGFLNDVGLSYITLDRAAATLSGGESQRIRLATQIGSRLTGVLYILDEPSIGLHPRDNARLLATLTALRDLDNTVVVIEHDMETMEAADYLIDIGPGAGVHGGKLTACGTPAEVAKSAHSLTGQYLSGKRSIPVPKKRRDGSGL

SEQ ID NO: 96562 - protein, 178 aa, Unknown
  Obtained from environmental sample
  DOMAIN (1)...(171): Bacterial type II and III secretion system protein
  misc_feature (1)..(178): Xaa is any amino acid
AYGLLKPNQFGAALDYLFSDSKTEIVAQPQIITLNNKEANISIGEQRSVRSTDENGVGITQMVNAATQLTVTPYVSGEGKIMLTLSTSKEDFLTAVGENLALSQKSAKTNVLVNNGETVVIAGLTSNEKRNASTGIPFLKDIPILGYLFKHSEKGTNKKDLIIFVTPHIIHSEIGPSK

SEQ ID NO: 96563 - protein, 186 aa, Unknown
  Obtained from environmental sample
  misc_feature (1)..(186): Xaa is any amino acid
MAYQFMKANQNRYTVKEMAMLFGVSRSAYYRWARNGASQKRKADDAELIRLILEIAAKHYRRYGSPRVRRELRDTYGKRVSLKKVARLMRENGLNARKSRKHIPTTDSNHALAVFENILSREFYAESGGLKWVSDITYLRTVNGWVYLTIVLDLYDRKAIGWALSLGMEASETAVAALKWQSKTEA

SEQ ID NO: 96564 - protein, 323 aa, Unknown
  Obtained from environmental sample
  DOMAIN (233)...(300): Oligopeptide/dipeptide transporter, C-terminal region
  misc_feature (1)..(323): Xaa is any amino acid
MEIECLSIENLTCDFLTVEGIVYALNGVNLQLKRGEIHGLVGESGCGKSVTSRSILGLVDKKYTRIRGVVRFDGEDLLSLPEKEMRSIRGERISMIFQDPLNSLSPIETVGSQIEEAMTNHLDINREELRRRTAELLEKVGLHPDTAKQYPFELSGGMQQRVMIAQAISCYPELLIADEPTTALDLTIQAQVLSLIRSLQKELSLTVLLITHNFALVTENCDRTSVMYAGRIVETAPARSLIESAAHPYTRALINCIPHSNTGGNRQEKLPVISGSPPRLYAPLRGCPFVPRCSRSDKACVEIPAATDLGGGRSVCCHHLGDA

SEQ ID NO: 96565 - protein, 285 aa, Unknown
  Obtained from environmental sample
  DOMAIN (224)...(285): Oligopeptide/dipeptide transporter, C-terminal region
  misc_feature (1)..(285): Xaa is any amino acid
MLEVRDLKKHFALSNGRRVQAVDGVSFQVQENEILGIVGESGCGKSTLGRLILRLIEPDAGNVYFGGEEITCLNRNALRLKRRAMQMVFQNPFSSFNAKISIGGALMEVCRFYGMSVPESREKIERLLSDIGLSNDMLNRWPRELSGGQLQRLAIARAIIGEPSLLIADEPLSALDVSVQAQLLNLLDDIRASRSMAMIFISHDMTVVEYFCDRVAVMYLGKIMELISAVELSHNSMHPYTRSLRASAPRLDVFKDSVKENAAPPVSGETPNPQTLIKGCPFAPR

SEQ ID NO: 96566 - protein, 82 aa, Unknown
  Obtained from environmental sample
  DOMAIN (6)...(49): SpoVT / AbrB like domain
  misc_feature (1)..(82): Xaa is any amino acid
MLASVVQIGNSRGIRLPKRIIHELKIKDQVELIINKDELVIKGVKKRPRQGWDEAFAKMSAEKADKLLFPDNIDNETFEWVW

SEQ ID NO: 96567 - protein, 632 aa, Unknown
  Obtained from environmental sample
  DOMAIN (498)...(623): Transketolase, C-terminal domain
  misc_feature (1)..(632): Xaa is any amino acid
MQNSDSLLSRINSPVDLKVLKPGDLDRLALEIRDIIVDRVSRNGGHLSSNLGTVELSIALHRVFNSPEDQIVWDVGHQSYAHKLLTGRYAAFSGLRKRQGLSGFPKREESPHDAFNTGHSSTSISAAEGILVAKRLKGEKGRAIAVIGDGALTGGLAYEALSHAGHLELPLIVVLNDNNMSISPNVGALSKYLSRLSMTSKYQSFRRHFDAMAKKLPFIGDIFYNVVVRLKRAVKAVFYIDNFFVDLGFEYVGPINGHNIRLLERVFRDVRQLERPVVVHIVTSKGKGYAFAEDDPGGYHGVGAFSVSGGIPEASVKPAGLAFTDSFAAALLAAAKREKRIVALTAAMEQGTGLSLFKKTYPGRFFDVGIAEGHAVTFAAGLAAQGLKPVVAIYSTFIQRSIDQAIHDVSLQVLPIVFVLDRAGFVGGDGETHQGLFDICLFRVIPNMVILAPASDKELGLMLDYALSLDVPSMIRYPKHPCPAELPEFSLPLEKGRGVWLARNKNSRVCIAFTGSLYPQALGALQILEDRGIKADAYNLRFLSQIDEEYLIEILNSYDLVAFAEEGVRQGGFGEYASALTRCRNCRARTIIFAVDGDFAANGNALGTREELLRDNGLDAEGIANKIINNRQ

SEQ ID NO: 96568 - protein, 279 aa, Unknown
  Obtained from environmental sample
  misc_feature (1)..(279): Xaa is any amino acid
AAAAGINATIGIALDDLGVVMQLPSVASQIQGGGADVLSYAPNLGKPELRKTWRGMILKKNPTLRPDGISTPVVTAALTHGLYAAAYMFLDDGDSVITPDLFWENYNLIFSYTHGAKLDTYPMFNTSNGFNVEALRDKLVSGPPGKKIVILNFPNNPTGYTPTAAEAKTIADILVEAANRGCDVVALVDDAYFGLVFEEGIFKESIFSLLANAHERILAVKVDGPTKEDYAWGMRIGFVTFGTVRGGAAFYSALESKLGGSIRGSTSSSSSIAQALLLN

SEQ ID NO: 96569 - protein, 196 aa, Unknown
  Obtained from environmental sample
  misc_feature (1)..(196): Xaa is any amino acid
AVQELIDKIKKDGIKAATEEANKVKAEADNESRRILENARKEADDLVERAKLDAARSEKAGIAALEQASRNLILAFKDEVQALLNKIINEKVTANYNEDVLKNALPELIKSWANKDGADLAVILPESELSKLQGYFNDKLRDELSKGVELKSNRKLASGFHISNKEGSVYYDFSAEAVAKQLSAYLNPKLAELLKK

SEQ ID NO: 96570 - protein, 209 aa, Unknown
  Obtained from environmental sample
  misc_feature (1)..(209): Xaa is any amino acid
MGTIGVINTDPQIKKLIDAAARNEPTQNYTPRYLSGEEEILDFLNYDLPEIVLINFSDPVIDLDRIVSRIQNDGWLLNFGIIGIFYGENNNEENYLKKYKSINVLAMMDIYRLRTHLIKNIQIIEQNYQIIFQREFTRDLFQGASGSFTIENDILAIPLYAGIGATILSQRGLINPDRKMQLQLSLGELIVNAVEHGNCGVTYEEKTAG

SEQ ID NO: 96571 - protein, 161 aa, Unknown
  Obtained from environmental sample
  misc_feature (1)..(161): Xaa is any amino acid
VQEALGEVEELLDDAEGLSDDVDDEIAVALDDADAANTQNKNATEGNANGRSNSATTGDPVLATTGSYIFEVEDNEITGSSLAIKRKYISEEKIIGSMGRGWLSSVDSRIMRGMTIVNTAGINLLVNEISRRGDEVRKKAKDLLIETANMNDVTKRAAQAA

SEQ ID NO: 96572 - protein, 487 aa, Unknown
  Obtained from environmental sample
  DOMAIN (142)...(179): RHS Repeat
  misc_feature (1)..(487): Xaa is any amino acid
ETTALGEQRYYYDDAGRLIRLETVSRNSGLYRTDWNYNDSQRTVTVTAGGKYYEILYLDAWGEVIRRADGEGNERRYEYDKAGKLVKAIDGYGRAASYAYNELEKVSAITYTDGATERYEYDHMGNLREIRDAIGVSWAGEYDQAGRLSKETGRPGIDKEYRYDAIGRIVEVKSGGEVVEQYRYSNRGREAVFTDGAGKDFTQQKNAFGELTGEVNRLADSQRYTYDSEGRVTANTAYSGKQTKVEYRDSEGITITTYSDGKQSVIERDMLGNIVRATNETGTIRYKYDAGGKLIEQSDEGAGEITYYVYNKSGQRIRMQSGNRDILYRYGKNGELLKVTDNSQRLEVSYEYDSMGREIRRVYGNGVRQETLYDQIGRIILIRETDSRGNLLRAEGYVYDEKGRRSHSVDEEGRVTKYEYDKQSRLSTVLYPWTKEKADADRREAEEAGLYFTADKGNGERYSFSASEQTALREILNKAGPMRGNAV

SEQ ID NO: 96573 - protein, 140 aa, Unknown
  Obtained from environmental sample
  misc_feature (1)..(140): Xaa is any amino acid
MTKAVYSPEELILIDERVMINPPADFSANNEAVSNNEEEAETDRQPEEVYTGPTAEDLRREAEEFKAEWEIEKKAMIEAARAEANEIVQLADMAVAKEKQEKTAEAEAALTQAKEEAERLVSEARQLAEKLEADMRATLD

SEQ ID NO: 96574 - protein, 172 aa, Unknown
  Obtained from environmental sample
  DOMAIN (1)...(84): Arginyl tRNA synthetase N terminal domain
  misc_feature (1)..(172): Xaa is any amino acid
LKEKIVEAVSILLKDHLSESDVEKNIAVPPSDDLGDYAFPCFALSKVLKKNPAVIAADLKDRIGPIDGGKVRVEASGGYLNFFIDKRELAAGVIENYSNAVPKTLADCGAAPIGMVEGRPLRAVVEFASPNTNKPLHLGHLRNMSIGDSTARILSFCGCEVFKASINNDRGV

SEQ ID NO: 96575 - protein, 177 aa, Unknown
  Obtained from environmental sample
  misc_feature (1)..(177): Xaa is any amino acid
MNEKYEIIIYKSADGLVKIDVRMEGETLWLTQEQMAKLFGRERSVITKHIRNIFSEGELDKKSNVQNMHNANSDKPIKLYNLDVIIAVGYRVKSPHGTQFRQWATRVLHEYLQKGFAINDDQLKNMGGGLYWKELLDRIRDIRASEQVMYRQVLDLYATSLDYNAAMPETVEFFKIV

SEQ ID NO: 96576 - protein, 312 aa, Unknown
  Obtained from environmental sample
  DOMAIN (1)...(310): Glycosyl hydrolases family 18
  misc_feature (1)..(312): Xaa is any amino acid
DWNAGMIRGEYLTDLIISFALLEKDNVSVPYIPELKSLPDQPSFSNIWDEAAALKEKYPHLKINVSAGGYGADGFSDMANDPKLRSAFIENVCKWLEEYNLDGMDVDWEYPVGPEWGQEIKSRPADKQNYIALLRELRDAMDKLGAKTGKRYGLSTAVPASGWFPKANDVKAAARIVDSLKLMAYDYYGGWSATTGHHSNLSNNPHDPAWGGWSTRQALDEYLWAGVPPEKIMLGIGFYGRAWQGVAQGGYEDTPGLFQPYKSIPNTAPFDQGTISWTDIKEFLKPGSGYKRYWDDLGQGPLPLQRRHLDQL

SEQ ID NO: 96577 - protein, 213 aa, Unknown
  Obtained from environmental sample
  misc_feature (1)..(213): Xaa is any amino acid
LLGSIVSSTDAAAVFAVLRSRNMGLRGGLRPMLEFESGSNDPMAYLLTITFLSMAMHKSASVWTEVSAFVAQMLVGVLMGLVMGWISKRIINRIRLEYDALYAVVVIALIFFTYSATGVIHGNGFLAVYVFALYLGNQKLIHKKTITSFFDGFAWLMQIIIFIVLGLLVRPSLVLPLIGTGLVIAAFLMFVARPLSVFLCLLPFKIPFNRQLF

SEQ ID NO: 96578 - protein, 150 aa, Unknown
  Obtained from environmental sample
  misc_feature (1)..(150): Xaa is any amino acid
MIYTVLIFVGAAIAGALVSYSIVNIATKRNRSRIVAEAEQEAELIKKEKMLQAKEKFQELKLEHERVINERNSKMAQAEGRIQQKESSLNQRIEDVSRRRTELETQRESLNLQIEAAKSRIEELDKVRRQHNEKLQTIANMSAEEAKNVL

SEQ ID NO: 96579 - protein, 514 aa, Unknown
  Obtained from environmental sample
  DOMAIN (108)...(514): Bacterial DNA polymerase III alpha subunit
  misc_feature (1)..(514): Xaa is any amino acid
GKTDEAEKKAVYYRDLFGKDENGNPNFYLEIQDHGIPSGGLRGSDLSQKDINKFVADISQNTGIPLVATNDVHYLDKDDNIAHDALLCIGTGKVRTEEKRKKYYGDQFYFKTGDEMAALFSEYPQAISNTVLIANRCDADIPKISVKELPGYLPEFEIPDGFESTDKYLRHISDRGLGERYAKDKAAGGKEWEDIQKRAEYELNTIINMGFTGYFLIVWDFIKYAREHGIPVGPGRGSGAGSIIAYALRITDINPLKYNLLFERFLNPDRISMPDFDIDFANEGREEVMNYVIQRYGKERVAQIITFGTLGAKAVIKDVARVLGISIPESEMITKLIPNRPNITLDKAVSEEAKLQELEKESRFTELFALARKLEGLNRHSSIHAAGIVIGKTPLIDFVPLYQEREDSKNDRGGSIATQYSMNFLEQCGLVKMDFLGLKTLDVIKHSQELIRLRKGKYSDFTIENIPEDDKAAFKMLGEGKSFAIFQFESDGMQNILKQTKPASIGDLTALNAM

SEQ ID NO: 96580 - protein, 90 aa, Unknown
  Obtained from environmental sample
  misc_feature (1)..(90): Xaa is any amino acid
VFLLLTGDTHFLCYATGDNLYGPFTYQGVVLTPVVGWTSHHAITEYKGKWYLFHHDSVPSGGRTWLRSLKVTELKYNPDGTIQTINGGGG

SEQ ID NO: 96581 - protein, 724 aa, Unknown
  Obtained from environmental sample
  misc_feature (1)..(724): Xaa is any amino acid
MAWNAALTDLPDFTAGTGNWSDGSWTDTDASKRGPWVASKNALFAGKTGTYTITVGTAAPSVGDIRFSASTYTISGGTLSRGTAKAVIVDSGKVATISSALSGGALTKEGKGQLTLSGTNEYTGGTTISAGTLIATNAGALGGTTGGAVTVIAAGANLHLSGGISLPNAITVSGASGGIVSEGTATTGNAITGAITLSGTTAVPIAVNNTNLTLSGAITGTSASIAKTGTGTLTLTNASYTIPISVATGGRIVFSGTGAISSSGGISGAGGLTKEGIGTLTLSGTNGYTGTTEITAGGIAISTGSDIGTGTINIASGATLTLSNPAAITAFGKTVSGNGTFVKSGAGELTFAATANITAKKMEINTGTVNASTALKSDSIAVASAGTLKYDGTAALSLPGALIVNGTLNLPLSGLSATTPKITATGALTIGASATLNITGTVAKGTYLIAKGGSGSGDFGAITVNGSANTDYRFTTARTANQIELTIAEKGGSESDAKNYLTVDSAKYTGDNNVTLYLSGSTGSGLKSMRDFIAATSGARITSVYVLYRPGAAATVNASGVVDTTANGGRIAIPLATISATTGNTMTFQLTVPAAKSGSVDEPYYFNVATYWSIDGTATAAPSVSNNKSANLRDPKNTVKENKLELRIVGNQIDSDPTGITLRLNVSNPDILPGSASVGENMPYVDYVGIWVKRNGSAPALTGNKLEGAVAGSEKQNIIPVATL

SEQ ID NO: 96582 - protein, 642 aa, Unknown
  Obtained from environmental sample
  DOMAIN (4)...(424): Glucose inhibited division protein A
  misc_feature (1)..(642): Xaa is any amino acid
MDYDTIVIGGGHAGIEASLAVSRLGFSTLLITQNPDRIGALSCNPAIGGLSKGNLVREVDALGGEMAKLTDATMIQYRVLNRSRGPAVQAPRAQADKQMYQMAARSVLEKQKNLTIFMDTVTDLIIEKAIDKNTVVQGDTAISAASCVTDGATAKVCGIITARGHRITARTVILSAGTFMEGKIFIGEYDAPCGRLGEEAAAGLGKSLRRLGFPVGRLKTGTPARIAEPSIDFSKMEKQDGDEMRPFSFCACMGAQDIVKNRPSLPCWITYTNTRTHEIIKANIHRSPLFGGKIIGVGARYCPSIEDKVVRFPERTRHHIFIEPEGLFTNEMYMNGASSSLPEDVQRDFIRSIPGFEQARIVRPAYAVEYDYLDPLDLYPSLESKRLSGFFTAGQTNGSSGYEEAAAQGLMAGINAAMKLLGRPPLVLTRAEAYIGVLVDDLTTLGTKEPYRMFTSRAEHRLVLRHDTADTRLCPKGRDVGLVDDERWEIFQKKAAALDEIRELLAQRKFSLSTDKTENEALVSHAGESLERCLTDTRVELADILPFAPELSAYPDEWLERARLDIRYAGYIEKENRAAAKAAKMDAIKLDPELDYAALTGLSSEAREKLKTVRPITVGQAARIPGVRQGDIALLMVLATKK

SEQ ID NO: 96583 - protein, 205 aa, Unknown
  Obtained from environmental sample
  DOMAIN (2)...(180): Chromate transporter
  misc_feature (1)..(205): Xaa is any amino acid
MIKLSAIFIAFFRVGAFTLGGGYAMFSVLRYELIAKRGWVSEEEFTQELAMATSLPGAMVINFSLFCGAKLRGRSGAFAAFLGTVLPSFLMIVIAAAFLFPYFAHPSVAAFLRGAAAVVAGLLGYTALKLCKPMISRVSHAVAALIAVGIALIPDVNPIFALILVSAAVYLLSIKERVKIAADSAGINTINGNGKSINKINGGDN

SEQ ID NO: 96584 - protein, 93 aa, Unknown
  Obtained from environmental sample
  DOMAIN (9)...(79): PDZ domain (Also known as DHR or GLGF)
  misc_feature (1)..(93): Xaa is any amino acid
MTVETITPELRDKLSLPKSTGTQGVAVTQIEPRGQAAQEGLRVGDIILEVNRKTVASVKDFSAQTKNIKAGDSLLMLVQRGGSTFYFVTKVRK

SEQ ID NO: 96585 - protein, 112 aa, Unknown
  Obtained from environmental sample
  DOMAIN (5)...(63): Ribosomal protein S16
  misc_feature (1)..(112): Xaa is any amino acid
VRLARSGRKKIATYRVVAADSRTQRDGKFLETVGYYDPQTNPKTFQFKSDRIAYWIKQGATPTLTVKNLLKQDRFYEKLEQLDKGVALESITLERKPERKRKAKVHKVKSSE

SEQ ID NO: 96586 - protein, 239 aa, Unknown
  Obtained from environmental sample
  misc_feature (1)..(239): Xaa is any amino acid
MRNEEYNEFSLLRLVPDVLRAREFRLYTKAGRLVDLWQNNGAAVLGHTPPSLMREIKNSASRGLYAPFPHFLEERYRKALSRVFPDRVFRLYAAPPPGLETLAANGSAVLWRPFADPASPLGVPENPPVLIPVVPGIQTWRDGLPLGLCVLAVKDDADIKSADVDIKSGDFLPPVLLAAAARGIYDLISAAPARANPNYPRIAKALKNSEAWQHNGIYLTSRQKPSQTEWAAYSAASSK

SEQ ID NO: 96587 - protein, 186 aa, Unknown
  Obtained from environmental sample
  misc_feature (1)..(186): Xaa is any amino acid
AARSRRFRQKVLLHYGGGSVKKSGLHDKVTASLKNAGVEYIELGGAQPNPRLSLVKEGIELCRKHDIKFLLAIGGGSAIDSVKAMAVGVPYGGDVWDFYCGKAAPAAALDVGTVLTIPAAGSESSPSSVITNENGGLKRGLTCELIRPVFSILNPELTFTLPAYQTACGAADIMAHIMERYFTTTK

SEQ ID NO: 96588 - protein, 94 aa, Unknown
  Obtained from environmental sample
  misc_feature (1)..(94): Xaa is any amino acid
MRIDIPETSVVAMIGVSGSGKSTFAKTHFKPTEVLSSDYFRGLISDDETNQQVSAQAFETLFYVANKRLDLGLLTVIDATNVNKESRAPVLQIA

SEQ ID NO: 96589 - protein, 258 aa, Unknown
  Obtained from environmental sample
  DOMAIN (1)...(258): Protein of unknown function (DUF1703)
  misc_feature (1)..(258): Xaa is any amino acid
MRDYYITFKAKEQHVRFLFMTGISKFAKMGVFSTLNNLTDISLKKEYGALLGYTEEELVENFSEHLEVGAKELGYSVGELVEKMRRYYNGFCFDGVQKVYNPFSALNFLTEFEFSNYWMESANPKIIADYMKDRSLTAEQFIGMQVSKDFVKNPGEMETAPPEGFLYQSGYLTLREGGDGEFSLDYPNAEVLEAMSQLVAMNVIQNGGGNYFADLRTPLFDAIQDGDVDLFIETLNRLLASIPYDDYAKAAQSSIRRS

SEQ ID NO: 96590 - protein, 125 aa, Unknown
  Obtained from environmental sample
  DOMAIN (3)...(102): Biotin/lipoate A/B protein ligase family
  misc_feature (1)..(125): Xaa is any amino acid
MEVSRLLAQNNAPLGAPPHGTVITADFQEAGRGRIPGRRWEMEKGIDLAFTVLLRFPDRCGIAIPAGLTLRTGLAAALAIEDFAPALCGKALIKWPNDILLPAPVSDGRQTVLKAAGILAEAESG

SEQ ID NO: 96591 - protein, 239 aa, Unknown
  Obtained from environmental sample
  misc_feature (1)..(239): Xaa is any amino acid
AYNVNVNIKVNIKTLDCFASLAMTVIAFTTTVIAFTTTVIAFTTTVIAFTTTVIAFTTTVIAFTTTGIAFTTTVIAFTTTVIAFTTTVIAFTTTGIAFTTTGIAFTTTGIAFTTTGIAFTTTVIAFTTTVIAFTTTVIAFTTTVIAFTTTVIAFTTTVIAFTTTGIAFTTTVIAFTTTVIAFTTTVIAFTTTVIAFTTTVIAFTTTVIAFTTTVIARSEATKQSSAFDVSFDFDFICGV

SEQ ID NO: 96592 - protein, 235 aa, Unknown
  Obtained from environmental sample
  DOMAIN (1)...(224): Nitrogenase component 1 type Oxidoreductase
  misc_feature (1)..(235): Xaa is any amino acid
IPVISTVTGDSSYETLTRAPSATLNIVQCAGSSAYLAERMEEEFGIPYIKVSFFGVEDTAASLLRAADALGRPDISANARAFAERRTAEVMPIIEKYRPRLEGKRAAIFVGGGFKAISLIRQFNELGMKTVVVGTQTGKKDEYEIIAELVDGDAVILDDANPAELERFMLEKQADILVGGVKERPLAYKLGMAFCDHNHERKHPLAGFEGIENFVKEIHASVNSPVWKYVKGDAA

SEQ ID NO: 96593 - protein, 50 aa, Unknown
  Obtained from environmental sample
  misc_feature (1)..(50): Xaa is any amino acid
EFLTEKVFAGKTGTRIEPDPKDVESFGIFMERYTAGLKIERAAVENFKKG

SEQ ID NO: 96594 - protein, 335 aa, Unknown
  Obtained from environmental sample
  DOMAIN (1)...(130): Glycosyl hydrolase family 3 N terminal domain
  misc_feature (1)..(335): Xaa is any amino acid
IVTVMGANVIKGLQDNGVAACMKHFLGEGQTIDGRNQGNALLDRAGIERILPPYRAAIEAGAISLMPSFSSVNGVKMHESKNLLTDLLKKEMGFEGFVVSDWAAVTQLSGGNYKAQIANMINAGVDMVMATNGRGSWINFINYLKELVNEGTVPMTRIDDAVLRILRFKRSIGLFEETLLIKKAGEIGSDANRTAARALVAQSLVLLQNKNNVIAKLPSYKNILVAGQGANDIGMQCGGWTITWQGRHGNITKGTTILEGIRNAAKDKTVTYAEGGKAEGTFDAVIAVIGEDPYAETEGDRSSLTDSRGREMDMTQSKPKNIENIVQINIRDRDM

SEQ ID NO: 96595 - protein, 302 aa, Unknown
  Obtained from environmental sample
  DOMAIN (26)...(221): Metallo-beta-lactamase superfamily
  misc_feature (1)..(302): Xaa is any amino acid
MCEFKSHRRQNIMEKYINCIAHKTSEGNLLIGEDYTALFDCGMAHCADGTIQNIKNALKDRPLDYLFITHTHYDHIGSLPFLRKEWPSLRLVTTQTGADVLLKDTPRKVIRELSIVAIKENNSKVDTAYSDDAFHADLIVKEGDVISLGGLSVKTLETPGHTRDSLSFFIPELELLVVSETTGFMTPDGTVYPTYLTGFNDAVNSIEKCGKIPYKYLSFPHYGIAADKDANGFFDKALKAVTDCRDFLLDMNEKKLDKEAMFEKYVQKYGSEELYVYQPWAAFAVNARATIACTLREFAPNG

SEQ ID NO: 96596 - protein, 761 aa, Unknown
  Obtained from environmental sample
  DOMAIN (2)...(75): Helicase conserved C-terminal domain
  misc_feature (1)..(761): Xaa is any amino acid
TDDGHPAKPYHGKMEKQIRTANQDAFMRTEVNIIVATTAFGMGVDKKDVGMVIHYDISDSLENYVQEAGRAGRDENIKADCYVLYNDDDLNKHFIMLNQAKLSQKEIQQVWKALKELIKSRESISQSALEIAKKSGWDDSVRDMETRVKTAINALEQSKFVKREQNMSRIYADSILVKNMGEAREKIDKSARFDDASRQQAIRIIRSLISARSKTRGKDEEGESRVDYISDKLGIVKEEVIRVIGLLREENILADAKDLSAYIKQREKVNRSKIILSMHSNIENFLFMYLDETERTYNIKEMNEALAAKYPDTSISQLGTILNYYSIKRLVKRKREFNKNYVTLKPYFLTAEMKVKSDKRCRIAGIIIDYLYSKVSDTQESQDTEDVKVDFSILELKKEYDRYLLGENVKTDEIEDALYYLLKIGAMKIEGGFLIIYNAMRIERLKMDNEAKYKKEHYAQLEEYYQNKRQQIHIVGEYANRMINDYDEAMNFVNDYFEIDYGNFLNKYFKGRKYEIDRNITSKKFNQLFGELSQAQLDIIKDQDSKYIVVAAGPGSGKTKLLTHKLASLFMMEDVKHEQMLMLTFSRAAATEFKKRLMTLIGDAANFIQIMTFHSYCFDLLGKVGSLEKSDDIIKYTVEKINAREVEFTKLTKTVLVIDEAQDMSEAEYSLVKTLMKENDNMRVIAVGDDDQNIFEWRGSSSKHFESLLNEPESKKYELVDNYRSNANIVEFANQFVKRITHRFKTIPIVPIKNENDNISI

SEQ ID NO: 96597 - protein, 306 aa, Unknown
  Obtained from environmental sample
  DOMAIN (1)...(277): Cellulase (glycosyl hydrolase family 5)
  misc_feature (1)..(306): Xaa is any amino acid
DIVRIPVTWMGYIGSAPDYHINEKYLERVAEVAQMAHNAGLKAIINLHHDGSTEGGGKDNGWLSINKARASTEGYNEVTFKFVRVWKQIATYFKNYGDWLIFESMNEIHDGNWGWGSASAQSAQYDIVNDWNRFFTEVVRGTGANNEVRYVILPGYCTVPQHTLASYFWLPPDSASNRQIVTFHYYDPYEFGIAGTRWEWGSDADKNRVSMDFAPFKDMYTDKNIPVIIGECGAVRQFTDKARQNRLDYLSWVFGKAKENGLVPIYWDNGLFSGNGEKFGLFSRSSGQPNSAESEACIKAMIEAVK

SEQ ID NO: 96598 - protein, 325 aa, Unknown
  Obtained from environmental sample
  DOMAIN (167)...(239): Prokaryotic transcription elongation factor, GreA/GreB, N-terminal domain
  misc_feature (1)..(325): Xaa is any amino acid
MYSKAKADTKAKTKAKAKPETDTESEASSAAADAASSAAADAARTEALAKAKAEARVQWYEAAGISEERQLIILIHILDLTYRDIENQRETTEARKINKQVYNILFKEDVLGSFVDTADTEIISRIYRFVSDVKNLDPQDKINLRSRIQDKHPDFKFIDSMEKRISQGLTVTRSKFEEKQKQLVNIMDVEIPANSKEIEAARLHGDLKENAEYIAAKEKQVLLNTTAERLKEDIDRAQLFDPGAVDSSKVSFGTVVVLHNHSKDRKEEYTILGPWESDPENNVISYLAPFGKIMMGRAEGEQFNFTSDGEKISYTVESIRPAVIN

SEQ ID NO: 96599 - protein, 215 aa, Unknown
  Obtained from environmental sample
  misc_feature (1)..(215): Xaa is any amino acid
MIVCTLFNPVIDATYRVDGLELGTTRLDVVSRTVPAGKGMNVARVVKTLGEEVAVTGLIPKNDMRRFETFLSDHGIKALLYEAPGVTRVNVTLHDAQTRCVTHINSVSPPLPISLEEDFLRFLAGQAETGDSWCFSGSLPSGFDDDAYARLIRDFKARDVSCLLDTRGMALRTGARAAPQIITPNLTELGEFFQEEIKGVHHIALCGKRLIDMDV

SEQ ID NO: 96600 - protein, 95 aa, Unknown
  Obtained from environmental sample
  misc_feature (1)..(95): Xaa is any amino acid
VVTVKRWDPTEHMDTEERIKGFLEAVLEEGGIDAMPSALAEAAKARAINQLAKETGVDRLELCRMFAQGGEAPPPSPESIARVAQAFAVPAHAGA

SEQ ID NO: 96601 - protein, 240 aa, Unknown
  Obtained from environmental sample
  misc_feature (1)..(240): Xaa is any amino acid
MSFSPSIQEKEKEIAELEQLLADKKRQLEEIKISTATPTQEQINNHSSPENKITLFRSMFKGREDVYAKRFESKKTGKSGYQPVCRNEWVKGVCKKPKASCGNCNGRSFESVTDGVIRNHLSGAIVMGVYPLLQNETCHFLAVDFDKEAWKEDAKAFAETCKLEGITAALERSRSGNGAHIWIFFDNPVSAAKARKLGTFLMTRTLDRRPEIGLDSFDRFFPNQDTMPKGGFGNLIALLS

SEQ ID NO: 96602 - protein, 280 aa, Unknown
  Obtained from environmental sample
  misc_feature (1)..(280): Xaa is any amino acid
EFRNIDNGKDITEYEYYEPLEQALFYTCKNKPSIQKNETRLGEYISLCKNVGNGLYKEKRKNGDKEKLEEQLKYLEKITNNLQDIRICWWNTQRLRAYWYVLSGEWEQAKACYEEIIDIIFYTGEKNLERIFNEALVLASINEDRSFLKKLKHNGVVFELFGKPYTNRSNFEYSKANKESRSKNFVVEDSEVKFWASKFYEIFQKDKFFISEDKLPKSVENPLLLTYIEDEIQKEADLNKKNKFISLQDKKYPQIVYFTKQRNIQEVKKLLKIRADVNQL

SEQ ID NO: 96603 - protein, 415 aa, Unknown
  Obtained from environmental sample
  DOMAIN (252)...(338): Hpt domain
  misc_feature (1)..(415): Xaa is any amino acid
GNRLIEGTGLGLAITKNLVQMMEGQLGVESEKGKGSTFSFRIRQGFVNDLIIGVEVAEKLRSFSYTDNKRIITQKLIRVNLSYARVLVVDDMKTNLDVASGILRKYKMQVDLLDNGPAAIERIKAGTPIYDVIFMDHMMPGMDGIEAADKIRALGTEYAKKIPIIALTANAIQGTDKMFFAHNFQAFVTKPIDVMEMDTILKKWVYDKNRDKASGSPIIEDTEENKIEIYIPGVNTRKGLTLYGGDMGIYLPLLRSYITNTPNTLEKLKNVTAENLPEYVIAVHGLKGTSAGIGAEELRVQALELETLSRAGNLQAVMEKNDKLIADTELIVASVKEWLDKNDVHEEKPRLKAPDKELLAKLRESCENYDMDSIEEIMNQLESAEYDEDGELIKWIREKIDISKMGEVVKRLEKI

SEQ ID NO: 96604 - protein, 540 aa, Unknown
  Obtained from environmental sample
  DOMAIN (38)...(182): GAF domain
  misc_feature (1)..(540): Xaa is any amino acid
MINANRMYEGFNANERRDLYANALNKSLEVFVSYSEKEFNDIMSKGLRPIAAAAGLDRITVFRIYNQGVMLSGEKYRWDRLKGGTAPIDDELKELSTSPVLERFISIMSDDICISLKRSGFKEDEAALLAPRGVMSILLVPVFTEGEFWGVVVCNDITMERDFDSDCIAMLRSTARMCVSTIIREEKTQNANLAAETLKRREKMLDLLNKVSLIFLSGSENKSGDMMAEGVHLIADMAEIDRIILYRNYIESDGIHISQVYRWGRNLGANTDLLELLFADISSLKLMPNWKSLLTEGNSINSPSRLLSAPEADMLKSFGILSVAAIPIHINNAFWGFALFADTKKERSFEDDVFEMLRSAAFLFANAFIRGEAEYDVLTGIYNRRFFNKNIKRTIKSLSRTGGLLSVLMIDIDFFKQYNDTYGHVEGDNCLKMVAQTLFNSVTRADDYVARYGGEEFVVVLPYTDRHGAQIVAERLLDNIRNCNIIHEQNDAAKYLTISIGATTGKVLQTHTTDDFVKKADEMLYKAKQNGRNKWFFEQL

SEQ ID NO: 96605 - protein, 265 aa, Unknown
  Obtained from environmental sample
  DOMAIN (1)...(181): Calcineurin-like phosphoesterase
  misc_feature (1)..(265): Xaa is any amino acid
MKILFIGDIFGNVGRRVLAERLPGLAREHAIDVCIGNGENVSGGRGMTKNLFRKLRKYGLDVITGGNHSFSVDDNDYSFMDESVSLRPLNFPPANLGHGSTLFTLEDGRTIGVVNLMGRTFMHESLDCPFRLGLAAINELREQTPIILVDFHAEASSEKAALAHYVDGLASAVIGTHTHVQTADERILPKGTAFITDAGMTGPEKSIIGMKPEGVIKKYLLQTYVRYEPSEDGAMINGVIIEVDDGSGKALSITRLFEHVTLIQS

SEQ ID NO: 96606 - protein, 216 aa, Unknown
  Obtained from environmental sample
  DOMAIN (10)...(132): Acyltransferase
  misc_feature (1)..(216): Xaa is any amino acid
MQHFTSYKHRWRYYGIKRAITVSNHTTFLDPVKIGWPLLPRLGFQTLLEGTVEFPVLGTYTRLLGGVPIPRGRNGFRKIIEICQKAFKYRRYLHFYPEGECFLYNQSIREFQSGAFRIAAELDIPVIPLVTVFSNGPFKPWSFWGRSLPIEKLVVLEPMYPAQFVKRDGKDEITTESIKEFADAVRRKMQAEIDRRKGSTAFFRGQMERMKGINDQ

SEQ ID NO: 96607 - protein, 53 aa, Unknown
  Obtained from environmental sample
  misc_feature (1)..(53): Xaa is any amino acid
ILEFDKKAIVIMITAAGNEDTVKRCLQIGAKGFIVKPLDRDKVLRRVVPVLKQ

SEQ ID NO: 96608 - protein, 248 aa, Unknown
  Obtained from environmental sample
  DOMAIN (1)...(219): Pyridine nucleotide-disulphide oxidoreductase
  misc_feature (1)..(248): Xaa is any amino acid
MKYRGDSFYEDNACTLLRGVAATEIRAPAKEVLLSDGRRIPYDKLLVATGSSSFVPPFKGLDTVQNACTFMSLDDARKLDAMLQRDKRVLIVGAGLIGLKCAEGILQRVAGVTVLDLAPKVLSSILDDDGAKLVQSHLESKGVEFRLSAGVKRFKRDAALLENGETIAFDILVLAAGVRPNTALLNGVAKIDRGIVVNEKSETGAADIFAAGDCTQAFDVSSGQSRIMALLPNAYMQGECAGINMAGG

SEQ ID NO: 96609 - protein, 93 aa, Unknown
  Obtained from environmental sample
  misc_feature (1)..(93): Xaa is any amino acid
MEPGEREAHECLRIMFAAQLITGPFSILVGFEGGLMALNDRLKLRSMVIGEKDDKVYMASEEAAIRVIEPNLDSLWAPRGGQPVIVGIQRGEV

SEQ ID NO: 96610 - protein, 263 aa, Unknown
  Obtained from environmental sample
  DOMAIN (30)...(231): Phosphomethylpyrimidine kinase
  misc_feature (1)..(263): Xaa is any amino acid
LGREVWAINTVEFSNHTGYGSWKGKVLGAELASELVTGVEERGVLNRCEAVLSGYLGDASVAMAIVDAVKKVRSQSPNALYACDPVMGDVGRGFYVKPDIPGIFNKELIPLADIITPNQFELDAITGINTQNMADTLKAINVLHEMGPSIVLVTSYKEKEGELSMIASDKKEIYKITTPELPLDKGVAGTGDMTAAVFLSRYLETKDLKKTLELCTASVFGILEASFKASNTKSGALIELKIIDTQQELVTPSYSFKAEKITA

SEQ ID NO: 96611 - protein, 82 aa, Unknown
  Obtained from environmental sample
  misc_feature (1)..(82): Xaa is any amino acid
MPEMDGWETFSRIRDLSNITDVPIAFLTSVQGEKEQNHAKEIGAADYIFKPFTGENLLNRIENILKKPPVKNVYPVLNSDHF

SEQ ID NO: 96612 - protein, 205 aa, Unknown
  Obtained from environmental sample
  DOMAIN (3)...(189): LytB protein
  misc_feature (1)..(205): Xaa is any amino acid
MVILRANVLGFCMGVRRAVELAYSQADRPAAKVYTLGPLIHNPQVLEDLQQRGVTILDEANLPEKLSGDTVIIRAHGISPQTEAELRKRGAVVVDATCPKVKASQLKAASLAKQGYRLFLAGEESHAEIAGIRGYAQDGWIHGNHAGHSKQFLRIMSSAAEAETAAKLLSEDPEFHSDPVKTGASCTNYHFRRGIPCYWRGNLAV

SEQ ID NO: 96613 - protein, 201 aa, Unknown
  Obtained from environmental sample
  misc_feature (1)..(201): Xaa is any amino acid
NKPVTLKNGISAAVRENDEEAAQVLIEREFLILKNYIDTPYWKEAWLRYYRFVYRDSWNRIAGPVSALVNYLGGKNTGSDETKRAFAQRALSFVQGFNYERNLTESDFINLVTAVVKGIGDCDSRSMLWAIILAQADIHSAIMVSPYYNHAMGLAEIGGIGARFEADGIGWLVAETTDKVDIGLIGQDVSDPRYWIGVIFN

SEQ ID NO: 96614 - protein, 505 aa, Unknown
  Obtained from environmental sample
  DOMAIN (324)...(412): Hpt domain
  misc_feature (1)..(505): Xaa is any amino acid
KHIKFNLEMNENIPLTLLGDELRIKQILNNLLSNAFKYTDTGEVTLSVNAEYSSQQWAQITLIFRVSDTGHGMTSEQVDKLFDEYTRFNMEANKKAEGVGLGMSITKHLVRMMNGDIKVKSESGKGSIFTVSLPQGVLGTEVLGKELTENARKFNFGKASQINNAPQFVREFMPYGRVLVVDDVETNLYVARGLMAPYGITIETAASGFEAIEKIKNGEVYDIIFMDHFMPKMDGIEAEKNIRDLGYTRPIVALTANALAGQTEVFLASGFDGFISKPIDIHQLNAVLNKLIRDKYPAETIEAAWRKKNEMEKSSVPQSSFNKELARIFTRDAEKTSVILGAIAERNHYGDDDIHSYMINVHAMKSALANIGEPELSAFAAKLEEAARHHDIPLISKETSAFLYELRLVIEKNRLIKNSADNENAGNISDDDMVYLREELAVIKDACAGYDKKTAKDALSNLRQKNWTKSVTEMLEKMAEHLLHSEFTEAAKEAEEYINRESADS

SEQ ID NO: 96615 - protein, 114 aa, Unknown
  Obtained from environmental sample
  misc_feature (1)..(114): Xaa is any amino acid
MNNLTGLIPSLHEAMDIVSREQVGVIPASYRDARADAVSIGQILTVPVAKPRKTQPIKPGQPPTGSGNDFDNVQVKIQRQESADPIVWSGDEESTQGALLNPMKKDQITQAMRA

SEQ ID NO: 96616 - protein, 449 aa, Unknown
  Obtained from environmental sample
  DOMAIN (218)...(308): Helicase conserved C-terminal domain
  misc_feature (1)..(449): Xaa is any amino acid
MSPSERLSEWSRIRRGEAPIVVGPRSAVFAPAPNLGLVIIDEEHDGSYKSGNTPRYHARQTAIRRCAVEGAKLVMGSATPSAEAWKLMAEGKIKRLDLSLRLAGGSLPEIKPVSLEKTDGCLTRELKEEIRLTAQMGRQTILFLNRRGFAYFYHCPSCGYEQKCKRCSVSLTWHKSRNRALCHYCGYSEPPPNACPNCGSLEAGYRGFGTEMVEEEVKRTFPNLRVRRIDADVSAKKGILEDTISLFKAGLIDVLLGTQMVAKGLNFPGVRLVGVVFADTGLHLPDFRAAERVFSLIVQVAGRAGRYFPDGKVIVQTFRMGDPVITRSCAIDVKGFFEAELSQREALNFPPYTRLIRFSARSHNPTRADTAIKRLAALAAPLIPPGADMLGPAECPIGVINGNHRQQLILRGKSMGTLHGAARVLLERYEKGRDSQVYMEVDVDPVNLL

SEQ ID NO: 96617 - protein, 326 aa, Unknown
  Obtained from environmental sample
  DOMAIN (151)...(325): Nicotinate phosphoribosyltransferase (NAPRTase) family
  misc_feature (1)..(326): Xaa is any amino acid
MDKKGQSALFTDYYALTMSQGYWKHNPQRQAVFEMSFRRQPFGGGYTIFAGLGTLLESLAAFSFSDDDIEYIRSLGGFEDRFLEYLKNFRFTGSLWAVDEGTVVFPQEPLIRIRGNLIECQIIEAMLLNTINFQSLIATKTRRVWLASGKGSIMEFGLRRAQGPDGAMAASRAAFIGGAIGTSNTLAGKIYGIPVMGTMGHSWVMSFPDEADSFDAYAGLYPDRSVFLIDTYDTLKYGIVNAIKAGKKLSEQGKKFGVRLDSGDIEYLSAEVRRMLDNAGFNDASITVSNELDENIIENLVRLGAPVDTWGVGTNMVTGGSDAALT

SEQ ID NO: 96618 - protein, 165 aa, Unknown
  Obtained from environmental sample
  DOMAIN (29)...(104): Mur ligase family, catalytic domain
  misc_feature (1)..(165): Xaa is any amino acid
MELRLSQFFTKYASERAGLISTNGSQDPLVNSLEYDSRKVKPGSLFFALRGLHTDGSLYIDDAINKGAVVIVHENDITDFKENIVYIKVKDARFAMSPISAAFYDFPSQHLLVTGVTGTEGKSTTVYLIWQLLTLLGKKAGFISTVQHCLGGEVLKHTEHQTTPE

SEQ ID NO: 96619 - protein, 170 aa, Unknown
  Obtained from environmental sample
  misc_feature (1)..(170): Xaa is any amino acid
MWMAENLDCDVGGSGCNYDDPANCAKYGKLYNWATAMALAAGCNSSTCASQVDAKHRGICPSGWHIPSNADWDKLMRYVDGTSGTSSPYNSSTAGKYLKTSDLGGNDTYGFSALPGGYASGGNFISVGSSGYWWSSSEIGDYAYGRGMGYGNERAFYRIDDKNYLQSVRC

SEQ ID NO: 96620 - protein, 224 aa, Unknown
  Obtained from environmental sample
  DOMAIN (41)...(57): KWG Leptospira
  misc_feature (1)..(224): Xaa is any amino acid
MVKLGGKWGFIDTTGKEIVPPKYDRVSDFSEGLAKVWLGEKWGIIDTAGKEVVPPKYEEFHEPHYYYLYGPVFNFREGFAMVKLGGKWGFIDETGKEAVPPKYGEVRNFSEGLAWVWHENKWGFIDKTGEEVVPPKYSYVYDFSEGMAAVRLVGGKWGFIDKTGKEVVPPKYDSVGYFNEGFAMIGLDRKWGFIDTTGKEVVPPKYDEVDFFSDVLETTFPPGM

SEQ ID NO: 96621 - protein, 283 aa, Unknown
  Obtained from environmental sample
  misc_feature (1)..(283): Xaa is any amino acid
VPGTAAEYQITVNEDSFGRMLTPAVFDIALGGLQDTFHEFRQIISGARERDKVDELRDEVQACAEQTSQMRADLQYLTAAKTEDHVFWAEGSHEKKWAKLCGVPLDISELLAQIWERCNGGIVFTSATLAAQGSMEYVSRAIGLDRFADRTESIILPSPYGADQTLFCAFRNCPEPDAPEFAAFAAEAIAAIHAKLGKNVLALFTSNAMLNNVYTQLKARPEVDRNNILAQGYAGNRNAMLEQFKTQSAMILLGTDSFWEGVDAPGEPARRSSFRACHSPSHA

SEQ ID NO: 96622 - protein, 330 aa, Unknown
  Obtained from environmental sample
  misc_feature (1)..(330): Xaa is any amino acid
ISQTQSGSNSVTGVAIERRITSAFLFVGTGVTPAIYEITGHGEYPISAYGMQDVVERENFTLKSLNLLVEAIPSDASALILLNPLRDLAASEAEKILDYLGRGGRLLIIANYQIRELTCLNEVLASYGLAFTYGIVHETDPYYIAIDSSTEWPDLSDHEITMPLMDKTKTPVILAEAMALSVLDTKRRSVEIMPLMTSSRAAFLRTNLDENSDVKVASDISGPFVLGAAVKDPSWIQDNEPQARIVAIGCGYLLYMAAMGFDANRDIFMNSITWLEDRPETISARSKSVFILPLRMNLVQIIVFGVLFIFVIPAAFFISGLVVWLKRRHL

SEQ ID NO: 96623 - protein, 502 aa, Unknown
  Obtained from environmental sample
  DOMAIN (253)...(417): Radical SAM superfamily
  misc_feature (1)..(502): Xaa is any amino acid
MGAKKRFIDPLTDLGELLLKVEKPGRYTGGEYGRLLKRDSSCVTELALSTVIAFPDLYEIGMSNQALKILYNRLNGIEGIFCDRSFAPAPDFEELLRSRHLPLYGLDTGISLGDVDFLMFTLGYELLITGLLTMLDVSDIPLRCRDRGENDPLIIMGGPCVSNPLPYADFIDAFWIGEAEDGFFDLAVELRYVKRSGGKRDDLYNKLISHPAVWTSGKGRAVRAVDGNFSSRSGNQAVFPVPSMKVVHHHGTVEIMRGCPNGCRFCHAGYWYRPARQKSARLIDDEVDLLIKSGGYREITLSSLSSGDYKYLEDLIDYLNKKYSPHHISFQLPSLRVSTFSLNLLEKISLVRKSGLTFAVETPSDFWQMAINKQVAGEDVVSILREAKKRGWKGAKFYFMIGLPLDESSVKEEVEIAAFVERVAQQTRMHFNINVGTFVPKAHTPFQWAAQISVKEAIGKLSYIRNRLKSQGHKVGIQDPFISVIEGIASRGDERAGAIFEE

SEQ ID NO: 96624 - protein, 87 aa, Unknown
  Obtained from environmental sample
  misc_feature (1)..(87): Xaa is any amino acid
MDKKIGIIGYGSMGKMIFSKFIESKIIPESNIFISNRTYEKIKDLKTIYPQLNICKDNIETAKNAGLLFICVKPSEIKTVLLEILKK

SEQ ID NO: 96625 - protein, 345 aa, Unknown
  Obtained from environmental sample
  DOMAIN (79)...(158): Cache domain
  misc_feature (1)..(345): Xaa is any amino acid
MIINGYSPAQIQKYIKEDITPNVIKHDKRKLGINRMYGYFEVFNGLQLINGEWETSVDDNMQESPWYKAAVEANGKVVFTTPYFNARIRSYVLTYSRQIFDGDKPLAVIATDVPIDKIIDYVIGMHVTDDGYGILLDENLGLIAHPDVYMIGKSLRNVNSGLASHLAYYLENSEEYIPKNMAINYKGMESIVFSRKLRTGWYVSLIAPVNKYYREIRNMGLVLTVLGIIMAAVLSGILRRITNSKKKVEQENKQKSDFLAKMSHEIRTPISAILGITEIQLQDRTLREDIREALGRIYNSGDLLLGIINDILDFSKIEAGKMELMPVKYYVSSMINDIVQLNKIK

SEQ ID NO: 96626 - protein, 559 aa, Unknown
  Obtained from environmental sample
  DOMAIN (35)...(101): His Kinase A (phosphoacceptor) domain
  misc_feature (1)..(559): Xaa is any amino acid
GLVLTVLGMIMATVLSGILWRITNSKKKVEEENKQKSDFLAKMSHEIRTPISAILGITEIQLQDRALRGDIREALGRIYSSGDLLLGIINDILDFSKIEAGKMELMPVKYYVSSMINDIVQLNKIKYENKPIEFKLQVDEFLPAELIGDELRIKQIMNNLLSNAFKYTDKGEVALSVTAEQARGGVSTTANIVFKVSDTGQGMTAEQIQKVFDEYSRFNMEFNRTTQGTGLGMSITRNLVFMMDGSISVKSAPGKGTEVTVKLPQRTDGSGVTIGKKMAETLQQFKMSSASQTEKEQITYDPMPYGNVLVVDDVETNLYVAKGLLAPYELSIETANSGFEAIDKIKSGVVYDIIFMDHMMPKMDGIEATKILREMGYNGNIIALTANAIVGQAEMFMKNGFDGFISKPIDIRQLNAALNKMIRDKQPFEVIDAARKQKATRKVDQKTPQPQLQPQPQSAVSQAKENFARNTEMAVARLETIFKNETPKPEQSGQDRDIDMILAELPKFIEALRIGSEKLKAAVKGSDPENEDIGLLYAKLQIMHKAYEERDKQSGKAEQ

SEQ ID NO: 96627 - protein, 266 aa, Unknown
  Obtained from environmental sample
  misc_feature (1)..(266): Xaa is any amino acid
VQKTVQTVYDGLQSTQRAQAWKFDGWPRQGRTNVNPFDKQWGSTFSIAFEVINQRGKVIGQQTVEMDSRYRFYGTRLEGPGTAFTTVRFTGVKAEDITDRMSIRIASINGRKPEEAGISRIAPMTDGGLQISKNYTIYNGALRPNSNDRNLGNIFTELWGERVTSIADRAYENRGLTSVIIPEGVTTIGVSAFANNQLTSVTIPNSVTTIEDRAFADNHWTVNDSDGRTRHYGLSNVIIPNSVTSIGEEAFASHYTAYYSSGDSYT

SEQ ID NO: 96628 - protein, 121 aa, Unknown
  Obtained from environmental sample
  misc_feature (1)..(121): Xaa is any amino acid
MSVNDTITSLLTELKHIAKSETVFGEPFVSGKTTVIPVSRISCGFAAGGSGKKEGVSTTGGGVQIVPVALITIVGESNVKVHPIDPRDSLGIKLLGLAPDVIEKLLKPKKKEIRNDDKRRK

SEQ ID NO: 96629 - protein, 521 aa, Unknown
  Obtained from environmental sample
  DOMAIN (7)...(362): AMP-binding enzyme
  misc_feature (1)..(521): Xaa is any amino acid
LKVLPNLRRVINSQSALCGEKWLLHCEDCWYFLLAFTALLQCKKEILLSANVSPAYIEEIRSGGAPDGSAPNAATPFLTDQIFPEGECPQNTFLIPSLLQNVQKTDTPAEEAPPINADETSIIMYTSGSTGKPKAVQQRLTEFEADNRFIISKWGDEFLKRKLCSTVSQHHIYGLLFSIFLPFTLGIPFRRNRIEFPEEIEKLSDTEYMIITVPAFLKRAVEMEKTSGLNLKSPWIFTSGGALKFETAEKTNDVFGFWPVEVYGSTETSGIAWRQSVNGQEWTVFDNAKISQNKDGCLIIRSPYIKDPAGFETADMVEILKDGRFLLKGRIDSVVKIEEKRVSFTEIENRILQSGLVSDICVIYMEDKRQYLAAAIVFNSKGKKRFDGLEKHEINQFWREHLLKYFDNIVIPKKWRYLERLPLDAQGKIMKENIRLLFSGEPGTEARIIQGTETSVSLEFLIPDTSPWFDGHFPGFPILPAVAQIELALRFASQYFGTRIGISEIRKIKFLNPIRPFSPLC

SEQ ID NO: 96630 - protein, 82 aa, Unknown
  Obtained from environmental sample
  DOMAIN (8)...(75): Phosphopantetheine attachment site
  misc_feature (1)..(82): Xaa is any amino acid
MTKEEIFQKLKDILNEEFEIDKDAVVPDAKLYQDLELDSIDAVDLLVKMKGLISGKIDPESFKKAVTVQDVVDILYPLIQQT

SEQ ID NO: 96631 - protein, 290 aa, Unknown
  Obtained from environmental sample
  DOMAIN (68)...(285): Binding-protein-dependent transport system inner membrane component
  misc_feature (1)..(290): Xaa is any amino acid
VKKINTAAILEAVAIIVFIIYMLPFFLIIINSSKPSLKIIMNPLALPDSPSQLIKNIKTVFGSSNVRYVSSFFSTIIITVISVGLLVLISSMASWVLVRTKTKLSSAVFMVFVAAMVIPFQVVMFPLITWFHIIEVKLGLFETPFRLLQNYPGIIFAYLGFGSSLSIFLFHGFIKSVPLELEEAATIDGCTKPETFFKIVFPILTPITVTVIILNGMWIWNDYLLPLLVLGSGNAVRTLPLAVAGFVGSFVKKWDLILTATLMTMLPIVIVFLVLQKHIIKGMVDGSVKG

SEQ ID NO: 96632 - protein, 130 aa, Unknown
  Obtained from environmental sample
  misc_feature (1)..(130): Xaa is any amino acid
MGTQWWKKAVVYQIYPRSFCDSNGDGIGDINGITSKLSYIKKLGVDVIWLSPVYQSPMRDNGYDISDYTAINPEFGTMADFDRLLNEAHNQGLKIVMDLVVNHSSDQHPWFLESRSNKESPKRDYYIWRD

SEQ ID NO: 96633 - protein, 514 aa, Unknown
  Obtained from environmental sample
  DOMAIN (1)...(399): Alpha amylase, catalytic domain
  misc_feature (1)..(514): Xaa is any amino acid
IYPRSFCDSNGDGIGDINGIIFKLDYIKKLGADVIWISPVYKSPMFDNGYDISDYTTINPEFGTMADFDRLLKDAHDLGLKIVMDLVVNHTSTQHPWFLESRSGKDNPKRDYYIWRDGRDGRPPNDWQAWFGGPAWTLDETTGQYFLHLFSPYQPDLNWENPATRSAVYDMMRFWLDKGIDGFRMDAISLISKPKEFIDGDIKKLIPNGPRVHEFLQEMRREVLSKYDIMTVGETGGVTVDEAVHYSNADGSELDMVFQFEQAELDGGESFKWNDRKINLIELKEVFSRWQTVLHGRAWNSLYWCNHDQPRIVSRLGDEGKYREKSAKMLAVCLHFMQGTPYVYQGEELGMTNAPFADLGDYRDLESINAYNEHVVREKRIAHDDMLRFMRMKGRDSSRTPMQWNAKPNAGFTTGTPWITVNPNYNEINAEDQTHRSDSVFSFYQKLIQLRKQLDIITLGGYQLLLPDDPDLFAYTRCYKNEELLVVCNFSNKEKTFTAPERFSGVKPLLSNEE

SEQ ID NO: 96634 - protein, 593 aa, Unknown
  Obtained from environmental sample
  DOMAIN (240)...(457): RNB-like protein
  misc_feature (1)..(593): Xaa is any amino acid
MISVGALVIYKGKPAIVKDHADGKFSISLQNGEQVKVRDKDIELIHEGTVNNFGDIDLNTSAAQSIREVWELLSGEGAVLTLKDLAGFICSEYTPSSAYAAYCALKDNLYFCGEIDAINPRSRDEVTAEESKRAAVRMETGERMQFLERLKACLKNPDQNKLLPEDARYLQDVEALAFGKSAKSRTMRDLTLGETPEDAHSLLLKTGFWSGMINPHPVRYGVSLSSASICPSAPPEEKRQDLCHLPAFAIDSPWSHDPDDAVSAEIEAGKNILYVHIADPAASISFDSPEEKEARDRGVTLYLPEGAVRMLAQEAIPMFALGLSEKSLALTFKMTVDKDGMVLDTEIFPSIVKVLRMTYEEADRVMDTDNGTDQKDATALRALFSLSQKIYNRRIAYGAVNIDLPDVHITVENEKIEVTPIKDYRSSFLVKECMIAAGEGAGDWAAGKGLPFPYISQEVEIQGKVLGGFAGSMQLRKCMRPRTLSVKPGRHQGLGLDTYTQVTSPLRRYTDLLAHIQIRAFLRGNTPLSSDDVSARLGFSDAAVTAVVHAERASENHWKMVYLSDKKDSVWDAVAIENKGNRWAVIIPQLALK

SEQ ID NO: 96635 - protein, 628 aa, Unknown
  Obtained from environmental sample
  DOMAIN (1)...(628): AcrB/AcrD/AcrF family
  misc_feature (1)..(628): Xaa is any amino acid
AELPQGITLEILSDNTNMIRATLNQVYNNAWQGGLLAMLILLIFLRNIRGTIIIGLSVPISMLLTLMFMAIFGFTLNLLTMTGLIMGMGMTMDSSIVILENVHKYRERGAKAAIAAILGSREMMRAIIASAATTLCVFIPLIIYKNDLKEMGQLFNDLIFTVVISLTCSLLVAITLVPSLCGAILPLQTRVQKPLKNRLLRKTDDAMERAFKAMENGYGKALDYCLSHRLLIVTLVILILIFSLMQFGGIGMNMYTRIRVDDNVTINVAMPQGTAIDVTEDMLFRLEEIVKREVKNYNHLVLTARRSGTNQGVLQIILPEPAKQTDTPDSIIRKLTPITSQIPGIRATYRAGRGVGTTSAVEIAISSRNYPAIMDTANEIHGIIERYLPDIENPTVNIDEGAPQLQIEIDRDRAASFGLSLAAIASEIRTAMDGTTATTMTRGERLVNVQVQLRDDDRQGLPNLDAVFVMSRNGSRVSLSNVARIRESRAPTSIRHERQERVVRVTGDLGPGIAATDMQRRLISTVNNYLVPREGVRVRFLGEAQEIQSYFWRYVLIIGTAVFLVFGVMASQFESFVDPLIIFFSIPLLSIGVVWIYKIGGQAMSMFSIVGIVALVGVVVNNGIVLVD

SEQ ID NO: 96636 - protein, 541 aa, Unknown
  Obtained from environmental sample
  DOMAIN (3)...(539): AcrB/AcrD/AcrF family
  misc_feature (1)..(541): Xaa is any amino acid
MNIGDYSVKRPVTIVILYALAMGIAVTLVLNLAVDLYPSTARPVLSIYTRFPGSGPADVEKNVTERLERALSTSVGLVNMTSNSQFESSFINLEFAYGTDMDKAANNAQLLVNRLANSLPDDVQTPTVRRFDMSAMPIMRLVVRGNYPPDQLRLFAEDEIQSNIEKLEGVASAEVTGGTTQIVKVAVSLNRLAAFNLTLNDITNSLKGQSVLASGGNLRRGTREYQIMTQEELVSLDQIKRLVVKTVNLAASGGASAGGAASAIAHANRSQAIRIEDVADVSLGYNENAARVNINGQSGVYIQVTSESGSNQVKVSDNVRSALGEINAELPQGITLEVLSDNTSMIRATLNQVYNNAWQGGLLAMLILLIFLRNIRGTIIIGLSVPISMLLTLMFMSVFGFTLNLLTMTGLIMGMGMTMDSSIVILENVHKYRERGAKAAIAAILGSREMMRAIIASAATTLCVFIPLIIYKNDLKEMGQLFNDLIFTVVISLSASLLVAITLVPSLCGAILPLQTRIQKPLKNRLLRKIDDVMENFFKAP

SEQ ID NO: 96637 - protein, 261 aa, Unknown
  Obtained from environmental sample
  DOMAIN (22)...(157): ThiF family
  misc_feature (1)..(261): Xaa is any amino acid
MANPLFQRITLLTGTEAAGAIQKSRVIVVGIGGVGSWCAEALIRSGVGSITLVDSDTVSITDFNRQIQAISGNMGRKKTEALKERFNSINPSCEVVSFPHFFSKENVRLLNFSEADYVIDAIDTLESKLDLIEIAAAAGKRFFSSMGMAWKLDPTQIRTADIWETSGCPLARLVRQGLKKRGFSGHFTVVYSAEKPGRGEKESLSLNEGDVKNSAAGGRKKAALGSAMPVTATAGMVLASLVIRDICGEFSDCDTKGNEAS

SEQ ID NO: 96638 - protein, 85 aa, Unknown
  Obtained from environmental sample
  DOMAIN (2)...(81): Ribosomal L27 protein
  misc_feature (1)..(85): Xaa is any amino acid
MARKRGGSGAKNGRDSNPQYLGVKVFGGGVVKAGTILVRQRGTHIHPGTNVGCGGDYTLFALKDGTVSYGQRRGRKMAVVSPTES

SEQ ID NO: 96639 - protein, 82 aa, Unknown
  Obtained from environmental sample
  misc_feature (1)..(82): Xaa is any amino acid
LYKELDAFSEELTLKRRVIVGTKLDLENAESRLEELKKKYPKERVLGISVFSGLGLQDLASLLSSMVEEEEQREVCDSWGQL

SEQ ID NO: 96640 - protein, 89 aa, Unknown; identical to SEQ ID NO: 91900
  Obtained from environmental sample
  DOMAIN (6)...(88): Ribosomal protein S15
  misc_feature (1)..(89): Xaa is any amino acid

SEQ ID NO: 96641 - protein, 229 aa, Unknown
  Obtained from environmental sample
  DOMAIN (41)...(197): FAD synthetase
  misc_feature (1)..(229): Xaa is any amino acid
MSMRVISWEEYIGSRESGVGSRDRRPDNDIAPDTSVPHCSFSLAITVGVFDGVHLGHQSLIRHICEPSLSPLPTPHSLLPTVITFRENPMKSLNPAGFTGDIYSLDQKLELFESLGVKLTVLIDFSEEISKMNGRDFIDLLLGSQPVTLLALGGNFRCGHGRDTGVVEIQSLAKARGVENWVAPPVMDDGKPISSNRIRQALAAGRLEEAQRMLGRPLDSITFNKFVPK

SEQ ID NO: 96642 - protein, 521 aa, Unknown
  Obtained from environmental sample
  misc_feature (1)..(521): Xaa is any amino acid
DKKEQAEKYQNLKSQCEALLNRKLTEDFDGEEAALAGEAKKYHNEWYIAELKKKEAADLLRDIRSELADLERGILRYPDAPRELRAALEKAGIEAFFLAEAAEITAQDWVDAVEGWLNTRRFAILVDPVHFQKAIEVYNRLPRSVAGAFIPNIEKMRDAVVRQGSLAEIIKAEGYARIYIDYTLGKVMRSDLASLKTYDSAVTKECMTYMNHTASRIKEEVYRRHYLGRAALEERRKFLVAEAERVEAELIIVEREEREARSREDCCNRVIRFLPELKYLFPSIASAELFANQLAAAEKELAVIDTQSFKELENKRGELERQLNLLKEDNNRLQKKCGSLNTNLTNCRDDLDRFTQSEEEKEEAIKNFGEDHPLMIGECEEYAQDKLSKNSITDLTNTYEATLKGFKTHTETCKKEYNRLVADYEREFHYLLGMDPADNTEAETLLKRLETSELPQYREKIAKAYQDAEKEFKDHFISRLNEHIEEARESFDEINDILRTLHFGRDQYWFHLKNSASARGR

SEQ ID NO: 96643 - protein, 285 aa, Unknown
  Obtained from environmental sample
  misc_feature (1)..(285): Xaa is any amino acid
MITLERLRLVNWHNFEDDVIEIGNRCLLAGDNGSGKSTVIDAIQYVMAANLRMARFNSAAEERRGGGRDLMGYVRCKLGSESTEYRRGDAIAHVMLEWRIGNGGFACGVCIEAYKDNHYTEHFWIGDIDSKDSIQAINVRNEKNEPLLFRQFKNVLAEKKMYDYPTKQQYVKDLTNKLGVFKRQPDVNPYLDSLTRSIGFKPLDSIDQFVCDFILEENPVSIQDMKQNLENYKEADRQAKGAIAKIGVLKKVCAKAAEWRNYDGLIIKQEYLKLSIERENEKQRK

SEQ ID NO: 96644 - protein, 93 aa, Unknown
  Obtained from environmental sample
  misc_feature (1)..(93): Xaa is any amino acid
VVKPNTLKDRIAEIAPDIIGLRRVIHRRPELSGREFGTARLVRDTLNTWGVPAQYHLGKTAVSAKIVNGKGPTVVLRADMDALPIQEENNVPF

SEQ ID NO: 96645 - protein, 299 aa, Unknown
  Obtained from environmental sample
  DOMAIN (21)...(237): Radical SAM superfamily
  misc_feature (1)..(299): Xaa is any amino acid
MAWVFDIQRFCLHDGPGLRTTVFFKGCPLRCRWCSNPESQRQAADLMHNAARCMACGACAAACPHGLIATKERGGPELDRKACVACGACCDVCPTGAMFRKGRDMTVDEIVAAALRDSVFYAHSGGGLTVSGGEPLAQPDFLLELLGAAKDAALNTAMETTLHADWAVVERCLPFLDHVFFDVKHPDSALHAAGAGVGLEKILPNAGRLCRVHPDPHPRIPVIPGYNTSEKAMEGFAELIAGFGRPVELLPYHALGEGKYSLLGKPYPGDDIPADKGLEYAKLFQNYLRGRGIDADIHA

SEQ ID NO: 96646 - protein, 188 aa, Unknown
  Obtained from environmental sample
  DOMAIN (41)...(188): Respiratory-chain NADH dehydrogenase 51 Kd subunit
  misc_feature (1)..(188): Xaa is any amino acid
MLQGRESEGAGIIMSELELRLLTDYKDNHNTLSIEGYIKASGFDALKKAAAMKSEDVISEISKAKLLGRGGAAYPAGKKWEHLLHIKETPKYIVCNADEGEPGTFKDRFIMEKMPFKLLEGIIIAGFVFRAKAGFIYIRGEYRKIQKRFVEAIKSIHEAGFLGANILGTGYDFDIHVISGAGAYVCGE

SEQ ID NO: 96647 - protein, 257 aa, Unknown
  Obtained from environmental sample
  DOMAIN (1)...(254): TonB dependent receptor
  misc_feature (1)..(257): Xaa is any amino acid
GSKLGVLWNVTASLVIRNNYFRSFKFPDFEELYWSNGGGEGAASGSGAAFSSVGNPDLKPEDGWGGDLGVEWHITQNTKLESVIFTQWLKDSIHWYAETNGIWRPENVGEAMFFGLDNKLRFEIPVKPGAVKKIIASVSYQYLLSYLLSFGYGFADNKRIPYSPAHTIGGSLEVPWGSGSVIITGHYESLRHDDRANITKLKPHFLLNANVNQKIGKNLTAFGVLRNILNESYQSFNDYPMPGITLTLGMRANVEVK

SEQ ID NO: 96648 - protein, 373 aa, Unknown
  Obtained from environmental sample
  DOMAIN (1)...(245): Starch synthase catalytic domain
  misc_feature (1)..(373): Xaa is any amino acid
MVASEAVPFAKTGGLADMVSALSISLAALGHDVRIVLPRYYSIDRGKLKMLPGAMGVPLGWGEEWSAVYTTTLPKAVKKNPVNVYLIDHEIHFGKDGIYGVPSEPDFLDNFRRFTFLCKAAFQLCRKIGWYPDVIHAHDWPAALAPVYLKFAERVPASRKGFEKTVSVLTVHNLGYQGIYSKDNYNYAGLGWDVFYNAGFEDWSMLNMLKAGLYSADSLNTVSPNYAEETKTQEHGFRLDGVLRYRSADYSGILNGIDTSVWNPKKDKLIPEHYSASDMSGKAVAKAALQKHFGLPENPKVPLIGMVTRLVEQKGVGELFGPTYGSLWNICNDFDVQVVLIGTGESWCEHEIGSLSYRLPNFKAHIGYSEKVS

SEQ ID NO: 96649 - protein, 116 aa, Unknown
  Obtained from environmental sample
  misc_feature (1)..(116): Xaa is any amino acid
LRIYCCFQIQHLPPFICIEEPENGLYHKLLETLAQQIRDHVTNEKNKSQIFITTHQPYFVDALEPKEVWILEKNDNGFSNIRRTSDDPIIQELVNEGLPLGGLWYSDYFEGVKNAL

SEQ ID NO: 96650 - protein, 408 aa, Unknown
  Obtained from environmental sample
  DOMAIN (246)...(343): CarD-like/TRCF domain
  misc_feature (1)..(408): Xaa is any amino acid
MKEIVWTDDRIDTLEKNLARLKEFSDGGRKIIEELIVSRALQGEELFYPLAFDKSASILDYGSDSTLLLLESERLENARESLEREYQGLYMRSKREKREYPLPDRILFDFSQLVKDYSRNVSERVVSFKTIKGKPKDGFYHIELPCEPARSFFGNMDYLNEEFNSLFKGGWQISVAAESEVQAERIKMILEPNKSLSIMSTPLTAGFSLPDIKFMLIQENEIFGRRKRPVRSLKTVKSSPIDTFVELNPGDYIVHVNHGIGLFKGIERINTLERERDYIHLEYADEEQVFVPVEQVNLIQRYIGSEGQPPRLDILGSKSWESRKNRVKKSVEDIAEKLIELYSKRKKARGYAFPADTEWQTMFEAAFPFEETEDQLRCIQEIKHDMEKPFPMDRLVCGDVGYGKTEVA

SEQ ID NO: 96651 - protein, 130 aa, Unknown
  Obtained from environmental sample
  DOMAIN (1)...(123): GTPase of unknown function
  misc_feature (1)..(130): Xaa is any amino acid
MVALAGRPNVGKSTLFNRLLHKRRAITDPTPGVTRDAVAMDTVMLEKRLTLVDTGGFKLDRERDSEAGDLERVVVERTLQVLKEADLIVLIFEAGELTPEDEEFIGLLRPYQGKLIAAVNKTEGGRREAD

SEQ ID NO: 96652 - protein, 384 aa, Unknown
  Obtained from environmental sample
  DOMAIN (139)...(380): Putative RNA methylase family UPF0020
  misc_feature (1)..(384): Xaa is any amino acid
GLGVSESAYGKVRFKADITGLYRSLMGLRAADRVLLEAGCFHAADFDALFEKTQALAWEKFVPPESGLKIVKVRSNGSRLKAETSIQSITHKAAAQRLCKHSGLSRLPDTEQTAEARVYVEKDTVSLLLDLSGEPLFKRGYRKDGGIAPLRETTAAAMILLSGWKRKYPLYDPFCGSGTILAEALMYAWDMAPGIARARASLNFAIDRLLIADKKTEETVRADFRARINFERVIRLAGSDEDPACSALALSNLNKVHALAGNRELANKVGAGTGNREENNEPAGRLPLVTTTPMNMAWPPFETNEEPRGFIITNPPYGKRLGNMEASLEIYSGMAVLAKNFPGWKLAVISDHPGFESFFGRKADSCREITGGAVPAYFYQYEKI

SEQ ID NO: 96653 - protein, 84 aa, Unknown
  Obtained from environmental sample
  misc_feature (1)..(84): Xaa is any amino acid
KLKSKDGWDEGGNGTDEYGFSALPGGGGDSDGDFDDVGKGGGWWSSTEDDASNAYGRGMYYSGADVDRGSSVKGDFYSVRCVQD

SEQ ID NO: 96654 - protein, 291 aa, Unknown
  Obtained from environmental sample
  DOMAIN (153)...(291): tRNA synthetases class II core domain (F)
  misc_feature (1)..(291): Xaa is any amino acid
NKDIGSAFGSLSKLGILAMDDNKNVVIKNPRVELLIKQFFNGEKVDDPAINYLVVIRSLLEKGSSAPVPEASLNTEEKTAMGGIAKKRGAADAPFRQIDRETVVFAFTTDGGSVPAQEAAQALRAAGITGDETGSLTQAMLESGSWKGKTFRSYNVKTPPVRLNPGRSNPYAKFLENVKDKLASLGFEEFDGPLVETEFWNSDALFMPQFHSARDIHDVYSIADPSSKNGIALAKAIDEPWLSNVAAAHENGGKTGSRGWNYGFDRDFTRRLILRSQGTVLSAKNLPTAKV

SEQ ID NO: 96655 - protein, 292 aa, Unknown
  Obtained from environmental sample
  DOMAIN (1)...(292): Aminotransferase class I and II
  misc_feature (1)..(292): Xaa is any amino acid
YSGYQDEGMAELREKISKVFYGGKFSIEEIFISDGAKCDIGRLQVLFGSGTKIAVQDPSYPVYVDGSVLAGAAGGWQGEGYKGITYLPCTAENNFFPNLDLIPPNSLIYFCSPNNPTGAVADSSQLTALVKAAIDKKCIIVFDAAYSEFIRDPSLPKSIYEIDKADLCAIEVNSFSKPAGFTGVRLGWSVVPKALKYAGGESVNADWGRIAGTIFNGASNIAQAGGLAALDEKGLAEMRAMMDFYLGNAKLIRDALRRLEIYCIGGDNSPYIWAHFPGRDSWEVFTELLESA

SEQ ID NO: 96656 - protein, 279 aa, Unknown
  Obtained from environmental sample
  misc_feature (1)..(279): Xaa is any amino acid
FAGCCFDTFGENDSQKLFFRFDGPIPENELAEQGVPFSIEKLRAFIRANYTDRETYTTNVNRDFRNDLCGKLGGLQPGRFSDLLKKAVSFNPNVDIRQFITEFVCGDEQKITIDDMKENIRSYDSLKKESVILKERIGLLTEIDDAFNEYIKNKESETLYSYLIDRAQWETKKNEIDKCRQNTLRLVKELNELEGKLANAENEQKQLQAERDVLKLQLDSNENARRLEELQKEIEEKKRRYGEIEDGFEKMSALLHRTLSSWKSCIIGFREAIAAVSFM

SEQ ID NO: 96657 - protein, 247 aa, Unknown
  Obtained from environmental sample
  misc_feature (1)..(247): Xaa is any amino acid
MNYSNAEILKKVIERIERDVSAFAGLIDIWDAINEVVIMPIFDKYDNAITRICNEYGQVRIVKEVFEAAKRANPNSLLLLNDFDISQDYEILIDKCLQAGIPIDVIGIQSHQHQGYWGVEKLNDVLERFSRFNLPLHFTENTLISGEIMPPHIVDLNDWQVEQWPTNPEGEERQMRETLEMYEIIFSHPNVHAITTWSGTDDAWLHAPSGFLRTDNSEKPVLKALRAKIENDWRTVINARTDSNGLC

SEQ ID NO: 96658 - protein, 154 aa, Unknown
  Obtained from environmental sample
  misc_feature (1)..(154): Xaa is any amino acid
MDDPALTTSRWIDGMFGSSFFILVGLQRQYGTVFDADFINSIKDFTTEIEDIPIVRSVTSLINAEYITSKDDAIIVEKLLKSDFTGTREEIAELKRRLLSWDMYERALFSDDFTATQILIPLSINSEQASSKQTNEYFINIRDIAHKYFDGYAT

SEQ ID NO: 96659 - protein, 514 aa, Unknown
  Obtained from environmental sample
  misc_feature (1)..(514): Xaa is any amino acid
MARFKETDNTQGQFIAVNLVEQLFPGTFEWTIDYLISKTDMSLFEKKYNNDEKGAAAYPPRVLLKAILYCYSKGIITSRRIEYACRENIIVKALAEDCEPDHGTIAAFISTNSEAVQGLFAQIVLQCAKLKLITGEMFAIDGCKLPSNASKEWSGTIEDLKKKRDKMEKYIERIIKQHRELDKDEKAKKIQKPYAKTMGKDKDRRERSIARLEKKLKKLNKFLKEAEPRKGVAAEEVQSNVTDNESALIKGPHGYIQGYNGIAIADSGSQIIVCAEVVGSGPESGSFPKMLEIFEENMKTVTGKEEPLKKALLLGDTGFFSEANLQEAAERDIEVLIPDPQFRQRDPYYAEKKEKKVEKKKRFTAEDFKYDERSDSFTCPCGKTLEYKGDVALRNNSGRKYMAKRTDCANCPLIDKCIARRNGKNPKRTLYIVEKKYKDNLSEKMRKKIDNPAYRELYSRRMQIVEPVYSNITYNKGMNRFTLRTERKVNIQWKLYCMVHNIGKCIKPLGEKCG

SEQ ID NO: 96660 - protein, 295 aa, Unknown
  Obtained from environmental sample
  misc_feature (1)..(295): Xaa is any amino acid
MESNLQQQRHKKEQQAGPDIQTVTQNDGQKTGICPNCNAELPEEALYCPDCGLPIKQRVCPKCGAPASPTADICQTCGAWLLEGKCKFCYADLSSNDALFCPECGKPKTGIPCPHCGTLSIFDFCSKCGRPVTEEAIADLKHAQEEMTSQTSSTAPEAAKKTFSSNQEARRWYNAQAAAQTAEIEAELAKLETLINSEPETEETEDEAPVPAKKSLFSDRQMESIRKTGAVVDEIARKRIEAEEVERKRKEAERKRKEELERQLRERGWRCNAYGTVHPGGPNECADPSMGGQWV

SEQ ID NO: 96661 - protein, 288 aa, Unknown
  Obtained from environmental sample
  misc_feature (1)..(288): Xaa is any amino acid
MQCVKCNTNNRNSAKFCKQCGTTITNTETTTGLGYSIEQLAGLDEIKKDLSELQAILEGMKQSNKGTRFPYDTIIIGASGTAKTLISNLIADLFFKFGMITKGKPEKVDGASLNGLSKKDIDSLFSKAKGGMLFVDNAQKLLDSDGKAMPTFSHFIDAMDANKDDPLVLMAGLPVGLREMVKSSESANKQIVNRFEKIFIIPDYTPDQYVKITENELKKQSFTFSPEFSEKLLQRFRYLYKELKKPVNSIKSVNGYLAIKEAQAITGCYYLRKASDKIILPEDIKGQV

SEQ ID NO: 96662 - protein, 842 aa, Unknown
  Obtained from environmental sample
  DOMAIN (617)...(798): ATPase family associated with various cellular activities (AAA)
  misc_feature (1)..(842): Xaa is any amino acid
MQCVKCNTNNRGSAKFCKQCGAAISNADTTANLGSSLGFSIAQLVGLDEIKKDLSELQAILEGMKQSNKGTRYPYDTIIIGSSGTAKTLISNLIADLFFKFSMITKGKPEKADGASLNGMSKKDIDSLFSKAKGGMLFIDNAQKLLDSEGKAVPAFSHFIDAMDANPDDPVVLMAGLPVGLREMVKSSESANKQIVNRFEKIFIIPDYTPDQYVKITENELKKQSFTFSPEFSEKLLQRFRYLYKELKKPDNNIKSVNGYLADKEAHAITGRYYLRKASDKIILPEDIQGQVDEKKNIQEIMAELDAIIGMTALKKEIKSLYTQLNQIAEMEKKGIKTDKPAQHFVITGNPGTGKTTVARLLGKIFEGLGLLDSGHVVEVDRSKLVAGYVGQTAPLTNNACDTAAGGILFIDEVYTLKQNDGDSFGQECIDTLLKRMEDDRGKFMVVVAGYKSPMEKFLTANEGLKSRFTKYFNLEDYTPEELAAIFESLAKKQRFIVPPETKIKVVAFFKDRCARKTKDFANGREARNLMDEARKNQAERLSSADIADISGEDLLITFLPEDIPGTTSDKMVSIDEALKDLNTLVGLKSVKDAVTKITNSLQAQKLTGETETLAKHFVFMGNPGTGKTTVARIMGDVFKAVGMLPTNNLIEADRGKLVASYLGQTAKLVAQQCDNAMGGILFVDEAYSLKQGPQDSFGQEAVDTLLKRMEDDRGKFVVIAAGYTNEMEDFLASNSGFKSRFSDYINFDDYNTSEMREIFIGMCKKRKIEFAPGFDEALQKRLDNLYANRNAQFANARTVRQLFDKTRENVSGRVLAMQKPEEELKREILIMRPEDLDMTVS

SEQ ID NO: 96663 - protein, 810 aa, Unknown
  Obtained from environmental sample
  misc_feature (1)..(810): Xaa is any amino acid
SGTAQYFFEYIIGRDGVHTDTTPLKKIGLGETSVKTWNAGISLTNGVWGTGIIPDGTWWIKVVVSDRVGNTTTVPKQIFKVNRNVPDIQLEKSGGNTLEFYGKQDGDVFTIAGTITDGDLSKVRIVINGTNSANGYEISTAIGPDTYPASSVYDRTTGVYKFNWVLSKDLFDNTGNTYLNGVKEGTNTIRIYAADEAGSEKEWEYKTDQPTFSFTRDTVAPTPQYFNLNPVSIDKGSWTGADNLSSFDGAAPEIRGAFNDATSPIGWKKDNEGGNTDTTKPNTTTGQYYIKYKLYTKAQFLTGAAPQPSWEYIYLGGDTNRSADWSIYLTTNRLATGGTALPDGTYWLDIEAADRANNVRDANGGGYFVKNLAFTIDTNPPNVSISTPSAAGVNKEAFAISGTAWDLGGLNNVVVTVDHGTTSLPVATINANGADSSQTSPFTWSVAANDDTWASSFGTIGEGLHTITVTATDLSRKTRTTTYTFTKDISGPAVEFTNINKTTTWVDNGTPTSSILIDGNAKELTGTFVDAYSRLGSARDETGNAGSNPVYQQYYFEYSITPGSTSPGSAVPTTKRGFGTGVDPLVSSAWTIPLDGLADGQYWVKVRILDRLGNPTIAPSADTAYTFWISRNDPQIAPTSEIKPVYSHNNPATISISGSVTDGDLNTSSMTYSVNSKTPATPLSLSGSGPYTWTISSINLALDPATPNNPNTPNSSNIKEGRNTILLTATDQRGRNGSYTIEFIRDSQPPSVELTNIKTQVITTTMWTNGTTQGSQNSTDFETAKNALNTAIANMTILGSDAAINGISRI

SEQ ID NO: 96664 - protein, 269 aa, Unknown
  Obtained from environmental sample
  DOMAIN (126)...(200): Helicase conserved C-terminal domain
  misc_feature (1)..(269): Xaa is any amino acid
TERESLVQEVKNKKFLFYKENTHQLNYISSEWVISIPIGKELYSQYLLVKKVIGNNKLLSHHQINKLSVSPFLVNKKTGVQLNQSKETGKIKALRAIISRLPISDKIVICDNQKETLYYIKTLDFIRPLKPVLYLGGKKSDNKKNIDSFNNNPNYRILLTTRQAGGEGLNLQVANHIVLINCWYTVKDIIQIIGRIKRKGQIKPVYAYILGYNLFDCLEHGKELKSYILQEDESVYMMVRKKKEIYREWGMSVETKLPPLQSFFNMIPL

SEQ ID NO: 96665 - protein, 485 aa, Unknown
  Obtained from environmental sample
  misc_feature (1)..(485): Xaa is any amino acid
MGIGRVGTTDPDIVEAEIEILQNSNELVYEKYTYTQLKCLAVIDTRKPKNKDIGQKDIVERIDDVLAKNKRVDDHGNTLTLERLTALAQATGHEPPPASAKDATEAILNAIELKTMTEVAFTKEGVLHEAMKSTIGSAITPEDLNKEFDRLIETPTTKIAPLLTKATDYGETAYYSTPELMEIERQNVETCVDAKKTDITVDSRIVDEYIDKAHKNLIRESTDRRGFTQGQMDAIRHILTTDRRYSVIQGDAGTGKSFSLRYAKELLEAQGYNVLGIAPTGKATDELTASAEIETTMTIAALISAKNKPLEQGKKYCIFVDETSMGDSRTVNKLLKITEEYGAKVIFVGDKEQFLPVGAGRFFADLQKADIKITRMKDVIRQKTEQTKNVVNALADKEIHTAVNILAGYTAVIGYDKINAKKYKIGQKISFNDRTATANSAETIPSGTTAHITAVGDAELTVEYTLQGRKITVNIDPRKTHKNYT

SEQ ID NO: 96666 - protein, 353 aa, Unknown
  Obtained from environmental sample
  DOMAIN (1)...(268): AMP-binding enzyme
  misc_feature (1)..(353): Xaa is any amino acid
VFIDVLPLHHTYPTTCSFIAPFAVGIPTVITEKIVGKVVIDDIRDGEVSFLIAVPLLYDKVMAAIEAGYQKISPIVRAPLDVLRKIALAKAKKGNPEWGRRVFRFIRKKANLHSIKIMVAGGGALSIKTADFFDSFGFNIIHGYGMSENSPLISVNTPHHKRNESVGLPVSYTEVKIVNPGPDGIGEIACKSPSIMLGYFENEEATKEIITEDGWLLTGDLGFRDEDGYIYIRGRKKNLIVGSGGKNVYPEEVEAHFAGLRSIAEILIVGRKTSGGEIIYAVIVPNYELIKEDYPGMENNDDYIFNLVRKEIDEVNRSLPVFKKISDFCIRKEPFEKNAQQKIRRFMYKNYEN

SEQ ID NO: 96667 - protein, 455 aa, Unknown
  Obtained from environmental sample
  DOMAIN (1)...(147): E1-E2 ATPase
  misc_feature (1)..(455): Xaa is any amino acid
ALDTSALTGEAMPRDVEPGGEAFAGSINKNGLLAITVTKEFADSAVSKIFELVRDTESRKAPVENFITRFARYYTPAVVLAAVALAVLPTLFLPGAEFSHWLKRALVFLVVSCPCALVISIPLSFFGGIGGASRQGILIKGGGFLSALNDIETVVFDKTGTLTRGQFAVSEILCEKEINRGELLYYAAAAESNSGHPIAKSILSAYKGEIASSDIASYEEIPGKGISACIKGRTVLAGNARFLEGKGIALRAISSAGTAVYIALDGLYSGCLVIADEVKPDAKQAMNELRKTGARRLVMLSGDNRAAAEKIGKELGLDAVYPELLPHQKVQQLEILRAATRGGKKLAFVGDGINDAPALALSDIGIAMGGLGSDAAIEAADIVLMTDEPLKLVNAMKIAKKTKSIVWQNIIFALLVKAVILVLGALGIATMWEAVFGDVGVALIAVLNAMRAMKK

SEQ ID NO: 96668 - protein, 538 aa, Unknown
  Obtained from environmental sample
  DOMAIN (76)...(448): Bacterial extracellular solute-binding proteins, family 5 Middle
  misc_feature (1)..(538): Xaa is any amino acid
GQSTEAPAKQAKEAVPRRLVDFAETRPQVLDRDELTVVFSKSEVELDFRKSFMASEAQLFTAIYEGLFSYHPGNLRPIEAMAERWELSEDKKQWTFTIRQNAKFSNGDPVRAEDFRAAWISLLSPGRDSPYSSLFDIIVGAREYRNGLEKNPEKVGIAATGPRTLIVRLNSPAAFFPAMLCHHSFSPIHPSMLNKENWSPEEDAKNWQPPVSNGPFRISAMNDESITLLKSDQYWDAQRVSLSKIILKYTETADEASALWNSGEARWISGDVNLDALTDRSGIQVNAMFATHYYFIRSVDKPWDDYRIRRALSLALPWDEIRQGHYLPAKTLIFPISGYPEIEGVSETNIEESKKLLAEAGYAGGIGLPDLVIRLTPSQDAARIGGLMAVAWKEKLGLSVRVEVIPYNRYFQSMKESGYGVGSSTWIGDFADPYTFLQMWRRDSNLNDSGYNDDDYEALMEKSMLEEGSARWAILAEAEQLLLERGSVLPISFSQAINIVDMGELEGWFPNALDIHPFKYLTFKAFRPLPGVVMGNSR

SEQ ID NO: 96669 - protein, 542 aa, Unknown
  Obtained from environmental sample
  DOMAIN (9)...(169): DEAD/DEAH box helicase
  misc_feature (1)..(542): Xaa is any amino acid
MNYLDLPVYKHKDIILGALEKTQALVVESPTGSGKTTQLPVILYQAGYAKNGMIGVTQPRRIAALSVSEFIARQMGCAMPGLVGYKMRFEDKTVPNTQIKIMTDGILLQEMKLDPWLSKYNCLVVDEAHERSLNIDFILGLLKRVLEGRRDFKVIISSATINAEVFSEYFGSDAFGQCPIVKIDAQTFPVTLIYDPPAVEGIPGSQIAGEALLSKIEAITERLINAKQNENNGGKIEGDILIFLSGEKMIKDCMSTLAFSQVGKYLHLLPLYGRLGKEEQEKVFYPAPKGKIKAIISTNIAETSVTIDGITAVIDSGLSKLNYYNPRTFTSSLVEAPISKASANQRKGRAGRTREGTCYRLYGRKDFENRQLFTTEEIYRTDLSEVVLRMADLGITSFEEFDFISPPSKEGLIAAIETLDLLDALESDHSLSNTGRLMTEFPLPPRHSRIIVEAILKYPDVIKETIIAAAFLSTQSPYILPPGEETDARQAHHRFRDEDGDFVSYLTLYAAYMDSSSKQKFCEKNYLDERAMAEIANVTNQL

SEQ ID NO: 96670 - protein, 430 aa, Unknown
  Obtained from environmental sample
  misc_feature (1)..(430): Xaa is any amino acid
FSIGTGVTLILDKNLTLRGHSGSNSPLVSIPGGGTLEMREGSVITGNTGGGVSVYEGTFTMSGGEISGNTASSSSGGGVYVGGGTFTMSGGAISGNTASYYGGGVYVGSGTFTMSGGEISGNTGSSSGGGVYMGGGTFTMSGGEISGNTASSSSSSSSGGGVYVSSGTFTMSGGEISGNTASSSSSYGGGGVYVFDRGTFTKTGGGTIYGYTDGDAKSNVVKNSSGVVQNNQGHAVYVSDGLIKRRETTAGLLIDMDSNKIGASGGWENNFGSLAAQLKWLQTNAASDTTYTFEVTADEDLESCTLSYSGKTNVTIHLKGDTVMRTVNLSGNGSLFSIGTGVTLILDKNLTLRGHSSNNYSLVRVSGGTLEMREGSVITGNNSYSYGGGVYVDRMYDYNQGKYVGGTFTMSGGEISGNTSSYSGGGVYVG

SEQ ID NO: 96671 - protein, 261 aa, Unknown
  Obtained from environmental sample
  misc_feature (1)..(261): Xaa is any amino acid
KKLLILVCLEADVTVHHVVRECLEQDSGKTVSSSSIQKIQQRYNENTRKIINEADIVDSKEGEASFKFFIEKLNNGTLEVKKTKEPAHAKMYVFTNTDEHSEGGEYPGKVIIGSSNLTFHGLGGRFEINATLRDKADYTEASDIFKKLWDEAIPLVDASTKDQFIEAVIKHTWLEKIPSPYLMYVRVLHEYFNKNTEAIKTPAGLTHTGDVQYMNLAYQTEAISEGLDMIKRHSGCIVADVVGLGKSIIGITIAANLNLTT

SEQ ID NO: 96672 - protein, 441 aa, Unknown
  Obtained from environmental sample
  DOMAIN (20)...(181): tRNA synthetase class II core domain (G, H, P, S and T)
  misc_feature (1)..(441): Xaa is any amino acid
MIEPKVLKGFRDFLPQAEMVRRNLSERIEATFRSFGFAPIDTPALEYADILLGKGGGETEKQIYRFTDNGGRDVALRFDLTVPFARFTALHQQELNFPFKRYHIGKVWRGENTQRGRYREFTQCDFDIIGGDSPAADFEIILLIRSVLADLGLGVEIKINHRGLFNRFLSHIGQLENSVEILRAVDKISKVGMDETMKTLAGIAGDANGKKILEYIGAGAEEKTSSFEQTLNRITQLSGGPSPESERLRLLHRFMKDTGETFSLDPSITRGLDYYTGVVFETFLTELPEIGSICSGGRYDNLAGLYTKNAISGVGSSIGLDRMIAALESLNKLPPSSGFAAVAISCLRQEDAGLYQALAAQFRRAGIPCEVFTDASADRAAGADDSKNLVKQFVLAEKKGYQWVIIPGEEPLHSPLTLRNLVTRKNQENLSVEKVVSIIKN

SEQ ID NO: 96673 - protein, 65 aa, Unknown
  Obtained from environmental sample
  misc_feature (1)..(65): Xaa is any amino acid
MSLVDTNIILRYLLNDIPEQSEIARLELKKDNVKILTQVVAEVIYVLSKIYKINRKEISESLFKI

SEQ ID NO: 96674 - protein, 469 aa, Unknown
  Obtained from environmental sample
  DOMAIN (198)...(267): HAMP domain
  misc_feature (1)..(469): Xaa is any amino acid
MNLNKLRLKWKIFAFLLGFCALLLIVLWLFQIVFLDSFYKKIKVMEIKRNAAEIISNIDSENIDTIITDISDNNNITVSITDLNGRGFQENPARNQPRIYPQDNRWRREETAALITKARENSGEIYEYVTTAAEERPRNNTDLDRTEARRIMLPRWQPSQSLIYVKMANNRQGEQFAVIIRAIISPVNATVTTLRYQLYYISCIILFLAVILAFIIAKRVSKPIEEITQSAIMLANGNYDTRFTGKGFYEIVALSDTLNTAAVELSRVESLRRELLANVSHDLRTPLTLIYSYAEMMHDFPGEVTPEQTQTIMDETRRLTTLVNDILDISKLENEVGKLNVVRYNLTQSISETAKITEKLLKIEGFKIAFSHSGDAYVDADKAKIDRAFYNLLINAINYSGGSRDILVEQTIAENRVRISVIDHGEGIAEADLPFIWDRYYKSGEAHKRAVTGSGLGLSIVKKIIDTHG

SEQ ID NO: 96675 - protein, 375 aa, Unknown
  Obtained from environmental sample
  misc_feature (1)..(375): Xaa is any amino acid
MLPVCFSFLCWFSSTALMAIAGYLIARAAEQPEMAALSLGIAGVRFFGISRGAFRYVERLFSHSLAFEELKKFRLHLYKILEPLVPYKLASVSEGEMLSRISSDAEEYKAWLPRAGVPLFAGTLSLIASLCVFAYLNLHYAICFFAISFFLVAISFLAFFSIKKRAGQWGSSCEEFSEFSLSVAQGMAEKKSWGIFGKILNTWENLGNAEEEKRKKTYSIYCVAEMFSTIAPFLCLAGMIYIGPCTYSFPVWIGILLGTLASFELLQELPSIALQSALSKSALERLAHPISYADTTLKAGMNLNLSSDFITLNKGDALILSAPSGTGKTLLANTIAGFLPSSEPIERTPNFVFLEQEPFLFTGTIKDNLLFANPY

SEQ ID NO: 96676 - protein, 798 aa, Unknown
  Obtained from environmental sample
  DOMAIN (269)...(351): Helicase conserved C-terminal domain
  misc_feature (1)..(798): Xaa is any amino acid
MPDVLAEFLAQAESKGLQLYPAQEEAVLELLEGKNVILATPTGSGKSLVASFLHRLMLSKNMRSVYTCPIKALVNEKWMALCKEFGAQNVGLSTGDATVNHNAPILCCTAEILEQIALREGENSNIGAVAMDEFHYYSDKERGVAWQIPLLTMKRTQFLLISATLGDTSFFESEMTKLNGLQSVCIRNAERPVPLEFTYSESPLANEIQKLLNEGKGPVYVVHFTQSEAAENAQAFTSLDIAGLLKKDKIAEAMANFRFSSPFGADIKRWLRQGIGLHHAGLLPKYRILTEKMAQQGLLPIICGTDTLGVGVNVPIRTVLFTKLSKFNGEKTIMLPVRDFHQIAGRAGRRGFDSVGYVVAQAPEHVIENKLREAKFSKTGRKFQKASAPEGTISWDKTNFEKLINGEPEKLVSRFAVDANIILQTSGCRNLHNLIMNCHDTKEQKKVHIRRAIQIYRSLIAQGIIVNGKPAVNLSDRFAMHQPLSLWLLESIEKIADLNALTLLTLIEAILEEAEMVRRKQLSRLKTEAISEMKAQGVEFEERQARLEEMRPPEPENAEWLEASFGEFAKKHPWVCGERVHPQTIVLEMFAECFSFSGYIKQYGLERIEGLLLRHINSVYKVLAHTVPEKYKNEEILEMQDYLREMLQRVDSSLLDEWQRMQNPEFILPEEKEEPLPPFAVSERMVKALVLQFLVAWGKGDFAAATDCLEPSEEFSEKKLAALHKEYIETHKELRLDAEGRSNKHTSIEKKGDVWEVTRMLQDYDEQNDWQIVFAVDLAESKRGERLMMKIFYTIPNL

SEQ ID NO: 96677 - protein, 59 aa, Unknown; identical to SEQ ID NO: 95893
  Obtained from environmental sample
  DOMAIN (2)...(57): Ribosomal L32p protein family
  misc_feature (1)..(59): Xaa is any amino acid

SEQ ID NO: 96678 - protein, 87 aa, Unknown
  Obtained from environmental sample
  misc_feature (1)..(87): Xaa is any amino acid
MSEQKAKILSVGTYVPDAVLSNSQFESFLDTNDEWIVSRTGISERRVVNMPHAAPGGTTAAEMGCKAARVAMKRAGVSAEEVDGIVV

SEQ ID NO: 96679 - protein, 232 aa, Unknown
  Obtained from environmental sample
  misc_feature (1)..(232): Xaa is any amino acid
MTEEVYRKAVRIDAGALASVPEEQRTYELCAEALLNKLYAGSALNYVPDKFKTPEFCLNCIRINGRNLEGVPEALKTYELCLEAVSDYSYALEYVPPHILTKEIILAAVTRNSDSLEIVPAAFQTEEVFIEAIKNDNSGFFMGYVPEKYYTKENFLAMLSNPDDEHSLSLGRIPESIRTVDFLIEAARLNGSLLKYVPEKLRTQELCLEAVKNNGDALKYTPPQFITETLCR

SEQ ID NO: 96680 - protein, 124 aa, Unknown
  Obtained from environmental sample
  DOMAIN (31)...(95): ATP synthase alpha/beta family, beta-barrel domain
  misc_feature (1)..(124): Xaa is any amino acid
MLFDAATVSRHFDSYLDFIRATDSVRVYGKVTEVIGILIESNGPSASVGEVCRIEKGGRLVCRAEVVGFRKDRTLLMPLGSIEGIHPGMTVAGTGRPLSVRIGDALLGRVLDGLGNPMDGKGPI

SEQ ID NO: 96681 - protein, 310 aa, Unknown
  Obtained from environmental sample
  DOMAIN (219)...(309): Flagellar M-ring protein C-terminal
  misc_feature (1)..(310): Xaa is any amino acid
GGGGGGKSGGSSGGMRVLYSDLDIEEAAQIVDQLNKGGYKYKLENNGRNVLVSQKQLYEIRMAMAREGLPRRRGIGNELFDKTNLGTTDAVQKQNVRRALEGELQRTIEDMDEVKSARVHIVMPEPSIFLESQREAKASVVIRFMPGRDLTKEQLRGITYLVSSSVEGLKPQQISVVDAVTGELKTSPFQDTPGGETTLNREIQQSVEKYYVKKATEMLADVLGYSKATVKIDATLDFDKVEKTQEIYDPESRVIRSEENQNENTKNAPDGDHQRERSLTNYEIDKTVQKVVQEMGGVKRLTISVAIDGK

SEQ ID NO: 96682 - protein, 173 aa, Unknown
  Obtained from environmental sample
  misc_feature (1)..(173): Xaa is any amino acid
LANLIVVVIWAMFTSADNYVWRSEEKDISSLHSALTSIFFYKTLFWLFVVNLTIFTAVQLKRKKYKIAGTMLLLTIIFYVFAGLYVSKKCAPFYYTVFLNQSVGEGYIEVPIFEAGYYIGPILTAEIPNKEMEYRRYAINGLMKLKYKPATEALKRILFDQTESDFFRADAYE

SEQ ID NO: 96683 - protein, 333 aa, Unknown
  Obtained from environmental sample
  DOMAIN (1)...(320): Aminotransferase class I and II
  misc_feature (1)..(333): Xaa is any amino acid
MPNAGYQNVRDSLAKKASKEQNVNIDGSYIVMAVGAAGGLNTVFKTICNPGDEVVVSRPYFMEYRAYTANHDAKLVEVDSLPDFSLDVKAIGSALSPKTSAVLINSPNNPTGRVYPAQALSALAELLREHGKKTGRLPYLVSDEPYREIAYNVNVPPVLFAYGESIVVSSYSKSLSLPGERIGFIAVSPNVTDKDDLMNGLIYATRILGYVNAPALMQRIVAELTEAKVDVNIYASRRDAFTAILNDAGIEYAVPEGAFYLFCKVPSKKGGGSGDDLEFVNHLKNYLILGVPGSGFGKPGWLRFAYCVDEKNIRASAGAFKRAMEAWGVGSRE

SEQ ID NO: 96684 - protein, 312 aa, Unknown
  Obtained from environmental sample
  DOMAIN (225)...(258): Tetratricopeptide repeat
  misc_feature (1)..(312): Xaa is any amino acid
MPKAHQYFTGSMVYARGDEASKLFILQSGKVSLATIDPETGIETRDLVSPGEFFGVKSALGRFPREENAIAVADSTAMVFTVPEFEAFAMSNPKIIIKMLKVFSTQMRRVHQQIAKLKEKEDVKPDEGLYGIGETYLKLKRYPHAKYIFSRYLVHYPSGPKAAQASKNLQIAEKAIANTVVKSQQKGTAREYREAISLISKHEYEKAIQAFTTIIDTCKEAGLISKSEYAIGNCLFLLEKFEDCIKHFSDLLSKNPKHPEAKEAMFFIGQASERIGDKAQAAEWYGKIMSLSDLEAGGMRARVRQALKGLEA

SEQ ID NO: 96685 - protein, 221 aa, Unknown
  Obtained from environmental sample
  DOMAIN (12)...(101): Cyclic nucleotide-binding domain
  misc_feature (1)..(221): Xaa is any amino acid
MNQNLGGFSRFSRIFERDEIIFSEYEPGETFYVIQSGRVKLLKDAGEYERTIDIMAPPEMFGEMAILEGSPRSATAIALDEVKVLEFNAQNFEIIMTGNPQIGINLLRIFAKRIYDSKRRFMILTLPTPQIKILDVFLMLDETLPDIDRETDTREFQTTIEDIAHWAGVTVTEVKEVLHPFMAQNRLEIYIDHMVVKNINDFARIVSSRRKQAKNPAGIKK

SEQ ID NO: 96686 - protein, 98 aa, Unknown
  Obtained from environmental sample
  DOMAIN (7)...(96): Cyclic nucleotide-binding domain
  misc_feature (1)..(98): Xaa is any amino acid
MDSQFQLNSYKKDAYIIIEGKQEADFFYIIQQGKVKIFKEAKLEGEDDVLGPGDIFGVISTMSSHSHIETAQALTDVALISVHQNQYVGLIQKNTQVA

SEQ ID NO: 96687 - protein, 357 aa, Unknown
  Obtained from environmental sample
  DOMAIN (186)...(351): NAD-dependent glycerol-3-phosphate dehydrogenase C-terminus
  misc_feature (1)..(357): Xaa is any amino acid
MTAQTAVIGAGAWGTAVAKVIADKGKDVVIWSLEEDNRDDINLRHENSHYLPGVKLPENLTATSDIAEAASGREYLILAIPSLYLLQTVKQILMTPSIREGETAIAVITKGFISTEKGPRLILETLEDYFPGFYRQSLVYIAGPSHAEEVSRGKITGLIAASENAKNSIRFRDLIRNKELFVFSSFDVKGVQVAAAAKNVIAIAFGMLDAIKTQGSIFGGANLFGDGTESLLLAAGLNEIQSLGMAMGATHPETFTSISGIGDLDVTCRSVFGRNRRFGKEIIEKKILEPFKDIDDLIARISELGYLPEGIAATKYVKVFAEKYRLKIPISVGMYQILNREIEPSDFLENFLNGLGH

SEQ ID NO: 96688 - protein, 229 aa, Unknown
  Obtained from environmental sample
  DOMAIN (105)...(223): Response regulator receiver domain
  misc_feature (1)..(229): Xaa is any amino acid
EALQLVNKNGDYHIYFVDWKMPDMDGIQLVRELKARASELSVVVMNSAADWSTVENEAKSVGVDKFLSKPLFPSTVADIINECIGVSKPQTEEEQTDITGIFAGYRILLVEDVEINREIIIALLEPTQLQIDSAENGVEAVRMFSAAPDKYNLIFMDIQMPEMDGYEATKSIRALNVPSAKNIPIVAMTANVFKEDIERCTEAGMNSHIGKPVDIAEVLEKLNTFFKVK

SEQ ID NO: 96689 - protein, 466 aa, Unknown
  Obtained from environmental sample
  misc_feature (1)..(466): Xaa is any amino acid
SAGVKGEKYVYKYVKYFRNADGKPRNKAKAIGKFDPASGKMSPNNNYYTLYHLDPAIHDISVWDYGYSYLVLKACRDSGLSDCLSKAFDGRAMDIIVMAAFIIREGNAMDGIDDWQERNFFPGFNRLLTSQSASKIFASLTARQMNDFFTRWVKASTGGGNVCYDVTSISSYAQNMPAVERGYNRDGEALAQYNIGMFCDEASKTPLYYNRYNGSLTDKTNLSYVLANAKAVGIQRVKMVVDGGFWSKECLTSLHSLCDAFTMGMPSHLKESEKIIAAHGDGIEKYANELGGRQVYCIPVDTELSGVPGRVMLYFDPWNHLNLCNELSNHISRLGAELAALKWYPQSKLGRYTPYFVITKHENDSGFDYTVDAGKVDRLRKGKGFFLIFSSDRESAPAEILDHYRAKDAAEKLFAQIKADMDGGRIRTHNEQTTEGKTFVVFIACVIRSYLLNKLRQYLTDNSTSM

SEQ ID NO: 96690 - protein, 285 aa, Unknown
  Obtained from environmental sample
  misc_feature (1)..(285): Xaa is any amino acid
VSALNEFRDSFSNIANEREDLESRGLPYKAFDLPETEAPPFEQPSRTAAPTAGSPVDLSTDTAAADTAGAADTGGSAGVGNFDFGALLGSVPADTPPLPDDNIPGASFDELFGDTAAQTEEPQSTDDFLSSLGIDTPADETPPDGTSGEETFADDDFLSSLGGDTPTDESPTDIESADIKSEERTPAAADLPDFPADESFPADDFLSSPDTGTLPDDSFPADDFLDSLGTETPAEEETSSTPDDDFSVPPDLLSGLGEEIESAPSDFPPEETPSEDFSTEDFPAD

SEQ ID NO: 96691 - protein, 157 aa, Unknown
  Obtained from environmental sample
  DOMAIN (4)...(157): GcpE protein
  misc_feature (1)..(157): Xaa is any amino acid
MINRRPTRVINVKGIPIGGGSPIVIQSMCNTSAHDVDGTLAQVERLVAAGCEIVRLAVPDMEAVEAFRAVRGRTAVPLVADVHFDYRLAIAAIEAGADKVRINPGNIGGADRVRAVIDAARGAGVPIRVGVNSGSLEKRLLEKYGAPTPAALAESAL

SEQ ID NO: 96692 - protein, 423 aa, Unknown
  Obtained from environmental sample
  DOMAIN (104)...(261): DEAD/DEAH box helicase
  misc_feature (1)..(423): Xaa is any amino acid
LNALQEFEWQIAIGDEVIDIEEFKKLVKQKQELIRFRDGFIKIDTEEFERLLKKVNGTKPELNDFLKAHFSGDSILSFDARKIIDNLFREQNLPVPTSLIAELRPYQKRGYNWVCSLLFSGFGCILADDMGLGKTVQSIAALLRLREDGHLDKGCLVVAPASLLSNWEKELQRFAPSLLVSRFHGPNRVINRKFDVFLTTYQTAVRDVEKLKDVAFSVLLVDEAHLMKNVETRVSRAVKLLQSKYRLALSGTPVENRLEDLRSLFDFIIPGYLGNARGFQKQYRIPIEVMRSREQAEALRKITAPFLLRRVKTDKSIIKDLPEKIVANEYAVLEKGQAALYESVVSESIKKSEKMKGSERSSLILSMLTSLKQICDHPRVFDKESPAVSELSGKAQLLLTLLEEILVSREKVLIFSQYVKHWT

SEQ ID NO: 96693 - protein, 200 aa, Unknown
  Obtained from environmental sample
  DOMAIN (2)...(144): Resolvase, N terminal domain
  misc_feature (1)..(200): Xaa is any amino acid
VIYGYIRVSTDKQTVDNQRFEIERFCMKNSLKIDEWIEETISGCKTPDKRLLGSLLAEVRSGDLIICSELSRLGRSLFMIMSILNQLMLNEVRIWTIKDNYRLGDNIQSKVLAFAFSLSAEIERELLSQRTKEALSRKRSEGKVLGRPYGSKSSYVKLTGREQDIKMLLERQFSKRAISRIYGVDRNTVTSFLKERMIFP

SEQ ID NO: 96694 - protein, 177 aa, Unknown
  Obtained from environmental sample
  DOMAIN (1)...(168): NADPH-dependent FMN reductase
  misc_feature (1)..(177): Xaa is any amino acid
MKAIAINGSPRKNWNTHILLEKCLNSAKEAGAETELINLYDINYKGCSSCFACKRKGITIKKCTMKDDLESVLQKVCDCDVLILGSPIYFFSVTGEMRSLWEHLLFPYSSYEGKPSSFGKKINTAFIYTMNAPSFALPLLGYTKMFMQNKSLLKRVFGNSESLIVTSTYQFDDYSKY

SEQ ID NO: 96695 - protein, 189 aa, Unknown
  Obtained from environmental sample
  DOMAIN (4)...(181): Methylpurine-DNA glycosylase (MPG)
  misc_feature (1)..(189): Xaa is any amino acid
MLLGYKFFNQPTIDLARALLGKYLVLGNLRGKIVETEAYLFHDDPGCHASRGLTHRNAPMFGPAGHTYVYFIYGMYYCLNIVSGKNGEGEAVLIRALEPIQGIEIMMKRRNTNKIENLCNGPGKLTQAFGITKEHNNKSLLTGELQIHNSREKPGIETSKRIGLSAGGELELRFFINGSRFVSKVPKNP

SEQ ID NO: 96696 - protein, 683 aa, Unknown
  Obtained from environmental sample
  DOMAIN (12)...(129): PAS fold
  misc_feature (1)..(683): Xaa is any amino acid
ESLLAKNARQKEFFNLLLKNMQNVILILDQNLRLLYCSDAFLKLVGITNIGFISNQSFDEFSKWYADAASIKFILDALVQALAEKTVKVVDRVLPIGKDKEPRHFRINIAPMMNAKEVIEGIILLFYDLTEIMEAKEQAEQASKAKSVFLAQTSHEIRTPMNTVIGMSELALRADNLPQIQEYLGSIKQAGLNLLAIINDILDISKIEAGTMEIETTPYSLSTLINDVVTMIQVKVSEKPIIFVVDLDSSLPNMLKGDEARIRQVLVNLLSNAVKYTHKGFIRLTLTYHIDPLDNNVIRLVYEVSDSGIGIKKEDLPNLFRTFTRLDMKKNQGVEGTGLGLAITKSICKAMGGDVTADSKYGEGSIFTAVLPQIIEEKEPIALVENPGKKSVLYYEKQPLYAKSMVYALGNMGVPVTLKTDAEDFLQTLSGGNYHFAFINVEIAEKARAVVKGKSLAATTLVLIANAIETITFRNMPVLSRPVYAVPLANVLNHQTGTVSKSQGGNFIAPDARILVVDDINTNLVVTSGLLAIYKSHVDTCTSGAAAISMVQNKHYDIVFMDHMMPEMDGIEATKAIRALEGEYYRNLPIIALTANAIIGMKEMFLSNGFNDYLSKPIEILKLDYTLASWLPIEKQIQNTDAQGQTDARAVFPEGFLMDGVDIKTGQNHVTLKKRTWKCCAPI

SEQ ID NO: 96697 - protein, 290 aa, Unknown
  Obtained from environmental sample
  misc_feature (1)..(290): Xaa is any amino acid
MTEDEKMQKATLQTRRTKQKDLNSDVTRAKTRKRLEEVLRKLPGQTATTLELLRDEALQKKGDPPVLTAEECVTGAIKKSMEKESAFCEKDVLNRALKTGMGHYTVGQLLEELRKQPDIKFVGEIDRLGRGYFTTAAMIGIERGILDFVERGRGQSKTAISPEAMARYFDKMTAAGKQLSDGQRSAVEQACTTKDQVSIIQGDAGSGKTYAMECVLAAMVGEKYAVRGFTPTGVAAKEMTAAGVEAITIDKLLVNVDLQNKAKPGEVWLVDECGMVGSEKMKRFLDVAEQ

SEQ ID NO: 96698 - protein, 194 aa, Unknown
  Obtained from environmental sample
  misc_feature (1)..(194): Xaa is any amino acid
LALIVSCSTVPKNQAGNREQLAVNSEQLTVNSESEQLAESNEQLVLSSEQLAESNEQLVLSSEQLAGNSEQLAVSNEQSADSEQSVATELIEVSNEQSAEYVEAFVPDEPDSTEIAQEPELQPAAIVTETLRPVETAPKPVSPVEPVSPSEPMPPALPEQRTAQIVPPVRESRPSAPSTERKGAEARGLPPVSA

SEQ ID NO: 96699 - protein, 78 aa, Unknown
  Obtained from environmental sample
  misc_feature (1)..(78): Xaa is any amino acid
MVERLEGKGIQTRTLFAGNMVRQPCFDGLRQSGAGYRVAGNLENTDRVMRDTFWVGVYPGMTEEMLDYMAKTLVEFCD

SEQ ID NO: 96700 - protein, 119 aa, Unknown
  Obtained from environmental sample
  misc_feature (1)..(119): Xaa is any amino acid
LTAPLKTLFEADLEQIYARAQNDFRLLAGAGLFLTGCTGFIGQWLIEALLWANKNKALGCRLTVLTRDAALIRRSRPHWAGHDSIVWLEKDILALNFEDLKPCAFAIHGLNLPNDGSPS

SEQ ID NO: 96701 - protein, 322 aa, Unknown
  Obtained from environmental sample
  DOMAIN (4)...(52): Sigma-54 factor, Activator interacting domain (AID)
  misc_feature (1)..(322): Xaa is any amino acid
MQFQRPSLAAEQRLKMNPQLLQSIKLMELPAVELRERITQELERNPALEIVEDKSTVALNEEDDAQKQKEIVYEYFESTSDPGRRGAQAAEEHNRFIEGALTRPETLQEHLLRQLQLEPVDEELRKIAETLIQNLNDDGFHKEKPETLFAQPQQRLNEAMELVRGLEPAGCCTSSYRESLLTQIALLGDAPCEISVIEKILDNLDLVEREKYSVLAKKIGFDEDEEELIVICEYIKKLYPFPGRDFASAEVRYVVPDIKVIKNNDGFSINLNDEAFPVLGINRNFEKFSGSKDKAAREFAKENIKEAKLFISHLSQRNQTLI

SEQ ID NO: 96702 - protein, 152 aa, Unknown
  Obtained from environmental sample
  DOMAIN (23)...(69): Bacterial regulatory proteins, tetR family
  misc_feature (1)..(152): Xaa is any amino acid
MPSLQKNHWLDTDKGKGGKRLAIMKAALKLFAAKGAAETSVPEIAQAAKVAVGTLYCHFKSKEALANHLIKEACEAFCRHLWDGFPHDAAFRQQFGFFWRRYISFALSQPDAFAFIQGRAKDTELDGASKKALATLAETEIGYWTGGLQLGN

SEQ ID NO: 96703 - protein, 290 aa, Unknown
  Obtained from environmental sample
  DOMAIN (149)...(239): Helicase conserved C-terminal domain
  misc_feature (1)..(290): Xaa is any amino acid
GSATPSLESWYAAVLGRYSLHRLTQRPAGVHFPIVQVVDLRECYRQARKKVIFSPLLLNGMAEVLERGEQSMLLLNRRGFENFWQCMACGETLGCPNCDITLTYHKGAWRLRCHLCGYECAPLEACPSCGAQHLRGVGEGTEQIESHLRERFPRARILRLDRDTTMRRGSLEAALIAAELGDVDILVGTQMLAKGHNFPNLTLVGIINADLGLRIPDFRSGERTFHLLTQVAGRAGRAERPGRVILQTYSPDHPAIQHAVAQDFEGFAETELPYRRALGHPPFTSMALYR

SEQ ID NO: 96704 - protein, 268 aa, Unknown
  Obtained from environmental sample
  DOMAIN (55)...(268): Citrate synthase
  misc_feature (1)..(268): Xaa is any amino acid
MDNQMNIFKKHFEEITSNEYIDDELYGKYDVKRGLRNADGTGVLVGLTRVGDVHGYTVENGKKTAVPGKLFYRGIDIEDIVAAAGKNNRFCFEETVYLLLFGNLPNKKQLTEFTNLIGNNRLLPKNFAEDVIMTAPSRDIMNKLAYSILALYPYDKEPENLSPENVLRQCMELIARFPTIVAYSYMSKKHYFDHESLVIHLADSACSTAEALLSLIRPDQKYTQEEAQLLDLALVLHAEHGGGNNSTFTVHLVSSADTDTYSTIAAGI

SEQ ID NO: 96705 - protein, 84 aa, Unknown
  Obtained from environmental sample
  misc_feature (1)..(84): Xaa is any amino acid
MHISEFFIVFPEGDVQEIQGRLPFNALVDMNGNVLSLPLPTNKMIVFKVAGIKTEERTGVSETYHFLDLLSAEELLEYTQNNRY

SEQ ID NO: 96706 - protein, 152 aa, Unknown
  Obtained from environmental sample
  misc_feature (1)..(152): Xaa is any amino acid
LSTRKTIGTNNESSLHRALKFQYAGPGGKTEAEVGAFVADGIRKDGEYIEVQTGSFGPLKKKVKEFAAVGKVRIIHPIAVTKTIEVYTKDGKLLYRRKSPVHGTPWEIFDALLYAPELPLIRGVTIEIAMIDIIEKRVKDGKGAWRRKGISI

SEQ ID NO: 96707 - protein, 486 aa, Unknown
  Obtained from environmental sample
  DOMAIN (126)...(153): NHL repeat
  misc_feature (1)..(486): Xaa is any amino acid
MPIAPDEVRYVGAGRYPGKAEETILGKKTEEIILYRQPTSILANNDGSVWVVAYGSNEIVKIDVNGLIKDRQRGPLNGFDRPYDLARGLDGRMYVSEYRGGRVSILNSKGDWQAYIGSKGLGDGQFVGPQNITIDEDGYLYIVDYGNNRISKFDPDGVFILSFGKKSAVFPGLLSPTGIAAYNGKIYIAESTAKTIYMFDPNGNYLGRLAAQGLKGPESLRFLSDGTMLVADTNRILQINPDSAIVRELGLAGGARVRITCAEMDSNGNILTANFNASEINILTRFEDLASGLFVQIRNIDANKFPKVTVELTVEDRLRRPILGLDNNNFLLTEDSLPVMDQVLYIPGYRTPGADISLLVERSEATARMRDDLTAAARDINRALQEMGNSKIVSVISAAAVPKREQHANSLENAVRGASDNTARWRFDQGLRLTASDLLTAAPKRSVVYIGSGGLGDLAFEQYSLSEMSAFLANNGIVFNAIIVGG

SEQ ID NO: 96708 - protein, 467 aa, Unknown
  Obtained from environmental sample
  DOMAIN (225)...(306): Fibronectin type III domain
  misc_feature (1)..(467): Xaa is any amino acid
LAQRPKPVIPVIPENKTFIIFDNTQGICAVSVYNDYRRRDEDKIAEIPAGNNSWKIACTPGDSVPFYFSYCVTIKGINDFSLNYIPEIGRDQKQVRIDADTTTNIKVPTLSETFSSPDKPLSNNSYLLIQNNSSYSFQLLCGSSILTPDNVSASLVNSGERAQYTINPGAASNYQLLVGADYKKFPGLIINFEAGHIYYFDYNGSISLVRDTELKLGNVNGFVIPQPPAAPVVLTSNGSLALQWSAVESATAYEIWMSTVNNSASALKYGTDIAASLFTTISGLNNGTTYYIWIKAKNNLGTSNFSPVATGIPSVSTVKPPDPMTAPSIIVGNKQLSVSWQAVEDTSVYEIWAGITNDIQTAIKQGEDVSGLSTVITGLNNGTSYYVWIKAKNNIGVSGFSPSATGKPLGTPGTPALSSGSGQLLVTWTEVAGADEYEVYYGTGSPTTFAATTAGTTAIITELTNGT

SEQ ID NO: 96709 - protein, 397 aa, Unknown
  Obtained from environmental sample
  DOMAIN (1)...(325): Melibiase
  misc_feature (1)..(397): Xaa is any amino acid
SRDLEIVSGDKLALTPPMGWNSWNVWGLAVDEEKVVASAKSFVDKGLRDFGWAYINIDDGWEIVGSSKDPKRDGEGNIIVNDKFPDMARLGRRIHELGLKFGIYSSPGPLTCGGYTGSYQYEQNDANSYASWGIDYLKYDWCSYGRIAKNNSLPELKKPYEIMRDALAKVDRDIVMSMCQYGMGDVWEWGESVGGQLWRTTGDIDDTWQSMSTIGFSQVKNAPYAKPGSWNDPDMLVLGWVGWGPNLRPTRLTPDEQYTHMSLWCLLSSPLLLGCDLTRLDPFTLNLLTNGEVLAINQDPLGKQATPKTVDGQIQVWVKELSDGGKAIGVFNLGDKAADYELNLPALGVQGQKLRDLWRQRDIGPLPEKHKVRIAPHGVVLIKGDLGRSHNRTLCFN

SEQ ID NO: 96710 - protein, 650 aa, Unknown
  Obtained from environmental sample
  DOMAIN (591)...(650): Beta-galactosidase C-terminal domain
  misc_feature (1)..(650): Xaa is any amino acid
MRLLGKAGIDILTINVFSWALLQPSEDRYDFSTLDSIIETVNAAGMKICLATGTATHPAWMARKYPEVLRVNTDGSKRKFGDRQNSCPNSPVYRHYSTLLARKLAERYGKLDNLVAWHISNEYGGYCYCENCEKAFRKWLERKYKTIEALNEAWNTAFWGHTYYEWDDIVVPSYLGGEWQHNRTSCQIQSIDYRRFYSDSLLECCLAEAGALKDAAPHIPVTTNMMGTFWDLDYFKWGKNMDFIAWDNYPWPGSPYTRTAMNHALMRGCGGGKPFWMMEQTPSVTNWQPYNSLKRPGVMRLWSYQALAHGSDTVMFFQMRRSRGCCEKFHGAVIDHCGHENTRVFRETAALGEELKKLGDVFLESRLESKAAVLFDWDNWWAASLSAGPTVNMNYTEEVFRFYNAAAMQNISVDIIGVDTPLDNYKILFAPILYMVKPGFADRLKGFVERGGTLVTTYFSGMADENDLVTTAGYPGELRTLCGLWVEETDALPEGQANKLNCSDGPWSGSLLEGSWKADLLCDIIRTEGAETVARYAEDFYAGTPAICRNRYGKGQVWYLGSRPQAKFLYRFVTLTCGELGITPVFPPQEWLEATRRIKGEKEFIFVLNHNKGDAEITIPFACRDLLTNNAFTAGERYSLPVAGVMILER

SEQ ID NO: 96711 - protein, 126 aa, Unknown
  Obtained from environmental sample
  misc_feature (1)..(126): Xaa is any amino acid
MKEAVLIVPCCEKGRGGGHLTRCVKLTNDMRASGKEAYLYIPADINVINFLQTAQFDKSYVISEYAVNKKNWELVIIDRYQTPQNELARWKKLAPVVGIDEGGLYRDYFDILVDILVPENLKNLQR

SEQ ID NO: 96712 - protein, 484 aa, Unknown
  Obtained from environmental sample
  DOMAIN (206)...(373): Radical SAM superfamily
  misc_feature (1)..(484): Xaa is any amino acid
STLIAFPDLYEIGMGNQALKIIYNRMNSIRGISCDRAFAPAPDFEKLLREINIPLYGLDTGIALSCLDLLMFTIGYELGLGGLLLMLSSSFIPLRCEERTEDHPVVIAGGPAVSNPSAFSPFIDAFWIGEAEAGFFDLVLELAVMKENGKGRGALLEKISAHPNIYVKGKKKTLRAIYSGFSDSEETEAAVFPVPSMKIIQHHGSVEIMRGCPNGCRFCHAGFWYRPMRQKSMAFVETQVGEMVTKGGWHEISLSSLSSGDYAGIDCLVENLNEKFIDMRVSFQLPSLKVSGFSLSLLEKISVTRKSGLTFAVETPREAWQMSLNKEVTLDSVTAILNEAKKRGWKTAKFYFMIGLPLPSSEKNEEEEIVNFIACIGRRTKMHFNINVGLFVPKPYTPYQWSPQLDAEEAVKKIEYIRSNLKPLGHKVSVPDALISQIEGILSRGDERAGLLFEQAYLGGSRLDAWGEYIDREKWLSLLKKTKN

SEQ ID NO: 96713 - protein, 722 aa, Unknown
  Obtained from environmental sample
  DOMAIN (435)...(622): Anticodon-binding domain
  misc_feature (1)..(722): Xaa is any amino acid
MKRRLITSALPYVNNVPHLGNLIQVLSADAFARFCRLRSYETLYICGTDEYGTATETRAAEEGISSRELCDRYFAIHDDVYRWFNISFDKFGRTSTPIQTEVTQDIFKKLDAAGFITERTIEQLYCGQCGRFLADRFIRGICPHCSSADARGDQCEACGKLLDPTDLQAPRCSTCGSTPSIKPTNHLYIDLPLLKNKLKEWIHTASEKGFWANNAVQITQAWIRDGLKERAITRDLKWGIPVPKPGYEKKVFYVWFDAPIGYISISGCLGQDLADGFVEFAQAAHKKKFPSWQKFVDYWWKSPDEVELFQFIGKDNIPFHTVIFPSSLLGSGDNWTMLHHISSTEYLNYESGKFSKSRGVGVFGTDTMETGIPADVWRFYIFYNRPEKSDAQFTWNDFQEKVNGELIGNLGNLVNRTLLFIIRYFNGRLPKGLPDNVLWEKVREYESSITKKLERVELRDAFHEIFELSSYANKYFQDAEPWRLRTEDPARAQAVIRDLAHIVRDIAILIDPFMPQIATRIISFFGLPFGETFDWKNLGSANGLDPFHEIKSEVLFSKLEDDLINSLRERFSGSQKDRQNESSVEAAVLSARKAAIEQTIDLRVAKIEKVEKHPKADKLYIINLEIGEGTSGTREERTIVSGLVDFYTEEQLLGKKIIVAYNLKPAKLRGVESRGMLLAAGDHNGPESAKERCEVLDSGDAPTGTRLLPQGAVAGNAPAKSI

SEQ ID NO: 96714 - protein, 238 aa, Unknown
  Obtained from environmental sample
  DOMAIN (1)...(204): GXGXG motif
  misc_feature (1)..(238): Xaa is any amino acid
MNIAAHNLDFKELNSRIRSAKEAVCIDGCYGQRFIASGMTGKNLTINGTPGNALGAYFNGGTIMVNGNAQDAVGDTMNDGKIIIHGNAGDALGYAMRGGEIYVRDNAGYRTGIHMKEYKEKKPVIVIGGKAGSFLGEYLAGGLIVVLGIESQDIPVWYFTGTGMHGGKIFIRTDKELASLPEQVIAEIATDNDLQEIAQYVGEFAEYFNVDAQKLMKDRFYVLRPNARNPYKQLYTAN

SEQ ID NO: 96715 - protein, 995 aa, Unknown
  Obtained from environmental sample
  DOMAIN (33)...(176): GAF domain
  misc_feature (1)..(995): Xaa is any amino acid
MGEENKVLSKHYAAMSGALNNFIEIFSANKDETFEATMAAGVNEMADTFRLDRLSIWRNEAMPDGLHGRQIFRWDRKSGGATMPTKGLDDIRYTDFSPRWERILSADEVINGPIKLMPEAPKLKPYGCLSILITPLFINDNFWGFALLEDLQNERWFREEDIDMLRSAAFMCANTVIRADMEREIDFAKKFNNAILDASPLGFTIFDENANVIDCNDTLAKLLNTTKPFYIENFGKFMPEYQSDGAKSTDKVVELVKRALNGENLLFEWTLCTSTGEPIHNEVTLVRAMYKGKYVVLGYQYNLHDRKTREMELARAKNLNDLQLAKLNLVVKATKIALWDMEVVQDDPINPYNIFTWSNEFRRMLGYSDEYDFPNVFGSWSSLLHPQDKDMALDLLKKHILDKTGNTPFDVECRLLRKNSDYGYYRASGECVRDKDGNAIRAAGALVDITDSKKLLQEKDRQKAEAEAASREKSHFLANMSHELRTPLNVVIGLTNLILEDEHLAKHVTENLEKINNAGTSLLNIVNDVLDLSKIESGKLTLSSEEYHMSSLLNDIITLTLTRLGDKPVKFILDIPDDLPNKLYGDELRLKQALTNLLNNAIKYTSEGNITLKVRCDRGEGVVLMEYAVIDTGMGISQDKINNIFLNFSSVDEKASRRVDGAGLGLPITKRLVDLMDGRINVESEEGKGATFNFRIIQGSVDDEVLGKEVSEKLRSFQYIESKRAATQKLVRIDLSYARVLVVDDMQTNLDVASGLFSKYLLQVDCLNNGKAAVEVIREGQPLYNAIFMDHMMPEMDGIETVDRIRALGTEYAKKIPIIALTANAIHGTEKMFFAHDFQDFVTKPIDITEMDAAIKKWVRDGTREEVVIAPEPSEEKQMTIEIPGVDTQKALSLYAGDTGIYLPLLRSYITNTPATLEKLKNVSMENLKSYVITVHGLKGTSAGIGAEEVRAQAFELENLSRAGDLRSVLAMNDKLIADTEIIVANVKEWLDKND

SEQ ID NO: 96716 - protein, 802 aa, Unknown
  Obtained from environmental sample
  DOMAIN (639)...(714): Hpt domain
  misc_feature (1)..(802): Xaa is any amino acid
MTGPDSKKVDLVDPTILNLAGKDSLCLRLTVPIINKRLDETVGVVGCRINIDLLQPLVEQTIKNFDEVTSMAIYSNSGFILANYLPQMIGKQLVEVETQYGEDLDEVAEAVKNAREWEVASFDPALKTTMYMSIAPIPLAASPTTWSVMIGSTEAYILKDVRAMTKFTIMLLAIVVLAAMALVSVLIRVDAARTKADVESRHKSTFLANMSHELRTPLNVVIGLTGLIMEDKNLEKHITDNLIKISNAGSTLLNIVNNILDLSKIESGKLELIPDEYYTASMLNDTVTLILARIGEKDIKFHLNIDDNLPYKLYGDDLRVKQIFTNLLTNAVKYTNEGSVELSIHCEHEGDTVWMNAAISDTGMGMSADDMKNLFLDYHRIDSKSNHHVEGTGLGLSITKKFVEMMSGEIKVKSEIGKGSTFSFRIKQGFVDDTVIGADVSGKLRKFSYTDDKRLVSKKLVRANLSYARVLVVDDMQTNLDVASGILRKYKMQVDCLTNGQSAIDRIQSGTPVYDVIFMDHMMPGMDGIETVDRIRAIGTEYAKKIPIIALTANAIQGTEKMFFDHDFQAFVTKPIDIMEMDSVLKKWVYDRDREAANAAGSSAVDDSSEEREVVIDIPGVNAKKVLALYDNDTDIYLPLLRSYVTNTPNTLEKLRSVSAENLPDYVIFVHGLKGTSASIGAEQIRAQALELENMSRAGDLQGVLAGNGKLIADAQVIVANVKKWLDKNDVQEAKPRKKAPDRKLLAKLRESCESYDIDDVDEAMKELENAEYDEQGELVTWIREMVDMSKLGDVAKRLKEI

SEQ ID NO: 96717 - protein, 259 aa, Unknown
  Obtained from environmental sample
  misc_feature (1)..(259): Xaa is any amino acid
VDGGDTAVFEFNIPDTADTYPPTAHYANGQVRGIESATDKVSFKSGLVGGPVTVLYTYPAGAKPYWDTAFVALPKDTTIAPRDAGVYTVKVRIPDSENFTGGTYTLGDYRIKAPAVAKFATDGDLTDTEVREGNSVTLTVNASSPNGSAGSLSYKWYRYTSPTDSVLIAGATGPSYTVSTGVEGDVLEYAVKITNNPGAAIQTAADVMSAHSLVTVKKAATSMSKAIIVINPEKTWIYKGDSIKPAGTDVTVWLPVTLA

SEQ ID NO: 96718 - protein, 262 aa, Unknown
  Obtained from environmental sample
  misc_feature (1)..(262): Xaa is any amino acid
MAAIPDAGAYSGGQRRPYPSAPRESAFSKIWPALRISILAVGVVVLGVLLYLLLIRPKITGKDLMERGLASIRVEDYTEAEDYFHRGETYLGKDIKWYRKYAETYKDMREHARAIRKIRDGLAFAPKDFDSLMLLGDTYTETKDFDSARETFLQLEKYYPESLKVPEKIGDVYLAMGDDRKSPDYYELARLEYTKITDKDWKNLDGQFKTLLSYVKMRKLPESEEKLRHIRRISSQAMNVPILTEYSALLQDNQKWSESRTM

SEQ ID NO: 96719 - protein, 289 aa, Unknown
  Obtained from environmental sample
  DOMAIN (120)...(189): GHMP kinases N terminal domain
  misc_feature (1)..(289): Xaa is any amino acid
MKIKELLSKIDSDNFSKTGDLRIFSAPGRTELAGNHTDHNRGKVLAASIHLENIAVVQKRSGNTVFFRSSNFPDVKVKLTDDSGAPDLQPKPAERGTTEALIRGIAAAFSNAGCVIGGFSANAASDVLPGSGLSSSAALEMLLCRVFDSLYGEGKRSPLEIAQFGKFAENAYFGKPCGLMDQIACSVGGAVFIDFADEAHPEIKKITFDPAAAGYALCVVNTGGSHANLTADYASIPVEMKAVAALFGKSVLGELEKETVLSSAAEVRKALGDRALLRAIHFFDENKRG

SEQ ID NO: 96720 - protein, 394 aa, Unknown
  Obtained from environmental sample
  misc_feature (1)..(394): Xaa is any amino acid
VERASLFAPRFAQWFRDDGSSIPYGRSLTYRFSALSLFSACAFAGVEALPWGVMKRIVLQGMRHWFSRPILDKGGILSIGYGYPNLIMADRYNSPGSPYWALKMFLVLALSDDHPFWQAEETPLPNLSQVTADKIPGFIVSRNADDAQLLCSGRVAPFEMNHSAQKYCKFAYSARFGFCVAQGGANLEQAGGDSMLLLSDLDSETEAGGNHWRERKGTTEILSGENWISGVWQPWPDVKISTLLVSLGAWHLRIHRIESKRKLKTAEGAFAIKHYNGFDEALPLNNSAAEKWEALVVFPWGASRIVALEPSSARIGTLVVPAPNLNLLEPSAVIPTLTGTLEIGTSILVTAVRAGNKDTASEASLPFVAINKDGLKISYKKIEQVIPWAGGSIS

SEQ ID NO: 96721 - protein, 88 aa, Unknown
  Obtained from environmental sample
  misc_feature (1)..(88): Xaa is any amino acid
MNNPNKRMKENPFLNKEDLRRCLCDLLYPLKEHAVGGGFDLGSTAAHYSPRVALMEGWSRSLWGIAPFLAGGGKFPDIDIWLSILRDG

SEQ ID NO: 96722 - protein, 271 aa, Unknown
  Obtained from environmental sample
  DOMAIN (36)...(203): Glycosyl hydrolases family 2, sugar binding domain
  misc_feature (1)..(271): Xaa is any amino acid
MGKKSGNYVSDIHNEDYVSEYLESRLDATNLINIAGRETESLNGKWNFAEDLYDTCRRAHWYREERFDRDGREIPLDYDWEAWDRITVPASWNLEKPELRYFEGSGVYTRTFRYIPKSSGERLLLRFEGSAYRTTVFLNGKIIGTHDGASTPFNADISEAVKGENRIVVVADASRNHARIPMENTDWFNYGGIYRDVYLVRLPPVFIKDWFIRLAPDGTYSTILADVTIASAVNDRAQVNGTAFVEIPELSIKQEIAVRDGRGEAKISARP

SEQ ID NO: 96723 - protein, 177 aa, Unknown
  Obtained from environmental sample
  misc_feature (1)..(177): Xaa is any amino acid
GNTIPITDNSGSNGNTNPYQSNSANGGGVYVSGSKFNMINGTISDNRIILNNNSVNCTTTGNGGGVYVSGNTTNSGTFNMNHGTISRNEITKTVSGSASTSANGGGVYVGSNGKFQIENGEVYGNDSPSSNTAETGAALYVGGDPLGTAEYGTGSSWTPFVLTEETGYKYTDATISF

SEQ ID NO: 96724 - protein, 549 aa, Unknown
  Obtained from environmental sample
  DOMAIN (445)...(541): OmpA family
  misc_feature (1)..(549): Xaa is any amino acid
DDQGNVVRVIENKEQRFERFNMKEFFKRLFTSKKQIDIPPAIIWDGIRSTGEAPIDGKYTFTITATDNLGNKAVSPVYETVIKNKVPVISINPIPDAQRIFDPKSGTTGGAQGGNRNVTITPKGSAEDAWESAIYNPTGQKIKTFETQSGEPKPVVWDGRTDSDQIAPDGVYSFRMGTTDKAQNSASAELTNIILDSREAGAFLTTSVSAIAPAKNQSSNMVNFTIRLLLNDGIDNWKLELKDDAGNVQRTFAGRAPVPSVQGWNGLDEQGQIQESLYTPELTVNYTRGDIVKASASTVLVDVTGPVLTVVTAPEYFSPDNDGENDELFINLTTKDASPIATWSFEIRNPVESGSTQVFRKIEGRGSPANRIIWDGKSDKGELVQSAMYYPYKFTATDALGNSSTMDGKIGIDVLVIREGDRLKIQIPSIQFRPNFADFEGLPKDVVDNNMRIIRRIAQILNQFRDYKVQVEGHANPTQPAGAARDKEEPTLQRISELRAKAIVDLLVRNGVARSRLTAIGAGSSKTVAAFEDRDNWWKNRRVDFYLIK

SEQ ID NO: 96725 - protein, 472 aa, Unknown
  Obtained from environmental sample
  misc_feature (1)..(472): Xaa is any amino acid
GNVAGGWLKLPVLAKTKFWTKTRTQFQETSGFRYNIGSLGALKNFTFGVVLRGLGLSYFPTWLTPIGGVSFDLIHVEGGENKKDPFVLGVAADISFPSLFYPPYIDVILKTGIKMTIAEIVTLNVSWPGGSGLGIRDLTKEYEYTEKKVAFPAIPAIGLSVNFMLPSTGERIAGGRLPSDGDLKISTGLKPIYEGIAAVGGGVSWYVGVADKKPPVVELNYPDTAYFSPNNDGKADTLEVPISITDQSYIASWSVEIKDEEGNVVRVIENKEQRFERFNMKEFFKRLFTPKKQIDIPPAIIWDGIRSTGEAPVDGKYTFTITATDNLGNKAVTPVYEAVIKNNIPVITINPIPEAQRIFDPKDSTGGAQGGNRTVTFTPKGSAEDAWESAIYNPTGQKIRTFETQSGEPKSVVWDGRTDSGQIAPDGVYIFRMGTTDKAQNSASAELTNIILDSREAGAFLTTSVSAIAPAK

SEQ ID NO: 96726 - protein, 309 aa, Unknown
  Obtained from environmental sample
  DOMAIN (15)...(296): Pyridoxal-phosphate dependent enzyme
  misc_feature (1)..(309): Xaa is any amino acid
LKHIGVLGIMTSCSILDAVGNTPVIELKRISAGLNGVSVFAKAEYFNPSGSVKDRAARAMLLHGIETGRLGKGKTILDSTSGNTGIAYAMFGAALGYGVELFMPSNASAERKKVIKAYGAKVVETDPLEGSDGAYRAVIERAVGDPEKFFFPNQYDNFENVRAHYETTGVELYKQCKPTHFVAGTGTSGTFVGTSKRLKEYDSSIHIILMQPDSPFHGLEGMKHMESTITPKIFDRSIADVHITVKTEDAYATARRLAAEEGIFVGISSGANVYAAMEWAKTLPAGSRVATILCDNGNRYMSQPLWKDI

SEQ ID NO: 96727 - protein, 141 aa, Unknown
  Obtained from environmental sample
  DOMAIN (2)...(140): Methylenetetrahydrofolate reductase
  misc_feature (1)..(141): Xaa is any amino acid
MKISDILNTGKITISCELFPPKHGSSLTDAQNIVRETASLSPSFISITYGAGGGSSDQTAALAAEVQKYGVPALAHLTCVSSDRRMIRDILSKLAGDKIENILALRGDIPNGHPFPTDAQYHYACDLMEEIKNRGRFLHRR

SEQ ID NO: 96728 - protein, 463 aa, Unknown
  Obtained from environmental sample
  DOMAIN (154)...(237): Bacterial pre-peptidase C-terminal domain
  misc_feature (1)..(463): Xaa is any amino acid
MVIMLFLGFKVNRRTGHALIAAIGFAALSLTGLSLTGCPMDRGIQTVARPTATPEAGPVASGGITVRLETTTPGADIFYTTNGKTPTKNDPDTKKYSNPISITPPETITAIAVKYGMYNSAILKAEYTVKLPTTGVTELIENKWADGNLTTSANEQWFKFTATAGTHYIHAAFGTMDSWNGLYIQVYDSSGAKVEPEANLHGSNNNYVSRSVTPEQEYYIKVRRYSSTYYGTYQIAFNKTSTPPTLPSSAITLTENEWTGGNITSSTREQWFKFTATDNTQYIHAGFGTLTPSVGLKVQVCDSSSVAVESETVLDYRTKYVSISVTAGQVYYINVQSNDFRYTGTYNIAFNKSSTAPSATITLPSSANTLTENTWANGNLFLSSSVQWFQFIATADTQYIHAAFDTIITTTGMNVQVYDSRGASVVTDSLLYGTGDNSFISLSVTQGQTYYIRVWPNYYTGTY

SEQ ID NO: 96729 - protein, 402 aa, Unknown
  Obtained from environmental sample
  misc_feature (1)..(402): Xaa is any amino acid
VWQLGRGIISNASVRLPPEDENDKAIGPYIQHTAQIDPGNSGGPLLVQVRGVPTGYAVAGINTLSLRRRQAANYSIPVTRVRTFLDASLKPPVADQRPILEERVNEFIKGLSANKAVYPHIASFLSNTCVGENAEFALSETLDKASKTTLDSIFVSGDIISIMTSSVAWSIENSLRSRSGAISATLDSIDPGENGLYNVSLNVNGNNVDSVWINEYGIWRIRKFGTIASGDKTRIEKKEKEWKEAKRLRYDPFLMLSVGLAMPFDLTAFGLDLTLKFGKYFGLGIRGYFGGEDYTQMETGTGLYMPITIGGSVALTPFVGLGVGAMFISNPNYIPSSWYNDSEEKTLMLMGVSIRGGLCFTMSAVPGLFLQGTYQRNLYTILGDKDKSFYPDLIYIGIGYAW

SEQ ID NO: 96730 - protein, 525 aa, Unknown
  Obtained from environmental sample
  DOMAIN (282)...(425): ATPase family associated with various cellular activities (AAA)
  misc_feature (1)..(525): Xaa is any amino acid
MVRVEPLKTIVLSEPLSSEDLGLMRSVQKSFSQYAEYSGRINPDTLTAVEKSEDPERLANLVSNAVNIKSEKKIELLGYTDTRERFLAILEMLEKENEIYGIQKNISGKVRKRMDKRHREYILNEQLREINKELGKDKIEDEFAILEKRITEKNPPLEVKEKSEKEIKRLRKLQPLSPEAAVLRGYLEWIADLPWSNYTTDSVNLSEAEKILDEDHFGMKKAKDRIIEFIAVRQLQADEALINETLKNDSIKDDTVKDDAIKKEDSKNNAKTSVPQSVKGPILCFVGPPGTGKTSLGKSVARALGRNFVRISLGGVRDEAEIRGHRKTYVGALPGKIIQSMCKAGTTNPVFLLDEIDKLSSDFRGDPASALLEVLDPEQNSTFTDHYLEVQYDLSKVMFLTTANSLHSIPYPLLDRMEIIEVPGYGENEKLSIAKQFLVPKELRENGLSSAKITFRDDTIKNIIRYWTMESGVRNLERETARCIRRIARDAVNKGYGKDKPVKEFNKIITPANLEKLLARKNIKG

SEQ ID NO: 96731 - protein, 193 aa, Unknown
  Obtained from environmental sample
  DOMAIN (1)...(192): ATP-dependent protease La (LON) domain
  misc_feature (1)..(193): Xaa is any amino acid
MLPLRDLVLFPDTVISIFIKVTSDIAAVEEARSRENRLFAVCLKKTETGFSSNEPYKTGTVVRIINRLKLPDNTYRVVLQCEYRGTIVSLYPHNDFSVVRVEPIKATGLSEPLNPDDLALIRSIQKSFTQYADYSKRINNDTLSAVERTENPERLANLICNSAYLKSEKKIELLSYTDTRERLLAILKLGKRK

SEQ ID NO: 96732 - protein, 299 aa, Unknown
  Obtained from environmental sample
  DOMAIN (91)...(160): HAMP domain
  misc_feature (1)..(299): Xaa is any amino acid
AKTIVNPEVKAKYDEAMKSFTDTFKPSVYKMVAEAEKGAPLAEMVGHLTGLKASADLITDNMIYATDIKAGQLATESEKSTEHSRSIVALMVVVLVISIVIAVFFGIYISAMISKPLTTTVNMINEMAGGRLDKRLRLTREDEIGVMAKTMDNFADTLQSLIIDDGGRVLTAAANKDMSQRLTRDYKGAFADMKDNINTVVQNLDTALSQVSEAVGQVTSASGQISSGAQSLAEGANTQASSLEEVSSSLEEMSSMTKQNADNSNQAKILAGEARVAADSGDASMKKMAEAINQIKASA

SEQ ID NO: 96733 - protein, 254 aa, Unknown
  Obtained from environmental sample
  DOMAIN (67)...(254): Glycosyl hydrolase family 3 C terminal domain
  misc_feature (1)..(254): Xaa is any amino acid
MPTSAGIGAATIIEAVKNGSLAETVLDKAVERILNIVFKTADSKKVNAAYDKTAHHALAREAAVESMVLLKNEDGILPLAKNGVIAVVGPFAKTPRFQGSGSSRINASRVDIPFDEIEKAAGNAALRYADGFSQDDDMVDAAIIAEAVTTAASADVCVIFVGLPDKADSEGKDRTHMRLPANQNAVISEIAKVQKNIVVILSNGSAVEMPWLGEVKGVIEAYLGGQAMGGALADILFGKYSPSGKLAETFPRKI

SEQ ID NO: 96734 - protein, 301 aa, Unknown
  Obtained from environmental sample
  misc_feature (1)..(301): Xaa is any amino acid
GRPFGYVYGGGGGGFKTISCLENTETWDGAVPCVIGSPMTIPYFSTIRAHAKRILRNKFHIIADAVEPGADHDVYTGLNVEERVALEEITLMGFPVKTWFMFKTLDDASLPTLLSTIKTLDGEYFADFWTVPGYLGADKYGSAVRDRIYHKTTIREVRQADTERQPVLVLTNLPDCHGYTDGLEAVFLTGEATGRRMAVERIEGNVVTLCLGFEPVYSAACVVRDVVNKVKAGDEVLLDNSDYLAIQTYHRHQIPDESYEGWKQFCRKDGTPLYPQRSFLVGPRIAYNSAGSIHAANIKER

SEQ ID NO: 96735 - protein, 146 aa, Unknown
  Obtained from environmental sample
  misc_feature (1)..(146): Xaa is any amino acid
MLPSVGKKWYRSFRNSHKAAWESLYPYYGDLDAMSAEDREFLRERVVARVESENQERGYLSTLRSMNFFFFFNGKKISRRIKKYPGKIAILWGEKDKVLPVEKAALFRGLRPDAKITLIAGAGHLPHQEKHEETAAEMLRFLKEVL

SEQ ID NO: 96736 - protein, 850 aa, Unknown
  Obtained from environmental sample
  misc_feature (1)..(850): Xaa is any amino acid
LIDSLITNIEKSKELFGFSLVICGKQPDSPELLCRFLAGINGVFVDDKAAKRLIPYAIFEKPSDWLKGIKKRKYGCGSYFKVNKLKVFKKPAVYDAELQTSVVDVFEKAKGKNTLLICPYYFQMRGGLYEFNSNINKSFPPLTICFESIGIGSLVDIWSSNIRSLIDSQATEEIESLWETLVRERIRDEVSEYLARCVKRYLSLVINLYIETANKKKKTPVLMLENVHFAEDTVFSLLADALAGINYQNKEKLLILGTGEDSISKEKLQRWEGIFDSVKNIEGINVDKIYFPKLSMDLWEIIYAMSLFNRYYSPELFQRLFEEEGKNPVMISKAFSILHNMGVIDDPHEPRLMNRHFEDHAGKILNDKTRRIKEIVCVRLLDWCVKRNLNPCFRLLTIISSLDGKKYIDDLLLLKSFSSDIVNKTISAIETAMNNGEFKELVGEKAEAIRHIYKTSKALITGYEKDIEAIFTEDNLEKIIELCESFPVLKAQILVNESGYFLGRHDEKNAAEKAKEAILLGQSKNSFCLPQGYRLFSLVCLSKQQINETIEYLNFALSNAEKSGNYHELAVSAYYAAAAQFLHGDVYHSADLAAKSIKQSLVAGRPDWADRSRFLEGRIEFDLGHYSKALDIFEHLLKEPYGGMTCEKENLMAAWIYRSKIYLEVSNVKKPEPANNDADLFEIEAAFLSGNYQKAVDLASSHKNPFTEENFLYSEQADWRSGFAQCEHLYFTHGEIQSRMISIFHSLALSKLSKEGCEEALHEIQKILRDEKLCEMDPWDAFYFYAKYRILEQTEASLVDMSTAVSMAFKRLQRRAGRIDDIETRRQYLNGSRWNRELSKAAKEFKLFLV

SEQ ID NO: 96737 - protein, 71 aa, Unknown
  Obtained from environmental sample
  misc_feature (1)..(71): Xaa is any amino acid
AAQGAARGRAQATTTQQDEEKDKKTVTNDLGVTVGQLAESLNMMGVSPQGLVAILQAIKDAGALTAELRIL

SEQ ID NO: 96738 - protein, 412 aa, Unknown
  Obtained from environmental sample
  DOMAIN (64)...(350): Transposase DDE domain
  misc_feature (1)..(412): Xaa is any amino acid
MMGFYLIAGDKPLMYMEDWLTENESFPVGKMSSQRLSELLGAFGQKERNDFFRAWCTANSSDEYMAVDITSVSSYSQLITDCERGYNRDGENLCQINLCLLFGEETQMPVYQTSYSGSLKDVSTFEATAAEMKAVSGGKKLVLVADKGFYSGKNVQILAERRRGDEFLIAVPFSNKWAKELVRGERGRIERAANLIKTSGPPYRGVSRPVNLLDLQLTAHVLYNPERALSERNDLYSHVAWLKDMAESGKKTFAFQREIEKYLSVRKGRAVHARIREDVIEQELETSGWLVILGNGKLTAQKAHDIYRKKDVVEKAFMKYKNLLGLQRLRVHSDERMRNKLFTAFLALTLVSYIHKVMKEKNLYRKMTMEKMFITLSKLRKVTINGYDILRPTTKEQREIFSAFSIPQPLVG

SEQ ID NO: 96739 - protein, 284 aa, Unknown
  Obtained from environmental sample
  DOMAIN (174)...(197): 4Fe-4S binding domain
  misc_feature (1)..(284): Xaa is any amino acid
TASWPNWTGLLSQACLDKINFKNKFVALKIHFGEPGNLAFLRPNFAKTVADRVKALGGRPFLTDCNTLYAGRRKNALDHLEAAWENGFSPFSTGCQVIIADGLRGLDEVEVPLPEGLTLKSAKIGRAVMDADIVISLNHFKGHEMTGFGGAIKNLGMGSGSITGKMAMHEDGQPSVSHKLCVGCRVCAKFCAREAIRFDKNEKAVINQRLCVGCGRCLGVCNQNAIHNHWSTAGPELNRKMAEYALAVVSGRPNFHVNVVNQVSPNCDCHNENDIPVVPDIGLS

SEQ ID NO: 96740 - protein, 307 aa, Unknown
  Obtained from environmental sample
  DOMAIN (26)...(130): FliG C-terminal domain
  misc_feature (1)..(307): Xaa is any amino acid
ATHVSVFLCNSNNEAKHFCHFVSRLSLAGDDKLVARRIVTNAEYSLEKYQPFKFDDFVKLDDRKIQRVMRELDSQILAVSLKDAKEEVKDVFFRNVSQRARGMLEEDMEYLGPVTESDMENARQVTLDIYDDITRENNRFDEAWAKYKNPEENNTKDQEDFDDEKHIVFAFRGTGTAADSVSIFLFDKYKYADTFCDYFNNLKPDKGSFFYARHADQMIEYETTKPLLVSFDQIVELSRRHGKWIIKEVLNKIKPVIILAALKGMDKRSRLLIMQCLPIKTTDEINERIERQSEKHLSLYESRKAQQ

SEQ ID NO: 96741 - protein, 179 aa, Unknown
  Obtained from environmental sample
  misc_feature (1)..(179): Xaa is any amino acid
SEGGYTLNRKSYYLNGYIDCILEKDSEDQGSLVIVDFKTTYMPDLSDCIGLEGLADFQLPMYIRLAENEFGKKVVTALFFSIVDAVPRVLFGVIHDVIHGKIIPGKEQDRIMHGSSEYERIMSEFDRKAEQFAVEIINGTFAFSPSHWELCHECGYNKVCRTLYKIFQGEKQWNQTKKR

SEQ ID NO: 96742 - protein, 359 aa, Unknown
  Obtained from environmental sample
  DOMAIN (10)...(356): UvrD/REP helicase
  misc_feature (1)..(359): Xaa is any amino acid
MEPNKEKINLNDEQLAAAYCDENAVVAAGAGSGKTMVLASRFAWLVTERKCRAREILTLTFTRKAAAQMYRRIHLMLAEIAMNSGIKGQLAREALEEFAQARIQTLDSYSAAIVKQAANRYGISPEFSIDEERCLRLAHDEAMSFFISKRGHPAIQRLYPNKSPVSIANDIFASGLFNYTHIDIQPNPEKDFTRQCDTICSEWEKHSGQIISILQKINEANTKDEKLLPDLALVISPFTLGKVIFPDVCELGEYFEQLAAIPHDSIIKWTDSHPLQTTLTNVMNFLLSLISLNLLKGKRQNNPVKELIKELRVIFKGFSSILVFCIQAGLTCSILKLLSDLQHCYLDRKRVESVLTYTD

SEQ ID NO: 96743 - protein, 419 aa, Unknown
  Obtained from environmental sample
  misc_feature (1)..(419): Xaa is any amino acid
YPKDSAAYAQMLRSPFAGLSMQGLALCTGKAAGMTAGAAPFSDEPLSRLSEDDRIKYAHGKHVYQKILDIAQKESVSSLVSELWYGEGYRYETEWNPRTAAYRELYDYLFHLAALADEKNQGLAEFTDYIQSLYNSDERLSDIEIPLERPSAVRLITIHKSKGLEFPVVFLCCCNKGTKNEGSGDLYYTDDSGLTFTPPLPQEYGDNANIRRSYFWERSQAVRKEKRTAELRRLLYVAMTRAENELFLSGSLDISKALGPENRDQNIDVESFSRYLKQYIDVKNEKAERSNGIKGDTILDGNTFFGLCLPAFGAHLAEGTGESFFHIEEIPAYSEQQIRDAEKSGSRFSNDQTGLNAFFELVESFYKNAGGIETPDVPKIHYTPTSLHCGCTAYNGGVTYSGDGHWTDKKNDFSGEDAV

SEQ ID NO: 96744 - protein, 280 aa, Unknown
  Obtained from environmental sample
  DOMAIN (160)...(280): DNA gyrase B
  misc_feature (1)..(280): Xaa is any amino acid
AIDEFIMGFGKKIEVNVENGVASVRDFGRGIPLGKVIDCVSTINTGAKYNDDVFQFSVGLNGVGTKAVNALSSSFRVVSYRDGEYFQAKFERGKLISKKSGAVKGEEPDGTFVEFVPDAEIFGEYKFNFEYIEQRLWNYAYLNSGLKLFLGKQKFESKNGLLDLLQSDVGESAVYSIAYCRGKQLEFAFTHTQAYGEAYRSFVNGQFTSDGGTHLSAFREGILKGVNEFYKKNYSGVDVRDGIAGAVAIKLKSPVFESQTKNKLGNTEIRGWIVSEVSLA

SEQ ID NO: 96745 - protein, 606 aa, Unknown
  Obtained from environmental sample
  DOMAIN (46)...(181): Histidine kinase-, DNA gyrase B-, and HSP90-like ATPase
  misc_feature (1)..(606): Xaa is any amino acid
MSKDKSTNQSAGAHQYDESKIKTLSSLEHIRLRSGMYIGRLGDGGNPDDGIYVLLKEVIDNAVDEFIMGFGKKIEVNVENGVASVRDFGRGIPLGKVIDCVSTINTGAKYNDDVFQFSVGLNGVGTKAVNALSSSFRVVSYRDGEYFQAKFERGKLISKKGGVSKTEEPDGTFVEFVPDAEIFGEYKFNFEYIEQRLWNYAYLNSGLKLFLGKQKFESKNGLLDLLQNDIGESAVYSIAYCRGKQLEFAFTHTQAYGEAYRSFVNGQFTSDGGTHLSAFREGILKGVNEFYKKNYSGVDVRDGISGAVAIKLKSPVFESQTKNKLGNTEIRGWIVSEVKSGVVDFLHKNADAARSLESKIVQNEKLRTELNKVKKEAKEAAKRVEIKIPNLKDCKYHAGENDGGRSTIFLTEGQSAGGSIISARDVYTQAIFTMRGKPQNVFGKTRAAIYQNEELYDMMMALGIEEDVEKLRYNRIVLATDADVDGFHIRNLLLTFFLTYFEELVQAGHVYILETPLFRVRNKKETLYCYSEKERDAAIAKIRDPEVTRFKGLGEISPSEFGQFIGGDMRLVEVNIKSAKNITETLEFYMGKNTPERRDFIMENLI

SEQ ID NO: 96746 - protein, 126 aa, Unknown
  Obtained from environmental sample
  misc_feature (1)..(126): Xaa is any amino acid
MEDIKNRLKEIKKHLGAIVDYTVDFLGKIIDKYKPQHPRKTELVSFKKVDVREAAQRNLKLRYDKDTGYLGYEVNGNLLFDVSPYDRVLVIRKTGAFSVIGVPEKLFVDKGMLHCGFGTRTCLTAI

SEQ ID NO: 96747 - protein, 185 aa, Unknown
  Obtained from environmental sample
  misc_feature (1)..(185): Xaa is any amino acid
MPQWAGSCWYYLRYLDPNNDTAFAAQDKINYWLPVDLYVGGAEHAVLHLLYSRFWHKVLYDCGLVNTIEPFQRLINQGMILGEDNQKMSKSRGNVINPDDIIREYGADAMRVYEMFMGPLEVSKPWNTAGLVGVSRFLERLWAIGEKTITDSPPQPPEQLTKLLHRTIKKVTDDTASLNFNTAIS

SEQ ID NO: 96748 - protein, 247 aa, Unknown
  Obtained from environmental sample
  misc_feature (1)..(247): Xaa is any amino acid
MQRNWIGRSEGANVTFTIDGHGEALEIYTTRPDTLFGATYMVLSPEHPLVEKITTPEQKQAVNAYLEAAARKSDLERTDLAKEKTGVFSGAYAINPVNDHKIPIWIADYVLISYGTGAIMAVPAHDERDWDFAKAFNLPIVQVVAEEKGLGLGDQGSGIEVREQSDLPICSDNIQQPQSLFIADGYSVNSGHFNGLPTAETKKRVTDWLEEKALANGRSIINCGTGFSAASATGASRFRWCIAPNAA

SEQ ID NO: 96749 - protein, 365 aa, Unknown
  Obtained from environmental sample
  DOMAIN (99)...(203): Shikimate / quinate 5-dehydrogenase
  misc_feature (1)..(365): Xaa is any amino acid
MKKKFGLLGEKLGHSFSPLIHGYLGEYDYSLYEVSSADFDSFMKDNRFDGINVTIPYKQQVIPYCATLSHEAQMIGSVNTIIKDDSGKLHGHNTDYHGFRVMLEHGGIDPKGKKVLVLGDGGSARTVRAALDGLGAREIVTISRRGENHYGNIERHYDAEIIINTTPVGMYPDNGSSPLHLTEFRQLTGVGDLIYNPTRTKLLLEAERLGIPCVNGLAMLVAQAEKASRLFLDGPARPELVNKIHDAILKRTQNIALIGMPGCGKSTIGRVLAQKMERPFADIDEQIEAAAGKKIPQIFADDGEETFRQLETRVLAEEAKKSGMVLATGGGVVTRPENLDLLKQNSLIVYLKRELSDLITDGRPL

SEQ ID NO: 96750 - protein, 85 aa, Unknown
  Obtained from environmental sample
  misc_feature (1)..(85): Xaa is any amino acid
LSNIHDFSTVITVNQSEKLRVLIPKGRIFEKVASLFADAGFPIAMADRTYRPVMDVDWLDVKIMKPQNVGELLELGSHDAGFTGI

SEQ ID NO: 96751 - protein, 280 aa, Unknown
  Obtained from environmental sample
  DOMAIN (70)...(275): Binding-protein-dependent transport system inner membrane component
  misc_feature (1)..(280): Xaa is any amino acid
MGDIKKTQIFPLILMYAIAGLFTILAIYPIFWLIIQSFKTTQEYMTASKLALPREWFFNNYPISWKTGRFGLLIINSIFYTSITVVSIILLSFMAGFAFAKLPSKMTPVLHGSFIIGILLTLQSILVPLFLMINAVGLYNTRLGVLIPYIGIGLPMGVYLSTEYIKSIPSSLIESARLDGAKYLRVFRSIIMPMSAPVAATVAILGITGTWNEFMLINILVSRNEMKSLPVGVNMFSGALASDYGKQFAALVIGMTPMVIFYLVFRKRITRGVSAGAVKD

SEQ ID NO: 96752 - protein, 433 aa, Unknown
  Obtained from environmental sample
  DOMAIN (14)...(343): Bacterial extracellular solute-binding protein
  misc_feature (1)..(433): Xaa is any amino acid
MLIIVCKRTENTGKKTRLTILDYADNTAANAAADRKWVFYDTFAANNPDVQLEKEDLFNEPFHNKVEVYAASGNMPDVMYVWPSGRSTSLHEKRLLKDLAPLIQKDNLKDKYLPITMDPNQQASGYLAMIPIGVTASHAFYINMEVLEDCGLEPAETYAELKAQVPILKEKGYETVIMANKDGWVMQSCLFSAIAGRFCGESWEQKILSGKAKFTDVDFVAALDFIRQLYADGVLASSSLGMDYGDGPGLFATNRGAYMIDGDWRGGSFLTDPDTGKALISPERQKKIKVTVFPDIEGVRLNKSTSVVLGTGWAMSAAIPDGSKREDAAWRLVKWLTGPEVQKRSFVNGGLPSPSRVDIDYSSLNVEPLTLAIANMGKEYVTGTVVIDGVFHSDVFNPLNDGLQEIGLGTKTPKQVASDIQKAFDAARAAGKF

SEQ ID NO: 96753 - protein, 522 aa, Unknown
  Obtained from environmental sample
  DOMAIN (92)...(521): Hsp90 protein
  misc_feature (1)..(522): Xaa is any amino acid
VGTIARSGSKAFLEKMTGDQRADSNLIGQFGVGFYSAFMVANRVKVVTKRAGSDGGAVAWESNGESSYTISDAEKEGHGTDVVVYLKDDEAEYAELWQARSLIKKYSDFIAFPIYLPNDKGESEVVNQTKPLWLRPASEITSEQYEEFYHQALGGYGKPICSIHNKAEGILEYSSLLFIPSQPAFDLFSSFERKHGVKLYVRRVFIMDNCKELLPDYLRFVRGVVDSEDLPLNVSREMLQKNAVIEKMSKSLVSEILGKLTEMAEGDPTAYKDFWKSFGAVLKEGLYNDYENREKLLELARFQSSMGESDDFVSLKQYVGRMREDQKDIYYITADSRGVAEKSPHLEIFRAKSIEVLYLVDPVDEWIVGMGGISEYDGKQLKSVTKGDLDLGDLGKEEAEKRKSAQAELAGLSERIKEILAESVEEVRVTGRLKDSPACLVAGAQSVGAHLEKMMKAMGQEVPVSKRVLEINAEHPIIKNINTRYGEAPGDPELADWVRLLYDGALIAEGRPAADPAAYLKR

SEQ ID NO: 96754 - protein, 275 aa, Unknown
  Obtained from environmental sample
  misc_feature (1)..(275): Xaa is any amino acid
MIINNPFKPADTRKTILQQASCFPKETKIAVNMTGGTKLMFAGALSACWEHELEPFYFEINNHDIIYIRDGSTVPFIGVKSVADFFVVNGFNVITQGKWENKPCRNARLEATGKLWENRKTLRKLYKTQDFQKYINQCKKSPNPPFDWKWKNSHASLDINMSTTLNLNGEEISTPDCDDFGQYLGGGWFEEYIFDILHNLEQKNIICDLRIGLEVNYVDQLQERKRIPVGEFDCAFTDGKRLWLIECKAGGIKQEHIQKLENNLKNYGGIAAKGY

SEQ ID NO: 96755 - protein, 177 aa, Unknown
  Obtained from environmental sample
  DOMAIN (3)...(170): ATP synthase delta (OSCP) subunit
  misc_feature (1)..(177): Xaa is any amino acid
MLMSKQWASAFVNSIEKEGGDIEDCINMLKALADSLPDTVSGRAAAIRIEPLVRGAIPEVKQGQETAIRFFLLMVKKNVVRHIDSIIGEIRKTLDKRSGAISVTAEYAFEPEKDFISGIKEFIKKQTGAKSVELTGQINTDLIGGYRLKVGDEIIDASVRRQLQKMKACLAAVDGGS

SEQ ID NO: 96756 - protein, 330 aa, Unknown
  Obtained from environmental sample
  DOMAIN (1)...(127): Flagellar hook capping protein
  misc_feature (1)..(330): Xaa is any amino acid
MGKDQFLHLLTIQLKYQDPLSPMDNTAFVSQLAQFRALETGENTESAIRELGRAFDENLAAQIVSSQSIANSSAMSLIGHEARMRQTSVSYDGKADTKVPIRVHLGNSDKATVEIRDSEDNVVRTIAASGKDAQNSVTVYWDGKTDDGEKAKSGKYSLNVKGSDKDASLYTYVQEVVEGVRFTGEGAMIKIGGKEISVGEVLDVSMNAGGEGGYMSPSNVLALMGKAVRARCDTIRHTTNSVADGNVEYPININASRGSAVEVQIKNGRGDVVRTLKGIANDFGDLQLTWDGYTKDEEMAPVGVYTINVVGSDKNTSLYAYTEGVVDGLT

SEQ ID NO: 96757 - protein, 300 aa, Unknown
  Obtained from environmental sample
  misc_feature (1)..(300): Xaa is any amino acid
GDLFHSQIPEIQDEKTCHLFDLVNKLTDELKNDLTFVIECPYIDRHYRDTYYSYYSSKFVLFHRDCLRVHIFEGEIDIKDIYKKEEYNNPNDENDPKNKKKKPKLRDKYFGFFIIRPLILHMLGRSLISPKAFKEKKLVCCLMRDRVSLFGSEFIVYGFPHTAQDVETHSCAESSLWCLYEYYGSKYSQYKPLLPSQIISPLQSNTEHRILPSRGLNDRELAKCLNSNGFQSLVYSICEYSEDKPFFQLINLYIESGITLLLALDGDTTGHAVLVIGHEENDLIYYNKDDNTQWKKYDDA

SEQ ID NO: 96758 - protein, 273 aa, Unknown
  Obtained from environmental sample
  misc_feature (1)..(273): Xaa is any amino acid
AADLFDPVLGDLRYPGGICGLFSPMLGDFYPSGKRDIEFFLVDAPDWITIDDRGTITIAAGAELDDENSITVQARYKGETYTAVMFIGKDVRSAPARYLGTITELPVTPTVFIIKGPVQGRVKARQGDYVLAVADGYAWQKGYVYQWTGTAWEKRAPDKYTDLYIRCFKDGLDVPELTQDMGWFGALFARVLIAQQAFIEELQTQVIELSEGGQIRSKNFVSGERGFLLDANGDVELNNAVFRGELQARYILVTGNVSSGDQYLLRGNSIPAE

SEQ ID NO: 96759 - protein, 373 aa, Unknown
  Obtained from environmental sample
  DOMAIN (119)...(370): Uroporphyrinogen-III synthase HemD
  misc_feature (1)..(373): Xaa is any amino acid
MKVTLVGAGPGGVGLLTLKGFEALQTADVVLYDRFVSEDILAVIPDSAEKIDVGKHAGNHPVPQDTINALLLEKAKIVKSVVRLKGGDPFVFARGGEELELLAENNIPFEVVPGVTSAVAAAAYAGIPITHRDIASSFHVITAHAKNNEPLNIDFDALVKLNGTLVFLMGVAAIDYICERCAAAGMDKDMPAAIVENATASCQRKFLGTIAALPQIAREHNVESPAVIIIGKVCRFSDRYDWFGQKPLRNKRIVVPLVKHGASKLSNALRELGCDVVEIPCLKIAPLVGVGSMPGKMLVNINDYSWLIFTSGVGVNIFFDYLKEVLIDIRGLSRIKIACVGIETEKEVNRRGIRVEYTPAEYNGAALARGLKE

SEQ ID NO: 96760 - protein, 490 aa, Unknown
  Obtained from environmental sample
  DOMAIN (166)...(247): Cache domain
  misc_feature (1)..(490): Xaa is any amino acid
MKISFKLMSIMIALGLFAVAAVSVTLLVRSRSSIIKLSEQYAISMANDSAADVTNFIDAYMHKAETVATVMEQYRYMIIANRRTFFNFILDGMTKESPEIIATWCVWEPDALEGDDKQFMGTKGTSVTGRFAPYYYWDNGKVKMSVLEDFEDPAYLIPLKTGVQAVIDPYEYDVGGKTLLITSIAYPIRNNGNVVGVIGFDLPLTDIQKISQTQKPFEDSVTAVFSNAGTIIAHFDESRIGKNIKDTEGDMAGKYLDSFLNSVKTGKFFSFSNFIEALGKEMRMFIVPIIFGETKITWSYAIAVMSNVVMAPVYEMIFITILISALVLGIVISASVFLSRSISKPIVKAADTLKDISEGEGDLTRTIAVNSKDEIGNLALYFNKTLEKIRKLVITIKYETGNLNNTGNELATNMTETAAAINEINANIQSMKGRVLNQSASVSETHATMEQVVSNINKLNNHVENQSNDVSQASSAIEEMVANIHSVTET

SEQ ID NO: 96761 - protein, 227 aa, Unknown
  Obtained from environmental sample
  misc_feature (1)..(227): Xaa is any amino acid
MSELNAESVLASIVELRKSIAESNAELRASIAEQGKRMEQETAELRTSIAEQGKRIDVVCERLDEQGKRMDKVLDELRVNNHRVGELTNKVGRIVEKVVVPNIVDKFNEKGFKFDAVSTNVEFLNEKKSGNLTEIDALLENGKFVIAVETKMDLSVSDVNAHIKRLQALRKVPRFKGKKIYGAVSTAIAREKPINYALSKGFYVLQQPDVMAVRIIDFPKGRSAKAW

SEQ ID NO: 96762 - protein, 278 aa, Unknown
  Obtained from environmental sample
  misc_feature (1)..(278): Xaa is any amino acid
MTETQPNRNHKDSVFTCLFSEKSNLLELYSAISGKSYPESTNIEIVTLSDVLYMDQINDIAFVMEDRLIVLIEHQSSLNNNMPLRMLRYLSAEYDILVDRKNLYKQKRIMIPSPEFIVLYNGDKKFPDYNELKLSDSFKSKTPDLYLELVVRIYNINKGHNADMASRSSVLSGYEEFIAQIKENLKSMELRDAIKLAVKTCISKNILVSFLERHNSEVENMIFGEWNLDEAIAVAREEAHEDGIDIGIGKERNEILDLIKKGYTAADIEKHLRKQTCP

SEQ ID NO: 96763 - protein, 146 aa, Unknown
  Obtained from environmental sample
  misc_feature (1)..(146): Xaa is any amino acid
YDNEPANCEVYGKLYDWETAKEACPRGWHLPSNDDWKVLMKSVNPSCSGNSVGTCAGAGTKLKATSGWGNGTDDYGFSALPGGGWYYSLDIFSAVGNYGFWWSASSDNPSAYRKVMDEYEYVKGDFGNKNDLYSVRCLQDYGEAHR

SEQ ID NO: 96764 - protein, 490 aa, Unknown
  Obtained from environmental sample
  DOMAIN (59)...(288): Glycosyl hydrolase family 3 N terminal domain
  misc_feature (1)..(490): Xaa is any amino acid
MTTKQKIGQCFGIGFSGTGVSEDLRRLVREYKVGNVILFRDNIESSSQVRALCADIQKLVKDETGYPAFIAIDQEGGAVTRLPEDMVNVPGAMALAASGKTDNVALAARITAAELRRIGVNLNLAPVLDVNCNKDNPVIGNRSFATNAADAATFAVAAVKAFVEEGLMCCGKHFPGHGDTAVDSHLDLPLVDRSLEELEARELIPFRAAIEAGIPAIMTTHILFPQIESEKLPATMSLKILKGLLRERLGFSGLIVSDAMEMKAVKDFYGVPRGCTLALAAGVDIVYICHESPDMEASLREAISACENSRIDAKELDASVERILRYKERYGAFRIDAGEGFSIEEINRRKEQNTALMQGALAAHEHGKVPPPLGDKPFFAGSLAYRSTIASAKPDSSLSFASWFTEKFSGNFLETAVNPNAEEIAKIVSALPPATSIVLGTYNGHINRGQIDLAKAFSKAAQQRGIPLIVVALRNPMGSFADSAWDLRPG

SEQ ID NO: 96765 - protein, 128 aa, Unknown
  Obtained from environmental sample
  DOMAIN (3)...(128): Phosphorylase family
  misc_feature (1)..(128): Xaa is any amino acid
MKTIAVLTAMPQELDAVLKTFNFANPEKVELFGMSVYISVHNGIKFILALSGVGRANTAMNTALIAKEFKPDEIINVGSAGGLQNEQKILDIVIPSEIVAVDVDLTVLGCEYGQMLGDQKSYFADAKI

SEQ ID NO: 96766 - protein, 67 aa, Unknown
  Obtained from environmental sample
  misc_feature (1)..(67): Xaa is any amino acid
MKILLPILTIFTCLGFAGHGVSYKEAIEGNKKNGKPILLEFYADWCIPCIEMEKTVFKDPAVLKELK

SEQ ID NO: 96767 - protein, 380 aa, Unknown
  Obtained from environmental sample
  DOMAIN (107)...(172): His Kinase A (phosphoacceptor) domain
  misc_feature (1)..(380): Xaa is any amino acid
MNPAFIGLKMSDPVIPLSFITDELVRTGKITGIEWVNWRNEPVIGFFETLPNGWRLGLLAPKNTYYKPVYSMALILSIFGTTLATVLSIILIRVDAAKNKSDTESRHKSAFLANMSHEIRTPMNAIIGMTTIGKSASDSVRKDYCFTKIEDASNHLLGVINDILDMSKIEADKFELVPAEFDLEKMLRRVVNVVNFRIDEKHQKFSIHIDRSIPRILIGDDQRIAQVITNLLWNAIKFTPEKGAIALAVRLAGKGNDICTLQVSVSDTGIGISPEQQEKIFNSFEQAESSTTRKYGGTGLGLAISKRIVKMMGGSIWVQSEQGKGSTFTFTIQLVRGTVEKHILLSSDINLSNLRILTVDDDPDILTYFFEIAQGFGIIC

SEQ ID NO: 96768 - protein, 57 aa, Unknown
  Obtained from environmental sample
  DOMAIN (9)...(55): Ribosomal protein L33
  misc_feature (1)..(57): Xaa is any amino acid
MASKKTAVELIALQCSECKRRNYTTGKNRRNIQEKLEFKKYCPHDRKHTLHKETKIK

SEQ ID NO: 96769 - protein, 59 aa, Unknown
  Obtained from environmental sample
  DOMAIN (3)...(59): SecE/Sec61-gamma subunits of protein translocation complex
  misc_feature (1)..(59): Xaa is any amino acid
MKKVIQFFKESYAELKKVVWPGKDDVISSVKVVVISTVIVAAILGLIDMLLLMGIRVLF

SEQ ID NO: 96770 - protein, 81 aa, Unknown
  Obtained from environmental sample
  DOMAIN (1)...(70): Ribosomal protein L1p/L10e family
  misc_feature (1)..(81): Xaa is any amino acid
TLAELKKGRVEFRADKSGVLHLAVGKVSMEPSQVAENITAVMTEVKRKRPVDVKGEFIQTVSVSSTMGPGVWVAMKDQDKE

SEQ ID NO: 96771 - protein, 1178 aa, Unknown
  Obtained from environmental sample
  DOMAIN (151)...(415): RNA polymerase Rpb2, domain 2
  misc_feature (1)..(1178): Xaa is any amino acid
MVKVKQAEKRQYIGKDIQDVMELPDLVDIQIHSYERFLQREKISKKEKPALQGLQEVFEATFPIVSPNEDMKLEFEHYTFDEENIKVTEFECKQKGLNYAVPLKARINLVFQQTGEIRQKDIYMGDIPLMTERGTFIINGAERVVVSQIHRSPGVIFSHEKGIFSSRIIPYRGSWIEFEIDQKRDLIYTKIDRKKRILGTIFLRALGFSSREEIIEAFYVTETLKIKDDRETKEKISGMVLAKPVMIKDESSSKGAEKVLYRAGEKLHPHNVDELINHGIKSICYIDFEAEGSLNSPMILNCFEREDIKFVKEAGSEPAKDDALMAVYSVLMPGESITVDQADKDLTGMFFSDRRYDLGKVGRYKLNKKFSLDLPTNKFTLTIDDIIATMKHLIKVYVGDEYIDDIDHLGNRRIRSVGELMANQMKTAFSRMERIAKERMSLKETDTIKPQELISIKPIVAAIKEFFGSSQLSQFMDQVNPLAELTHKRRLNALGPGGLSRDRAGFEVREIHYTHYGRMCPIETPEGPNIGLIVSLANYTRVNEYGFLETPYRKVNKGIATKDIEYLSAMDEDKYYIAQASAKVNDNGSFADDQISCRKQGDYITRAPEDIQYMDVSPKQIISVSASLIPFLEHDDANRALMGSNMQRQAVPLVFPEAPRVGTGMEVKCAYDSGVLVKARRAGTVLRVTSQEVIVKPERAGNVKPAAQVSLDENGNDVYQLIKFQRTNQDTCYNQRPIVKVGEKIVSGQVIADGPATQNGELALGRNILVGFMPWNGYNYEDSILISQRVVKDDMFTSIHIKEFVVEVRETKLGPEKITRDIPNTSEKSLDNMDSEGIIRIGAKVRSGDILVGKVTPKSETETTPEFKLLNSIFGEKAKEVRDTSLKVPHGIDGTVIDIQRLKRTDHDSLSPGVDEVVKVLIATKRKLREGDKMAGRHGNKGVVARILPEEDMPFMEDGTPLDICLTPLGVPSRMNIGQLLETELGWAGSTLDEWYSTPVFQSPSTEQIEVKLKEAGLPLTSKATLKDGRTGEEFVNQIFCGIIYFLKLHHLVDDKMHARSTGPYSLVTQQPLGGKAQFGGQRLGEMEVWALEAYGAANTLQELLTIKSDDMTGRSKIYEAIVKGEPSTTAGIPESFNVLVQELRGLALDLSIFDVKGKQIPLTEKDEELITKSGSNF

SEQ ID NO: 96772 - protein, 288 aa, Unknown
  Obtained from environmental sample
  misc_feature (1)..(288): Xaa is any amino acid
GHSRNPLVLDFYGDVSLAGEAAISGALYKRPYEKDEEDETQWLSAMRNAVSAALGINIERIFLKQRQRQRGDAQYEKTGDTRFEKIVSEGDLVFKVNLSDYLDTGLFPDRRLLRVMVKDEAKEKKVLNLFSYTASFSVYAAAGGAVSTDSVDLSNTYLNWARENFSLNGFSAQILQIWDYFSNKEQREEIHNLIRADVLDFLEKATVSKKKWDIIVLDPPSFSNSKKMTNDFDLQRDFYDLTGKCINLLAPGGKLFISVNQKQFKMSVAETEEKLGLRVTDLQNKITD

SEQ ID NO: 96773 - protein, 175 aa, Unknown
  Obtained from environmental sample
  DOMAIN (15)...(175): yrdC domain
  misc_feature (1)..(175): Xaa is any amino acid
MEMLSTSNTDLEKAASALAAGLLVAFPTETVYGLGADAFNQSALARIFEAKGRPRFDPLIIHIADPQTLWRIADKSSLNKATVERLSVLAERLWPGPLTLILPKRSEVPELATSGLSTAAIRFPSHLVAQKLIRLSTGAVAAPSANLFGHLSPTRAAHVKAQLGDKVDYIIDGGK

SEQ ID NO: 96774 - protein, 118 aa, Unknown
  Obtained from environmental sample
  misc_feature (1)..(118): Xaa is any amino acid
MIRHILFDLDNTLYSINTGVEDIFLRRLKEFTSSWLGISWEECEPLWKAGLKTYGTTLEWLIEDKGFTAQDEYNAYIHPEYEADSLKPDPELRNFIESLPCRSSILTNSPLFHVNTTA

SEQ ID NO: 96775 - protein, 514 aa, Unknown
  Obtained from environmental sample
  DOMAIN (130)...(306): Integrase core domain
  misc_feature (1)..(514): Xaa is any amino acid
MTNYREILRLYHLGILKQDIAKSCGCSRNTVASVIKNADEKGLGWETTARLNNNELAERLFPGNQGKPVYKMPDWEYIHREMAKSGVTLSLLWTEYCEQCRQNNETAYKTTQFYQHYSDYIKKTKATMHIGHKPGEIMEVDWAGQTAFIRNTDSGEPIKAHVFVAVLPYSGYTYVEAFLSQNEQAWIQAHVNAFGYFGGVARILVPDNLKTGIAKHTRHETVINKTYQQLAEHYRTAVLPARVHSPKDKATVEGNVGVISTWITAALRSQQFLSLRELNEAIRCKLSEFNSKPFQKKEGSRESAFQEEKPFLLPLPEHPYELAVWKIATVQFNYHIAVEGCNYSVPYEYIKQKVNVRLTKRVVEVFYAESRIASHPRLSGKPGQYSTYEEHMPKEHREYLAWNGERFLSWAGKIGEHTKTVVQFLLSRNQIEQQGYKVCMALLKLSDSYSALRLEQACKRALSFTERPSLKSIQIILKSGQDSLPRSEPAPSLPETSERAFTRGRDYFKRKEEE

SEQ ID NO: 96776 - protein, 323 aa, Unknown
  Obtained from environmental sample
  misc_feature (1)..(323): Xaa is any amino acid
IADIANKDKVNINVFTHLEHGKVLPLLKKGISFAEAKKQAFEEVLKELGIDISFSRKNSEDMSLQADSVLLLASVLLQVGRSESELKTLLSTLTGIDKVKEGMEQALAVYATAKGNVQSSTTVTKSTFKDDRDNNEYSYVKIGTQTWMAENLNYHGTDQAILGKCYNDDPHNCAIYGRLYDWATAMSIDTKYNSEEWGESDVKHQGICPNGWHLPSKAEWQKLIDFVGGYETAGTKLKAISGWNDYQGVSGNGTNDFDFSALPGGYGNSSGSFFNVGNYGRWWSATEGSAYNAYVRYMVYNLASVRNDYDDKTIPVSVRCVQD

SEQ ID NO: 96777 - protein, 177 aa, Unknown
  Obtained from environmental sample
  misc_feature (1)..(177): Xaa is any amino acid
MNNIFQYIFTTDFAYSVFRVTTPILLAAEASVVAERAGASNIALEGIMLFSALFGAIGSGFTGGSLLWGFVLAMAGGLIIAILLAYFGLYFKTDIILAGIALNTLATGGTVFLMFALIGDKGTTTSLASGTFSKIDIPLLGNIPVLGPIISGQNALTYLAFILVFVVWVLLFKTRIG

SEQ ID NO: 96778 - protein, 927 aa, Unknown
  Obtained from environmental sample
  misc_feature (1)..(927): Xaa is any amino acid
YLVHYLIVDEAGNATHYYNDIYLENNKPRIMSVNFGTDINGVNDVTDGTPNPKNDLLNEYLYYDSATGIAKNEAISEPTVSNAAGVMSPSFRIRGGKFNVRMNVDKGNGAKTATLSYISASTIVAASSMSKGNVYTIENLGTIMTDFTKYGAPNNVPGTTFVASGPAPASTNGTVISYTLVNRLPETMTASQTDVVLTFQDFAGTAPGTGTKAAIPDSEKYSTTVPPPAGFAIGDIIDGRHNERLFILKVFDTTASPAPGGEFDHLADAILLKVDIDNNDSKAPTINVLPFGEEYWINVNNNAPGMNNPANDKAKLIRDIPVSEYNKNIGMITVSGKEVRGGYVQYAKDSTPNTTANISGKVKFLGKVEDNQKIKEIYVTIPNYNGGSGLGVQFKIAEANGTTGNLEPVTPLAGQWEFIVVNNDNYFTLDYGHTLNWEFMWDSSNVTNQAQTGVNITFQVRDAAFVTATTPPTHHANSGSTVNIGPYITEIETPLSKAYGSKPSAFNRSSTGGYPVRETELITIRGFNLGTGNTNDAASNVTIGGGTNYLTVTGRNSTVISASIPNTLSSGNLDVRVNNITSFNNSSNKSVAYNQEPNSVNNNVLTNARYIYVWSVGSIYTRNEMEYTFMRVSNTGRRFITYGTYATNGRLRLLNNHAAIDAAVATGATSVHLDVDNTTNRYLNLSVAATNNTNDWIIASSNMTANQANWAMIHARAVTGTTGANSAGTNKSRIVDLGTAAAQTPNRVRIPRLHARETSNNTTPATNNNNAMVVMSYGDETTTNYNIILHYGTVSGAGTATFGGNFTAASGNGASTTQVVANGTTTNGMTTYGSMYTASATLSDGTPVIAWFDNTAQCLYISYGNQPTNATSISTTTTASWTGRATLIQEGAGAHVDMAVDGGNNIHLAYNDVSNGGLHYAYIPSSG

SEQ ID NO: 96779 - protein, 92 aa, Unknown
  Obtained from environmental sample
  DOMAIN (1)...(80): OmpA family
  misc_feature (1)..(92): Xaa is any amino acid
MSSSDLRDRKFRIEGHTDAVDVDPNGPWEDNWQLSAERSRAVLRYLVAIGLDEKRFQIAGFADTMPVSSNSTEEGRKNNRRVDVIILDAGHL

SEQ ID NO: 96780 - protein, 313 aa, Unknown
  Obtained from environmental sample
  misc_feature (1)..(313): Xaa is any amino acid
MKIQFKLSIVVIAIMAAVVAGITSLLLWQASKNTMQLSLRSQEHLANSRAEFWKGREEGYLRALKTLANVMGDFETVKPEERRDKYDDMLRSALDTEPMMVVLYTAWKPNAIDGMDAKYIGRTGSGPTGQYAMAWAKETGATVKRLTTALDSAMEHLTGPDASKDSIYEPVFRTIRGEDMWTIRFQVPITNNKNHEVVGVLGCVLSIKPVQEIVESTLTANDETDIVILYSNKGSILAHYMPDRVGKNMFDVDEELGDARKDIYNAMNNGETYFGKEYNPTLHDNIMYVVKPVKNRHSDFSWTVLTGVSESYV

SEQ ID NO: 96781 - protein, 244 aa, Unknown
  Obtained from environmental sample
  misc_feature (1)..(244): Xaa is any amino acid
MKVNKKLKDSLFSSLFNNPDILRELYSAIEGIPIPPDVPIEINTLSGVLYKDRENDLSFIIDNRLVVLIEHQSTINNNIPLRLLMYIAHIYEKITGRRKLYATKPEKIPAPEFIVLYNGKEPYPDRGTLRLSDAFKEACGLRGMESPAQPLELVAQVYNINRGHNAEMLGRSRRLSGYSVFVEKVREYAQTLTFEEAMKQAVKHCMDNNILKTFLETHSSEVFNMLLTEWDTEEAKEVWYEEGM

SEQ ID NO: 96782 - protein, 262 aa, Unknown
  Obtained from environmental sample
  DOMAIN (1)...(179): haloacid dehalogenase-like hydrolase
  misc_feature (1)..(262): Xaa is any amino acid
FNHPIALSVINEYGGEVDHSGLSQYTELSGYGISVVKDGKTILAGNSKLMEKTGVAFKEPLSTGTKVYVACGGVFAGSIIISDEIKPDSHNAIAALKEKGVQKTVMLSGDNPDIAGEIAGKLGIDEVYGGLLPQEKVERVEMLNAQKNAKGKLAFVGDGINDAPVLAMADIGIVMGGIGSDAAIEAGDVVLMNDETSKLIEFMDIGKFTKKIVVQNIVFVLAVKIVFLLFGAMGVAAMWEAVFADVGVALLAVLNSMRILRA

SEQ ID NO: 96783 - protein, 128 aa, Unknown
  Obtained from environmental sample
  DOMAIN (5)...(128): Bacitracin resistance protein BacA
  misc_feature (1)..(128): Xaa is any amino acid
MDIMTAIVLGIVQGLTEFLPVSSSGHLVLMQRIFGVKEPGLFFDTMLHIGTLSAVFVVLWKDIWEILKKIIQPLTLYIIIATIPAVIFALAFKNKIESAFESGQFLGICFLITSALLITAEQLPNAPK

SEQ ID NO: 96784 - protein, 391 aa, Unknown
  Obtained from environmental sample
  DOMAIN (268)...(347): Toprim domain
  misc_feature (1)..(391): Xaa is any amino acid
MALISKASIAEVNSRLDAISVVGEYVRLEKKSGRWWGRCPFHGGGQEKTPSFKVDPDLKMYHCFGCGKGGSVISFVMEMDKLTYPEAIKNLAKKMSIELIYEEGGPAEDGEDHSIKEELYELYKRMTGTFEHFLYEKDEGKPALNYILNRNINEEMIKKFQLGFAPSDRDFLHKFLKQKGYSDEFLEKSGLFSAKYKTIPLFSGRLMFPITDRQGKIVAFGGRALPGTVQSDGNEPPKYINSPETEIYKKGQTLFAIEHAKPQMRQTKTVYLAEGYMDVIALHQAEIVNSVAPLGTAFTDEQAAWLRRWVDNAVLIFDSDEAGQKAAYKAIITCRKNGISCSLVNLQEGLESEIDGEEAKKIKDPADILQKFGPQILKKVVKFTINDFVYL

SEQ ID NO: 96785 - protein, 718 aa, Unknown
  Obtained from environmental sample
  DOMAIN (173)...(585): Alpha amylase, catalytic domain
  misc_feature (1)..(718): Xaa is any amino acid
MHLDNIVAENGKALPLGAELVGDGVNFAVFSRNASAITLILFESADPGSKWVEIPLDKRGNKTGNIWHCFIKGLKAGTCYLYRADGPYFPEKGLRFNKNKTLIDPYAKALTDISGWDYGKCAGYDLEKPGHDLTYSYVDNIDSQPRSIVIDDKFDWQGDTPLNYPLRFSVIYETHVKGLTANPNSKVQHPGTYLGVVEKIPFFKDLGITSLEFLPVQEFNENEIARHNPKTGGTLTNYWGYSTAAFFAPKGNYASNKNPGAQVNEFKEMVRELHKAGLEVILDIVFNHTAEGNEQGPTFSFRGLDNSIYYILNENRRYYQNYSGCGNTVNCNHPVVRTFIMDCLRYWVMEMHVDGFRFDLGSILGRDQHGQIMENPPTLEQIAEDPVLSSTKIIAEAWDAGGAYQVGWFPGGRWAEWNDRFRDEIRKYWRADPEETRHLATRLSGSSDLYLRDGRKPFHSINFLTSHDGFTLNDLVSYNDKHNEDNGEENRDGGDHNFSYNYGSEGLTLDPILEKIREQQIKNFFTTLLVSLGTPMILGGDEIGRTQRGNNNAYCQDNEISWYDWSLLEKNKGLFRFVKEMIAFRLRHPCFMRPEFYTGRQGSYNAIPDISWYDEKGGNPDWEKLTYPLALLINGRRAEVTRDRDNNDFYIMFNASLDPVVFSIPAANDRRKWFRAVDTTLISPNDILPEGSEEPLAVSNKYKVKSRSVVILISKSAS

SEQ ID NO: 96786 - protein, 279 aa, Unknown
  Obtained from environmental sample
  misc_feature (1)..(279): Xaa is any amino acid
SFAGYSYYYTINSGEPLKEQEIAALQKEMEAIVREDLPITFKYLGYEEALEVFTKNRQTDTVLLMEQRSNSRIKVNECKDFLDIYVEPLVPHTGLLSSFALMSYQDGLLLRFPAIGKGMEIGPFEDEPKIFDVYNEYKKWGRVVGVRVVGDLNALVTKRTINDYIRIAEAHQSRKMAEIAEQIYGQLDRIKTVMLAGPSSSGKTTSAKRLSIELMALGIKPVAISLDDYYVGKERTPKDEKGDPDYECLEALDIPLLNEHLQALYRGEELLCPSTISKP

SEQ ID NO: 96787 - protein, 435 aa, Unknown
  Obtained from environmental sample
  misc_feature (1)..(435): Xaa is any amino acid
AFSKYIIDTIDRELEKLKEDRVEKGHEELTDAEVIFAKVGRVEHHTDDEVDNEKAKRYKLVSKAIIDKLNGLRAEIDPETFDQMNIRENLKKIIDIENIRNRGFNTAINSITSILDTSKMGYQYIENLKNGRGVIIREYEDTDTKNLPDERYQIKMRYFDHAQLTEERKAYEVQLKSFETEIQHVWDLVTVIYEDGKPLGKVTDFNDLAKKVKGRIKTRIKDKTGEPLYEDIDKAWDEVSFVKPAETEVERSNRTYLYEKDHIRQTIILIKNKLKELYGFQFPIERRVIEKRLTFLEKNYNSFEYEINPYHILPGIILDMDITSIKRKKRTLDAMANVLNEFLSGVSKGFSDAAFASFSRRRSTVREDINQSFGADEPPKAKAAKTESAGAAYLDIINTSSDTIETPPKGRGRSSKAKAGAAAGLPKRRGRAAKK

SEQ ID NO: 96788 - protein, 493 aa, Unknown
  Obtained from environmental sample
  misc_feature (1)..(493): Xaa is any amino acid
AALALSVLFALIGCEDPVKGGTPRLSGTVTIDGAPGVGTTLTANISKLHGSGGVSCQWKYYDPDNKTYTPINGANTSSYKVKPEDIGKFITVTVTRAGYSGSVTSAEKGPISDKPSLEEAVTVNVIGNAEVEGILVVNVVADGDEEIEDKYEYQWQRANSENGEGTDIPGEIGNEYTLTAEDAGKYIFVVVTHPDYSGSATGNTIGPVLFPALTGTVTISGDAIVGQTLTAVTTGVSGKPTAANFTYQWQRSGTANGTYADIAGATSSTYTLVDEDQGQFIKVTVTSNQNSNSVTSAATAQVVFPALTGTPTITGTAIVGQTLQAGTAGVSGKPTAHGFIYQWQHADTANGTYENIAGATASTYMLVATDNNKFIKVTVTSNGNSNTVTSAATAQVAFPALGGTVSIDGTTTVGQTLTVTTSLTGQVGTLLYQWARSSTSGGTYTNIDGATNSTYVLVDADHGQYIRVTVTSTGNTGSASATTAAAVIFPALG

SEQ ID NO: 96789 - protein, 98 aa, Unknown
  Obtained from environmental sample
  misc_feature (1)..(98): Xaa is any amino acid
MKNDAKRIEQLERDIKKYQKSYYGGEAEISDGEFDLLWDELKALAPNSPVILGIGDSADNVDGFPKAKHLIPMGSQEKAANPGEFLAWAAKHPLPEFL

SEQ ID NO: 96790 - protein, 237 aa, Unknown
  Obtained from environmental sample
  DOMAIN (40)...(237): Putative methyltransferase
  misc_feature (1)..(237): Xaa is any amino acid
MSLQSADGEPAVSAGDSLRKIRSFVLRGGRLTVAQKRSYNSLSGKFLLPYENKTLDFAGIFGNDNPVIVEIGFGMGRATALIAGENPQKNYIGLEIHKPGIGRLLWEIEQRPLSNVRIIEHDATEVFQNMIPANSLDGVHIFFPDPWPKKRHHKRRLIQRHFTDRVSSRLKPGGYIYMVSDWLDYAHWALAVLTDTEGLVNEYGGFSLPQSWRPLTSFEKKGLDKKHEIKELFFRRI

SEQ ID NO: 96791 - protein, 217 aa, Unknown
  Obtained from environmental sample
  misc_feature (1)..(217): Xaa is any amino acid
MAGKRIIPVLFIFILAVSCTRNEPKIAFGFIELVYYQDRNKPQERFSFFIIPEDEEGVENLADLYLYHDREQLRWHISSEDWVSYVEEGKTWIGSRSIAIGEDEILPRGQYRAVLVNKSGERSERNFSFDAPEEPRFPFPFLEISEGRYTVTSLYPSNRLVCYDEQGNYIHTANLSNLSGQVSELNLPSNARTAALWAEDAQYFTSAFTYVTAIRRR

SEQ ID NO: 96792 - protein, 385 aa, Unknown
  Obtained from environmental sample
  misc_feature (1)..(385): Xaa is any amino acid
VDSPLVTCSTNYGTPFFLNLNDGDVGHSLVFGPTGSGKSTIIGLLAASFLKYPDGQVFIIDKGASALTMTLAAGGEYVDPSATEHCFQPLGDIDTEPDKAWACDFITTLLEMQGTTILPKMLVQIRVTIELMSAMEKQRRTLTTFKQTCMYRDEITGQNPIDDAVQPYTLEGPYGRIFDGDTTKINDSRWILFEMSELMELKDKVVAPAIMFLFHFLEKRFKGQMTLLVVDEAWRFLDNEVFRNKMRQWLKELRKKHVFCVFATQEVADGANSPIASTLIQNCPTKIYLADPEAHNNAEAYMKFGLTEDEVALLAMARKKRDYYFKNPQGTRLFQLSLGIIFLALMRAQDAQVRTAKGEVIRWADYCKDLLELKSFWRFKEVLQK

SEQ ID NO: 96793 - protein, 267 aa, Unknown
  Obtained from environmental sample
  misc_feature (1)..(267): Xaa is any amino acid
MCLEQTPNPYAFSVGNADRIFEPYRAMENTSREDAANLFKHFLVFFNIGSRSWAISQNVIVGGKDLSDKDLTNHTTYALLDAYYEMNLPQPILSVKLHRNTPETFYRELGRFFFTPGCLTPSLFNDDSLFKVLEASGIEKNDLPDYSVAGCQEPLIMGKDNGNTTNSWLNLGKILELSLNDGVSLISGKQILPSFGTQSPEERLRSIRENFYKNTEICMKEMADAANEASRAIALLPVPFISTFMGGRETGYDMRDPVHQGTRYNSS

SEQ ID NO: 96794 - protein, 94 aa, Unknown
  Obtained from environmental sample
  misc_feature (1)..(94): Xaa is any amino acid
MEPCQYDDFRIPSTDDKTRRSFENIPPEEIASAAKHILNQQIGLLREDLEREISRLFGFARYTEAMQKPVRAGIEMAINRRWATMDGDRMNALP

SEQ ID NO: 96795 - protein, 138 aa, Unknown
  Obtained from environmental sample
  misc_feature (1)..(138): Xaa is any amino acid
APRPNEPNRYKLLRKKESGDNRSKTGLDLEVSDAYTGKHRDAKSLSGGESFMASLALGLSDIVQQTSGGVRLDAMFIDEGFGTLDTEVLELAVRTLSNMTESGRIIGIISHVAELRERIEKQVRVEKTMRGSRISLVG

SEQ ID NO: 96796 - protein, 872 aa, Unknown
  Obtained from environmental sample
  DOMAIN (172)...(751): Ribonucleotide reductase, barrel domain
  misc_feature (1)..(872): Xaa is any amino acid
ERRKSEIRNPNGKAIFFEDTVIVPNFWSQIASDIIAQKYFRKAGVPSDKIYEWRKWVKLPENSVGPEITLPEDGAEHDARQVFHRLAYTWLDWGKRNNYFDSEEDESAFYDETCYMLAHQFAAPNSPQWFNTGLYSVYGIDGPAQGHYYFDPEKNETVKSESSYKRPQPHACFILSIDDDLVNEGGIMDLMTREARLFKYGSGTGSNFSRIRGVNENLSGGGVSSGLLSFLKVGDRSASAIKSGGTTRRAAKMVTLDIDHPDVEKYINWKAGEEHKVASMVTGSLILKKHIDAVKKALGGFRGPEDDKFNSEKNHELAAVLRAALGDKVPPSYLYQQLRRLEQGDDEVDISQYSTAWDDEAYNTVSGQSSNNSLRLTDDFMRAVLNDGDWELKSRTTGENVKTVKARKLWSDIAKTSWQCADPGLQYHTTINDWHTCPAGGEIRASNPCSEYMFLDDTACNLASINLAALYDKRNRIFNVEGYLHAIGIWTTILEISVVMAQFPSARIADLSYQYRTLGLGYANLGTLLMIMGLAYDSEEGRSVAGALSALLSGEAYAQSARMAAEHGSFAHYGENAKNMMRVIRNHRRAVYNAADNEYEGLHTAPRGIDPAKCPSYLMNAAKAAWDRAHDLGSAHGYRNAQVTAIAPTGTIGLLMDCDTTGIEPDFALVKFKKLAGGGYFKIINQSVPPALEALGYSPQAIEEIVAYAMGRKTLSGSPAINFETLKAKGFTQDAIASAEEAVKTALNLEGVFSPYILGKAFVENVLKVPEATWSLQGFSLLKHLGYSDQDIEDAELYTCGTMGLEGAPGLKKDHYAVFDTAAPSGKKGKRSIPWTAHIGMMAAVQPFISGAISKTINMPNSANYDDVKGAY

SEQ ID NO: 96797 - protein, 213 aa, Unknown
  Obtained from environmental sample
  DOMAIN (5)...(102): DnaB-like helicase N terminal domain
  misc_feature (1)..(213): Xaa is any amino acid
MNENERAEQNEFEQCFLGSLLLLADPKATPLKVKPFYFSNPKNEKIFQAYQKQIMANVIPDIGTLCFDPDLSDIGKDYIASLNNKIPSAANLQFYESKIIKAWQLRTCNFGNEKFQENLKTAKITGEIEQAIIEYQGILSEALNDKSKDAFLSFDEYINTQARKEYWREYTPRLFGSLPFPDGTISTIGAAPGGGKSAALINLCRELLTTLPT

SEQ ID NO: 96798 - protein, 262 aa, Unknown
  Obtained from environmental sample
  misc_feature (1)..(262): Xaa is any amino acid
SEQYLDHAATCIYAQSIGPMNTRSNSSEDNVIRTLVSGQSRNRYAGAGASELVYPSEHILRYIALKWAAQTVSEHWTLFDKAYYKKAIENNKARLKGQNMTDIDPATEYISTVDMSAKNSNAFAMFTRNASYGFDKDGFTETFSKWNGYISELEKFVKGVASKGQSEIDGSRDSAQAAVEKLSGEEKKNMDSFREAYNHLLYYKEQVSRRVDDIGSKIAYGLFKFNEDEDATVSELPTQIETYLRDNSKEFMHPNAARYFLY

SEQ ID NO: 96799 - protein, 165 aa, Unknown
  Obtained from environmental sample
  DOMAIN (14)...(164): Respiratory-chain NADH dehydrogenase 24 Kd subunit
  misc_feature (1)..(165): Xaa is any amino acid
MGVDMAGANAGGDITFPKELLSFIDEWKVKEGSLIMILHKTQETFGYISRASAEQISRLTGIRLARIYGVITFYHFFKTTKPGKHKVSVCLGTACYLKGGQDLIDEVRNLLGIAPDAVTADGLFSVDPVRCVGCCGLAPVLTVGNDTFGKLTKDMLPGIIEKYRK

SEQ ID NO: 96800 - protein, 410 aa, Unknown
  Obtained from environmental sample
  misc_feature (1)..(410): Xaa is any amino acid
GLQERFDGSIGSLSVLFPWGGASQGTPECGMAALLPSLGKQSRTASILCFGYDPYLMERNPYDGAKGSIREALAKYACLGGDFRKARLSLQEYFQRPLSPESWGLPCSALLGALEAQIALGIPAIGGKDSMSGNYRDAIHGIDITVPPTLVAFAAGTAPARSIRSGALTGKTGNVIVLLAQAESYPAKTANPNLNEWDIFKANMDALSSLGAIFCGAASCGAASCVLSAYPVVSGGVAASLALMSFGNNAGMEMRSSASTLVDGASYQSSVLVEIDGAAFRENPKIAEILGSAGCWEIAAVTIEEPVFRVTKEVDNELQVAEVPLAVLRRAYEYPLARVYPQVGSEEEIGSRESGVGSRERIGIVKELGNRDCFSDDKDIYKMYPDTPKNDPRLLEIRTCLSLVDGIPTI

SEQ ID NO: 96801 - protein, 64 aa, Unknown
  Obtained from environmental sample
  DOMAIN (8)...(64): Plasmid encoded toxin Txe
  misc_feature (1)..(64): Xaa is any amino acid
MPFEIADWDPKAARHYLTWQKHEPRIAARIDELLAAIKVDPFGGIGKPKYLDGYWSRRITQKHR

SEQ ID NO: 96802 - protein, 263 aa, Unknown
  Obtained from environmental sample
  misc_feature (1)..(263): Xaa is any amino acid
SDGSTSCSTRVSIIGTNATTAVIGRLVYTTALLNVVVNGSNVAGGAVTINGGTFVSAASSVGNAISAGDSVLILGARISGSGTPSDAPDYVVSSENGVIVRATSSNPAEVAWTGSANVGAVRARRYVFVESGLLAKAEVRVQGGNAAAIWVYGTDGGHAAPADLSTFLTAGATGVITNITSVAVLVQGNGTNNSATVRAASGRAIWVNNTFKTGTAKNDVILDNAVVVRTSSPTGVVTPLVDVNGGDVAVFGASLTATSINAA

SEQ ID NO: 96803 - protein, 284 aa, Unknown
  Obtained from environmental sample
  DOMAIN (42)...(143): Phage-related baseplate assembly protein
  misc_feature (1)..(284): Xaa is any amino acid
LLDLDREINKLLEKHPDPRKGIDGRIEFRKRKETEAGLPRFGTVVDNKDPQCLGRVRVACDTIAPGAVTPWIQIIALGATNKTGWWQLPDIGTQVVLGFVGKGHNNPVVLGCIYDLKHLPPEHTPKKESDSKVWQTKKHRLEFIDEEGKETLIISSAKGKMRCVLSKDKGIELVNELGDIEIKCRKFTVEGEKGIQIEGKKKVTIKSEDKITIKGSKGIKLENGKEVKIKGKNIKLEASKGITAEGKQIAAEGDKVTGFDVHQMVVPSGSGTAVAPLPHPFLGK

SEQ ID NO: 96804 - protein, 144 aa, Unknown
  Obtained from environmental sample
  misc_feature (1)..(144): Xaa is any amino acid
MTFQYREPQIEKMPRGDLEALQLQKLKDEVGFALRTSFYKERLGKAGIKSTDDIKTLGDLRKIPFTTKNDLRDGFPYGFLSIPKDEVVRLHASSGTTGIPTTIYFSRDDIKRVVGLYGPLYFWFRMHQIRRFQNMITYGLFTGG

SEQ ID NO: 96805 - protein, 279 aa, Unknown
  Obtained from environmental sample
  misc_feature (1)..(279): Xaa is any amino acid
MKEKWQADFTKPEKSCFDIKPEISYNAYLEKGSSKGNALPKGGAPSKGGALFLGLKKKSCIAWLETVHRVYVDQIIEARFRFDHFGDYCAAGIMFRVTGQGSYYLALISSKGYFRLDAVNNNIPRPLIGWTEVSDLNDCAANLKIIAYGEQLIFLLNDKWIAETYDASIPGGHLGFALVSYDLEDTSRNTGEAYTCRAWLDFLAVDSHAGAVEAEYKKWNNNIEIGAESRFRLAESLAALDYFDAAHSQIHKIWKRREEAIKSIMATYTETRNKKELLL

SEQ ID NO: 96806 - protein, 133 aa, Unknown
  Obtained from environmental sample
  DOMAIN (13)...(133): Beta-galactosidase
  misc_feature (1)..(133): Xaa is any amino acid
MNGFFQNILYGGDYNPNQWPKEIWDEDMRLFDLASINSATVNVFSWAKQQPDEDKYDFAELDAIIDLLAKKKKSIVLATSTAAMPAWMFKKYPEVARVDFEGRRHKFGGRHNACPNSLVYQKHAEQMAYKLAE

SEQ ID NO: 96807 - protein, 89 aa, Unknown
  Obtained from environmental sample
  misc_feature (1)..(89): Xaa is any amino acid
MSKRYRFAIIIVIVAVCFVFLWPSLRWYFLVPRDQQARALQSREQIKNYASQTAHADLQRMITLAQENGDVPEELSFLVKQAKKIYKDT

SEQ ID NO: 96808 - protein, 182 aa, Unknown
  Obtained from environmental sample
  DOMAIN (4)...(118): Response regulator receiver domain
  misc_feature (1)..(182): Xaa is any amino acid
LSMERILIIEDDPEIQEMLKFAFAREGWKLIHVSTGEEGLKIINETGADCVILDIMLPGMDGFKAIKKIRENKDMQTLPVIMCTARGEEADIVTGLELGADDYVVKPYSPRVLAARIRVALRRKEAAFAETDSSKSKTVFQQGKLKIDIERHTAFLEEAPLDLFPTEFAILAHFLSNPRYCF

SEQ ID NO: 96809 - protein, 434 aa, Unknown
  Obtained from environmental sample
  misc_feature (1)..(434): Xaa is any amino acid
MGRVLELADRPVDDSSPCPEEQSANKRPYYSLIPLKEILGELLETGGASKKVDAAYGTLIEKAGNEFAILLDMTLEKIETLSCPGISGELLAKAIGRMRRGEVSISPGYDGTYGVIRTFAAGEAKDGGSGLFEDNVVNDTNTKTKARQAKQKDVSPVNNGKSSPQTRGFSLDADQLAAVSSGLRRGIIIAGPGTGKTAVLAAKIARVTSEGIPPPSILALSFTVKAAAELRDRVLHLMQKPQLEKPETGKPVIVTFHSLCASILREQCAPALFPADFKILSETERDDLLAKICAAANSKTVSPKRLGEYIEGRKRYLLLPGEKPKDISRILPASLVSFIPDDNSGDNDSAAALDNAYAEYRKRLHSLGAVDYDGLIAGTVRLLAIREDILKNYGQKFRFIFVDEYQDINFAQYALIRLLVGNEVVAPSPVGYRR

SEQ ID NO: 96810 - protein, 299 aa, Unknown
  Obtained from environmental sample
  DOMAIN (190)...(298): ATPase family associated with various cellular activities (AAA)
  misc_feature (1)..(299): Xaa is any amino acid
MIAHSFLKIPDDEHQSILECATLEEMYSKIDLAVNTAMEVHRIISLNRQQVEIKMQRSQREYMLQEQISQLQRELDEINVNDQDSESYSKKAKELRFPLSIKEKFDEEMSRLKLLNPMNPEYTVVRNYIDWLLALPFGIYTEDVLDIKRATENLNSKHFGLEKVKERILEYIAVLQIAEKLKNKEVKSPILCLVGPPGVGKTTLAMSIANAMNRNLARISLGGVHDDAEIRGHRRTYIGSMPGRIVQALRKAKSMNPLILLDEVDKMSSDFRGDPASAILEVLDPEINTEFTDHFIEVG

SEQ ID NO: 96811 - protein, 641 aa, Unknown
  Obtained from environmental sample
  DOMAIN (64)...(205): Histidine kinase-, DNA gyrase B-, and HSP90-like ATPase
  misc_feature (1)..(641): Xaa is any amino acid
MAVKTKKPGKQNIVKGAPARGSSAKGVKSLPGVYDESKVKTLSSLEHIRARTGMYIGRLGDGSNPDDGIYVLLKEVIDNGIDEFIMGNGKNIEVAIKDAAKPGAASVKVRDYGRGIPLGKLVECVSVINTGAKFNDEVFQFSVGLNGVRTKAVNALSIYFRVVAMRNGEFAEAIFERGALQSSRKGKLKDKQKDGTYVEFTPDPDIFKDYLFNVEFVEKRMQNYAYLNAGMSLSFNGKQFVSKRGLYDLLYEETGDDNLYPLGYYKGEHSPNGQLEFAFTHTNNYGEEYFSFVNGQFTSDGGTHLSAFKEGFLKGIQTYFKKDYRSEDIREGTASAIAIKLKNPVFESQTKNKLGNSDIRAWVVQETRNAVEDWLHKNPEAGKKLEQKIISNESLRTELNAVKKEAREAAKKIALKIPKLKDCKYHLEDGKDGAESTIFITEGDSASGSIVSSRDVMTQAIFSLRGKVENMYGKKRAAIYKNEELYNMMMALGIENDVEGLRYAKIVLATDADFDGFHIRNLLLTFFLSFFEELVTAGRIYILETPLFRVRTKKETRYCYTEKERDEASAALGSQCEITRFKGLGEISPKEFGQFIGKDMRLVPVSINTLKAVPQVLTFYMGKNTPERRDYIMKNLIEDAG

SEQ ID NO: 96812 - protein, 411 aa, Unknown
  Obtained from environmental sample
  DOMAIN (34)...(407): Aminotransferase class I and II
  misc_feature (1)..(411): Xaa is any amino acid
MRKKLLSEGSKEFKYEIREIVKKANQLKALGLPIHWENIGDPIEKKCQLPEWIKDIMANLVRQNASYGYCPSKGILKTREFLCEKTNALGGPQITPDDILFFNGMGDGISTTYHLLDITSRVIGPSPAYSTHSSAEAAHANAEPITYRLDPSNHWYPDLEELENKVKYNPNIVGILIINPDNPTGMVYPLEHLKKMIQIAKKYKVFVVADEIYTKITYNGARSYALAEYIEDVPGIAMKGLSKEVPWPGSRCGWMEFYNKHKDPEFLAFCNALDNAKMTEVCSTTLPQLALPLILGDSRYEEHRKNLNERIGKRSALINKILSEVPELTFNPTYGAFYNSIIFKDGVLNDKQFLPIENPKIKAKVEEWCNGVSLDYRFVYYLLGATGICVVPISSFCSELMGFRITLWKKT

SEQ ID NO: 96813 - protein, 313 aa, Unknown
  Obtained from environmental sample
  DOMAIN (10)...(141): GTPase of unknown function
  misc_feature (1)..(313): Xaa is any amino acid
MLSSEISKRRTFAIVSHPDAGKTTLTEKFLWYGKVIREAGHVRAKANKSYTVSDWMKIEQQRGISVSSSVLNFPFEGCYFNLVDTPGHQDFCEDTYRALTAVDAALVLIDSVNGVERQTIKLMEVCRMRHTPIITFINKMDLDGRDVLELLDEIEKILQIQACPFTLPIGYGKLFKGIYSIADNTFHTFNKEEGKQEILQMSSADDPKLTELCGEEYIKEFKNRYDMVTQAMEPFNKEEYLAGKQCPVFFGSAVNNFGVRQLLNTFANIAPPPTPRESDVRIVMPTEDKFSAFVFKIQANMDPRHRDRTAFLR

SEQ ID NO: 96814 - protein, 135 aa, Unknown
  Obtained from environmental sample
  misc_feature (1)..(135): Xaa is any amino acid
MGEVVEFMVAPNLRKKFEELGFNFSQSNQKKEIVDKDNKISFEIDVFLENYSKAMLVEVKTTPTTENVKEHIKRLQKMRKFADLHGDKRTFMGAVAGVVITDNVKKYILKQGFFVIEPSGEGFNITSPKGQPREW

SEQ ID NO: 96815 - protein, 363 aa, Unknown
  Obtained from environmental sample
  DOMAIN (104)...(362): Domain of unknown function (DUF323)
  misc_feature (1)..(363): Xaa is any amino acid
VYAQAQKDYLLAVNPRPVTITGLSVADKQYDGTTEAEVIGTAVIDGLIVGDDVSVVEGTAAFADAALGHGKTVTFSGWALSGADAGNYILSAQPADVTADIREIVIDIVQIPAGAFMMGQTGVATPEHQVTLTSGFIMSKYLVTQEQYQAVMGTNPSNFTSAVAGESGTPGKLPVERVSWYDALVFCNKLSMKEGLSPAYSISGSTDPSDWGTVPTSSNSTWNAAVIVSGANGYRLPTEAQWEYAAKGGSAPGNYTYAGSNTVGNVAWNSGNSNSMTHEVGTKAANGLGLYDMNGNVWEWCWDWYGNYSSGAQTNPVGASSGTYRVLRGGSWYDNASYTRSVYRTYTYPYYRDSYVGFRLVRP

SEQ ID NO: 96816 - protein, 73 aa, Unknown
  Obtained from environmental sample
  misc_feature (1)..(73): Xaa is any amino acid
MVIKTVYETGKLLLEKDMTFDQLISRVATKGGITEEGTKIIETEMPKIVNELFEKTMKKRKMTTENAQRDFDL

SEQ ID NO: 96817 - protein, 78 aa, Unknown
  Obtained from environmental sample
  misc_feature (1)..(78): Xaa is any amino acid
SQIKYVNTFVKLPNRKCEFCKGQDGLKKNVYQTKQEATGIAHQIEKEQKLFLKAYQCPHGNGWHLAKADPGQWDDYLY

SEQ ID NO: 96818 - protein, 338 aa, Unknown
  Obtained from environmental sample
  misc_feature (1)..(338): Xaa is any amino acid
GSVNISSSSADSDGLYMAPILTPNPAAGYTFSHWLVDGVQVKDPTYSPANHSQIQAVFGRLWIVNDPSGSATTNGTLRYALNTANGIDDGDIIKINLPSPNRIELANALPEITKSITIEGNGVTLTKAASWTTIGEYSRLLIISNTAAVVKISGIWFKGGEVNGSSSNYTGGGAIRNHGDLTLESCIFSDNKFSGITSAFGGGAIHNGNTGITARLTVKGCTFYNNTATFPDAGQGGAIYNTVGILTLTGNLFYGNTAMNGGDTVYSTASGAVVTEYNVYDTATFVTVNSGTWNGSNQPGTPGTGDTQFIGISFANNTTPPFVNGTAAYSAATDLHRE

SEQ ID NO: 96819 - protein, 275 aa, Unknown
  Obtained from environmental sample
  misc_feature (1)..(275): Xaa is any amino acid
SNLTNLTTLILGNNIKSIGASAFSGCTKLTTLTVPDNVKTIGASAFSGCPRLQTASIGNGVDTVGVGAFRNCAGLTSVIIGNKVKSVGASAFSGCTGLASLTSLASDPPAVGVASGNGTFDGIDKTTCKLKVQQVDMGMYRNAAGWKDFTNIEAVQFPNVPVLDITGVPTSFKVGEVLTLTGTVTPTTATNKTIEWSVAGASISGTNFTGAVIEGGNKLSASAPGTVVVRAAIPSGAITGVDFERYFFITAEPDEDSAAVSVASRDRVIPSVKPA

SEQ ID NO: 96820 - protein, 564 aa, Unknown
  Obtained from environmental sample
  DOMAIN (1)...(564): AcrB/AcrD/AcrF family
  misc_feature (1)..(564): Xaa is any amino acid
IFLRNIKGTLIIGLARPISILLTLMCMAFFGFTLNLLTLTGLIMGLGMTVDGSIVILENIHSYRLRGAKPQIAAILGSREMLRAIIASAATTLCVFIPPIIYKNSLEMIGQFASDLIFTVVISLTCSLAVAVTLVPSLCGSILKLDTRKQKPLKIPPLRAIDNAFEGLLVAIENGYKRALGYCLSHRLLIVTLAVVLLLFSLLQFSSIGMNMFFRTRTDDNVNINVSMPLGTTIEETERVLFELEEVIKDEIEGYKSVILTARRSGSTQGSIQITLPEPARQIDTPDTIINKLTPYTNSIPGARVSFRAGRFVSSSSQVEIALSSRSYGAIIETADEILQIFERYLPEIENPIVNIEEGAPQLIVNIDRDRAAALGVSLSSIASEIRTAMDGSIAATMSLGDRLLNVRVVLRDEDRTGIPNLDAISVVSRNGSRISLSNVAEIVESRAPSSIRREKQERVIRITGGLAAGIAVTDMQKRLEATVKEYLVPREGVTIRFLGEASEIQSYYGRYVLIVATAIFLVFSVMASQFESFVDPFIIFFTIPMLFIGVIWIYKFSGEAMSM

SEQ ID NO: 96821 - protein, 114 aa, Unknown
  Obtained from environmental sample
  misc_feature (1)..(114): Xaa is any amino acid
MQTLPEYSYNLAIIDKQRILANTKSPKIVLAGGSNLAFGIDSESIQQRFNRPVVNMGLHADLGLGRILDNISPFLNSGDILLIAPEYSHFTSTWNGGRTAYELIFDARSLSDLG

SEQ ID NO: 96822 - protein, 410 aa, Unknown
  Obtained from environmental sample
  DOMAIN (266)...(347): Mur ligase family, glutamate ligase domain
  misc_feature (1)..(410): Xaa is any amino acid
MVIKNPGVAPDSPFLQTARLASRRIETDISLFLDASPARLTAVTGSKGKSTTASAQHWVLEHSGEKKTGGKAYLGGNITVSPLTFLDDLREDDDVVLELSSWQLGDLRVRRKADYKASENHANSMLLRPKVAVLTAIMPDHLDRYSSMEAYVDDKRVIYQGQDSADFTVAANDEWGRGFLAESRAFPLMYSNVPLPEGISGGWLEGSDSPGYARLSDGKRVELVPARPLVPGRHQKQNLLAAGLALLGLGLPAEIIRKGLETFPGVEHRLELFYQAGGIKFYNDSAATIPEAAAAALEALGHTDGGRLILVTGGTDKNLDFSPLVQAAGQAKAIILLAGTGSEKLCDQFDDADIAYRGPFDDLDKAVAAALETATPGDRVALSPGCASFGMFLNEFDRGRKWKDAVRRLA

SEQ ID NO: 96823 - protein, 295 aa, Unknown
  Obtained from environmental sample
  DOMAIN (38)...(107): GHMP kinases N terminal domain
  misc_feature (1)..(295): Xaa is any amino acid
VDISDLSVRQKENGYTEALVRGIASEFVARKLPLRGFTANADNMVLCGSGLSSSAVVEILIAKIFDSLYGDGKTSALELAKIGQKAENVYFGKPCGLMDQTACATGGAVAIDFEEPDNPKVKGMGFDPASAGFALCIVNTKGSHADLTADYAAIPAEMKAVASFYGKHVLRELDEETFFSRLPELRNAVGDRAILRTMHFFSENRRVDAMLAALHGKAIDTFLALVRESGDSSWELLQNVYSYKKIIEQDVSLALALTKNFLASGKGACRVHGGGFAGTIHAYIPMERLIDYRNL

SEQ ID NO: 96824 - protein, 260 aa, Unknown
  Obtained from environmental sample
  misc_feature (1)..(260): Xaa is any amino acid
IARNPAVARWASIMADDSCISIRRSEFTEDEAALLGPRNVMSILFVPVFTEGVFWGVVTFQDNTRERDFDEDCIAMLRSTARICVSTIIRAEKTRSTEQALKVISRHETIKDILNKVSVIFLSRNEEKVEDTMAAGVRLIADMAGIDRLILCRNHIATNSLLVSEVYRWDRASGGSTELTAALIGIPYAHLIPDWEELLSDGKHINSPSRLMSENAAKTLLSFGVLTAAVIPIHINNAFWGFALLGDTKNERYFEDDIIK

SEQ ID NO: 96825 - protein, 124 aa, Unknown
  Obtained from environmental sample
  DOMAIN (18)...(124): GGDEF domain
  misc_feature (1)..(124): Xaa is any amino acid
MISLNDALSDVLFANAFIRAEVDYDALTGIYNRRFFENNMKRIISFLSRSESLLSILMIDIDFFKRYNDTYGHLEGDKCLKVIAQTLSHSITRANDFVARYGGEEFIVVLPNTDEQGVRLVADK

SEQ ID NO: 96826 - protein, 71 aa, Unknown
  Obtained from environmental sample
  misc_feature (1)..(71): Xaa is any amino acid
ITRQTAVLAFDFGDGFSNMIFPTNALLLIALSFSVVGYTKWMRWTWKLQLAILVITSAFLAFAVKIGFGPF

SEQ ID NO: 96827 - protein, 453 aa, Unknown
  Obtained from environmental sample
  DOMAIN (118)...(199): Cache domain
  misc_feature (1)..(453): Xaa is any amino acid
GYIGSRITSNVITSAGITDGLNAAQSLSEYIGLVISTARLDLSAIVLHPSVKPIILGQAPPDELEEYMTALIRRYPIYNNILALNRSGIVVAGTSGSTGSNNSDREYFKAGMRGENYISEVEVSRSTGRLVSFISVPVFDGEKVIGVIMAGVLIHEINRRYVSPVELLGGYGYAMIVNSAGTIIGHKNDDLLGEKIPENLQKRIKTLGMGRVAFQDVVDGVPSMLFIERHNPTDWFPIVIVSLSDFFTSSNFVTRAIIILAVDVILLLTFIVLFTVNGVTKALSTTILYAETVSRGNLEAELKVRRSDEIGVLAVSLHDMVASLKHMISVSMQKTHEAEEATKTIIEGINYASKIQRDLLPRNYAFDKAFQDYCIIWKPRDIVGGDIFWLKNFERGTILCVCDCTGHGTSGAMLTMLVVSALESCIWPSNCHDTAGIIWQIEQKLVSNFSVNA

SEQ ID NO: 96828 - protein, 271 aa, Unknown
  Obtained from environmental sample
  misc_feature (1)..(271): Xaa is any amino acid
TWSVTVPPVFDVDPTESGIITTGVDGTPNGAGTHLVGSGSSITFADKAYHTANPASWTGGTNRYEATVTVNAVSTAGCDANKTFSLEVWQAPVMGSLANIVACSDETVSGAVTLSITNGATLGSYSWNADATVGLPVGNKYTDAGWALPTYSTSLPDFTTTTVTTETTVTANVFATTDATTAGGCNSESVPFTITVRPKPEITGTYSDHTICSDVLVPVADFAFQPATVSGGTVNAVAHWTLDTDTGGEISQEAAHAVPVTNGTGNIGSFK

SEQ ID NO: 96829 - protein, 266 aa, Unknown
  Obtained from environmental sample
  misc_feature (1)..(266): Xaa is any amino acid
EYEGCSGTTPELTTITINPTPILTFTAGADQEICSGAEFNTVSFSSGGVGATFRWEIDAPPSIGTDPGRLTTGRFTTAERTGTGTSISFAGMTALNTANVNSWGTPTPPAPDVYTATVTVTATSTAAGACPKTETTTLSVKQAPVLVVPSDLTLCADEVINGVSDLSPRITFSVSNDATLKTAAYHWSHSGESVWKTIPDLTGKPALSVTSDDVSATVAKMPPFTTENTTAQNRNAKITVTAYHTNDCEATRDFNITVRPILTVNA

SEQ ID NO: 96830 - protein, 410 aa, Unknown
  Obtained from environmental sample
  DOMAIN (41)...(239): Outer membrane efflux protein
  misc_feature (1)..(410): Xaa is any amino acid
MNLKYRYAGSLQIPLFLAIFLLLCAYYSHAQETAHPMRLSPDEAVNLAIKNNLSLETSRSNSATKKRLSDLSWNQFIPSVDVGGAILRLNEAPQGMTLPLPPAMGGPITMGGGSQWRAAGSVSASLNFNYAMIEEMNRLRLDYEKGLVSFEKAKAQLERDVRKAYHNMLLLQENINLLRGSFENAGRQVQMAQANYNAGLAPELTFLQAQVARENLRPVIDQAENGLKLSMAQFAMFLGLDYNTPFDLEPVKENTNFISIDVAQMISKAASGKPDIQELRQDILTLNSVKKSTWYRLYTPTLSLSWSADPTFQKDPWKDSWFGDKDNWKQQSGSFRISVGFRLNGLIPYTSEHQGLKTLDDQISTITLGLTQMIRGTEIEIYNTVLALERARISAQAQAQTVRLAEQSYR

SEQ ID NO: 96831 - protein, 84 aa, Unknown
  Obtained from environmental sample
  misc_feature (1)..(84): Xaa is any amino acid
MRKRKIASAIGYSPEDPAPVLLASGRDREAEHIIAVAQQAGVAIVEDEALAALLDSSAIPGDFIPPWCWEAAAKILVFVTKAQK

SEQ ID NO: 96832 - protein, 117 aa, Unknown
  Obtained from environmental sample
  DOMAIN (9)...(102): Uncharacterised protein family UPF0102
  misc_feature (1)..(117): Xaa is any amino acid
MHKAGLGKEGENRAVQALEAGGMSIIARNFRSRKGEIDIIALDGETLVFVEVKAWSAFGIENLTYSLSPKKQNRIIETAKYFLSVYRQYYGRATRFDVVFVGKEAVTHLASAFMEHV

SEQ ID NO: 96833 - protein, 190 aa, Unknown
  Obtained from environmental sample
  DOMAIN (54)...(168): Acetyltransferase (GNAT) family
  misc_feature (1)..(190): Xaa is any amino acid
MEIKRAIDLGDNIRERLSEVYVNAFYDDVLKYFSKNKAKLKKVFACGFLLEYFYVAVIDNEIVGMAACMGKDQYCFKYNIKTLIKYFGLFGGLIFNYGLNQFVKGFPKLDEKTAIIEYVATDTKHLRKGIASTLVNSLFTLSEYENYVLEVIGTNKKAIKFYNKLGFKIAYIKPYFPSVYFCLKYTKKEK

SEQ ID NO: 96834 - protein, 179 aa, Unknown
  Obtained from environmental sample
  misc_feature (1)..(179): Xaa is any amino acid
MNTVIARNRPKEKKNNHPCFDHGAHGQYGRIHLPVSVKCNIKCRFCERNINSDEMRPGVAAQILKPEQAVETLTAALELCPELTVVGIAGPGDALADNSAIETFRLVGGHFPQLSKCLSTNGLGLPDKVRELSALGLKHLTVTVNAVDPKIGEEIISHIILDGEIIMGEKAAQILLSRQ

SEQ ID NO: 96835 - protein, 106 aa, Unknown
  Obtained from environmental sample
  misc_feature (1)..(106): Xaa is any amino acid
TRFLRRSRDIIDDFSAKTKTQIIQYVPRSITVTQSELRGKTTIEAAPESDQAKVYTQLAERIASHEESKTPSPLELDELRNWAAGWSDKLLELETGVVVGGEKAGI

SEQ ID NO: 96836 - protein, 639 aa, Unknown
  Obtained from environmental sample
  DOMAIN (427)...(637): Methyl-accepting chemotaxis protein (MCP) signaling domain
  misc_feature (1)..(639): Xaa is any amino acid
MENLAVQRAAYWQGREDGLFRIARTLANIFGDFEDDPAERRRDMYDSMMQSITRAETTIFQVYTVWKPNAVDGMDSRYIGRPGSTETGQYAAAFRMENGLANITTTTDVADAMAYLTGPDARKDRYVHPVPRNIDGKDTWYFRIMVPIVNRRTSEIVGGVGLLCVIDAIQPTVVNTIKTREDIAAAVIYSSNGFIMGSYMPERVGKMMKDVDVIYGEHMDAAFNAVQKGEDFSCSSYSPALKSDVEITVASFPMGSSGKSWSVMIAATRSYILREVDEMTKFTIIIALIAIIIAAVIVYIVLHTTTQPIVKVADTLKDISEGEGDLTKSINVSSKDEVGDLALYFNKTLQKIKNLVLIIKNEAASLSSVGATLASNMTETAAAINEITANIQSIKARVINQSASVTETNATMEQVITNINKLNDQVENQSNNISQASSAIEQMVANIGSVTNTLVNNAENVKTLEEASEIGHHGLEEMAADIKEIAKESESLLKINSVMKDIASQTNLLSMNAAIEAAHAGNAGKGFAVVADEIRKLAESSGEQSKIIGDVLKKIKNAIDKLSGSTENVLTEFNAIDSGVKTVALQEDNIRNAMEEQGEGSKQILTGVSNVNEITRQVKGGSTQMLEGSREVINESHNL

SEQ ID NO: 96837 - protein, 713 aa, Unknown
  Obtained from environmental sample
  DOMAIN (10)...(137): TIR domain
  misc_feature (1)..(713): Xaa is any amino acid
MTTINKRYDIFISYAHKDNPPLESPITKLVDLLKETYSDRYNGEEIEVFFDEDGLKAGDLWENKLLESLRQSTVMLVILSSEYYNSEYCYKEWRHFQDVEIHYSLPGTGIIPNKYGDDHKPDITSPSVNIWVQGRIQDREDWIEDLSKRQYFDISDWQADRDAQTFKQRLMDVCEQIYNRKRQLKERKKITSNIRPHNANFTGRARQIRDVHDALTKSSIGVITAIKGIGGIGKSTIAYEYAHAYIDYYKGGTFNFNAEGCDDFRIALASIAAVSGITFTEEERKNLDLQCDRVWYKLCQSHPTLLILDNVDKDAILNRITDYAPDRHKLHILVTSRQGFVTSKSIKEFHIPPLENSLDLLHKLFQAKNEDEWKAADSITRRLGGHPLAITMIGTFLSNMGDVTYAKQLQWLEDEGIGTLDEISNEIRLDDYAHPVPTNIFEQVFSLLEPEGKPTAEMRALEYAALLPPDSIPFPWIYELVKEEFPDIAPTVKRPIDPWKKILQKLERFQLLLPSVDEPKICTMHRLIQDAIRQRHNRNKQYCERLIEHAYSRAVFLDEILGRDNIYPANIPPEYLYEKKVPSLGNLLEQVDFIQWAYKIAFFELVLAEMLNKTDFLAYEDVKKRCEGALEILRKLTGITPEADLPYLAEKLNNFADLIETWGLSEIATHAYIEVLEVKRKLAKTNPEAYLPDLAMSLNNFASLQQFTNPLGT

SEQ ID NO: 96838 - protein, 449 aa, Unknown
  Obtained from environmental sample
  DOMAIN (133)...(444): Poxvirus D5 protein-like
  misc_feature (1)..(449): Xaa is any amino acid
MENQLGDESVYLRIMELENGLLQHTDTTNAYRLLVEHGKDIRYNDAWKKWVVWNGKYWEMDGGYLIHDKGLQIIRGIYKELLKTADYRERIDIEKHAMQSESARRRKALVEVASWIPELNVKTDDLDKDPWLFNVRNGTIDLRTGEIKEHNQSDLITRIANVDYDPDASCPIWKQFIMEIMNYNTELIHFIQNAAGWAITGDTSEQTMFILFGTGANGKSTFLNTIMNLLGDYAIATPTETFMRKIGDYISNDIARLRGTRFVTTTEAEHGRRLSEPLIKQITGNDKMTARFLYGEFFNFIPTFKIFMATNHKPVIKGTDHGIWRRIKLVPFITRIEEDKQDKHLEQKLMEESSGILNWLIEGAMRWCAEGLKTPSVIIRATDEYRGEMDVIGNFIKERCVQGADYSVKARELFKCYQDWCDDHNENTVSERFFGLRLKEMGLEQKASD

SEQ ID NO: 96839 - protein, 500 aa, Unknown
  Obtained from environmental sample
  misc_feature (1)..(500): Xaa is any amino acid
VIRELIIERPYVMETVTTTGVVDKDSESEGVVIPSFADNGVGSLSVTLDATRLSLLDSAVTYLFRYPYGCMEQRSAAIMPLVIFGEYLDALGLRSEVANPRQVVENELKSWAKVQLSNGGFPYWPSGTRADFYVSLRIAHIIAIAKSKKMNVPSSLNIAELNSYLGREYQELQKWRNDSSSYYYQSYLQSYMLYVQSLLGEKVDPSRLAEILSRDNVDPSVLAFVGMTYRALRQNTDAANTAQRLRNLVRMTARGADITDPLEENRFNYYGGMVEQLALTLQFFVDQYPGDDINTRLLFSLLESKRSGRGYWESTAVTIRVLSAVDALIRAENLTNLDVNGTVTLAGMELLKGAFKGLGAKPVTETFDFTGPVLSGLPRDSMQSLNFTRRGKGNIYYTVSLRYAIPFELQSFRDEGIGVFMSLYDINTNEEIKGTALQNGKTYRARVRVSTNRDRTYLALRVPVPSGAEILDATFVTTASYGDKGGISENGQSPWMGSWL

SEQ ID NO: 96840 - protein, 494 aa, Unknown
  Obtained from environmental sample
  DOMAIN (1)...(283): tRNA synthetases class I (I, L, M and V)
  misc_feature (1)..(494): Xaa is any amino acid
DYQGVFVKDADSAIMARLKAEKKLIKRDQILHAYPHCWRCESPLIYRAISSWFVSIEKIKQDMIEANNQIHWVPDHIKTGRFGKWLEGAREWAISRNRYWGNPLPIWKCTDCGKTVCVGSRAELKEYSGAATIDDLHKHFVDEITFPCSKAPGEKKCSGTMKRISEVLDCWFESGSMTYAQNHYPFENKEFFENHFPADFISESLDQTRGWFYTLTILAAALFKRPAFKNCIVSGIVLASDGRKMSKMLRNYTDPAELMDAYGADALRLFLVHSALLKAEDLRFSDEGVKDVLKSIILPLWNAYSFFVTYANIDKITPTGAPENPSNPLDKWILSVAEGLVEKCAAAMDVYDLSKAIDPILEFIDLLNNWYIRRSRRRFWKNAGPDVASDTDKVEAYGTLYAVLKTLVQVASPFMPFTTDAIWQNIRSTSDPESVHLSDFPAARNNRRDADLEFRMAAVQHAVSMGRALRSQYNIKVRQPLKSVEMVTKNPGRK

SEQ ID NO: 96841 - protein, 272 aa, Unknown
  Obtained from environmental sample
  DOMAIN (49)...(272): Type II/IV secretion system protein
  misc_feature (1)..(272): Xaa is any amino acid
ERGSASLGSVPDDALNLKAMEEELVDLGAEFETIDEEQSVSVESLIKGSENAPVVKLVNMVLVDAIRKGASDIHVEPYEKHMRIRYRIDGILQEVMKPNIKLKDPIASRIKILAKLNIAEKRLPQDGRIKLRVNLSSGTKVVDFRVSSIPTLFGEKIVLRLLDSDALMLDLTKLGFERESLAAWNRQIAKPYGMVLVTGPTGSGKTNTLYSSMASLNTEDVNILTAEDPVEYNFAGINQVQMKEQIGLNFAAALRSLLRQDPNIIMVGEIRD

SEQ ID NO: 96842 - protein, 79 aa, Unknown
  Obtained from environmental sample
  misc_feature (1)..(79): Xaa is any amino acid
MPAFAWKGKNRAGDSQEGVIVAETKDIATKMLQRNGVTVATIHTQASFGGRLFGKVKQKTLAIFTRQFSVMIDRGPAPG

SEQ ID NO: 96843 - protein, 365 aa, Unknown
  Obtained from environmental sample
  DOMAIN (10)...(317): Phosphofructokinase
  misc_feature (1)..(365): Xaa is any amino acid
MAGKRSSVTRTIGILTAGGDCPGLNAAIRGVCRAAYDRYGMTIIGISDGFRGLIGESVRTLRPQDFNGILTRGGTILGASREKPFKSAIGEKDDIEGDKVAAAIKTYQKLGLDCLVVLGGNGTNTTGYRFAQEGLNVIGLPKTIDNDIVGTDETFGFNSALSICTEAIDRLHTTAQSHSRVIVIEVMGHKAGWLALYAGVAGGGDIILIPEIPYDKKIIGDHLKDRASSGKTFSIVVVAEGALSIEEAKMEKRERKTYRAENGPSVAFRVAREIVEETGMETRSTVLGYVQRGGIPSASDRVLATSLGTAAADLLAKGEYGRMVALIGNDIGSVDLSIPEGKVKTVPQDHYMIDSAIAVGTCMGN

SEQ ID NO: 96844 - protein, 113 aa, Unknown
  Obtained from environmental sample
  misc_feature (1)..(113): Xaa is any amino acid
DCEEFKPLADSGLFQMQTIPPYATNNAHTFYLVCNSQSERAGLIEHLKNNGIGAAFHYQSLHKSDYYKDRHDGRELKNCDRYSDCLVRLPLYYGIGRDDIKRVRGAVAGYYRI

SEQ ID NO: 96845 - protein, 339 aa, Unknown
  Obtained from environmental sample
  DOMAIN (69)...(193): PAP2 superfamily
  misc_feature (1)..(339): Xaa is any amino acid
METSYIQMFAMEPQSIPGIFLWGIEIIKAIQRLKSPALTAIVIFITDLGTDLFYLPVILFLFWWIDEKKGFRLGILMLLSAWINSFLKDAFKQPRPFNFDQSLGLAYEPTYGAPSGHAQFSLCFWVPVAAWFAEKKSGMKRFLVWAAAIFFILLIGFTRLYLGVHFPTDLLAGWIIGAIILFLMYVLNSLLIKHLSGQTRAQNILAAIAALVMISIYPGDRSLPAVFLGFCLGYNIMKKNFPFSPYSEIKEKKLSVMLLRCITGFAGLVVIYFVLRLLFPGEGSLFNYVSLWGEASPFYELGRFIRYGVVGLWASAGAPMIFQRMGLSFAASKSEEPKK

SEQ ID NO: 96846 - protein, 348 aa, Unknown
  Obtained from environmental sample
  DOMAIN (68)...(347): Glycosyl hydrolase family 10
  misc_feature (1)..(348): Xaa is any amino acid
STICVIAFVAIIGFSFPACGGDDGNSNNSGNGGNNNGGNGGNNNGNNSGGNNNGNNNGNGTNPNPPPATPLHSKWPFYVGAAAPAGAFNTSDGQYSLLGHFNVLVAENDMKPESVMPSGWQNSASSPAYNASQSYRWTEADKLVNYAQANNTKIRGHVLFWHEQTPAVFFKTGNLTSAYVSKEVFYTRMEQHVKTVFQKYGNKVLWWDVANETVGDDGNPRVTGGANVAGSDGKSGFTAVMEASGLTGDNRYEWIVNAFKYARKYADENGGKNVKLFLTEYDIEKSYASTKKDGFLRLLDYLIKNGTPIDGVGIQGHTRIQESQGYVTGLGSLIDQIATRKNPVTEKI

SEQ ID NO: 96847 - protein, 70 aa, Unknown
  Obtained from environmental sample
  DOMAIN (5)...(69): Heavy-metal-associated domain
  misc_feature (1)..(70): Xaa is any amino acid
MKTEDFSLTGLHCPSCARLVQEDASKLDGVESALVDFAAKKLRLLYDEQTFQFARLESAITAAGFGVSRE

SEQ ID NO: 96848 - protein, 106 aa, Unknown
  Obtained from environmental sample
  misc_feature (1)..(106): Xaa is any amino acid
VQEEDFLITGMHCASCARLVERRTLVVSGVAEAFVNIATDTLRLRHDPQKFRYEQLEAAILGAGFGIARIPAAGTLMPGEAAPYGGFPIRLAFAAAFSLPPFYCAM

SEQ ID NO: 96849 - protein, 282 aa, Unknown
  Obtained from environmental sample
  misc_feature (1)..(282): Xaa is any amino acid
VNFAQERITTNPVNGAILSNSVHNNKRVEVTYTYNNTPIRTYTANLTVQKKIIPLIEISGKTLELDSPDGKKFTYVAKCGEENVDIDITRQDADVFVDGQPVQGMFNAPLSYGDNPLEIMVDVYSPLNPSNILVHEDYTLTVKRPFPAEQMIKVRWDNTLTVIDNLNNPYDFASYKWYRNGREIGFGRSWSAGTNGEKLNPKDSYYVEGTTESGKTIRSCEVELSNVAMRGYGISLKNNSAYSNIGIEIFAPEAVSEMEISVHDVAGKQVFKQKGNLAFNWN

SEQ ID NO: 96850 - protein, 211 aa, Unknown
  Obtained from environmental sample
  misc_feature (1)..(211): Xaa is any amino acid
MNGILVLLLLLLTATLPAIVVFFWLRSGKSPVTLPLFLLSLAMGIISFVVAAIIQMFFPPYRRQEFWPVFFDIFIRIALIEEASRVITLIPLLKTGKNRQSDIAFGASIGLIAGLGFAAIESAYHGIANINITLLRIFTAVPLHAACGIRTGSSVFIASKHQVKAFFLFLSSVFIHGAYNLMIVSPAIPSFLAILTAIIAFFASIYYLSDM

SEQ ID NO: 96851 - protein, 296 aa, Unknown
  Obtained from environmental sample
  misc_feature (1)..(296): Xaa is any amino acid
AAAAPAAAAPAAAAPAAAAPKTTPAATPVPAATPAPAAAPKATPAPAATPAAAAPAPAATTAPVAAPATAQAAQAQAAAPTDTNVVKPKPERKKKKRVEFATVDFPADFEIQARKVMPVSSKDWADDNLDTWWGRANLKVETQSEYFKGRVHLRMYPGEFSERIPTINGNSSISRDRFEIYEAWAWHRGDYFNFKIGRWSNTTRFGSETFGGYIDAKKDINWDTATALNGLSKNNVRREAGFMSTYYPENSVQFGFHNFAENISLDLSLVSMDDHLNKGDLRVNLRFEDLASVNGL

SEQ ID NO: 96852 - protein, 191 aa, Unknown
  Obtained from environmental sample
  misc_feature (1)..(191): Xaa is any amino acid
MTVCEALAQGGAALKTAGIDTSSLDASVLLANILNISRSSLIAKGTEILKEENLNKFNLFLDRRIKGECTAYITGNKEFFGLNFRVNANVLVPRPDTEILVEAALEKLKTVNMDNGTKDKIHVLDLCTGCGTVAVSIKHEMPEIKVWAADLSAQALETAKENADRLIGGGSICFFHGDLYDALPALTLHSP

SEQ ID NO: 96853 - protein, 68 aa, Unknown
  Obtained from environmental sample
  misc_feature (1)..(68): Xaa is any amino acid
MAKPHRGKGIRDQFAHGRGECPVCKRRNVKVLYEMDGGEKKLKICKVCKAAIKHGKKSLPVTAKAAEA

SEQ ID NO: 96854 - protein, 346 aa, Unknown
  Obtained from environmental sample
  DOMAIN (37)...(310): 7TM-HD extracellular
  misc_feature (1)..(346): Xaa is any amino acid
MNKRFFHFIFCSLIFTVSAIILFPTEDIAHKSELPVLGQSAPRSIVAQISFDVLKNPQELEDEMKRAKDKVQPVFEYSEEATKKLSENFDLLISQIETYGKLQAEISSAAAVEQRKIAVTGDLYQSIVRKISSAALNQLVHNTTAIDTLKNIFKTMLSQGISNTLIAERAKDVTMFKESRNLNSVNYILYSKQEVLLIKNGKDSIVESSSIRLKEILIDAVLDKYKNAFNSNPGITSAFYEILYVFVAPNIFYLDKETETRKAVAAAQVNPSKGMIPRGMEIISQGSIVTKETLEKIKAMQNAIQKDSVSFFYTATYGQYILYFMLISTLSFYLWYFRLNKKVRPL

SEQ ID NO: 96855 - protein, 100 aa, Unknown
  Obtained from environmental sample
  misc_feature (1)..(100): Xaa is any amino acid
RFFYEILEYYRDRAGENISNSIYEKIIKEIELLEIEKIKTKQTQELKDIGIFDIYELTVKPWKIYYKLSANNKKAYILFVLDGRRNLEEILMSKIIDNKV

SEQ ID NO: 96856 - protein, 136 aa, Unknown
  Obtained from environmental sample
  DOMAIN (11)...(83): Ribosomal protein L6
  misc_feature (1)..(136): Xaa is any amino acid
MSRIGKLPIAIPPKVTVAVQPDNTVVVKGPLGELSQKVDVDITVKQEGGQLLVTRPTNQKRHRSLHGLYRALLANMVTGVSEGFTLKQEFVGVGYRAEAKGQILEMSLGFSHDVMFALPKEIKVTTVTEKRANSIL

SEQ ID NO: 96857 - protein, 277 aa, Unknown
  Obtained from environmental sample
  misc_feature (1)..(277): Xaa is any amino acid
GFDYLQKVKPCYDYVMIDEVQDMTNIQLKCALASLKSPSHFILTGDSNQIVHPNFFSWSKIKTYFYHSGEGKEKDNPIKILRTNYRNSLNVVELSNNLLKIKNTRFGSIDRESNYLVDTVSTDKGEVALYSSDEKKKHELNRRTQNSAKYAVIVPSNSYKVQAARYFKTPLIFSIHEAKGLEYENVILTDFISSHEAEFREITSGVSAEDLQQDELRYNRAGDKHDKDAEVYKFYINSFYVAITRAIKNVYIFEQLINHPMLKLLQMQENKADIQVR

SEQ ID NO: 96858 - protein, 410 aa, Unknown
  Obtained from environmental sample
  DOMAIN (181)...(360): L-fucose isomerase, second N-terminal domain
  misc_feature (1)..(410): Xaa is any amino acid
MAINRFKGEYPKIGIRPTIDGRQGALKVRESLELQTMNIAKAAKALLEKNLRYSNGSPVQVVIADTTIGRVAEAAACAAKFRREGVDITLTVTPCWCYGSETMDMEPSTIKGVWGFNGTERPGAVYLASVLAGHAQKGLPAFGIYGRNVQDMSDTEIPADVQEKLLRFGRAALAAATMRGKSYLQIGSICMGIAGSIVNPEFFEEYLGMRVESVDEVEIIRRMEKGIYNEQEFKKALAWTKQYCKEGFDKNPAELQRSRQEQDAAWEFVVKMMCIIKDLFNGNPNLPAGCEEERLGHNAIAGGFQGQRQWTDFYPNCDFPESMMCSSFDWEGAREPYILATENDTLNGVGMLFGKLLTGTAQIFADVRTYWSPDAVKRVTGYELTGKAKEAGGFIHLINSGAACVDASRE

SEQ ID NO: 96859 - protein, 986 aa, Unknown
  Obtained from environmental sample
  DOMAIN (319)...(737): Alpha amylase, catalytic domain
  misc_feature (1)..(986): Xaa is any amino acid
MVKFQLKLDKLEKKPSIWAKNRKVRMEFHIDRDMRHKYGLKDSLFSLTGNVFLADMKQTRELAAKFNAKQDPNHPERYIKAGHLYAMGLIDEILHYVIALYREEVQPDAFETALDRLETNIGGKQTDALLTSFSEQFPPRPVYKGEKKVPEYLKSKEDGESCRALSVEETMMLSLANLNPAFNPFKFLFDDKDLSKKTVYPSAIEELKEHFKTLPPFGPDGMNLWDLLRSPALASPDSLFGQLEYIRKHWGAFLSKYMARLLMSLDVMNEEDKPSFMGPGPSEVLTFAGMDEYERFSPDQEWMPNTVLMAKSTLVWMFQISQKYGREVTQLDQIPDEELDELARRGFTGLWLIGLWERSKASRTIKQWMGNPEAAASAYSLYDYDIAGELGGWGALANLRERCMKRGIRLGSDMVPNHTGLDSRWMIEHPDRFLQLPYPPFPTYNYNCGNLSGRDDITVQIEEHYFSHSDAAVVFKRIDNNTGHTRYIYHGNDGTSMPWNDTAQIDFLNPEAREAVIRTIIGVCQQFSIVRFDAAMTLAKRHIQRLWFPVPGTGGAIASRAEHSISNDEFNRRIPNEFWREVVDRCAAEAPHTLLLAEAFWMMEGYFVRTLGMHRVYNSAFMNMLKNEDNAKYRATIKNTMEFDPEILKRFVNFMNNPDEETAVAQFGKGDKYFGICTLLVTMPGLPMFGHGQIEGFEEKYGMEYRRAYRDEEPDGYLVDRHEREIFPLMKRRALFSGSSGFRFYDLYTEGGAVNENVFAYSNRVWLHEKIERALIFYNNSYYETSGWINVSDPAIPQGDGSKKRDNLGSALALNQGERFFTLFRDQRSNLWYIRSSKAIHENGFFVALKGYEAQVFIDIHEIEDDNRGRWARLHHDLQGRPVSDPHSAINEIYLGDLYYRFTKLLKPEIVNQLHDFFVSGVTKDKQLSFIESIKETAETYFATVIHFIGGADGKFDSWKAPDLEYELQAVSKEQLWQEFKEYVER

SEQ ID NO: 96860 - protein, 253 aa, Unknown
  Obtained from environmental sample
  misc_feature (1)..(253): Xaa is any amino acid
MKLDPILSKAARLARSKKYELALKVLKDEEDRYLGSFKYYYLYGVISLYSGAFVDALKSFNQARNIKMKDPNLLLGMAVLYLKRMNTVQAVDYYLDVQEMDPKNKIAIRALAVIRKNSDSQALSEWLTPERLVKLFPPIPFPGVNKKAVVFSSLILAAALVLFFGISYKIRTMPSPRPSAQFMLSPEERSAPLENDGPYMKTLKKDEALSYYDKALSLFKEYRDEAAKIYLNTILVSNASESIKNKARLFSHT

SEQ ID NO: 96861 - protein, 233 aa, Unknown
  Obtained from environmental sample
  misc_feature (1)..(233): Xaa is any amino acid
MKMNRKLFIALATLLLFGMLAGCRKKEDPAIAELKAQMQAAEQKQEVATTATTQTEAEPDTSTETPTTTEDRFEMMGTVLTGYSGTNENITIPDSVTSIGESAFLGCTSLTSVTIPNSVTNIGDFAFYGCTSLTSVTIPNSVTSIGDCIFPDCTNLTSVIIPSSVTGIGRNAFSGCTGLTSVTFAGTIPVNNFNTYEPFPGDLRAKFYATNSTNGTPGTYTRQRDDGTWTRQP

SEQ ID NO: 96862 - protein, 134 aa, Unknown
  Obtained from environmental sample
  misc_feature (1)..(134): Xaa is any amino acid
KSTPVGHIANAVCVGIENVKVLYQFATGKITGEEALDKAGDATCSLVGSLALGAKGAGIGAAIGSALGPVGTVIGGAVGGIVGGIAGSTVGHAIWEGGKAIVKTVGKVIRGIGEGIKNVASAVWGGIKSLFSWW

SEQ ID NO: 96863 - protein, 278 aa, Unknown
  Obtained from environmental sample
  DOMAIN (37)...(232): von Willebrand factor type A domain
  misc_feature (1)..(278): Xaa is any amino acid
MKFLHALEMAGIFLLFAAAAGPHFVFTEMVWLNRGADIIFVMDISPSMAGMDMGGRTRFDAARSLMIDFADRRQQDAIGFIALGQDAALLVPLTTDREVLYSRLNSLMIGELGDGTALGTGLALAAFHISKSDAPRRAVVLITDGENNAGTIHPESAAAMLGEMGVSLWVVGVGSSGEVPVNYVDPITKMRRTGTFESRYNTEDLKSIADKAHGQWVHAPQAEALAAAFSQLDQREMIIRRSIPMRREEPLYVVFVIAAAALLWGVRFVRRYVLGALL

SEQ ID NO: 96864 - protein, 249 aa, Unknown
  Obtained from environmental sample
  misc_feature (1)..(249): Xaa is any amino acid
VPQTIFVGDSGRLVVPLGRAFARITPFILDAPDKLPETPELLIRRLELERRSGATRLLIDFIPYAAGVLSLPDLEILSPGEGTEPLVLSGLEVQVASILNPSQMTLSGPASPITAPGTSFLIYGTIIIFILLLCLGIGISLWGRRHFRELWELFRRRRLINAMSKFLRCLRQECSLEKEGDPNYYLTLLSKEFREFLSLFSGINCRSLTPGEFLELPLSQTALTLGPVYLCWLFQNWETLRFSGQRMEM

SEQ ID NO: 96865 - protein, 277 aa, Unknown
  Obtained from environmental sample
  DOMAIN (67)...(137): S1 RNA binding domain
  misc_feature (1)..(277): Xaa is any amino acid
NDKDVYVGIGYKSDGAVATNEFRDLNEHKVGDEIEVFVEKLEDSDGNLVLSKSRADFLRVWDRINEAHDNKEIIQGKVMRRVKGGLAVDLFGVDAFLPGSQIDLRQIPDLDVIMGQVFDLRVIKVNKIRRNIVVSRRIILEEERDKLRENTISKIEKGQVVKGIVKNITEFGVFIDLGGVDGLLHITDMSWGRVNDPKDVLSVNQEIDVMVLDFNDDKDRISLGLKQLHEHPWKDVETKYPEGTKVTGKIVSITEYGAFMELEKGIEGLIHISEMSW

SEQ ID NO: 96866 - protein, 200 aa, Unknown
  Obtained from environmental sample
  DOMAIN (38)...(200): ABC transporter
  misc_feature (1)..(200): Xaa is any amino acid
MLELKNICVDFALKTSQFSAKKQILRAVDNVSLTIRDNEVLGLVGESGCGKTSLGKTAVRLIEPSGGQIILDGIDITNMNFSQLKKYRSKMQIIFQDPISSLNPRQTIFNVLEEPLKIHTNLDKSGRKAEIEKLIDRVGIAKNALNRYPHQFSGGQCQRIAIARALSVKPKLIVADEPVSSLDVSIQAQILNLMQDLKNE

SEQ ID NO: 96867 - protein, 456 aa, Unknown
  Obtained from environmental sample
  DOMAIN (141)...(322): Radical SAM superfamily
  misc_feature (1)..(456): Xaa is any amino acid
MRYFLDPFGCVKNQVDAENMMAHLNKEGWESVSEAEQADLIIVNSCGFIESAKRESINAVFEWRKLYPGKKILLAGCLAQRYAKELGESMPEIDGFFGVENLAQITQIAANIVKGKAKLSHNAVLPLGERPLLSLPGSAYVKISEGCNNRCSYCAIPLIRGGLVSRTIPDILKECGALLDRGIRELCIIGQDIGAFGTDAAKNAAGANAAAKLPQLLEAISSLKVKERFWVRLLYIHPDHFPLKILDLMEKDTRFLPYFDIPFQHSSSKILTAMNRRGNPETYLALLETIRARLPNAVVRSTFLLGFPGETEEDFAELLNFQEKANLDWLGCFAYSREEGTAAYSMKKRVPVKTAEKRKQIIEERQIPITEKNMDRFVGQNMYVLVEEQIAADETNANSSQDSETLWLGRLYCQAPDIDGATVIMKSEVSKINPQVGNFTKCKVTARHGFDLEVSV

SEQ ID NO: 96868 - protein, 61 aa, Unknown
  Obtained from environmental sample
  misc_feature (1)..(61): Xaa is any amino acid
VNINPETKLIRRIEGRTIGENELRFDFTNIRLNVGIPEARFAFDTPPSANMYDNFLFRDSN

SEQ ID NO: 96869 - protein, 219 aa, Unknown
  Obtained from environmental sample
  DOMAIN (1)...(219): Isocitrate/isopropylmalate dehydrogenase
  misc_feature (1)..(219): Xaa is any amino acid
MKEGVKVLEAAGKKFGFSLKLEYAPVGGAAYDLQGHPLPESTIKIAEAAQAILFGSVGGPQWEKLPPELQPERGALLPLRKHFKLYCNLRPARVYKALASACPLRSDIVGDGFDILCVRELTGDVYFGQPKGREGTGENEKGFDTMVYSRYEVERIARFAFEAASLRRKKLASIDKANVLTTSVFWREIVKEISKEYPQIELEHIYVDNAAMQLIKRPR

SEQ ID NO: 96870 - protein, 204 aa, Unknown
  Obtained from environmental sample
  misc_feature (1)..(204): Xaa is any amino acid
VSRRLDKSPNRILAKAAAPGPSIPVQSAAKTGPVTASRKPEQVSKPVQASKTDQVLEYPPPKMKPLPKDKVYDENIYGNGGPLLLNLFVEDQNTAIGKRNIHSLKPGYSFTIGGGNSDFLIFLVPIPPRIAEVRHDGRTCAFIPVKPQYFPDIGSQTVPNCIGKTFRVISDKKYELHIRLEKYEDPLNALNKMLRSIKVPGPVV

SEQ ID NO: 96871 - protein, 85 aa, Unknown
  Obtained from environmental sample
  DOMAIN (21)...(74): Sigma-70, region 4
  misc_feature (1)..(85): Xaa is any amino acid
MDTLSSPGDTPERIALKEAAREAVKAAVKDLPERFRICVDLYFHYDRSHQEIEAITGYPVNTIKSHVHRAKKMLREKLEHFKGEQ

SEQ ID NO: 96872 - protein, 277 aa, Unknown
  Obtained from environmental sample
  DOMAIN (1)...(258): ApbE family
  misc_feature (1)..(277): Xaa is any amino acid
MSVNVPSSDVSRINDAAGIAPVNVHKDTFKVIERAIYFAEISGGAFDPSVGPLVSLWGIGSDGARIPPWEEIDNTLPLINRRYVELDETTHGVFLKRKGMALDLGAIAKGYAADEAAKIIKKAGVKRAIIDFGGNIVTLGEKKDRTSWKVGIQNPVKRRGIYFGVLQLDTNGKQTVVTSGAYERFFETDGERYHHILSTVTGYPVKNSLLSVTVIGSDSTDADALSTSLFALGFEEGIKLLDSFPGTGAVFVFEDNSVRVTPGVNLRITDEAFVISE

SEQ ID NO: 96873 - protein, 463 aa, Unknown
  Obtained from environmental sample
  DOMAIN (70)...(273): Transposase IS66 family
  misc_feature (1)..(463): Xaa is any amino acid
LLADEKQPLLFAEEAGQPEAKEEKAQEIETIKSFTRKKAGRRPISANIERRERTIDIPESEKTCACGAELTKIGEETSEKLVIIPMQIYVDKQIRPKYACRRCEGTEDEGKPAVRIAPVEPAIIPKSIASPSLLSTIITQKFEMHLPYYRQEKQFEQIGVVISRQDMANWQQQAYEKLKPLFNLLLAMIKTGSVLRMDETPVQVIGEEGREDAQTSYMWLALGGPSDKTVVWYEYHPTRAAYHAKAFLEGYSGYLQTDGYKGYDSALKDMPDITHVGCFAHARRKFFEAEKANKNSKSAQEGIKHIRKLYDIENELRDKIADNNDMFLSERKARTGPVLEKFKAWLEKRKEEVPPSLLLGKAIYYSLTQWDKMTSYLESPYLTPDNNACENAIRPFVLGRKNWLFCQSIGGVESSCGMYTLIETAKQNGLVPFNYLMVLFEKAPLASSLDNWEKLLPWNIFTA

SEQ ID NO: 96874 - protein, 283 aa, Unknown
  Obtained from environmental sample
  DOMAIN (14)...(180): Transglycosylase
  misc_feature (1)..(283): Xaa is any amino acid
MHTQLQNVEQSLVSKVLDKDGKLIHEFSVERRFWVSLDKIPVELQNAVIATEDRKFYSHWGIDVLRNGSAVFVNLARGKKAQGASTITQQLARNLYLSSDKTFIRKIREVLTAVQLERSYTKREIMELYLNQVYLGAGVYGMQAAAEHYYSKNVDELNLNECAVLAGTIQLPEHHRPDKPDNADRTTARRNSVLKAMAASKFISKDAAKAVMDEPVVANPKIYRPPVAPYFMEMVRKYVSDKYGDEVLYNGGLSIYTTLDPAAQDSTEKSATRAVASLQKRLN

SEQ ID NO: 96875 - protein, 270 aa, Unknown
  Obtained from environmental sample
  DOMAIN (94)...(242): Insulinase (Peptidase family M16)
  misc_feature (1)..(270): Xaa is any amino acid
GLSLATVITAIIVVSCASTGNKRPTDQSAVSATDGIIDNEDAMATAKIKTAAKHQIVSHPSELKFDSLDWKVPLGDRHRVALTNGKNATGPVAYVAVDSTLPLVSITAYIRSGSLTDPAGKEGLGSLMTRLMRTGGTERYHADTLDALIDQLAMSFSFSQGEADISFRASFLSEYLDTAMVIMKEMFFHPAFDPKKLERERSITLEGISNRFANPGPTLSVAYRRHAYQKSAPARISTAASVKSIKRNDIVALHKAAFSSCEIILAASGK

SEQ ID NO: 96876 - protein, 566 aa, Unknown
  Obtained from environmental sample
  misc_feature (1)..(566): Xaa is any amino acid
VKFIRFAANSFKFCLFALLLAGLGLAAPLYGADWMFPAAPRGHRGSVSAVFQKGDNIISAGEDGFLGIWSSTTAAAIDRFQVSQRQIIAMAGRPERDEACVVENDGLGLYWVSVWNYRERRKIFTLQFMDPIGHISYSAGGKYIIAARTGRTALVIIDANSGAILQSPQSLTGIIGLVVTGRSERAMMVYTMSGEISYWDIETGNMTSAFSAPLSMQSTALFGNNRYLAGVNALGLTVVHAASGETLGRDTSIPVGSLLCADGDDFICLAQKNNAAAELYRFTIDNDGRLVTRKNYSVAVSDMKDRFTAIGAGTGNTVLLGTSTGSLVTVASDGWVSLLSAREQTLITDAAVSGSTVAFISENGYIGFIPLDYQQLFDGSSIHTEKNDRPYNRVTAFNTETEQEESAGGGAGQFVFWHDRNARLQPAIRSSEPGSQFRLLSGVNARSPIHSAASFGGKVLFLDTTGNLSVVTADRNQSFTFFSVGLMDAAFIDNNRIMLGRSAVSGNTPFMITNINTGETVPLPHSSQAATALYRGGSGGIYAVTVSSQPFENTQPANETTIRTQV

SEQ ID NO: 96877 - protein, 66 aa, Unknown
  Obtained from environmental sample
  misc_feature (1)..(66): Xaa is any amino acid
VTDEPTIGMIICKTKDSVEVQYSLEVVNQPIGVSEYRLAKLLPDNLKSSLPSIEELEEELKRMDAK

SEQ ID NO: 96878 - protein, 263 aa, Unknown
  Obtained from environmental sample
  misc_feature (1)..(263): Xaa is any amino acid
MNYRTKRGSWLYDGLCESDSLSYYKTYGRAFDKKYGRVYDWKRAKKVCPAGWKLPDTADWNMLVKTVGGKLAAKKLKAKNGWNNWEEGSDTNGTDDYGFSALPGGGCVPNGYFEIMDDFGRWWTATKYTNIPEADEWRRMNNFAYFRGMNEFDYIIKPTVGGYSYRDEITERIDEMSIGYSVRCIQKNRTERRDNIRKRVRTTAANRLDKRSPITYDTLTDKRDGKTYKTIAIGGKRWMAENLNYETDSSWCYNDTLSYCETY

SEQ ID NO: 96879 - protein, 334 aa, Unknown
  Obtained from environmental sample
  DOMAIN (6)...(157): Histidine kinase-, DNA gyrase B-, and HSP90-like ATPase
  misc_feature (1)..(334): Xaa is any amino acid
MYIGTTGIDGLHHLVFEVVDNSVDEAMQGHCDNILVALEVNDVVRVEDNGRGIPVDIHSGEGVSALELVMTRLHAGGKFDKKSYKVSGGLHGVGVSVVNALSQWCEVFVHMDGRVHTQSYKTGIADGPAHEITPDKVPYPAGPNRKGTVVRWKADASIFETTTHNFDALSNRLRELAFLNKGLKITIRDERLSTPKTHEFKFEGGVKSFVEYLNENKTVLYKDPIFIEGVRDDGDGGSVEVECAIQYNDGFNEIMFSFVNDINTREGGTHLNGFKTALTRTLNEFLKKSKQAKKLDESLSGDDVREGLTAVLSVKVPNPQFEGQTKGKLGNSEV

SEQ ID NO: 96880 - protein, 77 aa, Unknown
  Obtained from environmental sample
  DOMAIN (3)...(71): Rare lipoprotein A (RlpA)-like double-psi beta-barrel
  misc_feature (1)..(77): Xaa is any amino acid
MATQEMKTPGLTAAHPSLPKGSKVRITNIANSKEVVVTITDRIAPSATRVVDLSPDTALALDIGRGGPVMIAEIEEN

SEQ ID NO: 96881 - protein, 245 aa, Unknown
  Obtained from environmental sample
  DOMAIN (1)...(245): BsuBI/PstI restriction endonuclease C-terminus
  misc_feature (1)..(245): Xaa is any amino acid
VSDFRRCYLRQPALVLADLVVNSGIKQLSATNDPTRGYSLNADFKDLIIHYGTRKWKEELEIFMKNRLPLKDILERKRSIEYVPVKLPQGIELHFSSGEHNILQKKIIEEFLPRFCEGCTVLYIGDTANKLLHIDDDSLKRLIFFELSHDEFPDIIAYDTVHYDTVHNWLYLIEAVYSSGSMSEIRVHELKKLLKDCKADLIFITAFLERNDFRKWSTEIAWETEVWIADNPDHLIHFNGSKYLG

SEQ ID NO: 96882 - protein, 224 aa, Unknown
  Obtained from environmental sample
  DOMAIN (44)...(210): Phage integrase family
  misc_feature (1)..(224): Xaa is any amino acid
MRSFFAFIAVEGYISSDPTELLESPKRTRSLPSVLSVEEVEAIINAVDLEGKNGIRDRAIIETLYATGMRVSELCAFTMEQLLEKEQLVRVFGKGSKERIVPIGDSALYWIGQYLEKERGLSARPYSGSTLFLNFRGRGFSRMGIWKMVQQYAAAGGVKKEISPHTFRHSFATHLLEGGADIRTVQEMLGHSNIVTTEIYTHVDREYLLEIHRSFHPRSRKGFN

SEQ ID NO: 96883 - protein, 293 aa, Unknown
  Obtained from environmental sample
  misc_feature (1)..(293): Xaa is any amino acid
SHHQNELSAVLKELKEKNNTAVHLHQNELSALLKNLKEENDSAVYQQQAELTNVLKEIKEKTYSSVNQQQAELTNVLKEIKEKNDSAVYLHQDELLTLLKDLKEKNNTAVYLHQDELSTLLKDLKEENDSAVNQQHAELTTALKDIKDKTYSAVNQQQTELTTALKDIKDKTYSAVNQQQTELSAVLKALKEKNDSAVYLHQNELSALLKDLKEENNYAVHLHQDELSTLLKDLKEGNDSAVNQQHAELTNALKDIKDKTYSAVNQQQVELTTVLKDIKEKTYSAVNQQQTEL

SEQ ID NO: 96884 - protein, 46 aa, Unknown
  Obtained from environmental sample
  misc_feature (1)..(46): Xaa is any amino acid
MKFHLLVIDDEKNIREGLAEYLEEEGYEVACAKDGEEGWSMFSKGG

SEQ ID NO: 96885 - protein, 65 aa, Unknown
  Obtained from environmental sample
  DOMAIN (1)...(60): Flagellar protein (FlbD)
  misc_feature (1)..(65): Xaa is any amino acid
MIKVTKLDGTEYYLNPHQIESIEVRPDTALVMLSGRNHIIREEVDVVLEKIDTYRRRLSPYIVQE

SEQ ID NO: 96886 - protein, 389 aa, Unknown
  Obtained from environmental sample
  misc_feature (1)..(389): Xaa is any amino acid
AGLLTGIAYRELNRAGIAVTVLPALGTHIPLTAAERERMFPGVPESLFRVHDWRNDVVELGRIERDWVEKATGGAVSYDWPVQVNKLLRDGGFDLIVSLGQVVPHEVIGMANHAKNLLVGTGGKEAIDKSHFAGAAFGMEKMMGRADTPVRAMFDEGLRRYGNKLPPVLYALTVLSARGETEAAATGTQRGSLALRGLYCGFGRECFEQAAALARQVNVDLLDEPIHKAVVYLEPEEFRTTWLGNKAVYRTRMAMADNGELLIIAPGLERFGEDKGIDALIRKHGYRPSKLIKEKVSKDPELANSLSAAAHLIHGSSEGRFTVRYCPGPGLSRQEIESVGFEWGDIGEARVRYDVHKLATGWNTGADSERFFFVPNPALGLWALRKNFK

SEQ ID NO: 96887 - protein, 418 aa, Unknown
  Obtained from environmental sample
  misc_feature (1)..(418): Xaa is any amino acid
TSIGGGSYSRSFIGCSALTSITIPSSVTFIGTDSFSGCTALTSITVASDNAKYSSVGEVLFNKAQDTLLAYPAGKSGAYDIPNSVTTIGRGAFSDSRGLTSVTIPNSVTSIEYYAFYESTGLTSVTIGNGVTSIGHAVFSGCGNLTSVIIPNSVTSLGNYAFSWTGLTSITIPNSVTFIDKWAFNYCENLASVVIGNGLTSIEGNTFAHCPNLTSIAIGKNVTSIADSAFGDCGRLASITILNPAPPAIGVQAGIPPFPSIILNVPGSAVEAYSAHEIWGLFDIRSSSTSADSHAREIPQPITEKETAAIAPAAALTSGVTVGPNPADKQSGAVTFFRNGSRVKSASLFVYDASGRAVKKIAVSDNAAVGNNGKRAIGSWDLRDAKGRPVSEGAYLVKGIINTSDGKSEKVSAVLGVR

SEQ ID NO: 96888 - protein, 468 aa, Unknown
  Obtained from environmental sample
  DOMAIN (381)...(464): Hpt domain
  misc_feature (1)..(468): Xaa is any amino acid
NLINDAVQLNVVRIGSKQIEFIVDIDENLPSKLYGDELRIKQILNNLLSNAIKYTNEGCVNLSVGYLTDGDGVTLRFTVEDTGQGIKPQDKERLFSEYMRFNAETNRATEGTGLGLNITKKLVEMMDGTIGAESEYGKGSVFTVTVRQKAVECPAIGASVAEQLRKFTFTGDRRMANLRINRELMPYGRVLVVDDVATNIYVAAGLLALYQLNIDTADSGFEAIEKVKSGGVYDVIFMDHMMPRMDGIEAMLKLRELGYAGTIVALTANAMVGNDDMFMQKGFDGFIAKPIDVRQLNEILSRFIRDKHPEEAKRCAAETPAREERPQNGAGLRQETDQHVEAGSKPALSVETSRRGGAGKSQQARSVSKSRKPVNIANDSKLLKFFCQDAEDAVVKLRETVKNGDAKLFTITVHAMKSALANIGEDEASKVAAALENVGRSGDMGYISENIDEFIDTLESLVERFSGE

SEQ ID NO: 96889 - protein, 287 aa, Unknown
  Obtained from environmental sample
  DOMAIN (66)...(93): The GLUG motif
  misc_feature (1)..(287): Xaa is any amino acid
GTPIGSEDYNRYYSGTFDGAGFAVSGVYINIETDDETIYAGLFGLVTGGTIKNLGVVASYVQGGEQGYSVGGLAGYVRDGEITNCYAAAVNVVDKDASVVGGLVGEIYRSMITNSYVTGSVTGDSLATVGGFVGGSNEGRVKNSYAIVNVTGGEAGEAHGFVGGGRGISFNNCYYRDDTDNPSRYTHRGVPKTTAEMKQQSTYEGWDFDSVWVMSEYPILRVQQMPPTVAVSSSARAIPAANPAAVAAVAPASALTAEFAAGPNPAGRSSGGVKFYWSGAAIKGASL

SEQ ID NO: 96890 - protein, 341 aa, Unknown
  Obtained from environmental sample
  DOMAIN (249)...(338): Penicillin-Binding Protein C-terminus Family
  misc_feature (1)..(341): Xaa is any amino acid
LERLGVRTFEEYLVSLGFHSIMETIGTHGTGLALGNAEVSLEEMVRAFSVFPRMGMPAQLRWTEDGKPGDAAPPAMSPYAAWMIADILSDRSSRFVGFGPAPALATPFESMFKTGTANQFQHIWALGATKRFTVGVWMGNFSGETIIGSTGSSIPARIAAKLLGVLEESAGQEKRLASNRITENLAGALPPGTTEVRICALSGMAAGSYCTGLTREFIRNEKIPAACNWHTQAGLFYPGEYRPWLSERFRSGGVRQEGSGRIRTPVTGAVFYLDPSLPAEAQALRVETTGFSSGALLFSDGELLGSLNYAGVYALPLSRGRHSITVSDPDGSSASVDFEVR

SEQ ID NO: 96891 - protein, 171 aa, Unknown
  Obtained from environmental sample
  misc_feature (1)..(171): Xaa is any amino acid
FDGNPCIYRGERNLRPFIETGFQNTRFKVEPVWKTEVFDETCDARLLIGDSALREAEDKWEFIYDLASVWQDWQNLPFVFGLWIIRKEALGRGFLALLKNYLNETETSISDFKRDRELCLQKWEKHYPHRLPQSLAYDYYNAVDYSFTARHEESLKKFYELCKMPVDLNFI

SEQ ID NO: 96892 - protein, 260 aa, Unknown
  Obtained from environmental sample
  misc_feature (1)..(260): Xaa is any amino acid
SSQFKQIIWLFGPLFLIGFALYWVSKLRNQNLTQSIGGKACLFLTGWVGTPVHEAGQALFCIIFGHKITEIKFFSSRKDGTAGYIKHEYNPKSIYQKIGNFFIGIAPMFFGALVIYILLWIFLPWCLPQELDEGIRITGWKIFKNIIFNSDNFGNWRFWVFFYLSLSVASHSALSTNDLKGTVPSFFILLGFIFLVNLVASAFLKYGLDSLSFTHLFTRNIDVMLSLFYSIMLYVLAISVLYLIFSYLLFWISKPFKRKS

SEQ ID NO: 96893 - protein, 867 aa, Unknown
  Obtained from environmental sample
  DOMAIN (1)...(448): Aldehyde dehydrogenase family
  misc_feature (1)..(867): Xaa is any amino acid
MAENKQEPVTEPESLQRALNRIREAQKKFAAFNQEQVDRIFFAAARAAAKERIPLAKMAVAETGMGVVEDKVIKNHYASEYIYNAYRDEKTCGVIEDDPVYGITRIAEPIGLVAAVIPTTNPTSTAIFKSLICLKTRNGIIISPHPRAKSSTCTAAKIVLDAAVEAGAPEGIIGWIDEPSLEMTNTVMKEADIILATGGPAMVKSAYSSGKPAIGVGSGNTPAIIDDSADILLAVNSIIHSKTFDNGMICASEQSVIVLQSIYDKVKAEFTRRGCYFLNPEETEKVRKTIIVRGALNAKIVGQKAAAIAELAGVKVDPAVKILIGEVESVELSEEFAHEKLSPVLGMYKAKDFDEALEKADRLVKDGGYGHTTSVFLNPQTSAEKLAAFSSRMKTCRILLNTPSSHGGIGDLYNFHMRPSLTLGCGSWGGNSVSENVGVKHLLNIKTLAARRENMLWFRAPEKVYIKKGCLPVALDELKTVMGKKRAFIVTDTFLYENGYTKTITEKLDSMGIVHETFFDVAPDPTLACAKKGAAQMSAFKPDVIIAIGGGSAMDAGKIMWVLYEHPDADFEDMAMRFADIRKRVYTFPKMGEKAYFIAIPTSAGTGSEVTPFAVITDETKGMKYPLADYELLPDMAIVDADVQMNAPKGLTSASGIDAVTHALEAYASVMATDYTDGLAIQALKVIFEWLPAAYNEGAANPTAREKMANAATIAGMAFANAFLGVCHSMAHKLGAFHHLPHGIANALMICEVLRYNACEVPPKMGSFPQYDHPKTLSRYAQIADALNLGGSSEEEKLEKLIMPVEKLKEQIGIKKTIKDYGIDEKDFLARLDDMSEQAFDDQCTGANPRYPLIEEIKKMYAQCLLR

SEQ ID NO: 96894 - protein, 356 aa, Unknown
  Obtained from environmental sample
  misc_feature (1)..(356): Xaa is any amino acid
VIAITTYTEPVPIDAVVNDPFKTNEPEENEEHSSFSEILAGLLQTQPKEEFKVDSGLDVLSAGQLTEGDMLDLSAETQEIDLDACALELTDESQNILLSADQLFTSLLETEVSGENGLSLEIDRVKSLIDEMPSQTVSFADKGQDDAAAQLRAAQEINDLAQMSDNKKKANTQSKADSEDALSAKNKTGENKDTLLSKTNEGKEQPGKLEEFRNRSRKDKVNIEVRDFRTNTNPDGTQTRTFSVVETAAGRAHGQNAVQEVTLDLRLPDQGQSSQLNNSWEVKSGNMLENMLARELHQNFNGDIVRHASMALRDGGAGTIKIALHPPTLGHVKIHLEMTENKITGRIPVKARKPFT

SEQ ID NO: 96895 - protein, 310 aa, Unknown
  Obtained from environmental sample
  DOMAIN (193)...(309): Flagellar basal body protein FlaE
  misc_feature (1)..(310): Xaa is any amino acid
MMRSLFSGVSGLQNHQTRMDVIGNNIANINTTGFKRNRVNFQDIIYQQLQGAARPTEDLGGVNPKEVGLGMSIAAIDTIHIQGSLQTTGVQTDLAIVGQGFFVLDDMGKQLFTRAGAFSVDSEGVLVNPANGMKVQGWMAREVEGYTIIDVSAPVDQLVIPVGGKDPAKATTMVQFACNLDKRIPELPENPTGDQVIRSTWSTTIDIYDTFGDKHVLQVSFTRVPGTANSWNATVNVDPQNEAPTNATIGFGEEPPAVGGPQVFVVNFSNNGTLLSAEDGAGNVSGASGQVQMNVAYDVQNATPNEDGTL

SEQ ID NO: 96896 - protein, 301 aa, Unknown
  Obtained from environmental sample
  DOMAIN (161)...(301): Glycosyl transferases group 1
  misc_feature (1)..(301): Xaa is any amino acid
KEENVCVVPPSVPAHKDHEPYDVHRYFSLPIPMRKPYRLGWPEVDVNFRAKINRLPFALLHAHSPFATGKLALQIARKNNVPLVATFHSKYRSDFERVIPSKTIINAMINNIVRFYEQADEVWIPQASVEEPLREYGYRGKVVVVENGNDFADGNPVEPLRCAAREKLQLSAGEFMFLFVGQHIWEKNVELIIRSLALLHDVPYKMYFIGAGYAEPQMRQMVKELGLAEKTVFVGIEKDRQRLKEYYAAADLFLFPSLYDNAPLVVREAAAMHTPAVLLEHSTAAEVIRHNDNGFLAANSP

SEQ ID NO: 96897 - protein, 269 aa, Unknown
  Obtained from environmental sample
  DOMAIN (1)...(268): Penicillin binding protein transpeptidase domain
  misc_feature (1)..(269): Xaa is any amino acid
VSALVMDIETGGIVASAAAPFYDLNEQPRDDVATLLGQIKNLPMINVLEPGSTFKILTLAAALEEGVVTEADRFTCHGSRTIDGENVKCWRSRGHGTQTLAEGVNNSCNCVFMDLALRLGVDKFYEYLAKFGIGQKTGVDFFGEPSGLVLAKKWVRPVDLARIGFGQAIAVSPIQFQSVVNAIVGDGILRAPRYVNSIDGMPEVGGVVEKRRILSQKTCDRVRELLYGVVMQGSGKLASVDGFQVGGKTGTAQKYKDGIIDQGKYISSF

SEQ ID NO: 96898 - protein, 395 aa, Unknown
  Obtained from environmental sample
  DOMAIN (41)...(281): ATPase family associated with various cellular activities (AAA)
  misc_feature (1)..(395): Xaa is any amino acid
MQESFVAEAEKRAEEALLDLLLPFTGKKPGKKKTPPAPVVKPMGSFSFNSDNGGGPGLIGTAIQVGIPAFMKDDANDEDEEPEDRTGKNHAADAAEDNSSEKFKATREKFRTMLREGKLEERTVELTVNQNPQFPPFEMMGVSMEDIETNLSGFASFFGGGKKNKVVTVARAREILKAEELEKLIDRDRVSDEARQRVEETGIIFIDEIDKIAVKGERGGGPDVSREGVQRDILPIVEGATVNTKWGPVNTDHILFIAAGAFTVSKPSDLIPELQGRFPLRVELDSLGKDDFLRILTEPKNALTRQYTELLATEGIELGFTTEAIVQLAALAAEVNSKLENIGARRLHTIMEALLEELSFEAPDIAPAKVQVTVEYVNKNLADIVKDQDLGRYML

SEQ ID NO: 96899 - protein, 440 aa, Unknown
  Obtained from environmental sample
  misc_feature (1)..(440): Xaa is any amino acid
IGDGCILSRIDDPQTTNHAKFGNGAVPDGEEENVRVWIDVMNEAGGRSILPFDGMIAADAFLWAAYRDDALLAERLKDITQRSYGGVRGRYGTIGRCAVIKSCAIVKDAAVGEHAYIKGANKLKNITILSSADEPTQIGEGVELVNGIVGYACHVFYGAKAVRFVIGRNCNLKYGARLIHSVLGDNSTVSCCEILNNLIFPVHEQHHNNSFLIASLVQGQSNIAAGATIGSNHNSRANDGELRARRGFWPGLSVSLKHPSVFASFVIIAKGEYPSELNIPLPFSLVANNVHKNRLELSPAYFWLHNLYALERNSWKSRARDRRIIKLQHIETDYLAPDTAEEIITGLSILEGWLADAGYSPMDLHGPEGAQDIRMIPCRHLEHGKRGQVIKYPLRAIAAYRQMLRWYAVKTIAVFFDTRPTLDYAGLRSLLGGGGERILV

SEQ ID NO: 96900 - protein, 410 aa, Unknown
  Obtained from environmental sample
  misc_feature (1)..(410): Xaa is any amino acid
MYIYQLGPSISVMKWTCGYHKRLGGITGKMAKKRIIVKPKEKAEKSRSRGASGASGGARPEPVIVQGIWGVVYLAVAALLLISMLFYSPRQHGGGTETHLLGPYLGTALALGMFYIFGRLAAAAFAVGVGYVGVTKLTNKPMPVKLLLWCALLAIELCVLLAVGRMPQLSGAVNGFWGVMDAVGVNLLGMSLVNLLVPLFRGRVFGPYFIVLLVMAVTVMVGLRVKPQSVFAVLSELFADAVEWMKMVISDIKVSIEKSPDIRSEAVKEKQAAKASKKETDKNAETPVVDTEGKETPTQEQTVSEDTSARKDGDATQPVKAGEGGDVDTVATEEKPPEALTPEEEAKKRLEEELSEFRKKRSEPIKILTVETPEVEPAVEEEDINIVPINTSKKPLIVDADPDDGGLTPE

SEQ ID NO: 96901 - protein, 68 aa, Unknown
  Obtained from environmental sample
  DOMAIN (7)...(61): Helix-turn-helix
  misc_feature (1)..(68): Xaa is any amino acid
MAKNLRLKAARAAKDKTQKDLAEAVGVTRQTINAIELGEYNPSIRLCIAICKALGKTLNELFWEDDLQ

SEQ ID NO: 96902 - protein, 57 aa, Unknown
  Obtained from environmental sample
  misc_feature (1)..(57): Xaa is any amino acid
MNEILSRYCPRLDFDSYEDFYENYRCNVPDNFNFAYDVVDEWAHLMPEKWDPLESTC

SEQ ID NO: 96903 - protein, 423 aa, Unknown
  Obtained from environmental sample
  DOMAIN (52)...(382): Amidohydrolase family
  misc_feature (1)..(423): Xaa is any amino acid
LHYDLILKNGSLVTPQKTVTGDIAVQNGKIVKTGNLNKSDTADEIYDAKGKHILPGIIDAHVHFRDPGLTEKEDFETGSIAAAFGGITTVADMPNVIPVTSTLERYYEKAEMAKKKSYVDFALFALLSNDNLNDMENLTKAGALGFKVFFGTSTGDIAAPSPSTLIQQMEKSVKLGMRIGFHCETNEINSYYTGILKNRTDFNDGYLLAQARPVISETLAIQTVIFYADYTKAKVHIHHVTSRNGVLLVTEAKKKNIDISAETCPHYLLFDAEKCAHKVYPPIRGMEHSKAILQALKKGGIDMIASDHAPHTLEQKSLPIWEAPAGLCGVETSVPLMLNEVNKGKLTLNDFVRVASEAPAKIWGIYPQKGNLQIGADADFTIVDMKMKKTLAASELHSKSKTTPYEGMEVQGCPAATIVRGKF

SEQ ID NO: 96904 - protein, 293 aa, Unknown
  Obtained from environmental sample
  misc_feature (1)..(293): Xaa is any amino acid
GNGNTGSSAAGASSGTTTTGSSATNGTNSVSQGQNAVSGSNADQQSAGTSTNADNYSSDGINAKNNLSPEERAKNRTESYSTSLPFILLVIILALLLLGIIIFLASRKLGSSPNRVMSEIASTDGKTPRDNTKFVDHSKELAKYASVPNRRSTPYDAHPFKPDTHKPVINPSGPLLLNLFVEDQNTAIGKRNIHSLKSGYSLSVGGGKSDDFMIFLVPIPPHIGEIHRSGSSLTFIPKKHKYFPDGADEVKDCINKTIRVISDKHYEMRFRFEMYEDPLDALNRVLMSVKIPG

SEQ ID NO: 96905 - protein, 392 aa, Unknown
  Obtained from environmental sample
  DOMAIN (5)...(392): EPSP synthase (3-phosphoshikimate 1-carboxyvinyltransferase)
  misc_feature (1)..(392): Xaa is any amino acid
MKWTVRPSAPTGAIVIPPSKSHTIRALLVAAMAAGNSVVRRPLLHGDGASALRAAASMGATVDIRDGDVFVGGIGGDYGLGTDLIDMGNSGTGLTLFCSVAALGSRERRFDGDASLRSRPVRPLLNALEQLGAVVTVESENQDLPFVIHGPLKGGRATVDGISSQFVSSLLLAAPLMQRDTHIIVHNLHEQPYVEMTLWWLANQEIEVEYSKELTSYKVRGGQSYKPFDMIIPADFSSAAFAAVAAAVGGAPIELCGLDFSDTQGDKEVLGHLEAMGATMERSSDTVIVSGGELKGAIIDLNRTPDALPALAVAAAAAEGETVFTNVAQARIKETDRIAVMAEELGKMGIAVKELPDGMVVHGGKLKGAKVDSHKDHRVAMALALAGMNAEG

SEQ ID NO: 96906 - protein, 715 aa, Unknown
  Obtained from environmental sample
  misc_feature (1)..(715): Xaa is any amino acid
VAVFPTVVLNESYQFDGWYTALDGGEKVTTSATFNKNTLLFAQWKPLYLITFKAGDGATASKESDRTGADGKLVSLPTATKSGYKFNGWYTSSSGGQKITSGTEFTSNTEVYAQWVSEVSVEYTITFDANGGTPSTSTGKTAGEGTLAVLPVPTRTNYAFAGWYDKATGGNLVTENTVFPSNTVIYAHWTQLYTVTFNADGGSVSPASAKTDAAGKLASQLPVPTKSNSVFDGWYTVKTTGGEEVTESMVFTANTTIYARWTQLYTITFNANGGTVSPASARAEVDGKLESLPTPARAGYDFDGWYSTSAATGGTEITESTAFTANTTIYARWTLLKYTITFDPSGGTVSVESGVTGAGGKLASLPTPAARIGYNFGGWYTSADGGTKVETSTVFTADVTIYARWTLISYAITYSLGGGTATPANPTSYNIETSDITLNAPVRAAYEFDGWTGSNGTVKQADVTIPQGSTGAKSYTANWTALIFNITFDANGGRGLTTSTAKTAVGGKLSSLPTPTRDEYAFDGWFTGDGVKVTTSTVFEEDATIYAQWSVVRKITFDADGGTVLPASANTGSGGKLASLPTPTRKDYAFVGWYTAKDGGDKITVATVFDDDATVYARWSLFTDAAVTFSAGANGTLRVTVDNVPIASGASVKIGKDVAFTAIPNDGYKVAGWTINGVAGTDTSATYVEAGLSNVISVSVSFERRISVAAPNREI

SEQ ID NO: 96907 - protein, 191 aa, Unknown
  Obtained from environmental sample
  misc_feature (1)..(191): Xaa is any amino acid
MSNSGDSIALLGDEAVALGAIHAGLSAAYGYPGTPSTEILEYLIEESKESDFIAKWCSNEKTAMEAALGVSFAGKRAIVTMKHVGLNVAADPYMNSALLGINGGVIIAVADYPGMHSSQGEQDSRSHSAFAMAPCLEPRSQHEAYDLCREAFEVSYHYHLPVMLLLSTRLSHARAAVKPTPIGNQNELPKI

SEQ ID NO: 96908 - protein, 285 aa, Unknown
  Obtained from environmental sample
  misc_feature (1)..(285): Xaa is any amino acid
FRAGKKGTAAFIEDGRNRTVAQGTMLSFNTEGAELRQPAAVVTRPRPNARYVKNTPQPLSVSFAWNRINLEAKTGLRLEIAADRNFNRVVQSIENLNTSAEISLEAGLWNWRLSYDGVILSTGRLSVTEASNLKLLSPIKGSLYHYQDDPPLIYFQWSEVEEALYYIIEISPIQDFTNPYISKHTAAPSFTDSWLGPGTWYWRVHPLFPSAYESVAGFSQVSWFDIKQAVISANDEIIVVPEPEIKPVIAVEEVLLIQETALSVQEEISPIQEAALPVHEKTPPV

SEQ ID NO: 96909 - protein, 324 aa, Unknown
  Obtained from environmental sample
  DOMAIN (185)...(323): DNA / pantothenate metabolism flavoprotein
  misc_feature (1)..(324): Xaa is any amino acid
MKVLLGVTGGIAAYKACDLVRMLVRSCHQVRCCLTDAGARFITPLTLATLSGEPCFGANPEYHEWRSNPKVEHVDLARWADVLTVVPATADIMGKTANGLADDLLSTILLAATCKVLWAPAMNKAMWANLAVQKNKATLMGYGHSVVQPGSGLLACGEEGEGRLADVEEIFEAIVSLGGKPLAALTGKRVLVTAGPTREDLDPVRTLTNRSTGRMGIEMAKAFRDAGANVNLVLGGELPAPWGVSTTRVRSAADMLDACLSLWPNMDGVCAAAAVADQRPEQCKPQKAKKGDAPETLTLVRTQDILMELGKTRGQSLDAGVRCR

SEQ ID NO: 96910 - protein, 462 aa, Unknown
  Obtained from environmental sample
  DOMAIN (400)...(461): Histidine kinase-, DNA gyrase B-, and HSP90-like ATPase
  misc_feature (1)..(462): Xaa is any amino acid
MLRKFRIRTRLLFSFFIVVLFTLIVGLTGYARITSMGKSAVETIHNVSILNDIYDNNVFIDTGLFNMLYISDSTLTSYVVQTTKEHTEHLLIRLNEYVAMQDQFSDVFTPGEMQDMTNLLEIYTEAYIPIAYEIFDLVEQGRREEALSVYISRLSPVYRTFTYYLNVGFIKNLEHSDDRMKKNNDKAALNAYLMLALVALSLIVSIMLALAVTRSISVPLAELEEAAEKIASGDRDVQFEQSHNNDEIARLSNRLQETLHHLNQVQQLKLEAIEARHEKEKAEAASKSKDEFLAKMSHEIRTPMNAIIGMAELALRENMPDTARKHILTIKQAGNNLVSIINDILDFSKIESGKMEIVPVKYLLSSLINDTVNIIRIRIGEKPLRFFTNIDGNIPNSLIGDEVRLRQILLNLLSNAVKYSEKGHIGLTITIDKRDNQHILLKISVIDTGKGIKPEDQAKLFD

SEQ ID NO: 96911 - protein, 284 aa, Unknown
  Obtained from environmental sample
  DOMAIN (135)...(218): Hpt domain
  misc_feature (1)..(284): Xaa is any amino acid
MPDMDGIETTAAIRELEMNEESGKSEKQIPIIALTANAVVGMREMFIKKGFSDFLAKPIDVSKLDEILDRWIPEEKRDKGSLREPQGPNKYSSLSIPEALEGIEALEGAALLVIPGIDIHKGISMTGGTVAAYKQVLSLFCKDAQDRLPLLQQMPEADALPAFVTQVHALKSASASLGAKDISAQAAGLEAAGKASDMVFIRENLPAFARRLEELVLAIGKALETKEPENPSESSFRAAHSPLFKELAEALEAQKSADIDRILEELNQKPLDKKTQGSAGKNFR

SEQ ID NO: 96912 - protein, 298 aa, Unknown
  Obtained from environmental sample
  DOMAIN (3)...(104): Semialdehyde dehydrogenase, NAD binding domain
  misc_feature (1)..(298): Xaa is any amino acid
MKKVFVDGQEGTTGLQIREKLLTRKDIELLEIEPELRKDTKRRADLLNAADIAFLCLPDDAAKESVTLVQNPNTVVIDTSTAHRTNDAWAYGLPELSPSHKEAVQKSKRIANPGCHATGFLLSVYPLVKGGIIKADENLSCYSVTGYSGGGKKMIAEYKEKFDPSVKPYALGLCHKHLPEMQKTAGLKNPPLFNPILGPYYQGMAVTVSLFPNMLNGINSFDELRDFFTNYYKGYEYISVVPAGESPSILDPTICNNTNNAKIFVFGREEHGQITVVLDNLGKGASGAAIQNMDVVVV

SEQ ID NO: 96913 - protein, 490 aa, Unknown
  Obtained from environmental sample
  DOMAIN (34)...(484): Glycosyl hydrolase family 9
  misc_feature (1)..(490): Xaa is any amino acid
VRKADFSGIAKKGVYAAYVNGARISDNIIVQNDVYENVFKAALKWFYYQRSSTALPFEFAGKWMRAAGHPDTSVGFYPEAGKPAGWKISSPKGWYDAGDYGKYVVNSGISVFTLLELYEHFEKELKIISLNIPESKSKTPDILEEVRWNLDWMLTMQDPEDGGVYHKLTTARFSGHELPEGDIAKRYVVMKTSTAALNFAAVMAQASRIYKPFDAEFSATAIAAAEKAFEWATKNPSILFKQPEGMNTGPYAPSDETVQDEKLWAAAELYISTKKKSYENIIDSVPFDGQTPWWGNVNFLTVYRISDAKNGFKKDLSKKAQDTLITAANMLKDIAENSAYGIPVNKWNFVWGSNSAVANNGILLLHAYYLTKNKSYLDAAQRALDYLLGANPIDISFVTGYGNRTPMSPHHRPSEGDGITEPVPGMLVGGPHEGGQDVKPNGRCENYVQKGKPALSYLDHDCSYATNEVAINWNSPLVYLSGALHFLNTK

SEQ ID NO: 96914 - protein, 191 aa, Unknown
  Obtained from environmental sample
  misc_feature (1)..(191): Xaa is any amino acid
MKKNFICILLLLGYVSLYAQPLKDMPPESLPPQAPSPQETPSPQETPSPQEEPNPDIPKHEEPDFAETRPHVQNRDELTVTFSKGELELDFRKSYLASEAQLYTAIYEGLFSYHPITLEPVPAVAEKWELSNDKKQWTFTLRQEARYWNGDPVTAEDFRASWLSTLSPDKDAPYSSLFDIIEGAKDYRIRE

SEQ ID NO: 96915 - protein, 296 aa, Unknown
  Obtained from environmental sample
  misc_feature (1)..(296): Xaa is any amino acid
DVSFSSLFINRPVATTLLIAAVALGGGIAYRFLPVAPLPQVDFPTIQVFSGLPGASPETMASSVATPLERQFGRIAGITEMTSRSSLGSTNVTLQFDLDRDIDAAGREVQAAINAARSQLPANLPSNPGYRKSNPADSPIMMFLLTSSVVPRTEMYDVASNILQQKLSQVPGVGQVYVMGGAMPAVRADVNPNILNAYGLSLTDVRTAISMSNVNRPTGDISDGNATWSINVTDQIYKAEDYGNIIIRYQNGAALRLNQVASVTDSVQDLRNIGLTENGPGISVTVFRQPAANIID

SEQ ID NO: 96916 - protein, 477 aa, Unknown
  Obtained from environmental sample
  misc_feature (1)..(477): Xaa is any amino acid
MKTRALFLIFLFSLAICACTNPLIGSLLQSKTILFDSNGGSYVPPQTLFKNEKISKPRDPVREGYYFGGWFSYLDDYYMNDNYDNYKWDFEVIPDGDMTLYAMWDAKPTPTIDNFIINGVKDFVYDGNPKEVTVTPQEGIIVGKITVYYENSRNTANGRTTNKPFNPGTYWVTFDVAASEDWNSARGLFAGTLTINNTPTENDFIIENLKQLIPNPSRNNISEVYVTPMDGKSSGYVTVYYEGTNGTIYNKDTILPSNIGSYKVTFNVAADTYNNWGAANGLYAGTLEINVFKSIIELGAWLSGQIDNNITNPYPVALNVGNLGVSANSDIGSAAGSMLKENETKYVSLDLSGSSFTSISEGAFRSCDNLIGVTIGNDVTGIGKEAFMGCTGLTGITIPDKVTSIGNKAFFECEALISVTFKGTIPSNGWPITSDDNYVFPGNLREKYFPSSTDGTTGGPGTYTRQKDNDTWTRSSN

SEQ ID NO: 96917 - protein, 70 aa, Unknown; identical to SEQ ID NO: 92804
  Obtained from environmental sample
  misc_feature (1)..(70): Xaa is any amino acid

SEQ ID NO: 96918 - protein, 394 aa, Unknown
  Obtained from environmental sample
  DOMAIN (221)...(386): GGDEF domain
  misc_feature (1)..(394): Xaa is any amino acid
MSKREFSLFTDKARELAVLASRSYRITDAEVDEIKQLEFKDLLAHPANIRLAEVFGHDYKFSDIKYAYVMVKLNQPEIKYFVTEENKEFYGAEPGTPLNLLWLVDFVVHKTPEELLAEDETYYNDIKRYSFFRDLSEKAYQAGIPVYSMTDYEYGKLICGWAPLYSTEGTFVGMIGVDLYIEQYEDAVRRIKFILSSVFAVPTVLLTVAYLILYIRNKKQIYSKAYTDSLTSIKNRRFIDEYFPSIVKEHYKKKLQLAVIMIDVDFFKLYNDNYGHLLGDEVLKNVTKAILSVLREGTDYICRFGGEEILVILTNTNLSAAEMIANRIKASVNALAIKHEHSVCSNIVTVSQGIYSAVPKSMNSAKNFIMHADQGLYEAKNSGRNKYVTVEEFT

SEQ ID NO: 96919 - protein, 73 aa, Unknown
  Obtained from environmental sample
  misc_feature (1)..(73): Xaa is any amino acid
MKEVEANKTAWGLLSKDHYEFCKKALQEKKFNFSKIIEKELGDVSGKTVIHLQCNAGADSILLAQKGAIVTGV

SEQ ID NO: 96920 - protein, 260 aa, Unknown
  Obtained from environmental sample
  DOMAIN (6)...(260): Initiation factor 2 subunit family
  misc_feature (1)..(260): Xaa is any amino acid
VEILDLVTVDDVCKAIKDMYVRGAGLIGAAAAFGMYLAALKTNDAAFNDDMAAAARLLKNTRPTASNLAWAADRMALAGYSGTLEQKIEKARLEANAIADEDAEHCRRIGLHGLEIIKKIAQKKEGEPVRILTHCNAGWLAFVDHGSALSPVYAAFDQGINVHVWVDETRPRNQGAFLTAWELGQHGVSHDLIPDNAGGHLMQHGMVDMVITGADRVTRQGDAANKIGTYLKALAAKENNVPFYAALPSSTFDFAMRDGL

SEQ ID NO: 96921 - protein, 686 aa, Unknown
  Obtained from environmental sample
  DOMAIN (411)...(565): Anticodon-binding domain
  misc_feature (1)..(686): Xaa is any amino acid
MYHIRYYFSDDKEKYIEIATTRPETLLGDTAVAVHPEDERYSALKGKTLRLPLTERDIPLIFDAYVERGFGTGALKVTPAHDPNDWELSKRHNLAVINILNPDGTLNNEVPEKYRGLSVSKARAAVIEDLKAGGWYVKEEPIKHSVGQCYRCETVIEPFLSEQWFVKMKPLAEKALASWQKGEIIFYPKKWENTYKHWMENIRDWCVSRQLWWGHRIPAWTCADCGKLTVSRNDIEECPHCKSKNIGQDPDVLDTWFSSWLWPFSTLGWNKVGSNTADLQKFYPTTALITAYDIIFFWVARMIMAGLEFTGIAPFRDIYIHGLVRDKQGRKMSKSLGNGLDPLELVDEFGADAMKFTLAFICAQGQDVLVDKESFKMGTKFANKIWNASRYILMNLEGRELVDNPNLSGADKWIYSRLNNAAKNMREAFFSYRFNDAALTAYEYFWNDFCDWYVEATKLSVKGGDDAEKDRVTSVLLDVLAQSLKLLHPLLPFVTEEIYQKLPRKGAGEKESLLICAGYPDYDAKRDDPLQEKNFADMQTLVGMVRTIRSECGITPEKKLRVLVRTAGEQAQVFNQNCDLIKLLAGIGDLSVKDAKEDKPSGSIGLAGPGFEVFVFVAEAVDTCALKKKLSGDLERDNKYIEGLRAKLANEQFVKNAPETLVAEQRSKLEETLLRTEKLKLYLKDL

SEQ ID NO: 96922 - protein, 634 aa, Unknown
  Obtained from environmental sample
  DOMAIN (27)...(363): Transketolase, thiamine diphosphate binding domain
  misc_feature (1)..(634): Xaa is any amino acid
MGKKPQPDILLSKLNSVQDLKKLKFHELNALALEIREHIVDVVSSNGGHLASNLGVVELSIALHRVFNSPADKIVWDVGHQCYAHKILTGRFAEFSSLRKYAGLAGFPKTSESPHDAFNTGHASTSISAALGLLAAESMLGGKGYAAAVIGDGALTGGLAYEALSHAGHLKLPLIVILNDNKMSISRNVGGLSKYLSRLSMKTKYQTFRRHFDAMVKKIPFIGESFFDLVVRLKRAVKAVFYIDNFFVDLGFEYVGPIGGHNIRALTSVLEDVKRINRPVVIHVITQKGKGYGYAEDEPDSYHGVGSFSVNAGIDLSGQGKKTFTEAFSGIILEAAKKNDSVTAITAAMQTGTGLTKFKQAFPKRFFDTGIAEEHAATFAAGLAAGGLRPVVAVYSTFIQRSVDQIIHDTALQNLPVIFALDRSGFVGADGETHQGLFDIALFRSAPNMTLLAPASENELRAMMDWALAKNDGPVIIRYPKAYCPAERLEFSQPVQTGRGVLIRGEKKGQVCLFFTGSLFNEALEAAQILRQHGMEADLYNLRFLKPVDEDYITGLMNEYKLIAVIEEGIKDGSFGEYLTSLASLRSCKAKTLILAAQGDFFEGNKALGTREELLAENRAGREGHSAKDFPRGK

SEQ ID NO: 96923 - protein, 196 aa, Unknown
  Obtained from environmental sample
  DOMAIN (44)...(196): ABC transporter
  misc_feature (1)..(196): Xaa is any amino acid
MTPQESPKLVEITRLRKYFPIKMGLFTTKHVRAVEDVSLFIHKGETLGLVGESGCGKTTLGRTLLRLYEPTTGRIVYDGQTIYDSGDKDTRRVAVNMLPFRRKMQIIFQDPSASLDQRMTVGEIVREPLDIHKIIPGKRERMERVRELLGHVGLNSEHANRYPHEFSGGQQQRIGIARALAAQPEFIVCDEPVSAL

SEQ ID NO: 96924 - protein, 86 aa, Unknown
  Obtained from environmental sample
  DOMAIN (1)...(55): Oligopeptide/dipeptide transporter, C-terminal region
  misc_feature (1)..(86): Xaa is any amino acid
TPAHPYTQGLLRSMPRVDAEEYERLIPIEGTPVDMLNPPEGCPLAPRCDYCMKLCLRQSPLVTALDGNHRVSCWLHRPGQNGEERP

SEQ ID NO: 96925 - protein, 345 aa, Unknown
  Obtained from environmental sample
  misc_feature (1)..(345): Xaa is any amino acid
SPINVDAIPDLGENQQIIATEWMGRSPKDVQEQITYPLTTALLGIPGVKTIRSTSMFGMSFIYVIFEENIEFYWSRSRILEKLNSLPANLLPSDVKPAIGPDATALGQIFWYTLEGRNPKTGEPAGGWSPDTLRSIQDFYVKYNLTAAAGVSEVASVGGFVKEYQIEINPNALQNYKLSIMDVMEAVQKSNLDIGAETIEMNKVEYMVRGIGYIKSLSDIEETVVALQNGVPIKIKDLAFVNFGPAARRGGLDKEGMEAVGGVVVARHGSNPMQTIENIKSKIDEMNAGMPSKILADGTESKVQIIPFYDRSILIEETVQTLKTALSHEILICILVVTVLVCGIL

SEQ ID NO: 96926 - protein, 439 aa, Unknown
  Obtained from environmental sample
  DOMAIN (37)...(107): Elongation factor Tu domain 2
  misc_feature (1)..(439): Xaa is any amino acid
VGEVLEKIADEIPPPKGDSSAPLKALVFDSVYDSYRGVISYIRVMEGSIKAGTKIRMMKTGGEYLVTEVGTFSMKRDARPALNAGMVGYVLANIKTLSDVKIGDTLTDCANPAAEPLAGYKEVKPMIFSGIYPINPEDYKNLREALEKLKLNDSALVWEPESSGALGFGFRTGFLGLLHMEIVQERLDREFNVDIITTVPNVEYRVYMTSGEMIPIESPSKLPDASRYDHIEEPYIKAQIFTPKDYVGPLMQLAEEKRGTFGTMEYLDENKVILHYELPLAEVMFDFYDRLKSVSRGYAGLDYEQAGYRENPLIKLDILLNGDPVDAFSVIIHREKAQHYAHAICVKLKDLIPRQQFDVAIQGAIGGKIISRTTVKAVRKDVLAKCYGGDITRKRKLLEKQKEGKKRMKNIGSVEVPQKAFLAVLSLSSPSGQSGDDDD

SEQ ID NO: 96927 - protein, 197 aa, Unknown
  Obtained from environmental sample
  DOMAIN (18)...(196): von Willebrand factor type A domain
  misc_feature (1)..(197): Xaa is any amino acid
MANLYDEAGPVSRRTMVLFFVVDTSGSMDGAKIGTLNRAVEEVLPEIQDISGSNADAEIKIAVLQFSHGAKWLTTEPVEVEKYSWVDLKAAGVTDLGAAYRELNAKLSRKTGFMKDEGTGYMAPAIFLLSDGDPTDDYKTPLEELKQNNWFKAAIKVALAIGSDVKFDILKEFTGNSETVLTVHTPEALRKMIRFVS

SEQ ID NO: 96928 - protein, 369 aa, Unknown
  Obtained from environmental sample
  DOMAIN (135)...(308): Phage integrase family
  misc_feature (1)..(369): Xaa is any amino acid
LQKDIGTFAELADGFWDWDASPYLEDRRKRSLLTKAYADKCKRVVDFYLLPHFGKMRLEKITLDVVEEWFDKLIAEKYKHTTINGIFGTLRTMLRWAAKKRIVPGGDPLIGVERLLNDRKQIKIITQVEFKALFVDDWKKVWDNDLLRYTANKLAACTGMRCGELLGLRGENIFDDHLFLCGQYDSYGYRSTKTKIKHHIPLAAELVGDLRKLMSINGNGYVFSLDGGNTPVCGRHLRNGLKKALKNIGIDETEAKERGLHLHAWRHFLNTELQRAGMTVQIVQAVTGHKSERMTEYYTHFNPMEFGEVPEIQAALLAVKPEEKKTGRPALALVKMPEAPAEPDKYGANESLSGSPAGGQENNQQIKAS

SEQ ID NO: 96929 - protein, 281 aa, Unknown
  Obtained from environmental sample
  DOMAIN (8)...(223): Methyl-accepting chemotaxis protein (MCP) signaling domain
  misc_feature (1)..(281): Xaa is any amino acid
RAAYFMSANMNTVAAAIEMMSASISQISSNASDARKIAGDATNRSREATEAMTKLGAAAKEVGQVTDVIKKIADKTNLLALNATIEAASAGEAGKGFAVVAGEIKELANQSAKSADDISRRIEGIQSSTSEAVTAINNVSGIIVKVNESVEAISSHAAQQTKASNEIASNVAQANTGAKRVAESVGEVAKGSKDIARNAGEANKGVERVSKSINEVAKGSKDIARNAGDAAKGANVVSQNMANIAQGAKESAQGAKQINESAGELAKIASDLKNVVIQFKV

SEQ ID NO: 96930 - protein, 70 aa, Unknown
  Obtained from environmental sample
  misc_feature (1)..(70): Xaa is any amino acid
MKSRQRSESFADPSRPSLFRRMFTIHLSLVSLLGICLVMLIGVGWVFVFGVIIGRGFEPDKKLPILGSLM

SEQ ID NO: 96931 - protein, 275 aa, Unknown
  Obtained from environmental sample
  DOMAIN (148)...(181): Tetratricopeptide repeat
  misc_feature (1)..(275): Xaa is any amino acid
LRQILLKQFNLGNAVTMVTDAKQLMRVTQNRIDVNPVMLVFMERLMNGRAHDALVRQFKQAHPGLRIIILTNDVEREQLMLLHEIGADNFVTKPVSINTLVEKMAFTLKPQNKLGQLIDEAKAQLAKNDPKAALDISLHILDLKPNSAAAYLVRGDAYRQLGDMENARKSYEKASENAELFLEPLRRLGELHASMGDLEGCLKYLERMDQISPLNAERKVDMGEVHLKRGRSEQAQALFDMAVEITGEEISRISSRIASLYMDRDPALAEKYLRR

SEQ ID NO: 96932 - protein, 273 aa, Unknown
  Obtained from environmental sample
  misc_feature (1)..(273): Xaa is any amino acid
VSNPSSGNFAGIWVFNGNVNVGTLLAGQAVGAAAPNATAQATAITADVTAYGVADGGTKIRNRSSVSSNGALAIFLDGAGSKTVDVGYYGILSVKGTGNTAGMIKVTKKNKVAIGKNAQLISTGSQAFAIEAEEGNVNINGGRIESLASKQAISTKGGDIIIGGDGAAAASAILMAPGSSFRDINGGQRGVRITGNEGVLVRAIKNTVTGRAGEVVVNGGFIYNKYGTGIWADDTLRIKGGEIVTDKDTAVRAGTATAVGLIDIGVGTATSDG

SEQ ID NO: 96933 - protein, 688 aa, Unknown
  Obtained from environmental sample
  DOMAIN (621)...(687): Biotin-requiring enzyme
  misc_feature (1)..(688): Xaa is any amino acid
MPKVKLTDLVLRDAHQSLFATRMVTADMLPICGKLDKVGYFALEAWGGATFDSCIRFLNEDPWERLKKLKAAMPNSKIMMLLRGQNLLGYRHYADDVVAKFVEYAAKDGVDVFRIFDAVNDPRNFEAATKAAKKTGKHIQATISYAVTPFHTIEKYAEFAKQLVNIGADSICIKDMAGLLKPYEGYDLVKAIKKVTDIPIEIHTHATTGMSVSTLTKCAEAGAEILDTTISSMSMGTSHSPTETMVEIFRGTEYDTGLDINLLLEIAAYFRDVRKNYKKFESSFLGADTRILLSQVPGGMLSNLESQLKEQNASNKIDDVLKEIAIVQKDAGYPPLVTPTSQIVGTQAVFNVLFGRYNKLSGEFQDLVAGKYGACPAPKNADLVKKALEALKMEKEITHRPADDIPAEYGKLEEEAKKVLGTGTVTTEDVLTYAMFPKVAPNFFKTRADGPVVFKPEDATPAVAPAAKAAPGQAEKYNVNVNGTDYAVVVSPAGTVAVTAAAGAAPVTAAASGAPGGSVTIPAPVAGTILRYSVAEGAQVQKGATIMIIESMKMELEIKTTETGKVHFIVPAGTQVAAQQPVAQIGGAAGAAPAAPAAPAAPAAPAAPAAPAAPSASSGGKTVPAPVAGTILRYAVSEGADVSPTTTIIIIESMKMELEIKAGSAGKVHFLVPAGTQVASQQPVAEIN

SEQ ID NO: 96934 - protein, 449 aa, Unknown
  Obtained from environmental sample
  DOMAIN (1)...(449): Phosphoenolpyruvate carboxykinase
  misc_feature (1)..(449): Xaa is any amino acid
MVQSLIDAGLATFLKKRPNSYLFRSDPSDVARVESRTYIASKSKDDAGPTNNWIDPKELKKEMTALYKGCMHGRTMFVIPFSMGPIVFSIAKIGVELTDSPYVVINMHIMARVGTKVLDVLGAKGEFIPCLHSIGKPLLSCQDDNGKWPCAPIEKKYIAHFPEEKTIWSYGSGYGGNALLGKKCLALRIASVAAKSEGWLAEHMLILKITRESDNKVKYIAAAFPSACGKTNLAMLVPTIKGWKVETVGDDIAWMRPGKDGKLYAINPEAGFFGVAPGTSMESNPNAMHSIQDNTIFTNVALTEDGDVWWEQIGYDAPGKLIDWNGNEWVQDKSNKDQKPAAHGNSRFTAPAKQCPVIAPEFEELAGVPIDAILFGGRRPSTIPLVHQAKNWNHGVFMGSIVGSEITAAALDLKVGDVRRDPFAMLPFCGYHMGDYFKHWMKLQKNTRS

SEQ ID NO: 96935 - protein, 75 aa, Unknown
  Obtained from environmental sample
  DOMAIN (7)...(60): Chorismate mutase type II
  misc_feature (1)..(75): Xaa is any amino acid
MDLQELRKKIDEIDDDLVRLFQERMDVSAEIARYKKENKLPVHDPAREREKLYDLSFKTNPGRRIVYYRVILSAL

SEQ ID NO: 96936 - protein, 386 aa, Unknown
  Obtained from environmental sample
  DOMAIN (37)...(386): Citrate synthase
  misc_feature (1)..(386): Xaa is any amino acid
LDGKDYSLPIVKGTQNELAIDVSKLRDQSGYITLDDGFANTGSCTSAITYIDGDKGILRYRGYSIEELAEKSTFIETAWAIIWGRLPTSIELRRFSILLTEHELLHEGLRHHYDGFPPDAPPMAILSAMINSVGCYHPELLANMNDSDFEEAAAKLISKVRTIAAAAYRMSTGRPIMYAIPEYGYVQNFLHMMFSLPNHPHVMDPDIVKALNLILILHADHEQNCSTSTVRMVASGGANLFASVAAGVCALWGHLHGGANQAVVEMLEDIRKTHCSVKDFVEKVKRKENGIKLMGFGHRVYKNFDPRSKILRDVAQKVLQKQGQGDGLLNIAQELADIALNDDYFIQRKLYPNVDFYSGIIMKAIGIPLNMFTVMFAIGRIPGWIA

SEQ ID NO: 96937 - protein, 172 aa, Unknown
  Obtained from environmental sample
  DOMAIN (4)...(121): Response regulator receiver domain
  misc_feature (1)..(172): Xaa is any amino acid
MAGASVLVVDDVEVNLEVAKLYLKPYDLCVDLADSGQRAIDFIKGRNEYDLIFMDHLMPIMDGVEAVKIIRDMDSEYAKNVPIVALTANTEPGNEKIFLENGFSDFISKPIDINKLDACLKKWIKKDRKKAEMNEGSHINFKDGIAQFGTEAKFKKVLSSFKKHVPALFKEL

SEQ ID NO: 96938 - protein, 92 aa, Unknown
  Obtained from environmental sample
  misc_feature (1)..(92): Xaa is any amino acid
MSHHERYDGSGYPNGLREKDIPLASRIMAVADVYDAMTQNRVYRKAISHKEAYDIIVAGKGIYFDPGIVTIFENVHEEFKKIADMDLDEQVE

SEQ ID NO: 96939 - protein, 110 aa, Unknown
  Obtained from environmental sample
  misc_feature (1)..(110): Xaa is any amino acid
MPDTAKEMAPRIKRTGGPDFFNEDKTIDLKNPELNMHIGSYYLKYISGRFNDTLVSLMAYNAGVNRVRKLRAANKMPSDLFLETVSIYETRNYGRRVISAAAVYEALYYR

SEQ ID NO: 96940 - protein, 251 aa, Unknown
  Obtained from environmental sample
  misc_feature (1)..(251): Xaa is any amino acid
MYQGTALPPKTKERVRREVSGAWAAAFDVVEKKDKERALAFLLSFEQDAAIPIETGLFVLREYEKQGHVFSEIESAAIDGHFAVTRLRYNEALASFRKFMEDEKWTEKIPQMFLKYPDLINDLGKTFQYTSTGKEGLELYLQWESKLEKAPNEDNLRYRLLFFAARIARRRGLNKQADLLFEQARPLAPAGEQLDACIWYILDLAVSGPRDVFIKKLEQLVPYWHKDFYFDDVLEKFLQTLVAKKEWERII

SEQ ID NO: 96941 - protein, 175 aa, Unknown
  Obtained from environmental sample
  misc_feature (1)..(175): Xaa is any amino acid
MKNTRKFINFAVIAAIGFVVLSLTGCPTPGDGGEVVEPGKETVATPTANPAAGAVPSGEKLTLTTATEGAEIWYTTNGNAPAKNGLGSAKYTSPFAITPPVTVKAIAVKDGMNDSAILEAAYSVAPVFIPPDTDIPALTENVWADGNLTSSIGEQWFMFTATADTQYIHAGFGTM

SEQ ID NO: 96942 - protein, 361 aa, Unknown
  Obtained from environmental sample
  misc_feature (1)..(361): Xaa is any amino acid
MKIKFKLSILIIAIVAVIVSGVAVLLLRQASSIALDLSKQKTMYLARQRAQYWDGRMGGYIDVLQTMSNIMNFYENLPPAERRQTYEETMMSVFEDMPDFVRMFTVWKPNAIDGMDAENIGRMGSTETGQFAYALARDTGEIKPLTAVVVNEVMAQITGPNAKVVVMSDPAPFKNMGKDTYAVRIAVPILNKRLNEVVGAIGCQLDISMIQPRVEQTIKDFDEVTSMVVYSDNGFVLANYLPEFIGKQIDTETQYGPYLNEVKDIIKNSKEWEGTAYDPELKTNMVMAIANIPIGASPTTWSVMIGSTEAYILRDVNAMRNFVILLAAAALLAAMGLIYIVLSRTTKPIVTIGDSKDIPKA

SEQ ID NO: 96943 - protein, 494 aa, Unknown
  Obtained from environmental sample
  DOMAIN (256)...(444): Integrase core domain
  misc_feature (1)..(494): Xaa is any amino acid
MSASAARNWLTRTWVSLGEAARLEGIDERTVRNQTKAGMNSRYVWRLGEGGVKEIRLSSLSGDAIQLYEQEQLPDVEPLVRREDTAEFCKLFHSSPDYVQKHCLFWTDVLLASSPFSGTISLGIFVHDWNSSHPEKEQISLPRLYAVRKLYKDNGYDRSFLLKERRVPQSKVKEEWLNDFKDMYLRQQKQSANDCRLYALGKARMRGENVSEECFPSLAAFYRATSKIGGGIKTWHRGGAKKFYDDSSLYVERDYSRLQAGWCWVGDTRTWDVLVNVPGFDTLKRPYITMFVDLRTDMPMGWHVHHTPPSAANALTALRNGIKHHGLPNMLYVDNGREYRNKDFSGNPRGGNNWGAGNNEDGEYWMRSAASILGIDMKFAIAKNPRAKTVENTFGVYKKIIDKSFRAFFGGNPTERPEQIKLVMKDTNKAPSLAEFKSIVEKNLLDIIPNYPCKSKRFEQRTRKEAWEYLYAQRVPMKSITSDALDMIPTLTEE

SEQ ID NO: 96944 - protein, 717 aa, Unknown
  Obtained from environmental sample
  DOMAIN (460)...(682): Methyl-accepting chemotaxis protein (MCP) signaling domain
  misc_feature (1)..(717): Xaa is any amino acid
VAVIVTGVAALLLRQASSIALDLSKQKTMYLARQRAQYWDGRMEGYIDVLQTLSNIMNFYENLPAAERRQTYENTMMSVFEDMPDFIRMFTVWKPNAIDGMDAKNIDRMGSTPTGQFAYALARDTGEIKPLTAVVVNEVMAQITGPNSKVVEMSDPSPFKNMGKDTFAVRIVVPIINKRLNETVGAIGCQLDISMIQPRIEQTIEDFDEVTSMVIYSDNGFVLGNYLPEFIGKQIDTETQYGPYLEEVKDVIKNAQEWEGTAYDPELKTNMVMAVANIPIGVSPTTWSVMVGSTEAYILKDVNTMRNFVIIMAAIAILAATALIYFVLSKTTKPIINVSETLKDISEGEGDLTRVISVNSKDEIGDLAMYFNKTLEKIKNMIINIKDEATGLSQIGNDLASNMNETAAAINQINANIQSIKGRVINQSTSVSQTNATMEQVITNINKLNHHVENQSSNMSKASSAIEQMVANIGSVTQTLIKNADNVNSLKEASEVGREGLQEVAKDIKEIALESEGLMKINAVMKNIASQTNLLSMNAAIEAAHAGDAGKGFAVVADEIRKLAEDSSAQSKTIGSVLKKIKEAIDKITDSTTNVLNKFEAIDSNVNTVAEQEGNIRNAMEEQGEGSKQILDGVSNVNEITSQVKGSSEEMLEGSKEVINESHNLEIVTQEITGGMNEMASGADQINVAVTHVNEICIKNRENIESLLNEVSRFKVA

SEQ ID NO: 96945 - protein, 366 aa, Unknown
  Obtained from environmental sample
  misc_feature (1)..(366): Xaa is any amino acid
VEVDKDGIRRRIDLAQNVQGHWYLQLALSPLVDYLGNPSIDLDSRRMYLRKAKMPNQAKKDIKIPLDGKGRMLLDWPKTDFPDSYSHVSFYDFSLMEELELELEQYSRLFGDTDIDFFSRFDPSLAKIPLVVMDLEKLFDVIQPARADALKNCSDESFKTYTDCRRISRGLMREILNLDPEAKVNALIPELAELYPNNSGAIREEAEYISTLAGYIRINLDRYESLGEKIENMVNDKFCILGRVDTGTTDIGSNPFFSEYINVGTHGVVLDMILSGSFITPAGIYWQTLFALVLVILFLLAGPRFSARLRASSGLIITAVVIVLTVLLFRFTGLFFSPLAAVVSMVSAIVITEITERKGNTPVAPM

SEQ ID NO: 96946 - protein, 92 aa, Unknown
  Obtained from environmental sample
  DOMAIN (18)...(80): Protein of unknown function (DUF433)
  misc_feature (1)..(92): Xaa is any amino acid
LSVGYDNLYCMYELRAHIVVDPEIKFGKPCIKGTRITVGDILQWLTGGMTEQEIIADYPELQGIHIRAALDILRENYYEKIIIDKYGLDRYI

SEQ ID NO: 96947 - protein, 290 aa, Unknown
  Obtained from environmental sample
  misc_feature (1)..(290): Xaa is any amino acid
LVADNVWYNNSGYQLLLDADANAYGSVIPPDGEAIGNCSAPASLYNAFEYKIPENADPACNTTNVVIDGSVTIHIPAGTYDWCIVNPWTTNPSGLWIVGENGIYNNYVFEERKKYTVKIFLYGYDEEWYDYARVIVENDNWYTPAAVSNLTVTQSAGSSYTVNWTNPTTTRRGDALANLTSVKVYQNNALIYTNNSSTVGGTGTCTAIIPTPGEYVFTVVASNADGEGAPANYMMSSCEGITSKFPWFEGFESTTFPPACWSMIDVSGAEIWQRVSDETYAYKGNGSALH

SEQ ID NO: 96948 - protein, 322 aa, Unknown
  Obtained from environmental sample
  DOMAIN (14)...(137): Oxidoreductase family, NAD-binding Rossmann fold
  misc_feature (1)..(322): Xaa is any amino acid
MNYAPIGKPAPVVKKGEFVFSAIGLDHGHIYGQCNGLIEAGGVLKSVYDPDPAKMDKFCQTYSGVKRAASEDEIFNDKEVLLVAGAAVTSERCALGLRVMSAGKDYFTDKAPLTTLEQLEAAKAKVKETGKKYMVYYSERIHVESAVFAGQLIEQGAIGKVIQVMGLGPHRLSAPSRPEWFFKKEKYGGILCDIGSHQIEQFLFYAGVKDAEVVRSQIANYNHPQYPELDDFGDAVLVGDNGAAHYFRVDWFTPDGLQMWGDGRSFILGTEGYIEQRRYMQLGENKSRGGHLYLANNKEETYYDVEGKVGYPFFGQLILDCL

SEQ ID NO: 96949 - protein, 218 aa, Unknown
  Obtained from environmental sample
  misc_feature (1)..(218): Xaa is any amino acid
GNAPGLAQAILHDPPILILDEPTNGLDPNQIIEIRSLIMELGKRKTVLLSSHILQEIEAICPQVMIINEGKIVARGTTEEIAGTMKGGDTWELMLTRNTAFDITASTSFAERLQALGYEIKSVTVDLMDNQLIKIGFFIPTNNAAGQGSLIPTGETIFDWAVSNGFKIIGMNRKKISLEDIFVSLTSDEQHSSSVTKSSESNSSEETSSSNETSKEAQ

SEQ ID NO: 96950 - protein, 361 aa, Unknown
  Obtained from environmental sample
  misc_feature (1)..(361): Xaa is any amino acid
MKMKLTAAIIAAFVIIMGCAGGPKASKADELDLAIRDTSDYLNDNIPKGNKIIILNIQSDYASLSDYIIDELIANAVNDKIFKVVDRAQLEQIRAELNFQWSGEVDDKSALEIGKFLGAQTIVSGAISELADRHRMRIRALNVETSEVQGQYNRNISASKLIIALMKGGKSANTIYGARNATPTTSYPQGSTSAQTAIPLYKIGGTGPAGGLIFYDKGNNRGGWRYMEAAPSDTGIQIWAPNVDRSYEYPNPGETIRWGKLITTALGRGKENTEEIMDVISRQSGGFGWAIRVVSELNINGFDDWFLPSRDELNFMYGNLYLKELGNFRAGLYWTSSLGSDGQGYVRNVHAIDFSTGKSDE

SEQ ID NO: 96951 - protein, 235 aa, Unknown
  Obtained from environmental sample
  DOMAIN (38)...(71): Tetratricopeptide repeat
  misc_feature (1)..(235): Xaa is any amino acid
VLSTAANINGDDEFIRAALEELLITRTRIEDSARSRWASWHFARARAFRINNQLEQALFEYRRGLRLNPYARDRREYAELLRLQGYPARYLEELKFMQNLGMADTSLNDAVESYNALLSNALFRRWDVDPVMISTPHWKLAVFSLASQSTFYHADAGVGASSYIKDLLAHERNILPMDVELRQPSFSAAFRTAREMNADYFLVLSVSENERDISIKGELFVARTGSPAAVFNAFR

SEQ ID NO: 96952 - protein, 81 aa, Unknown
  Obtained from environmental sample
  misc_feature (1)..(81): Xaa is any amino acid
GRTGILNEGIGLVFAPEDVVGKITIEKADEEVSAGRLTRVGFFDRITPGDEVFLVPERKDSPSATVLPSDPELRALLRMLH

SEQ ID NO: 96953 - protein, 291 aa, Unknown
  Obtained from environmental sample
  misc_feature (1)..(291): Xaa is any amino acid
MANETTGIVYHKIISLFLDELKEKGEEIAPPLVKNDTSPRRILPKSYRDILIKKTEIVFKSFPCLFEDEDDKPAMSMLTARLLLAEKELFFTQLENFLIKFISFFAGFSVVASEGKYTLNKKFYYLNGYIDCVLEKSSEGHGSLVIVDFKTKYMPDLSDCVGIEELADFQLPMYIRLAENEFGKPVGAALFFSILDAAPRVLFGVIQDGLNDEIIPGKEQDRIMRGSGEYERIMGEFDKKAEQFAEEIINGTFAFSPSHWELCHECGYNRVCRTLYQIFQGEKQWNKTKKK

SEQ ID NO: 96954 - protein, 406 aa, Unknown
  Obtained from environmental sample
  DOMAIN (148)...(320): Radical SAM superfamily
  misc_feature (1)..(406): Xaa is any amino acid
MKYFCKTYGCQMNSAESAALSLACKERNWKEADNSENADLVLLNTCSVRLTAEKRAFGRIAHYAGLKKKHGRRFTLVVAGCMAQRLGEKLIEKYPAVDYVMGTYARSLFPLILQAVEKGEKAALDLTENAVFSFSNSHLEEGQFRSFIPIMHGCNNFCSYCIVPYVRGREVCRDPELIAGEIHAVGERGVREVTLLGQNVNNYSWQGGDFARLLQIASVEAVKSGVQRIRFLSANPGNFSPDTIKVMAENPVFCRHIHLPVQHGSDRILSAMNRKYTRSQYIALVRELRAAMPGISVSTDIMTGFPGESEGDFQMILELMEEVKFLYSYMYYFNPREGTAAVEMPGQIADEVKRERLSRVIALAKKHTHELLKKRIGGREKVLIEGISRKNADELIARTEKDEMVV

SEQ ID NO: 96955 - protein, 300 aa, Unknown
  Obtained from environmental sample
  misc_feature (1)..(300): Xaa is any amino acid
FIFSLLILFWFSDNELAPEWLKIYSHQMPDALLKRQLYLDIEVPKALLEAERPYDNEYRQQKGMIVRFNMKTIKSLDTLENVLLSDHAYYKGKYYSSMGMIPVLVLFVPYKLITGDYLPSSIGAFLFGSITTILLMLLWKQIAQDYLKKIPYFFFLIGGVALYACSLIPVVLSISIFHTIAQFSSLAFVILGVIILLKAKETLSIKLFIISSFSFALAVACRPSALFWSLLIPVMLWDKRKELLNANRYLLAIIIPFVIVGSTLAWYNYVRFDSPFEFGYAYIIGESNQHMFYKRSIIGK

SEQ ID NO: 96956 - protein, 159 aa, Unknown
  Obtained from environmental sample
  DOMAIN (3)...(138): Phosphoglucomutase/phosphomannomutase, alpha/beta/alpha domain I
  misc_feature (1)..(159): Xaa is any amino acid
VALKYFGTDGVRGCAFEPPLTIEEVCRWGGAWASVAKSNGVQTLVIGWDGRSSCEPILCAFLTGFGNDAKTILLGVAPTPAVAWITSRQPNAWGLVISASHNPPEDNGIKGFDSKGVKLSSEIEHAIESAFDSTPTSAASALASQQKGCDCNPPRGHGG

SEQ ID NO: 96957 - protein, 495 aa, Unknown
  Obtained from environmental sample
  DOMAIN (343)...(495): ABC transporter
  misc_feature (1)..(495): Xaa is any amino acid
MRGLSPAIPIEQKTTHRNPRSIVGTVTEIYDYYRLLFARIGVPHCPVCGKEIREQPIDQIIETILQMKDGSKIQLLAPVIRGKKGEHQKIIEDAKKAGFARARIDGVPVSLDEKISLDKQKKHTIEIVVDRLVMGTGIRQRLAESCEAALQAADGVMLVLCQGPKGSEGPEGPVTEHFFSQKNACPDCGVSIPELQPRLFSFNNPFGACPACTGLGIKMEFDPSLIMPNPSLSFNEGGLVPYNPDSAWYRSRFDSIARHFKFSLDTPLKDIPKKALNAMIYGSEDDLEVHYKNREGTSHFDYNTRFPGVLEDLKRRYMETSSPGIKDWLEKFMSQKPCEECGGKRLKPEVLAVTVGGRNIWDLTGLSVTDTLKFFETLKINKTEKTIARQILKEINARLGFMKNVGLDYLTLERKAATLSGGEAQRIRLATQIGSSLVGVLYILDEPSIGLHQRDNQRLIDTLLHLRDIGNTLIVVEHDEQTLRTADHIVDLGPG

SEQ ID NO: 96958 - protein, 289 aa, Unknown
  Obtained from environmental sample
  DOMAIN (1)...(240): C-5 cytosine-specific DNA methylase
  misc_feature (1)..(289): Xaa is any amino acid
AFENNPHAQKTYKYNHPNAAVYSDVSDVLTADIGKVDVVIGGPPCQGFSNANRQKNHAISHNNSLVKKYVQAVLHLNPMAFIMENVSMLQSKIHRFYVDSNDSADIKKYEIKTEETDILLLDAGFLFEGVSDIIADADKINHYLWNNENDYLALNVVYKYRKNPKKLTASLNKHKSRLLALAKRLTCNQAENDHIVTEENLTGMAIIEYFTEKGSIDSNSLCEAIEPTIMIQRMLSKGKEIFDNNIAVSVFSAEHGLIATVSSMAIIDYIEAILGASSNGYSITRGVLS

SEQ ID NO: 96959 - protein, 274 aa, Unknown
  Obtained from environmental sample
  misc_feature (1)..(274): Xaa is any amino acid
MSRSCSDLVDLLREKRREIRKYQLLIFTTANTSTTIKVLESPEIDNVPSECQIWDIERLFQLCGSDAGRNIIEINFKEYSPTGIPCLEANGTATVNFKSYLCIIPGTLLADIYDRYGSSLLEGNVRSFLSTKVAVNKKIRTTILQQPERFFAYNNGISVTAMDVLLEPSAQGKYLLFARDFQIINGGQTTALLSNTRYKDKADLASVFVQMKLTVIDNAIEAEDATALVQNISRSSNSQNKVSDADFFSTHPFHVQMERCSQRLGARGTGGLQF

SEQ ID NO: 96960 - protein, 247 aa, Unknown
  Obtained from environmental sample
  DOMAIN (78)...(245): Carbohydrate kinase
  misc_feature (1)..(247): Xaa is any amino acid
MPIVKADLTLAVEPQSRCIYAPAARPYAGIIESVNGIFPKEVIDRYRDCGAEFLDWESARARIPSVKKHAHKYERGTVEIHAGATGTTGAALIAARGAQAVGAGLVRLVVDDDIYPILASGAGGIMVTPVSAYDIGFEGRFAPDAMLLGPGWGRAESRVRIFKKAVEMEKTGTPLILDADAIELSKNSKFNGNAILTPHTGELSRFSGIDKDDLLCRPVPALLKLSREYNAVIVYKCHVIHIAAPDG

SEQ ID NO: 96961 - protein, 111 aa, Unknown
  Obtained from environmental sample
  misc_feature (1)..(111): Xaa is any amino acid
MKEILFWVLPPAIGALIGYVTNAVAIKMLFRPLREIRLFGIRLPFTPGILPRERHKLADSIGRMVEQELFTPTVLRERLARPDVRVNVENVIGKYTDQMLEKPLSAWLKIR

SEQ ID NO: 96962 - protein, 316 aa, Unknown
  Obtained from environmental sample
  DOMAIN (25)...(305): Omptin family
  misc_feature (1)..(316): Xaa is any amino acid
MSNIGKITAFVIFICLFPLPVFAEETNPDFKFSVIPSFGLLYGRANEIVYKDSITENYLSELLWNIKPLYYAGLAADFGPVNNFARHGFIGNLSLKMGIPQRTGIIEDRDWFDYYWVPSGTLTHYSRHDNFSERAIMADLSLGYSFPLFNFVALGMAFDFSYMHFYWIAKNGYGQYLRADGIENVDYMGKTMIEYTQNWFIFSPGVFIKFRLDRFFSLYGNFNYSPLIYCADKDYHLLRDTIFQDSLFFGHYLNGGGGITFSIMDNLDITFFLSYSTITDSRGDSYFNLLNHTGIAGGGYSAFEFGLSARLRLFGL

SEQ ID NO: 96963 - protein, 88 aa, Unknown
  Obtained from environmental sample
  misc_feature (1)..(88): Xaa is any amino acid
MKQSRALVHTLREVPKDADVVSQQLMMRAGMILKVAAGIYDYLPLAYRSIQKLQQIVREELEKDGCQELLMPTVQPAELWQESGRWQF

SEQ ID NO: 96964 - protein, 70 aa, Unknown
  Obtained from environmental sample
  misc_feature (1)..(70): Xaa is any amino acid
MDKVEVHAERTANLDGTGKENLKPASLQWEAIDWFKVEEFINKAQARIAKATVKGNKKLVRELQRMLAHS

SEQ ID NO: 96965 - protein, 292 aa, Unknown
  Obtained from environmental sample
  DOMAIN (2)...(240): Nucleotidyl transferase
  misc_feature (1)..(292): Xaa is any amino acid
LKGILLAGGAGSRLYPLSAVASKQLQPVYDKPIIYYPLSTLMLGGIRDILLISTPVDLPRFESLLGNGSQWGLNIQYAAQPKPEGIAQAFLIAENFIKDQACTLILGDNIFYGAFDLYGIMADAKNFTGARILGYAVNDPERYGVVEFDANGKALSLEEKPAKPKSNYAVPGLYVYDKTVLGKAKSLKPSARGELEITDINKMYLQEGTLFVKKIGRGVAWLDTGTHASLLEASNFVYTLESRQGLKIACIEEIAVDRGFVPWEKMKTYLESNMPKCPYRDYIFKMFSEKNN

SEQ ID NO: 96966 - protein, 740 aa, Unknown
  Obtained from environmental sample
  DOMAIN (475)...(540): His Kinase A (phosphoacceptor) domain
  misc_feature (1)..(740): Xaa is any amino acid
VGVKSAILQTQTAYRDMRRSMNAIIAYTPLGESAKIDRLYQDAVSAYELAMNTTQEFEELIRTSPLLNEEERKIRLERADLLNNYIQRYKDEVCDPIMNAARTGDYNRCIEIADNQEPFVDELRTHLIELYKLASIVEERSSNDAMATANRTKILLVVILVVSVVISVLLALLITSFITAAIHAQESALLTVSAMFESNPHINILFDDAFNVIDCNPEAVTFMGFKNKQDMLDGFIDFISKNIPSVLSNGQHSMSLISRLTTAAEEGMTKFETEMHLDGDIRRLSVDFRKIPYKGSFAILAYVFDMTEIFQREMQLARSKELNELQLAKLNLVVQASKIGLWDMEVVRDDPINPNNTFVWSDEFRHMLGYTDENDFPNILCSWSNLLHPEDKEVTLNAFAKHMLDKTGKTPYDVEYRLLRKTGEYAYYRASGESIRDSEGVAIRVAGALMDITDTKNMLMDKERQKAEAEAANRAKSTFLATMSHEIRTPMNAIIGMTSIGKSAPNIERKNYCFTKIEDASNHLLGVINDILDMSKIEANKFELAPTEFELEKMLRRVVNVVNFRIDEKHQELSVHIDRSIPHTLIGDDQRIAQVITNLLGNAVKFTPEKGAIGLIVRLVEKTDNLCTLQISVKDTGIGITPEQQKKLFHSFEQAESSTTRKYGGTGLGLAISKNIVEMMGGRIWIESETGKGSTFIFTIQLERGKEEKQELLPDVDVKDVRILIVDDDPDILSYFMEVT

SEQ ID NO: 96967 - protein, 212 aa, Unknown
  Obtained from environmental sample
  misc_feature (1)..(212): Xaa is any amino acid
KEYKIITSPEDKFKRKLRKVPKPEFIVLYNGTDPYPDYKELKLSDGFENTDDVNIDLTLELVAKVYNINKGCNQKILSKCKTLENYSRFIDKIREYQKEYQLKNHGKDDRKKLLDKAYRSAIKYCIKKNILKDFLIKHSSEVLNMLYAEYDPEVEFRVVREEALEEGEEIGIEKGIEKEKLIIAKNLLSEGSTIEFVHRITGLSFEKIKELY

SEQ ID NO: 96968 - protein, 204 aa, Unknown
  Obtained from environmental sample
  DOMAIN (100)...(196): OmpA family
  misc_feature (1)..(204): Xaa is any amino acid
GNTRSCESGAAQVFRRIEGRGSPSSRIIWDGKSDKGELVQSAMYYPYTFTATDALGNASSTEGRIGIDVLVIREGDRLRIQIPSIQFRPNFADFQNLPKDVVDNNMRIIRRIAQILNQFRDYKVQVEGHANPTQPAGAAHDREEPELKRISELRAKAIVDLLVRNGVARSRLTAIGAGSSKTIADFEDRDNWWKNRRVEFYLIK

SEQ ID NO: 96969 - protein, 323 aa, Unknown
  Obtained from environmental sample
  misc_feature (1)..(323): Xaa is any amino acid
MGGNMREQIIIRKAAFFLIVLFLLSTGLYAEPDRSPFGADAVPDLFSAALSADGFTTAKGGAPVSAINPAQGGDADRMVFDASYLALPKLLSGNEKDGYMQSISVGALFPTKAGVLGGSIRYIGGFAEDQFDYFPINPTFGGNLFTAKELYPGMSLGLGINFGFGAATTISGDIGFRYNTGNLGFLKNFTAGVVLRSLGLSYFPTWLSLVSGISFDLIHIEGKDNKNDPFILGFATDIAFPSLFYPPYINVIWKAGIKMTIAETITLNASWPGGSGLNLQELTEKKVSFPVFPAIGLCVNIMLPSTGERIVGGRLPSGRDMLI

SEQ ID NO: 96970 - protein, 438 aa, Unknown
  Obtained from environmental sample
  DOMAIN (55)...(284): HlyD family secretion protein
  misc_feature (1)..(438): Xaa is any amino acid
MKKYLKQAVILFILLFICISCSGKKSKTAVYEFTEIRRGNLERTVSSSGTINPVATVKILPRMSGKVEAVNVDYNDTVKKGDVLARLNTDMLRLQRDQQQASVQKARANYELQLINYRNQEALAKRELISEYELKTSKTSLDNQRADLAVAEANLRVIETEINQYAFITSPIDGIVLDKNINVGDTVVDSANNNSGSIFTIAENLREMQIEAMIGELDIASIFKGQEVRFTLESLPSRKFSGIVETLRMVPVVSNGVVSYTVIINVENRGGSLLPGMTCAVDFIVERSENALLVPNAALRYQPTSLNAEQISDLVFNASLENMTEEQKQAALEAREKQKLESSQKQNNQGLSQIMMGPQPPAPGQRGGRQPSGQGGQGGQGGQRRNAQVVVWRNLWFVGGDGKLDVVQVRTGISDGSSTEIIVPDDFEGRQIILREKI

SEQ ID NO: 96971 - protein, 97 aa, Unknown
  Obtained from environmental sample
  DOMAIN (67)...(90): 4Fe-4S binding domain
  misc_feature (1)..(97): Xaa is any amino acid
MKTDGGGLIKGPEAVRIGVAQVKRSRCLTFSTHSRPAQPCRVCLDRCPYPDAALAMSEQSDGAPPRPEVIEERCTGCGLCEFACPAPLPGIVVRNRL

SEQ ID NO: 96972 - protein, 180 aa, Unknown
  Obtained from environmental sample
  misc_feature (1)..(180): Xaa is any amino acid
MSERIIMKNPVAELDGDEMTRVLWAVVKEKLLLPFVELKTEYYDLGLMSRDASNDAVTVQAAEAIMRLRVGVKCATITSNAARKVEYNLKNLYPSPNATIRAILDGTVFRKPVSVSCVRPTVSCWKKPIVIGRHAYGDVYKAAEMKIPAAGKVELVYTSDDGLVRRSVTVADLKGPGIVQ

SEQ ID NO: 96973 - protein, 60 aa, Unknown
  Obtained from environmental sample
  misc_feature (1)..(60): Xaa is any amino acid
VREINRNGTTILLIEQNAHAALEIADYAYVLETGVITMRNTGAELLKDDGIRRAYLGEEG

SEQ ID NO: 96974 - protein, 159 aa, Unknown
  Obtained from environmental sample
  DOMAIN (1)...(159): NLPA lipoprotein
  misc_feature (1)..(159): Xaa is any amino acid
VEPFGLYSSKYKKIADLPNGATIAIPNDPSNGGRALLLLQAKGLITLKAYAGLTATPRDITGNPRSFRFRELEAAQLPRSLQDVDAATINGNYALGAGLNPVKDSLIIEGADSPYVNIVVVQKGKENDPRIIALKNALLSKKVKDYIDSRYGGGVVSIF

SEQ ID NO: 96975 - protein, 270 aa, Unknown
  Obtained from environmental sample
  misc_feature (1)..(270): Xaa is any amino acid
LFYAGHGVQSNGENYLIPVDANIQSESFLRQRAVSVQSMLDELNQAGNSLNVVVLDACRDNPFSWSRSGGSRGLQVVSNQPADSIIVFATSAGSVAADGTGRNGLFTGHLLKNLKRPGLEVTEVFRLTMGDVLRASNNQQRPAVYNQFAGLAYLGTKPQATPAPAPVQTYMIGDRGPAGGIIFYDKGRNTDGWRYMEAAPVDLMAGWGQRGKNIKGTKTGIGFGKRNTELIIAALNRNREGGKAAQLCKAYTLNGYNDWFLPSKSELNLM

SEQ ID NO: 96976 - protein, 223 aa, Unknown
  Obtained from environmental sample
  DOMAIN (18)...(190): D-isomer specific 2-hydroxyacid dehydrogenase, NAD binding domain
  misc_feature (1)..(223): Xaa is any amino acid
MVCNTPGVNAQAVADLTFGFMLSLVRRLPLLDRTTREGQWDRSIGAELYQKTIGILGLGYVGKAVARRAAGFSMRILACSPDIDQEYARANGITAVSFNELVSESDFLSLHLPLKAETQHIISADVMRKMKKGALLINTARGGLLDEAAAYELLKSGHLGGLALDVYETEPPHNSPLFTLNNVIFTPHTAARTAEATAAMASLSVQNLIDVLSGKYCAYAVNA

SEQ ID NO: 96977 - protein, 477 aa, Unknown
  Obtained from environmental sample
  DOMAIN (1)...(471): Protein of unknown function (DUF1703)
  misc_feature (1)..(477): Xaa is any amino acid
SLLCSTLGAVFEGRRELFGGIAGQPALAIDSLEWEWKKHPVIRLDLNAGVYSNGVGALHSVLYSELQKEAEKNGLVLEHTDVISQFKYLIRNACNKTGEKTVVIIDEYDKPMLSTMDDSALHARMRDELKGFYGVLKSSDEYLQFVLLTGVTKFSHISIFSDLNHLVDLTLDPRYADICGITQEEAEQNFGPEIEAVLENTGKNREIYLDELRRYYNGYRFSEKLLTVYNPFGLLNHFDKSGKFLPYWYETGTPTFLINLIIKQKINILNLTNMRVGYEDFRKYDIETMKAEPLLYQSGYLTIKNYDEELNQYTLDYPNEEVRTSFSKSLLEQYLQPPDEASRGLNTLFPAALLKGDVDGAMNALKSFLASIPYDIIKKSENYYETAVHLVFTMLGLNCRSELRIASGQIDTLVETKKNVYCFEFKLKGTAEEALTQIDTKEYLLPWTGSGKYLYKIGVDFDYEKRNIGHWLVKTAI

SEQ ID NO: 96978 - protein, 436 aa, Unknown
  Obtained from environmental sample
  DOMAIN (255)...(436): PEP-utilising enzyme, TIM barrel domain
  misc_feature (1)..(436): Xaa is any amino acid
MKNFTGIPVSAGVAYAKAFVYTVDETLEIPHHGVSEADVSAELKRLKNAISEAVKEAQSLLDRAGREMSQEQADIFQAQLLMMEDADFHDQMNNRLRESLCNAEWVVWEVSHELSQKLLQSPDAVLRERSVDIDDVSRRIIDCLLSDAKGRSPLADLTEEVILVAQYLMPSDMVNLSKDCVKGIVMDEGSSTCHTAILARAFNIPAVMGISGFSRIANDGEPLVMNGLSGLVVTNPDRQTLARFRTDEKQQRKQTDRLSGLRELPAETTDGCLVAIKANISLPEEAENLKQYGAEGIGLYRSEFLYITPGKAPDEETQYRAYSHVLKAMGDLPVTIRTMDMGGDKIVPELHAVAQIDSEKNPLLGWRAIRLSLANPEMFKVQLRAILRASVHGNVSIMFPMISGIEELEQAHAMLEEARADCKKSKQNFDKDIEVG

SEQ ID NO: 96979 - protein, 125 aa, Unknown
  Obtained from environmental sample
  misc_feature (1)..(125): Xaa is any amino acid
VTELDFGSEASGLGMSEEKQAELYKTFVTSAFSHPAVNGILLWGFWDNRHWIRNGGIIDGKGRAKPAADTLYNLWHKTWTTNLQSTAAESGEIRFRGFPGKYKITVGGKEEFVYCRTGKSVCDKS

SEQ ID NO: 96980 - protein, 314 aa, Unknown
  Obtained from environmental sample
  DOMAIN (17)...(312): Alpha amylase, catalytic domain
  misc_feature (1)..(314): Xaa is any amino acid
MDNKSLADWWKHAVVYHIYPNSFKDSNNDGIGDIPGIIKKLDYLSELGVDAIWLSPVYSSPMVDMGYDIADYKNIDEHYGTMDDFKKLLNEVHKRGIRIIMDLVLNHTSDLHPWFLESRSSVTNPKRNWYIWRPPKDNIKGRKPNNWKTNFGKKAWRYDHKTKEYYYHSFFWQQPDLNWRNPEVKKALFDIMRHWLDLGIDGFRLDVINLLYKDRELRDNEIGLLKKTKIYNRNQPEVYDLLRDFRKLLDSYPEKTSVGEIYVPPPGNTDLAVSFLGNGTDMLHLVFDFSLIFTLWKASSYYKIITNYYEKIPA

SEQ ID NO: 96981 - protein, 261 aa, Unknown
  Obtained from environmental sample
  DOMAIN (1)...(137): Domain of unknown function (DUF323)
  misc_feature (1)..(261): Xaa is any amino acid
MRLPTEAEWEFAARGGLAVPADVFASAHPYPDDLAAYEWFAGPKSSHNEVRPVGQLKPNPLGLHDMLGNVSEMTNTLYQLEYYQGRSGGMAARGGHFLTAEKDLNAALRIEEPLYLGDKKQGLKPNRKPTLGLRLAIGVPIMTDRVEIAALEDAWDDYLESARRTVSPAGLSTAPVGVRTDVEAEDARGHLGNVKARLAAGELPPAFMDPINQDLGRLEASLSGLDIIRKRAETDSARSWVRTGVFAAHQYMREEAKRPKL

SEQ ID NO: 96982 - protein, 96 aa, Unknown
  Obtained from environmental sample
  misc_feature (1)..(96): Xaa is any amino acid
ESVASEALLRAEREAEAPDEREHVCPYLYRHPEIFRLHRPLAPRRWQGPEYRITVDTREDYDRAVSLYGRLSSLPLSERNLGEIVISLCEGLWRGN

SEQ ID NO: 96983 - protein, 370 aa, Unknown
  Obtained from environmental sample
  misc_feature (1)..(370): Xaa is any amino acid
MEGQLKNASVLIVPACERGCGGGHLIRSLLILKALQANGRDAFLWVPDSLKDDFLQRFHDFFGFLDSPCLLSREEELKGRTWDFIVFDRFRTSKKEYIFFSSFAPVIGIDEGGPFRSRFDFLINLLPSLKEDAVNLFSPALLSLPRNRRPNYAIETTPNSLLRILISFGAEDSAGLGIAAARSLSDFLANASTEKQLEVTLVSPIPPHNSRGETEGLPGISVMGRIPHLGERLAEYDLFITHFGLGAFEAVYARLPVILVSPSLYHEKLSRKAGFFSVGIGVGAAGCLGKLVRDFGHITKSGAEKPKLLKTLERKTREIADRYCLWEDQKETIATFLCRISPRSPLVCPVCKKPRAVPVLARFPDESTAN

SEQ ID NO: 96984 - protein, 571 aa, Unknown
  Obtained from environmental sample
  DOMAIN (384)...(474): Methyltransferase domain
  misc_feature (1)..(571): Xaa is any amino acid
LQRFRDFFNTLDSPRLLSREEDIKSQTWDFIVLDRYKTSKKEFEFFSGFAPVIGIDEGGPFRNHFDFLIDLLPSIKKAKPNLFSPALLSLPRNRRPDSAVETAPGSQFRILISFGAEDSAGLGIAAAQSLSGFLAKTPTKSPFEVTLVSPIPPHNSQGETEELYGIKVLGRIPHLSERLAEYDLLVTHFGLGAFEAVYARLPVILVSPSPYHERLSRKAGFFSLGIGAGAAGRLGKLVSNFGHRAEGNAGKPDLLETLERKSREIADRYGLWEDQKKTIVSFLCRVSLRAPLACPICEKPRSVPVLARFPEESYRQCPHCGIIYLARLGEPPIEYEKDYFFSDYKKQYGKTYLEDFPGLVETGKRRLEHIKGLLHLNDEKPSILDIGCAYGPFLAAAAECGFSPAGVEPASDAARYVKETLGFPCYQGFFPAAVNGLGGFDAVTLWYVIEHFEEVGEALREIHGLLIEGGVLAFSTPSFSGISGKKSLSSFLKNSPPDHFTVWSPRICAWILRRYGFRLRKIVVTGHHPERFPLLGRFADPAKKSPLYRFLFFISRLFRLGDTFEVYAVKG

SEQ ID NO: 96985 - protein, 64 aa, Unknown
  Obtained from environmental sample
  misc_feature (1)..(64): Xaa is any amino acid
LRKLTTTVFMYRAEKYNVSSNLSTCFRQRTAIASAMVDYPIGRKVELSVQRAGVTTYYQRFKHD

SEQ ID NO: 96986 - protein, 273 aa, Unknown
  Obtained from environmental sample
  DOMAIN (1)...(273): tRNA synthetases class I (I, L, M and V)
  misc_feature (1)..(273): Xaa is any amino acid
TRRRQRLNLESITVIGFDAKMTAAAGKPYEGLDRFECRDRVLADLEKIGLIEKIEDYTHQVSVSDRSGAVLEPLVSTQWFMDVKEAAKASLEAVRSGKVRFTPQHWENVWEHWLTNIQDWCISRQLVWGHRIPAWTCDSCGELHVEMEAPTKCKKCGKAALTQDPDTLDTWFSSALWPFSVFGWPDKTEELARYYPTSVLITSYDILFFWVARMVMAGLTWMGDVPFRDVYFNSLVRDEHGQQMSKTKGNVVDPIQNMDEYGTDALRFSLAIM

SEQ ID NO: 96987 - protein, 299 aa, Unknown
  Obtained from environmental sample
  misc_feature (1)..(299): Xaa is any amino acid
GGGGGGGGGGGGGMTWTAVGTSTFEDKGLLNVYAMAFGNNTFVACASRYMATSPDGVIWTAVADSKFTYYIYAITYANSTFVAGGLVGTIATSSDGTTWTAGTISSFGTNNINEIAYGDGKFVAVGDNGKMAYSTNNGVTWSAVSDSTFGTSAIYAIVYGDGKFVAVGDDGKMATSPDGETWTAVADSTFGTSAIRAIAYGNDKFVAGGSGKMAYSTDNGTTWTAVTNSKFGTLQISAIAYGNNKFVVGDVGGRTTSSTDGTTWTAVADSTLVQVDSIAYGNNTFVVGGYPGKMAYSNN

SEQ ID NO: 96988 - protein, 182 aa, Unknown
  Obtained from environmental sample
  misc_feature (1)..(182): Xaa is any amino acid
MSDNGSPDKMPSRRRMPFSWIWFASTLVLCAVFAFASVPSVLAQVREGGTQSGQADSILKNRRYTETIQQVFNFIQRHYVEEVDSKVIFEGAMTGIFNALGDPYSSFLPESEMKDLNDTTSGQFGGVGLYITKPAGNRSDGKPQYIEVASPIEDTPGWRAGINPGDVIISINGESTDKLQQM

SEQ ID NO: 96989 - protein, 78 aa, Unknown; identical to SEQ ID NO: 93518
  Obtained from environmental sample
  DOMAIN (6)...(73): Phosphopantetheine attachment site
  misc_feature (1)..(78): Xaa is any amino acid

SEQ ID NO: 96990 - protein, 290 aa, Unknown
  Obtained from environmental sample
  DOMAIN (43)...(123): Cache domain
  misc_feature (1)..(290): Xaa is any amino acid
GFFDVYGGIFLTGDMNWKPPNDYDVENRVWYQAAVEANGDIGVTPPYFNISIGRETISFVRRIFNDVNQPLGIICLNIFIDRVKQHAIDTQFAEKGYGFLLNQNMELIAHPDTSLLGVRLRNVKSYIAAYEDELKEKGHIYEVVTTDYRGIKSIVFLQNLHNGWYMGVVTPRDKYYQSRTNMAIFLTALGTALAVILITILTRIFTEKNKADERMRIMFDAMPLGANLHNKNYKYFDCNASAINMFGLSNKQEYSEKFFQLSPEYQPDGVLSRKKMAEVNEKVFSEGYCR

SEQ ID NO: 96991 - protein, 241 aa, Unknown
  Obtained from environmental sample
  DOMAIN (1)...(191): Beta-eliminating lyase
  misc_feature (1)..(241): Xaa is any amino acid
DARTAAWDGGPGRPTPEQVVKAAGGQGPYYSLRTTLLCLENTHNFAGGSCLGAATYKALVEAAKGKGLKVHLDGARVWHAAVATGDSLASLCWGTDTVSVCLSKGLGAPMGSLLAGSRAIVEEARRIRKMLGGGVRQGGVVAAAGLVALDYIPHLAQDHAKASTLADGLISLGFKATKPETNILIVPVPRAGEAVAKLESVGIRCLTVGSALRFIAHRDLAAADVGEAIERIKPIAEGIIS

SEQ ID NO: 96992 - protein, 381 aa, Unknown
  Obtained from environmental sample
  DOMAIN (33)...(371): Glycosyl hydrolase family 26
  misc_feature (1)..(381): Xaa is any amino acid
MRNIQKLLPLLMIVLPLVSCPSEPDKLEPPPQVDPGAVAGSSPNARRLMNYLSDQYGKYIISGQMDTAWTTNERMDMIARVYFDTGKYPALKGFDFIDLPNNWGGYGKDQVDEAIEWWEGKNKMYGTAPAAQLLPDKPNIHGIVSFCWHWRAGSENDFYTNKTTFRIPWKDGKLDTDSAAFKNTIKSDLDKAAALLQLLKDKDIPVLWRPLHEASGGWFWWGASGEKPYIALWEYMYSYLTNDKKLDNLIWVWNGQNKDWFPNPKTVHIVGYDVYPQKPKDYSSQYAKFKETLEMVPARDRIVAMTENGEIPDPDKCRQDNAMWSWFMTWNDAGNANGETKSGNFWTGEYHNTNDHKNHVYNHNLVITLDELPDLTTYRME

SEQ ID NO: 96993 - protein, 464 aa, Unknown
  Obtained from environmental sample
  DOMAIN (371)...(447): Surface presentation of antigens (SPOA) protein
  misc_feature (1)..(464): Xaa is any amino acid
SIDLGSFAEDETEYTIDLDATAETEKNNKKGQVLSQNEINQLLTAINAGDTEPEEYRLATDGRKVKIYDFKRPDKFTKEQIRNISIIHDTFARLTTTSLAAQLRSMVYVSVVSVDQLTYEEYIRSIPCPTTLSIITMDPLKGNAILEIDPLITFSIIDRVCGGIGDGTKSQHELTDIEQSVMEGIIVRMIGNMREAWTGVLDLRPRLGQIDTNPQFAQIVPPTEMVVLVTLEAKIGDVEGLINFCIPYLTIEPIMGKLSSQFWFSIYQKKTPITISDVLLGDIPVRLSAEVLRRDYPLNEILKWDIGTVILPLRPLSPGYCYLRLGDRRVWQCQILPNCKWFLKRIAIVNYAEKPFGTEGNMEMEKVNPLVRDALSSAMMKITVELGATFHTVKEVSSMGEGTILELNKLAGEPLDVKANGVLIGYGEAVVIDENFGVRITEILQPAPEPPAPPMSKKAFPELD

SEQ ID NO: 96994 - protein, 84 aa, Unknown
  Obtained from environmental sample
  misc_feature (1)..(84): Xaa is any amino acid
MVQMAVNVDDNVKHDIEKLYNRLGMNINTAVNIFFRQCLIEQGIPFQQNKAHKHIPLKERLKNYSGNYKTEEWDTGEPVGRELL

SEQ ID NO: 96995 - protein, 289 aa, Unknown
  Obtained from environmental sample
  misc_feature (1)..(289): Xaa is any amino acid
MYALKATGAIVVKDANIIYSTKTAIDGGSVFDNTAISSGAAAVTLWDVNVTGQSASALNGSIVMSKGSVEIKRGAYQAATGGNGGRAIWTDGGSAQASTVTLEEVAISSNGKLKDSKADYVVSANGKVTLESKKKAATSVSLTTLTSDSVGGISAKGGVWLKMEGSPVSSVNIVGSGRGINVESKATGTAYDIGSNGYITTPGAAIVDIEGSASYSALVSVGSGQAIYVDLKPQGGTTDDEAGLVYLYNAEVKRTAAATTAKKNLIHASGADVYVTGSKAELTKVKTDS

SEQ ID NO: 96996 - protein, 433 aa, Unknown
  Obtained from environmental sample
  DOMAIN (1)...(433): Prismane/CO dehydrogenase family
  misc_feature (1)..(433): Xaa is any amino acid
AREILHILRCASAEGNYKIRDEQKLLRLAKEYSIPTEGRDIYDIAHDVADMGLAEFGKSFGTQNFIKRATPERQKVWREQGIEPRAIDREIATSLHMTNMGNTADAGALIRQGLRTSLSNGWGGSMLATEITDILFGTPTVRSTEGNLGVLEADMVNIVVHGHDPVFSEMVVCAAEARDLVDYAKSKGAKGINIIGLCCTANEVAMRHGVRMAGNFLQQENAILTGAVEMMCVDVQCIFPALSSLCECFHTKFVTSSPIARIPGSIYVEFKQDTAFRQAKDLVKMAVDNFTNRDKSKVFIPQVKQSAVVGYTCEQIIGHLDGVTNSRTDTFGTYKPVVDAIKAGVLRGAVAIVGCNNPRVRPDFAHFGIMKELLSNDILIVASGCAAQVASKAGLMNKEAKKFCGDGLRRVCELVNIPPILHMGACVDISRMM

SEQ ID NO: 96997 - protein, 435 aa, Unknown
  Obtained from environmental sample
  DOMAIN (260)...(434): Flagellar M-ring protein C-terminal
  misc_feature (1)..(435): Xaa is any amino acid
MNEFLKKLLAKAAGFWADWSGRQKGLFIAVIAAVIVGIVMLFRVSATPVLAPVFTIPIRDETLRDRIVVRLNEEGVNPTVTPDGVIQVADPATAKRMKAILIREDLVPPNISPWQIFDTESWTITDFERNVKLQRSLTNTIVDHIKAVDGIDNVKVSIVWPKEELFISMQNPVTASVTIIPKPGSDITQNRKKIEGIQKTLKFAIEGLKDDNITITDNYGNQINDFDGMKDFDKQALTERQQKFLLDMEKRYKGIVLSSIQQVFTQDRVRDLNIKFEMDMSQKTVDTKENFPVTIKPRTPGLPYDDSIIKESLIVGEVNSDTKWEGTGFNPEGPGGVEGQTPPAFKDMSNLYGRMNQTTQNINYEINQRNSQEEKSPQIDRVTVSVNIDGVWKRKFDEKRNPVITAEGTIEREYVPVPPEELKKVEGLIRDAIGI

SEQ ID NO: 96998 - protein, 726 aa, Unknown
  Obtained from environmental sample
  DOMAIN (602)...(689): Hpt domain
  misc_feature (1)..(726): Xaa is any amino acid
ILLGIVLSLSLCYILLRFSAAKMHADQDSKSKSSFLASMSHEIRTPMNAITGMAELLLRGELSDEAKGYAHDIKKAGNNLVSIINDILDFSKIEAGRLEIVPVNYLLASLINDSVNIIRMRIGEKPLRFFTNIDANIPNSLIGDETRMRQILLNLLSNAVKYSEKGHIGLSIIEHKREGKQVWLKIIVADTGKGIKKADQEKLFGEFVQVDISKNRGIEGTGLGLAITRRLCLLMGGDISLESEYGKGSVFTVVIPQGIDSPEPFAAVDEPDKKKILVYERRTVYAQAVCWSLENMKVPYTIVTNQNDFSDALRREEWFYVFSSYGLYNKIKPVMEQLDTSFHGGKKPPVALMAEWGIEDYIPNVRFLSIPVQSLSIANTLNGKAESKGYSESTGIIRFSFPSARLLVVDDIATNLKVAEGLLAPYKVIVDTCLSGRQAIEMARKHNYDMILMDHMMPEMDGIEVTAVIRAWEKVEQENGVMRKQIPIIALTANAVLGMREMYMENGFNDFLSKPIDVSKLDEILDRWIPREKREQGIAIGDQRTDYDSALNLYPDNSNRNPQSQVASPKSLSSPQSLIPIPGVDITKGIAMTGGTLNAYRQVLDIFCEDAKKRLPLFQTVPEADTLPAFVTQVHALKSASASIGAAELSALAAGLEAAGKAGNMTFIRENLPVFADRLVELAVEIRDWEKAMKKPDSEKPATADRLDRKTVTLLLHELAAALRSQ

SEQ ID NO: 96999 - protein, 583 aa, Unknown
  Obtained from environmental sample
  DOMAIN (14)...(583): Polyphosphate kinase
  misc_feature (1)..(583): Xaa is any amino acid
MFDKTSNGESGNIPSPAFFNREVSWVDFNERVLDEGLRKDLPPLERFRYLSIVSSNFDEFFMVRVAAIKRSGEDAESQALRPPELLDRICQKVRSIINRQYDALVGEIFPGLAKGGLTIRRPDEWTSSQRDYLESFFAREVFPLLTPLRVEETEDLPSIDSNSLYAGFFLKAETALDEEKPPEEHISIIRIPHVPERIIFLPGEREDHGDDEMGQTYWALIEDLVETWGHYLYPGYKVTESLVFKVNRDADFSVDEQRDEDFIEAMEEVLEGRERSMPVRMVYSPGSAKIRDCLAQKLSLAENDLFELTGPLSPGKIYDLFRGYDHLREKSWKIYPHPAFTEDQSLWDRISQGDVLLHVPYQSFDPVVRFFQDAASDPAVAAIKTALYRTSGDSPIIRALEQASLAGKHVTAVVELKARFDEGRNISWANRLEKAGVIVVYGLARLKIHAKITLVMRREYSRIKRYVHLSTGNYNDKTAKLYEDISLFTAREDIAFDAGLLFNMITGYSSVQAMNRLVIAPTALKRKLLELISREISRSSPEAPGRIMAKMNALADPEIINALYRASQAGIKVFLNVRGIAAR

SEQ ID NO: 97000 - protein, 367 aa, Unknown
  Obtained from environmental sample
  DOMAIN (195)...(315): HD domain
  misc_feature (1)..(367): Xaa is any amino acid
MILEIGGGSTEIMLLRRGQMVAAHSLRLGTLLIDQAARTGTPQGHERYISEQIRNTSGFLSSELDLAHVRTFVIAGFDAGIAADRVGRALNENCWIIGRDAFAEFVKKVQSYTDEECMEQLQLPFWEAKTFIPGITINKLLLDRTGAAQVVVPRVSIREGLLIDLAQGVDPAMQEDFYSQIFASAVNLGRKYHIDEPHCRHVASLSMTLFDALIQEHGMNRRERMLLEIAAMVHDIGMYIKAAAHNLHGQYIIANSEIFGLRREELDIIGNVIRYHRGPPPSPTDIDYIALQREERILVLKMVAILRVADALDRGHSQQVKIKAVEKKGEILVLNTDTTLDLSLELMGLEEKSGVFQDVFGYKVVIN

SEQ ID NO: 97001 - protein, 89 aa, Unknown
  Obtained from environmental sample
  DOMAIN (6)...(88): Ribosomal protein S15
  misc_feature (1)..(89): Xaa is any amino acid
MALTNESVASIVTRFGKNEKDTGATEVQIALLTERINQLTEHCKQFKKDKSGQRGLLILVGKRRRMLKYIQRTNLEGYRKLIKDLGLRK

SEQ ID NO: 97002 - protein, 430 aa, Unknown
  Obtained from environmental sample
  misc_feature (1)..(430): Xaa is any amino acid
MCDKALINERGFVMLEFGHGLRWVAMSAAVLIALAVKGVNATTGPHTFSWRGKDVDISIIQNEIPSPISDLYYKSLLESLDDFADKLRQDGKLSRGKIRFDIYNCTWDVKTGVKMYKYNGVHYCLLNGVEQAITQNYLTKIIAYFASDKWESFIYDETKIEDPVVAIEMFHRKLDPIKVSRIYGSRKVLDAGNGIAVYFEKESLICKGANMVYGVINHWIPFSSGSKSFITVGDTISVVEKGAVVNRYKLTEDDFGYGDALMPPPSKEIFSEWVNFNFYGNCILSYSIKKNKFYSASEMEAEKERVKEDVKGSNVNYGTLADSRDGKKYRTVKIGDNTWMAENMNYKPVTGESWCIDDAESNCAKYGRLYDWLAARTVCPKGWRLSSRADWDYLGKAAGGFAAGLNSRGEMATNVHDLSGNFGWFGVGKS

SEQ ID NO: 97003 - protein, 810 aa, Unknown
  Obtained from environmental sample
  DOMAIN (68)...(312): Iron only hydrogenase large subunit, C-terminal domain
  misc_feature (1)..(810): Xaa is any amino acid
MAITPLTPVIRIDEEKCINCYACIVICPVKYCMDGSGKKLLINHDICIGCGNCINACTHKARTFIDDTSRFMEDLKQNNKIIAVAAPAVASFFPDKFLNLNGYLKSLGVEAFFDVSLGAELTVISYLDYIKEKNPRTVIAQPCPAIVTYIEIHHPELLPFLAPADSPILHTIKLIREFYPQYKDHKIAVISPCIAKRREYDETGMGDYNVTMVELKNLLDDQKINLSSFPKIEYTGLSAERAAGFPIPGGLLDTAERFKPGIRRLTEKIEGVHNIYPYLKEISEILNTKAQLPLLIDCLNCEKGCIGGPGTGNAEKPLAMLENPVRKRMIELERNQKPQPGKNAYKKYHNTLQKYWKKGLYNRSYLDLSANNTIKHPNKSEINEIFHSMKKYEKEDIYNCTCCGYGSCEAMATAIFNKLNKPENCAHYILALLTEITDSEESNRLHLQEHIDHASQTIEGINRLINELNASIMSQSETIAQSSVATEKMIGSIKETSEVSRSKQEIIKGLIEDTAKSQEAMRETIQSIDDISKSVEGISQAIKIISSIAANTNLLSMNAAIEAAHAGNAGRGFAVVADEIRRLSDSTRENSVNISKTLKSIINGVTVTEKQSEGTGTRITAMSKEIGDFAKTMSDLINTFGELSSQSGEITSALDSLIRQSDKVKTGYGEILSMTEKLREVMVDLNMLSKKKVLIVDDEEITLEMTKEILHNNYNVTTANSAKAALDLFLGGYTPNFILLDLYMPEMGGWDALIRIRNLSKLHQTKIAIYTASDDPKDRAKAKEFGAAEYIHKPINGTELLERIRNLIGE

SEQ ID NO: 97004 - protein, 259 aa, Unknown
  Obtained from environmental sample
  misc_feature (1)..(259): Xaa is any amino acid
MTKTMQYRSVALFNKSEKDLIIYTGNKENKIRHIALIKKISSITIICVLLAFIVISIFSIHSMRTTSIKPAVNIGINKLKSDMLFFAKRLSIEYGQLKLIDADLIGREGVSLKNNYKLVDDISSNFNIAATVFARNGDDYRRISTSIADNAGKRTVDTFLETVNVAYQCIQSGNSYTGNDVILGKNYITKYRPIFTENEKEIIAILFIGFDMTAIEKVINSNIVNYFIRMTAITFIILLAFFSLFGLGNKYKFLRHRVK

SEQ ID NO: 97005 - protein, 420 aa, Unknown
  Obtained from environmental sample
  DOMAIN (224)...(336): PAS fold
  misc_feature (1)..(420): Xaa is any amino acid
MLENGKALITPELFQIKEYEGRFLWSEIPILKDNFAFITKSDSRNILTDEVFFLKTGVRKNSVYSEVFNKIFPDHRNLSEYETMEELWGAFERGDFEVIFASQRRLLIYTNYYEETSFKLNIVFDQTFDTSFGFNRDARILKSIVDKALRIIDINNITNQWMYKAYDYQRKLEEAKRPFLIGALILFFIVLVLISAFLQRSRDAGKKLEELVKKRTGELAFQTSKLQAIFDSIPDMVFTKDLDLNYTQCNKIMEEYNGISEKDIIGKDDVAAFGFQADIVEKVKAADRTAITKGVKIVNEETIRYRDGRIRIFETIRAPFVQDGSIVGLVAIARDITRRKAAEDEAQEASRAKSAFLANMSHELRTPLNVVIGLTDLILEDEQLDKEVAGNLVKISNAGETLLNIVNDILDISKIESGKL

SEQ ID NO: 97006 - protein, 318 aa, Unknown
  Obtained from environmental sample
  DOMAIN (127)...(286): Integrase core domain
  misc_feature (1)..(318): Xaa is any amino acid
MSLEVRQTAEREIQRYHAKTGLPITTLLKYAGISHRTWREWAQRRGAETKHNNNIPKSYHLTPEEVKAIIAYCINNALKGYRMQCWEMVDRNVAFVSCSSVYNVIKRHNLDKKWVELTEEAKKGFKQPTAVHEQWHIDFSYIKIQNSFYYFIGILDGYSRKLLNWRLCKNMEGINAEILVAETNEMYPEAVSPRLISDNGSQFISKNFEELLALLEFSHTFTSANHPQSNGKLERFHRTLKTEHVRRASYLEYQDACISLAKWIAYYNSERLHSAIWYLTPNDVFYGRTAVRLAERKEKLHTAYIKRQEYWRTKNAGS

SEQ ID NO: 97007 - protein, 579 aa, Unknown
  Obtained from environmental sample
  DOMAIN (248)...(317): HAMP domain
  misc_feature (1)..(579): Xaa is any amino acid
TAALAKNINVIQEEADYFFDQNPQIAALFYTSASPAAWTNRVFVNERFFLSRGIDINLANAFRVNSEKTLENAALGQTILVNASPQFNKAQGSTYLAAMFFPVQEGSGCVLFSTENLNESFGMGVNASFLINADGDIIADADIERVKTQTNLAEQEIIGRIFDSPDRNKQMLVELDVQLTPDYSSSSLFSYLREKLVGKIKKTNTQNENKKVRYYLAYTKLNTAGSVLITTIEYDKVFEGINATTRRNLYLTAAILFLSIMCIWFFAKSISVPLKTLAGAARSIEGGIFNIELTPASGDEIGLLTSSFGKMCAALNIFGKFTNRDIAVQAMRGQIKPGGLSKHATIFFSDIRGFTEKSENFVKAFGSEASDRIVFWLNEYLTRMVECVEKTNGIIDKFIGDAVMAHWGTAYTTGSPQADALNCVKAAMMMRIALYKLNMNRKKENMGNPPITIGCGINTGVVTAGQIGSDLRMEYTVIGDPVNLASRVEALNKPLGTDILITEDTWNLVKDQFIVEEMPSVTVKGKEKPVRLFAVVNHISVQSGPKTLAEVRKILGIKPPDISKADVNAEEVKYKIGGK

SEQ ID NO: 97008 - protein, 574 aa, Unknown
  Obtained from environmental sample
  misc_feature (1)..(574): Xaa is any amino acid
MESKKKSNGKFRFVDFLVILLCLSGAVYSVNLFWEDLFQTLNDKNKTPIGSVSIKRNIVQRRMSDRVIWDRLIRESPVYSNDMIRVGDNSEADLHVGGNDITINENTLLRLRYDKETGEYQIELTSGNIGLVTNPKGNEVALNIMGRQVKAKPGTALNAAAGDNGMALQVSEGSAVIAEENQSRELDAGKAIAMDLSGSIRSAPSVFVIQPKPNALYRKSTSEPLNIDFSWNRINLQPNETLRLEAAEDQSFSRSVRALNGLNDSAQMSLNAGLWNWRLTYNDGANSVVLDSGRFTITDAKGLELLSPAKNRQFTYESELPKLYFQWSQTDDVLYYIAEVDVTPEFRNPIIKKQTTALSFSDSSLGEGIWYWRVTPVFSQTDDGGINSSAAAFRIVKSKEPLTPSLVFAEELLPSSSYAAVPEPAAAPEPVPAVKPAPSQPLSQSNIPPIPFLAAPANRQPAEGYLIGIEELKKVNINFSWSAVRGANSYILTIYKETNGERKQIMQMGPENRTSWTTDIKTLGRGEFIWRIEAVNAGPDNAVEQHGSPAESRFTVDIPGAGPVIIINGPEDLP

SEQ ID NO: 97009 - protein, 376 aa, Unknown
  Obtained from environmental sample
  DOMAIN (133)...(376): Poxvirus D5 protein-like
  misc_feature (1)..(376): Xaa is any amino acid
MQNQLGDESVYLRIMELENGLLQHTDTTNAYRLLVEHGKDIRYNDAWKKWVVWNGKYWEMDGGYLIHDKGLQIIRGIYKELLKTADYRERIDIEKHAMQSESARRRKALVEVASWIPELNIKTDDLDKDPWLFNVRNGTIDLRTGEIKEHNQSDLITRIANVDYDPDASCPIWKKFIMEIMNYNAELIHFIQNAAGWAITGDTSEQTMFILFGTGANGKSTFLNTIMNLLGDYAIATPTETFMRKIGDYISNDIARLRGTRFVTTTEAEHGRRLSEPLIKQITGNDKMTARFLYGEFFNFIPTFKIFMATNHKPVIKGTDHGIWRRIKLVPFITRIEEDKQDKHLEQKLIQESPGILNWLIEGNIRWCMEGLKTPN

SEQ ID NO: 97010 - protein, 116 aa, Unknown
  Obtained from environmental sample
  misc_feature (1)..(116): Xaa is any amino acid
MKKRNSKNRMVTPQANGSTMKEPLPPALLSAPGQRPAVTTPAPAVRAKNSNTVMANEMTHPANREIAVQFDSVSFAYGDVPVLENVSFHIHRGEFAALVGPNGSGKTTVLKLILGL

SEQ ID NO: 97011 - protein, 60 aa, Unknown
  Obtained from environmental sample
  misc_feature (1)..(60): Xaa is any amino acid
MDLEMLQERARIIRQVRSFFDDKNYLELDTPLLSPDLIPESCLEVFETRRILPSGSGEPC

SEQ ID NO: 97012 - protein, 347 aa, Unknown
  Obtained from environmental sample
  DOMAIN (1)...(181): Mur ligase middle domain
  misc_feature (1)..(347): Xaa is any amino acid
KETDAQAYLGGNITVSPLTFLDKLKEGDDVVLELSSWQLGDLRGRRKTDDRADKNHADSMLLKPKAAVLTAIMPDHLDRYGSMEAYVADKRVIYQGQDSTDFTVAGDDSWGRSFLAESAAVPLIYSHTPLPKGVSGGWIDGSDGPGYAHLNDEKLVELVPSRPLVPGRHQKQNLLAAGLALLGLGLPAEIIRKGLETFPGVEHRLELFHQAGGIRFYNDSAATIPEAAAAALEALGGDKDGGRLILVTGGTDKNLDFSPLVQAAGRAKAIVLLAGTGSEKLCALFSDTGIVYRGPFDALDKAIAAALEAAAPGDRIALSPGCASFGMFLNEFDRGRKWKETVKRLVR

SEQ ID NO: 97013 - protein, 238 aa, Unknown
  Obtained from environmental sample
  DOMAIN (6)...(235): Pyridoxal-phosphate dependent enzyme
  misc_feature (1)..(238): Xaa is any amino acid
MLKPMSDYGIGKTPLLELPQIGSNRIYLKMESKNFLDSVKARTAYGLVRGLNVPIDSIIIESTSGNLGLALNFFCREEKRFFLCLLDETVIEAKRNYLESQGVNCEVVPTRIGMDGRTSRMRRAEELTSLGKHYWVNQYDNEDGVIIHGETTAPEILEQTDGSVTCVVCAVGSGGTICGIGEYFNSIGSTIMLIGVEPYGSTIFHKTESTYITAGAGLRGKPGNIVRHSRVMGKRWLF

SEQ ID NO: 97014 - protein, 379 aa, Unknown
  Obtained from environmental sample
  misc_feature (1)..(379): Xaa is any amino acid
SIRVLDGIGFDAAIDRASSLLGYTDPDDIRRRFPRVYPLGLGIISTSPLRMARAFSIFANLGREVTPIAIRSVEDRNGRIILDIEREVRQEQRRKGNAIQVVSPQNAYVMISMLKKTVERPGGTLYNPSGWGSKFTFKDANGKTFKMPMAGKTGTPQNWSDAWTIGFSAYYTTAIWFGFDKPGNSLGLTLTGSTLAGPVWADYMREIHQGLPYRDFLRPATGLVDATVCIKSGLLKTPSCTEGEVTLTFLEGTQPMLFCEECGSTRGFDAFRYIELNPIFFDTLDFLNDLKMPVLRDEALLREIEEEMRRPQSSLTISRNTTPDPITLPTLNLPILDLVENSPQPVPQPIVEDDSDENETSALDMDDSLEAPSYNPLLD

SEQ ID NO: 97015 - protein, 129 aa, Unknown
  Obtained from environmental sample
  DOMAIN (1)...(85): ParB-like nuclease domain
  misc_feature (1)..(129): Xaa is any amino acid
MLVPINDIKVKRRIRKEMGDITALADSMKRFGQISPILITKNNVLIAGGRRLEAARSLGWTSINAVIAEIPDELSKLEYELEENIQRRNFTPTETNEAAKRIYRLRNPSLFRRIIAAIAGFFRRLFRIE

SEQ ID NO: 97016 - protein, 479 aa, Unknown
  Obtained from environmental sample
  DOMAIN (34)...(188): Histidine kinase-, DNA gyrase B-, and HSP90-like ATPase
  misc_feature (1)..(479): Xaa is any amino acid
MQPKNQNQQQPQNLEFQTEAKQLLHLMIHSLYSHKEVFLRELVSNASDALDKLRFEALTNPAINAGAELAIRVAVDKEAKTVTVSDNGIGMSREEAIENLGTIARSGSKAFLEKMTGEERADSNLIGQFGVGFYSAFMVANRVKVITKRAGSDGGAVAWESTGENSYTISDAEKEGHGTDVVVYLKDDESEYLELWQVRSLIKKYSDFIAFPIYLPNDKGENEIVNQTKPLWLRPASEVTREQYEEFYHQALGGYGKTLCAMHSKAEGILEYSSLLFIPGQAPFDLFSSFERKHGVKLYVRRVFIMDNCKELLPEYLRFVRGVVDSEDLPLNVSREMLQKNAVIERMHKALVSKVLGKLTEMAESDPAAYKEFWKCFGTVLKEGLYNDYENREKLLELARFQSSMCDGDDFVSFKQYVGRMREDQKDIYYITAESRSVAEKSPHLEIFREKSIEVLYLVDPVDEWIIGMGGISDYNGKQ

SEQ ID NO: 97017 - protein, 692 aa, Unknown
  Obtained from environmental sample
  misc_feature (1)..(692): Xaa is any amino acid
MAESAYYMEDLRKPNANLYLYLAATEGSQGEEAADTFRKYFKEYSPKRALALIYLKLQSDNGITIGAKHYQSPEELKHEKDRAQIALIKKAVMEKDSMLLVWLSDIYGDDLKSTDKISNLSIREQFFLLGLFPFLSFKDFNNRNSWDVLRDLIDFFPGRSDFFEIYAAQGLPLTGQNYNNITPIDYVVCNFNELCGKHGTVTPYNLIRLLCKLGANVNEYSGDGTCPLINAYKAKNDDLVNLLLELGADESQYLAYKERIEEEEQQEQKAREEQERKKAEAKREKILKKIIGILAAMIAVAALILFIAYRLTGSFFKFQQNDQGTITVTGYSGKKEVVIPSTEKGTSVTEIGDKAFYRKNIISVTIPDGVTSIGNSAFEDCAKFTNVNIPNSVTNIGDKAFYNCNSLTNVTIPNNVSSVANYSIIDGIMYNESKTEFIFRPSGIKGITGSVTIPNGVTSIGDYAFRGCTNLTSVTIPDSVTSIGYAAFGTCTNLTSITIPDGVTSIGDEAFGSCTNLTSVTIPDGVTSIGDNAFSYCNSLTSVTIPKSVTSIGKSPFRDCTNLTTINVASDNPSYTADNGVLYDKAKTTLIQYPKGKTDASFAIPDGVTDIGYEAFYCCSSLTSVTIPNSVNNIGDWAFIRTGLTSITIPGNVTSIGIYTFHGCSSLTSVTIMEGVTNIGSTAFGYCTNLPV

SEQ ID NO: 97018 - protein, 119 aa, Unknown
  Obtained from environmental sample
  misc_feature (1)..(119): Xaa is any amino acid
IYLLRNGGLQRLTIDHSLRESGGNPNAPPNIITNALGGGNSAFIEFEEIEQPFLNNDIYLLSSDGLHDLVPPDVISDTLIQPDTRAAGDAAEKLLALAKENGGFDNISIITIKVQDKIE

SEQ ID NO: 97019 - protein, 288 aa, Unknown
  Obtained from environmental sample
  DOMAIN (19)...(288): Poxvirus D5 protein-like
  misc_feature (1)..(288): Xaa is any amino acid
WIPELNINTDNLDTDPWLFNVKNGTINLKTGEIGEPKPEDLITRIANVTYDTHADCPNWKKFVMEIMNYNADLIHFIQNAAGWAISGDTSEQCMFILFGTGANGKSTFLNTIMNLMGDYAIATPTETFMKKTGDQISNDIARLRGTRFVTTTEAEHGQRLSEPLIKQITGNDRMTARFLYGEYFNFVPTFKIWMATNHKPTIKGTDHGIWRRIKLIPFTTRIEEEKQDKHLEQKLMEERAGILNWLIEGAMRWRKEGLRTPTIIISATAEYRAEMDIIGNFIRERCVQ

SEQ ID NO: 97020 - protein, 335 aa, Unknown
  Obtained from environmental sample
  DOMAIN (1)...(332): Predicted permease YjgP/YjgQ family
  misc_feature (1)..(335): Xaa is any amino acid
MFVFLLLLIDLFSNLIRYLNNEVPIATILKISLFYVPKSISYSMPMSLLFAAAYTLGDLYARNELTSVFATGIPLWRFSMSFVAVGLAASIFSFYLDDRIVIPTLKEKNELTRRALKQYVTESNSDIVIKSRNGRIIYSVDYFDSEKNILNGVNVVEMNEKGLFISQIRAFSADWVDGHWEFKNAVIYRYDEEGVLRVYPFVSTDTYNEHPDIFRRKAVNVEELNAKNAGLLIKDLRIAGLPYRHTQANYYHRYSFAATSLIVMILSISMGGRFRKNILLMSLFTSLSVAVVYYIAEMLSMTMAGLNYIHPFVGAWFPVLIFLVLGVHLLRSSKT

SEQ ID NO: 97021 - protein, 242 aa, Unknown
  Obtained from environmental sample
  misc_feature (1)..(242): Xaa is any amino acid
MKIAVKGLGIAILAVMLVFALAGCNEVGDISTTTSGGGSTPGGGTTPGGGNTPGGGNTPGGGNNPGGGNNPSGGNTVIKTTAIVVTAPVKGAAPSTTATVEDNGNFTIGSVSWSPTDNPFKGDEVYTVYVTLTAKSGYIFTGLSSATINGKSAEVSNNAGSTVKLSHTFPATNTKTVTGIKIKSQPNKLTYTHGDTLVLSGLAVTLTHDDTTTEDVDAADFADKNVTANPSAGNSLVYSTHD

SEQ ID NO: 97022 - protein, 70 aa, Unknown
  Obtained from environmental sample
  misc_feature (1)..(70): Xaa is any amino acid
FLSARQITGKKLALFCCHGGGKGKALEKLKALLPGNTILGETDFVNPAKKGRAALEEKITAWLTTLGVNP

SEQ ID NO: 97023 - protein, 144 aa, Unknown
  Obtained from environmental sample
  misc_feature (1)..(144): Xaa is any amino acid
VLSFPPNTGFLAHAGIVASATLLSRILGFARDMCMAWLLGGGPAADALTLALRLPNLARRLLGEGTLSMSLTAGFSRSPALTELRHDAAGQARLSRLAAALGVRVAAVLGCAVLLGEALAQPLMALLTPGLHTEFAARSAFLLR

SEQ ID NO: 97024 - protein, 165 aa, Unknown
  Obtained from environmental sample
  misc_feature (1)..(165): Xaa is any amino acid
MEQRQYKETRVKRIGRFSALCRMIKIEHSVFALPFALGGAFLAARGLPPWPVLFWLVTAMVGIRTFAMTMNRVADLRFDRLNPRTQKRPLVTGEITLRQAWAFIIGSAALFVFACAMLGSLCLALAPLALFMSAGYSLLKRVTWLCHFGLGCVHALAPIAGWISV

SEQ ID NO: 97025 - protein, 241 aa, Unknown
  Obtained from environmental sample
  DOMAIN (78)...(241): DnaB-like helicase C terminal domain
  misc_feature (1)..(241): Xaa is any amino acid
VLADILIRKRRLRDLIKLGAQLVRKAASEEDPPETLVETAGRDLFGIAQGHERGGLEHIAQVAQDVHGRLQERLESGGSPGVRLGFQRLDALTRGLQPGNLVVLAARPGLGKTALALNWLLHSSKAYGSHVAFFSLEMSKEEVFNRLLASHSSLNVRAVMSGDIDEHGDPDAPHAYGHLEIVREKLLRARDELVQMPAYICDRASITVHEITAMVDRLCTQTDKRLDLVIIDYLQLISSPA

SEQ ID NO: 97026 - protein, 73 aa, Unknown
  Obtained from environmental sample
  misc_feature (1)..(73): Xaa is any amino acid
IEVHREDVPAGKKILLVDDLIATGGTLNAARALLNAGGAQVPEIFGVVGLPFLNYQKTLDPTPVTTLINYHGE

SEQ ID NO: 97027 - protein, 276 aa, Unknown
  Obtained from environmental sample
  DOMAIN (1)...(180): Glycosyl hydrolases family 2, TIM barrel domain
  misc_feature (1)..(276): Xaa is any amino acid
SFGRWGTKAGDGANHDMGAAWIRRYDSFRPVSYEGAVRLKRKQGRATLDSLNRCKDLTDIVCPMYPEIETITDFVKHCEDHRPLIMIEYSHAMGNSNGSLSDYWKAIESHHGLQGGFIWEWIDHGLEAFTPDGKKYWKYGGDFGDLPSDYDFCCDGLLFPDQTPKPAMAECKQLFAPVRLTPVPGKPFAFILENRYDFSALDALVLNWKLCTEKIGGDIGEKILSQGSMAIPALKPGEKQEIEIPGLALDSILSEYPGAVYLHANFALKEAVPWAK

SEQ ID NO: 97028 - protein, 376 aa, Unknown
  Obtained from environmental sample
  misc_feature (1)..(376): Xaa is any amino acid
EAVSVSVGSVTISGGKVSAVVPTGYSGILNVTAVSVSSGSVTISGGEVSATSTGGTATNYYAIDNSSTGTVNLGNSPNITGRIRTTDGTLEVITSGGNTFNPGSNVYTIELYNAPNAAIAVKNGANYLSNFNVYDPTGVFDLSASGNDLIFGVNGYSVSSSGTSYTITRGTGKIILVQDAINLIKTQSNKANCSIQFGDGSNVLDIGNEYITFDGTSSAWGLITLTGKITSSSNSSYGTISLTNGASIASTANIANTAASNSYAVRNSGTGSVTISGGTVSAAVYNSSSGKITVSGTATITSANTNPNQGTIYNNNGTIEIIGGTVENTATITNARAIYNSTGAVTISGGTVSATGSGKTIYNNSGTVTINDGKVS

SEQ ID NO: 97029 - protein, 295 aa, Unknown
  Obtained from environmental sample
  misc_feature (1)..(295): Xaa is any amino acid
MSDTANKERRKTSNKALDIFVVLFCLCGAAASMYYFYLDIYSTFRSYSVVPAGTVTVKYNTVQRRLADRAVWDRLFEQSAVYSGDLVRIARLSGATLNIDDNSIELGENTLIRIQKDEGPLQIEFSYGNISVTSGGDRGTILLSIGDQVVQVLPGAEVSALSGNDGLVLRVTEGAAQVIRDGQVTDVPAGGMVVRDSEGNEVRQPMAAVIHPKPNAVLLKTEAGPLIVEFKWARINLQPQELLRLEIAEDRYFRKIIQTADNLDSSAVVSLNTGLWHWRLLHGNNTLASGRMSVI

SEQ ID NO: 97030 - protein, 298 aa, Unknown
  Obtained from environmental sample
  misc_feature (1)..(298): Xaa is any amino acid
GYYVDKSEGEPVFKQRLVWDEEEYVLYYEVTIQISSGQYRDYRVEKTRNNYIEISLNPGRYRYSVTPYDLLERRCESSDWEEFTITTAFQPEIYKFTPGFFYMEQNKKRVLLVTGNNIFDDSVIYLRNEKNELIPIQKVVTDNSSATLTFDDDTLIPGNYEVYIKNPGGLDAFLGGFFVGYSKPLEIFIKVGFNPIIPAGGELRDIFGSYLYYPGITFKLESLTSERSYFKAGMEFALSFYYLNKIFSIRPLESIFKNDNGFPDASASLVDFAINIPMQIRFNHLRNAVTFAFGFGFT

SEQ ID NO: 97031 - protein, 239 aa, Unknown
  Obtained from environmental sample
  misc_feature (1)..(239): Xaa is any amino acid
LLGVAANFFTVAGATAGNPANSGVVTAVFPATAATVNNNAIAGVTAPVAGEAPVAAVTETAQYTGTVTWLPNHSTFAAATQYTATITLTAKAGYTLHGVAQNFFTVAGAASASNAANSGVVTAVFPQTAPTVSIAAIAGVTVPVAGGIPVTVIAENEQYSGTVTWNGNAFAAGTQYTATITLTAKAGYTLQGVAQNFFTVAGATSVSNPANSGVVTAIFPRTAGALSFTLNYNGTAYSV

SEQ ID NO: 97032 - protein, 95 aa, Unknown
  Obtained from environmental sample
  misc_feature (1)..(95): Xaa is any amino acid
VVAHHTTFAASTVYTATITLTAKETYTLQGVKANFFTVNGATATNAANSGVITAVFPKTGGTGTVTDPTVISISAIEGLTAPATGGTPVTTIRNC

SEQ ID NO: 97033 - protein, 289 aa, Unknown
  Obtained from environmental sample
  DOMAIN (1)...(289): Carbon starvation protein CstA
  misc_feature (1)..(289): Xaa is any amino acid
MISFIIGVAALVVGYLIYGKIAEKIFAIKPEQQTPAMRLNDGVDFVPMAPWKTTLIQLLNIAGTGPIFGAIAGALFGPAAFAWIVFGCIFTGAVHDYMVGMLSVRNNGANISEIVGKYLGKVPLYIMRVFSIVLLIFVGAVFVTTPAQVLKTMFAPNSTTFYYIIIACIIGYYILATLLPIDKLIGRIYPFFGACLLVMAIGMTFKMFSTGDIKNIPEFAFTNFRPDKGTNIIAHLFPFLFITIACGAVSGFHATQSPLMARCLKNEKDGRITFYGAMILEGIIAMIWA

SEQ ID NO: 97034 - protein, 348 aa, Unknown
  Obtained from environmental sample
  DOMAIN (81)...(317): FGGY family of carbohydrate kinases, C-terminal domain
  misc_feature (1)..(348): Xaa is any amino acid
CGGTKQRVRPRGLFDLKTRTWDKNIALRCDLRDDIFPDVIECGTVAAKISKTGAEQTGLLEGTPLVVGGGDCQLGTVGVGVVDTNEAVVFGGSFWQYEYNTDSGLCSPKCDVRVNCHAIDNLWQYEALAFNPGLVMRWYRDAFCAEEKRLAAEQHADPYALMDKAAANIPAGSYGMICTFSDVMNYINWKHAAPGFLNFELNPEKYNKFTFYRAIMENTALVTLGHLRLVEAATGQCPKKIIFAGGASKSALWPQILTDALGIPVEVPVVKEATALGAAIMAGKGIGLYADVKETARKLAKIEKVFSPNKENSEVYEKAFEKWKSAYSPQLRLSDEKVTKYMWLAPGM

SEQ ID NO: 97035 - protein, 295 aa, Unknown
  Obtained from environmental sample
  DOMAIN (13)...(242): FGGY family of carbohydrate kinases, N-terminal domain
  misc_feature (1)..(295): Xaa is any amino acid
GPGSGYHKLSCDLFDSEQNIVNVSQKEFPQHYPKEGWVEHDPMDIFSSQYAVMMEVIAQSGINISELAAIGITNQRETTVLWEKDSGHPIYNAIVWQCRRTAHIVDSLKAQGLEDHIKKTTGLIPDAYFSATKIKWVLDHVNGAREKAARGEILFGTVDSWLIWKLTNGKVHITDYTNASRTMLYDIKRLCWDETLLKALDIPKECLPEVRNSSDIYGYVNIQGREVPIAGIAGDQQAALFGQCCFASGDTKNTYGTGCFLLMNTGEKPIESKNGLLTTIGIGLKGEIQYALEGS

SEQ ID NO: 97036 - protein, 243 aa, Unknown
  Obtained from environmental sample
  misc_feature (1)..(243): Xaa is any amino acid
MVINVQGLVVSPAFIDSHSHSDGWYIIDEKCESKIYQGVATEVVGQCGSTLFPRSQSQLSRLKKDGPDDKSDPSEYYQSKNFEQLRKKAAVDGKKMSTNLVQLVGHNAIRRGVVGFAGRPCNDEENKLSAFLLEESLEQGAWGLSLGLEYMPGVFADFNELKELGKVCEKYDVAVTSHMRDEGENVFKSVDEMVALSRETGAKVNISHLKTCAKKHWGKAGELYRKIEDANRGGARVTADMYP

SEQ ID NO: 97037 - protein, 425 aa, Unknown
  Obtained from environmental sample
  DOMAIN (17)...(88): HAMP domain
  misc_feature (1)..(425): Xaa is any amino acid
FDGEYLHKTIIANEKRRAFIGGISLLFGLALVLFFLRQIFSPLDKINIILKEISMGEGDLTGRIETGKKNEMGELAGYFNMTLDKIRNLIVVIKDEAANLHNVGDNLASHMQDTAGAVYQITANIEVVKEKVTGQSASVSQTGATMEQVTANIDKLGRNVEAQTESVSRSSSAIEEMLVNIENVTKTLGKNAESVQELIKVSDTGRGSLQKVTQDIHEIARESEGLLEINTVMENIASQTNLLSMNAAIEAAHAGEAGKGFAVVADEIRKLAESSAEQSKTIGNILKKIKGSIDKISGSTQNVLTKFEAIDSSIRIVAEQEENIRNAMQEQETGSRQLLQSASSLNELTEQVKGGSSEMLEGSKEVIQESNNLEKATQEITSGMNEMASGADQINVAVSRVNEISGKNRKGIETLMHEVSRFKVA

SEQ ID NO: 97038 - protein, 498 aa, Unknown
  Obtained from environmental sample
  misc_feature (1)..(498): Xaa is any amino acid
NAAKSAWDRALDLGKAHGYRNAQVTAIAPTGTIGFLMDCDTTGIEPDYALVKFKKLAGGGYFKIINQSVPPALENLGYSPQAIEEIIAFATGRKTLGGAPIISHETLKEKGFTQEVIDLAEDAVKTALNLEAVFNPYILGKKFVEETLNIPESTWSLQGFSLLKHLGFSSQDIEDAELFACGTMGLEGAPGLKKEHYAVFDTAAPSGKKGKRSISWTAHIGMMAAVQPFISGAISKTINMPNSANYDDVKGAYMLSWKNALKAVALYRDGSKLSQPLNTFAPGTDPLADTIIKVEKGLELPSVPDRKKAASLRGLRKSLPNRRMGYTQKAKIGGHSIFIRTGEYEDGSLGEIFLDMHKEGAAFRSLLNSFAITVSLGLQYGVPLEEYVDAFTFSRFEPNGLVQGHDYVKMATSVIDYVFRDLAISYLKRSDLGQVKPEDLVATAMKSENETDPKPKGEKQSVGFRPSASVSVPLTPAPAVPASVKSCKLTSGNSGNVP

SEQ ID NO: 97039 - protein, 186 aa, Unknown
  Obtained from environmental sample
  DOMAIN (13)...(36): 4Fe-4S binding domain
  misc_feature (1)..(186): Xaa is any amino acid
MKEKGSLSLPPVIRVDGEKCTNCQKCIAVCPVKFCNDGSGKAISLNHDMCIGCGSCIPACTHGARTGIDDTDVFFADLAKGEKIIAIVAPAVVASFPDQYLNLNGWLKSLGVGACFDVSFGAELTVKSYLDYMKREKPKTVISQPCPAIVTYIEVYRPELIPHLAPADSPMLHTAKMVREFYTLTA

SEQ ID NO: 97040 - protein, 245 aa, Unknown
  Obtained from environmental sample
  DOMAIN (44)...(92): Regulator of chromosome condensation (RCC1)
  misc_feature (1)..(245): Xaa is any amino acid
VSERQPCANLVDGVLREYGLPPESEAAALGGLLSGGHSPTIKTDGSLWAWGPNNFGQLGIGRNDKYASLPVQVGTGSDWAAVSAGVSHTVAIKADGSLWAWGNESGNASLSAPVRVGTESDWVLASAGKGRNYAIKADGSLWGWSAIETPIRVDDDTSSTQKKSRRQDARPGWVTVGTFENRVIALKSDGTLWTWSNKEFREKKFYEQYYRTVSRFTPDQVGADSDWKAVSVDPRRTMAVKADGS

SEQ ID NO: 97041 - protein, 327 aa, Unknown
  Obtained from environmental sample
  DOMAIN (1)...(290): Basic membrane protein
  misc_feature (1)..(327): Xaa is any amino acid
QVGFIYIGSIHDEGYTQAHDKGRLALEAKGIKCAYVENVPENADCEKAIRDLIDQGCNVIYTNSFGFMDWTLKVAGDFPNVYFGHCSGYKRADNMSTYFGKVYQARYLSGIAAGYKTKVNKIGYVAAFPIPEVIRGINAFTLGVQSVNPNATVEVIWTSTWYDPAVEKQGAIELLNKGCDVIAQHQDTTAPQIAAQERGAFAVGYNVSTPNAAPKAYLTAPLFHWEVFYVDDINQVINGTWKSRAYWEGFSNGTVTLDKLTDNNDPRAAGTIETARNAIKEGTLELFTGPLSDQSGEVRVPAGTKMTDDEIWNMGWFVKGVIGIIPG

SEQ ID NO: 97042 - protein, 64 aa, Unknown
  Obtained from environmental sample
  misc_feature (1)..(64): Xaa is any amino acid
MGHKDIAEDRSAEVKYVNIPIPAANSDLKARYIKLKIETLGLCPSWHYGVGYPAWFFLDEVNVY

SEQ ID NO: 97043 - protein, 145 aa, Unknown
  Obtained from environmental sample
  DOMAIN (24)...(144): Late embryogenesis abundant protein
  misc_feature (1)..(145): Xaa is any amino acid
MKRKLSIMAAMAAILICCLVCTTCDLLKDVVKAPELSLKSVDFTNIDFDGLTLLSKIDIQNDNSISIPLPKIDWDLNIIDNPFVNGIIQSEGALKSRGATEVQFPVAFTYENLKNTITALTDENAKYKLNMTAHIPVPELGDMSW

SEQ ID NO: 97044 - protein, 283 aa, Unknown
  Obtained from environmental sample
  misc_feature (1)..(283): Xaa is any amino acid
METRASLPQKILSRAEKVICFGALSLLALIPFIEFILRQFRLIIPAARLMMPQLFLITGFFAGMLTAKFGEHISITAVQYIKSEKIKHVLGFLTSLLSVFVMTVLAWNCVSFIKYNMWKSIGPVSESVFAFAMPLGYAVIALRFAVRKRTSKEIIIMAAAFLLGTAAALPAIAKIIWGFEPPEPYFTWVNKLYDLAAFIRVPAILFLVLAALSGMPIFAAIGGIALVMLQAAGMEPDAAPLHIHSALVETDIIAIPLFTLTGFFLSESSAGVRLVRTFRCFFG

SEQ ID NO: 97045 - protein, 256 aa, Unknown
  Obtained from environmental sample
  DOMAIN (1)...(185): Pyruvate ferredoxin/flavodoxin oxidoreductase
  misc_feature (1)..(256): Xaa is any amino acid
DGTVGANKNSIKIIGEYTENYTQGYFVYDSKKSGSGTTSHLRFGSEPIHAPYLIEPNQADFIACHHTPHLYQVNMLRYAKPGAVFLINTQHSADTAWDTFPKEVQKQIIDKKLKVFVIDGYKVAHDTGMGRRINTIMQTCFFAISGILPKEEAISHIKDSIKKSYLKKGEEVVKKNWEAVDHTLAHLSEVKVPDSVSATSGFRPALIGTNDEFLNSVTAKIIEGYGDELPVSKIPADGTYPTATSKYEKRDLAWKF

SEQ ID NO: 97046 - protein, 420 aa, Unknown
  Obtained from environmental sample
  misc_feature (1)..(420): Xaa is any amino acid
MKNILTVLIITVIVFTFFTCSTSSNGDSAAVVIINYDEYRQEIDGFGGSNAWTGTPKDYETSQELVNLLFSKTKGIGLTILRNRLPFRERLQNDESPGVNDGFVSRKSDNTYDFTVNTDGTKTFNLNWRAWDISNTRGLIEQILDLGDDGPEKLTIMSTPWTAPNNRVTQWKENVTGVSSKLDYKIDWNKPDVWGKLKRDKYEDYADLLADYARNFEANMGAPLSILSIQNEPNYKVDYESTYWSGENIRDFINIIAQRFPKKGVTFGKTGLGIMMPEYENFDVNYGQMIKPSIDSPASNAVITHIALHQYNGPYDSSDRAGAKAFPDIIATGKRFWQTEVSTSSGQTPYGTGIDNALYYARMIHFDFTLSQINAFLYWWLWKNNDNDRNFPGGLINITDGETIKTSKRLFALGQYSRFI

SEQ ID NO: 97047 - protein, 266 aa, Unknown
  Obtained from environmental sample
  DOMAIN (47)...(124): Bacterial Ig-like domain (group 2)
  misc_feature (1)..(266): Xaa is any amino acid
TSNAAVATVNGPTVTAVGVGSATITVTTLDGGWTATCQVTVTASTVPVTGVTLNKTSLALGVGGQEQLTATVAPSDATNKTVAWSSSSTAVATVANGLVKAVAPGTATITVTTQDGSKTATCAVTVSATGTISITGPTGMFVGKTAAFTATVTGISDNAVTWSATGGSFSGSTYTAPQTAGFYTITATSVLDQAVKQSVQVKVNEASAASVDGNTKTSPSLLGLVRTFGSTNSTDLEKCDSDNSGRLDDGDLTPLFAETDGNGVVR

SEQ ID NO: 97048 - protein, 101 aa, Unknown
  Obtained from environmental sample
  DOMAIN (1)...(95): GGDEF domain
  misc_feature (1)..(101): Xaa is any amino acid
KSISRPDDFAARYGGEEFAVVLPNTDENGARLVANTILESIRKLNIAHEKNDVADCVTISIGGITGDVTHTQKVDDYIIHSDKMLYESKQNGRNRYTAGKL

SEQ ID NO: 97049 - protein, 419 aa, Unknown
  Obtained from environmental sample
  misc_feature (1)..(419): Xaa is any amino acid
MEIATLSGAFANTRFPGIGRYCESRPNPAMFKGLTGSGDAFLAADLYRQSKSTLLVLTENTKSAERLADDCLAILGSDNDIALFPSRDAVPYNMKSPFGPTVEARLGILSDLLAGRRRLIIAPAAALLQRTPGRRELFNSIIRLETGTEVPMDSLANWLSGSGFRRESSTDNLGAFSIRGGILDLYPFLSDNPYRVEFWGDTIESIRSFDVFTQKSVGAHKSLEIVPMREFCLSDAHLDSAVEKMLASCESGALSVAETAIRKLEHQWKTVGDLDGAEWFWHWFGLDSASILDYLPTDAIIVWNDIVPMKRRLGEALDNYAHHLERVPDAFAPLVSPPSELLFDEKTIAEEMACYNVLYVDTVDTPKDTALFPVSFSPQPLVQQELGHIASGLREHVDGGYRCVIACHSAGHAERVAGL

SEQ ID NO: 97050 - protein, 360 aa, Unknown
  Obtained from environmental sample
  DOMAIN (299)...(360): TRCF domain
  misc_feature (1)..(360): Xaa is any amino acid
LIGTHRILSEDVKFKNLGLLIVDEEQRFGVKHKESLKQLRYKADALSMTATPIPRTLHMSLVGARDLSIINTPPRNRLPIETVVAEYHDDLVKSAIENELDRGGQIYFVNNRISNIPALQDRLEILAPKAKTISAHGQMEESELEAIMKEFIAGRYDILLSTVIIENGLDIPNVNTIIVNRADTLGLSQLYQLRGRVGRSSEQAYAYFLTPPFNEVKEDSLKRLRALEQYTDLGSGFQIAMRDLEIRGAGNILGTRQHGFIAAVGFELYCRLLQDAVEEIKGGGQSEENKTAMPDTRLDVPMQAYIPTEYIADGQTRIAVYQEMSSLKSTEELSDMERGLSDRFGALPEPVGALILLMRL

SEQ ID NO: 97051 - protein, 465 aa, Unknown
  Obtained from environmental sample
  misc_feature (1)..(465): Xaa is any amino acid
VSGDINVYAQWTANTLTITYAPGGGSGSNPTSPTSAAYGTNVPMPQNTFTRTGYSFAGWAVSGDGATTGTHAAGANVAVTALSSGITIGNTSITLTAQWTAHILTISYAGNGNTGGSTPTSPTSAAYGTSITMPANTFTRTGYSFAGWAVSGTDSISGTHMAEVSVAVSDLSTGIITGNAGITLTATWTENNSYLVTFTKNASDATEANPSSKKVTLPATTIDALPTAPTRTGYTFAGWNTQADGKGTVFVQTTTVSASVTVYAQWTANTLTISYAGGGGGGSVPTSPTSVAYGTNVTMPANTFTRTGYTFTGWAVSGTGSVPGTYAAGLSKTVSDLSTVINTGNASITLTATWEIIKSSNANIRAVTGAGTPQAKYGLYIAGMPGISNGDPKTTANGFTSTASTLFGNYTTTLGSNNRSVVTIVEDDKVTSVEYGIVNTENDTAPASWNSLTRDNTNGTADTLT

SEQ ID NO: 97052 - protein, 438 aa, Unknown
  Obtained from environmental sample
  DOMAIN (336)...(435): Putative tRNA binding domain
  misc_feature (1)..(438): Xaa is any amino acid
GYENKVSYVWFDAPIGYISITGTLGEEKGNWRDFVNYWWKSPNDVELFQFIGKDNIPFHTVIFPSSLLGSGEKWTMLHHMSSTEYLNYENGKFSKSRGIGVFGTDAKETGIPADVWRFYVYYNRPEKSDAMFTWSDFQEKVNGELIGNLGNLVNRTLSFVTRYYDGVIPEGKSDGAFWAEAVKKEKSITEKLDRAELRDAFREIFELSSFANKYFQDNEPWRLRNDDPEKAKAVIRDLTYIVRDFSVLIEPYMPQAAGKIASFFGLKHRENLDWKDIGKAEGIGNVKITSEVLFAKLEDELVETMRTRFSGSQKERQESEAVQAAESKPFSAVMDLRVAKIEKIERHPKADKLYIEYLEAGEGVTGTREERVIVSGLVPFYKEEELLGKKIIVAYNLKPAKLRGVESRGMLLAASDHKATGADGQPAERVEALTQETA

SEQ ID NO: 97053 - protein, 314 aa, Unknown
  Obtained from environmental sample
  misc_feature (1)..(314): Xaa is any amino acid
NGHTFIGLLSEHTTINGEQATTTNNTGETITLSYTFNETAAINAKNVSNISVKTQPKLNYTHGDALDLSLLNVTLTYDDGTTEDVVSSAFSAHSLTTTPANNTPLERSSYNDKPVTINYGSKTATTNNLNIDAKSLSDTDAITVEPSSITAVTYTGNELKPAITYVRHTVPTGTIRTLDLNIDYKLEYSNNRNAGTATITITGKEDYTGTRTVNFTINKAAGATVNSPTLVSTSGGSSGYNEGSATINPITINGQSVEYGISTTNDASTVSVWQDGLTFSNLTIGLIDYQFIFARSKGDDNHLTGTASAGLPVT

SEQ ID NO: 97054 - protein, 301 aa, Unknown
  Obtained from environmental sample
  misc_feature (1)..(301): Xaa is any amino acid
VEIILGTPVSTTVSALEIPLNVRVGGTGGTDNLPAGWTLTTSTTGFKIEGSAGAVVAGGSAAASGLSLKADAGLTSGTNKTVTIALSGTGTNSHTLITTTLTVTVTGDPLAAKKVRISLGTAVGTTVANFEYPLNVEVGGTTTTDDLPATWRLTTSTAGFSITGTANVITAGGVSPVASGFKLVADEGLTVGNKTVIIVLSGAGTSNHTLLSNTLNVRVESAPATIVISGAVNNDNKLTSGNGAAANVITPTTPIVQYVGNIKERLNVKADILKATLPTGSTFSADTGFRYTWYRTTAAGT

SEQ ID NO: 97055 - protein, 451 aa, Unknown
  Obtained from environmental sample
  misc_feature (1)..(451): Xaa is any amino acid
GGLSEAEICKLTGAERLYWSQLYFGIASHLTDRGGLVTFAHSFIRDAVKKRYLSGRAVIRKYRMKIADYMNDPLSMVPFNRKLDELIYQAWNVESKDVLKTPEVCLAAVQQWGSAFKYVPEALRTPEICLTAMQQYDWKLAYDFETSKMVKTFFGYVPKALRTPEIYLAAVKENSRTLDYVPKKLLTPEFYLAAVQQSGYMLEYAPEALRTPEICLTAVQQNSDALKYVPEASRTPEICLTAVQQDGEALEYVPKSLRTPEICLAAVQQNGRALEHVPKSLRTSEFYFSTVQQNGRALEYIPAELRTPEICLAAVQQNGRALEHVPEALWTSKICHAAVQQNGEALEYVIETLWRCKKFVRRFIFIISLKLGSILFTAVQQNGDALKYVPDAFRTPELCLAAVQQNGSALEYVPEALRTPELCIAAVQQDIEALNYVPETVKTQVKKAGEI

SEQ ID NO: 97056 - protein, 604 aa, Unknown
  Obtained from environmental sample
  DOMAIN (579)...(602): 4Fe-4S binding domain
  misc_feature (1)..(604): Xaa is any amino acid
MAFNHYILTCGGTACESSKGNELFNHLKAEADKQGVRSQVQIVKTGCFGFCEKGPIVKVLPEDSFYVDVKPEDAKDIIAEHIIKGREVKRLLYNEDDAKKSIITVEDIPFYQKQFRVVLRNCGVINPESIDEYIAREGYAGLEKVLFEWTQEQLIEEVKTSGLRGRGGAGFPTWLKWDLARKAQGDVKYVICNADEGDPGAYMDRSTIEGDPHSVIEGMITAGKAIGAHQGFVYIRAEYPLAIDRLRIALKQAHEYGLLGKDILGSGFDFDIEIRLGAGAFVCGEETALIKSVEGNRGMPVPKPPFPANKGLWGKPTIINNVETFANVPVITAKGGAWLAKLGTEKSKGTKVFALTGKVKNSGLVEVPMGTTLREIIFEIGGGIKNGKKFKGVQTGGPSGGILTEKSLDLPIDFDTLTANGSMMGSGGMIVMDEDDCVVDVARFYMDFCVDESCGKCSPCRIGTTQILKLLEKITNGNGEDEDLDKLEEIGVAMTKASLCMLGGSAANPTLSTLRNFRDEYLEHIHDKKCRAGKCKKLLRFSIDAEKCIGCGMCAKKCPANCIKALDPAKYPNKKKPPYAIDQGACIKCGECLKNCKFNAVSRG

SEQ ID NO: 97057 - protein, 245 aa, Unknown
  Obtained from environmental sample
  misc_feature (1)..(245): Xaa is any amino acid
TSQLAEGILPIIVKATFHNDDVAVRRILLIVDPREPSVNVIGPDENSGHRTTIRVFGSTVDDYDMDSVEVSLRPGDKLGYTVPGFIQGLYLDGSVLGSMNFCAGIGLSFFEDNVKVQANVSQAPSGRYSGWAFGGKILANVWTKNLGDWFGPDWSFWKTSFVLGAHFSYFLMEEGETPLWMGEFLGQWEVIKSDMSFFFPNWKYFKSLSFYVEPGIWIAPSDVTYDPNAWRIRATMAFGLRVNLF

SEQ ID NO: 97058 - protein, 284 aa, Unknown
  Obtained from environmental sample
  DOMAIN (124)...(282): Carbohydrate binding domain (family 11)
  misc_feature (1)..(284): Xaa is any amino acid
EGVSNVGIGLLDNQGQNSSGAEMKVQTKLILSDFGKIEPVWKYYMVPIRSFRPEGLYWDDGKKAEVSAKVDWAKIQEVRFSVGKGENKIAASDPVAFYVKDISFIEEIPGYVNPEDYWNAFKSNAPDVKLHDFETEGDQKWESSNGPKSEVAFKYSESGAPNGGGKALEISYRLGDWVDVLFNYRDRGRPADQRDWTKHWGLKFDFYTDKPYQPITVQVQDKGNEIFVAPSGGNKGWTEVIVPFKNFSKFPYYQPEDAQQNGKFDLDGVIVLDFKPAGEGSRGT

SEQ ID NO: 97059 - protein, 272 aa, Unknown
  Obtained from environmental sample
  misc_feature (1)..(272): Xaa is any amino acid
MQSVASVANEYISGELDLLMIDASAVVQTLQGIPIEDMQMDLMEQVAAYSDSFLAVTIFNSMGKIEASYGSILTPEDMALGEYGQQAFKGQRVISSTRLTPSGVPVFHIFVPIDESYYRDRQDRARSRIAAFTVPGMYFSKKVNQFQLWGTGNIAIGDHDGTILANVNHDWVTKRVNILDLVKKDSHYQDNVETIKTMIAGEAGAFRFVFDGVDAVTSFVPITASDEGWFVTVTAPIAESPFYQVRNLIIISGFIFMGLGMLAAAIASGSIA

SEQ ID NO: 97060 - protein, 247 aa, Unknown
  Obtained from environmental sample
  DOMAIN (1)...(247): ArgJ family
  misc_feature (1)..(247): Xaa is any amino acid
TVRKEAAFEVELSNGKFIIGGCCKGSGMIAPNMATMLGFITTDLNIDIELLDRIHRNTVDATFNNVTIDGDTSTNDTVIVMANGESKIRAELDVDTALVERAFFLLYNELCAKIAEDGEGATKRVEVRVSNGKNVFDCKLAAKSVANSNLTKCAMFGNDPNWGRILCAAGYSGAEFDPGDITVKLCGTTVFENGSAASFSAKELSRKMRGKSVLIEIDLGFDNATFAVAHTCDFSYDYVKINAEYHT

SEQ ID NO: 97061 - protein, 67 aa, Unknown
  Obtained from environmental sample
  misc_feature (1)..(67): Xaa is any amino acid
SPFIAFIASDGVIIEIKDMQPNDLNSVRSSRSVRYALEAPQGWFQRANVRHGDVVRIRSEELGIRNK

SEQ ID NO: 97062 - protein, 384 aa, Unknown
  Obtained from environmental sample
  misc_feature (1)..(384): Xaa is any amino acid
DGRDFSQNCPKHIIILGNLPKGLPEKTDTLIQLPQGIQVEAVIQTGNALLASYDAWYNSLLLAVINHKPIDAFLNIAVQKLVNPILVMNNNLSIISTAGSISSSTKGTIWEKVNVPGFVLDNFYTPEEIRKISLHIAQKNEQIISLRPENDPAHFTMGINIWIDGKLYGAIGTVDMNEPFTDGQKETFAVIAHVLKLYFQNHSIYMQIAEDKANWVDSLLDGVNISANIVSKYLYRFHWKLDDHFCIVTFTASADLKLPIISLLDLNQINGLFPEALVSVYEEYVVMIIRCTDKKPLHGKKKQQLDQFLKKDIMLRCGVSMAFNNFLHVRYYYTPTKFAASQCKTPLIPAICLYEDYQMDHVLQTLSLESDPRCFCHPCILSLW

SEQ ID NO: 97063 - protein, 444 aa, Unknown
  Obtained from environmental sample
  DOMAIN (184)...(443): Domain of unknown function (DUF323)
  misc_feature (1)..(444): Xaa is any amino acid
TITAVFTHTDLVPDPIAFTADTGHINKTYGDVFTNAIAAGYLGSGVITYSSSDKTVATVDGSGQVTIHKVGSTVISAEKAADTVYAPSQKDYTLAVEPRPVTITGLSVADKQYDGTTTATVTGTAVIDGLIAGDDVSVVVGTAEFADALAGNGKTVVFSGWSLTGADAENYSLSAKPTATANIEFLSMVQIPAGTFMMGSPASEPNRQSNETQHSVTLTKSFYMGKYEVTQAQYQAVMETNPSSFNSNPQAGETQSKRPVENVTWYDAIEFCNKLSEKEELQSVYTISGRTPATGYPITNATVTADFTKNGYRLPTEAQWEYACRAGTTMAFNNGNNDYTNAASVGAVAWSDSNSGEKTHQVGLKSANAWGLYDMHGNVYEWCWDWYGSLSGTQTNPTGASSGTQRVRRGGSWDASAQNTRSAHRSSDYPGSPYRSLGIRLVRP

SEQ ID NO: 97064 - protein, 155 aa, Unknown
  Obtained from environmental sample
  misc_feature (1)..(155): Xaa is any amino acid
TGAFAATPEAQTLAASWYNSGMDVIFACGGAVGNSVMAAAEQAGKKVIGVDVDQSGESPTVITSAMKGLQVSVYDCIADFYNGKFPGGQTLVFAADNQGVGLPMQSSKFQSFSKADYNSIFAKLASGDIPRMDNLDSEGSPKVVPVTISRVTEVK

SEQ ID NO: 97065 - protein, 111 aa, Unknown
  Obtained from environmental sample
  misc_feature (1)..(111): Xaa is any amino acid
VPFLGALYLFARFAWKRYCRCVTGQDGRTLFVRGAGTRVTLRVIAVFLAVIFLITALMRPRWGARDTEETEHGIDVAVTLDISMSMLAGDILPSRLERVRSELSLLLRLLD

SEQ ID NO: 97066 - protein, 168 aa, Unknown
  Obtained from environmental sample
  DOMAIN (3)...(168): Bacterial  dnaA  protein
  misc_feature (1)..(168): Xaa is any amino acid
MEIAPQYRFDTFAAGESSRLAFAACNEVAENGESHGNPLVLIGGTGLGKTHLLHSTANALHSKKSGLKIICATAMEFYEEYKKNAQQIKENPSLMEEMATKFRGADVLILDDLQNIERKFESQHELLQIFNLLLLAGKPIIVASQVPISSIESLDESLRSRLTGGLSI

SEQ ID NO: 97067 - protein, 99 aa, Unknown
  Obtained from environmental sample
  misc_feature (1)..(99): Xaa is any amino acid
KSINEVAQGSKDIAQVASQANTSVEHVSKSISDVAQGSRDIARNASEAAKGANVVSQSMVSIAQGAKDGAQGAKQINQSADELAKIASDLKNVLSQFSV

SEQ ID NO: 97068 - protein, 91 aa, Unknown
  Obtained from environmental sample
  misc_feature (1)..(91): Xaa is any amino acid
MNKNDKIYVAGHNGLVGSAITRKLQSEGFNNIITKTHKELDLIDQAAVERFFSENKPDYVFLAAAKVGGIGANSHYPADFIYINTIIGFNV

SEQ ID NO: 97069 - protein, 361 aa, Unknown
  Obtained from environmental sample
  DOMAIN (4)...(251): NAD dependent epimerase/dehydratase family
  misc_feature (1)..(361): Xaa is any amino acid
MKTALISGVTGQDGAYLSEFLLKKGYAVHGIKRRSSSFNTERIDHLYQDPHEKEKKFFLHYGDLTDTSNLVRIVQEVQPDEIYNLGAQSHVQVSFEVPEYTADTDGIGTLRLLEAVRILGMENKVRFYQASTSELFGKVQEIPQKETTPFYPRSPYAAAKLYAYWIVVSYRESYGMFACNGILFNHESPIRGETFVTRKITRAVARIKLGLQDKLFMGNIDAKRDWGYAGDYVELMWLMLQQEKPDDFVMATGVTTTVRDFITMAFLEVGIVLQWEGKDVHEKGIDKDSGKVLVEIDPRYFRPAEVEILIGDPSKAYEKLGWKPKVQLPELIKMMVYNDFKLAEKEIHLKEGGYEIKNYYE

SEQ ID NO: 97070 - protein, 124 aa, Unknown
  Obtained from environmental sample
  DOMAIN (2)...(114): Response regulator receiver domain
  misc_feature (1)..(124): Xaa is any amino acid
MASILIIDDEPGIRRAFTSSLEDEKYKVFSAEDALAGIEILKTEIIDIVFLDVLLPKLGGIEALEKIKKEWPAVEIVMISGHANIDMAVRAVKLGAFEFLEKPFSLDKVLTICRNAAEIKKLKT

SEQ ID NO: 97071 - protein, 110 aa, Unknown
  Obtained from environmental sample
  misc_feature (1)..(110): Xaa is any amino acid
MRKLTNILVTGGAGFIGCNFIRYLLEKADGFSGRVINLDALTYAGNSMSLADIEAKYGALGANPRYFFEHGDICDRAFVESLFGKYEIDTVVHFAAESHVDRSILGPEAF

SEQ ID NO: 97072 - protein, 115 aa, Unknown
  Obtained from environmental sample
  misc_feature (1)..(115): Xaa is any amino acid
MTSGAARHGLLIWHLRYLTLIKTVDSGKSVPFGIYHYTNEGNITWFDFAKEIFRQGREQGRITKDCAVKPCTSAEFPAKVKRPAFSVLDKGKIKTALEIDVPGWEKSLSEFLKNA

SEQ ID NO: 97073 - protein, 203 aa, Unknown
  Obtained from environmental sample
  DOMAIN (7)...(203): NAD dependent epimerase/dehydratase family
  misc_feature (1)..(203): Xaa is any amino acid
MLMADNVWLIGCKGMLGTELSLLLEKSGLPFVGTDREVDIADMAALRQFAKKQPIDWIINCAAYTTVDKAEDDAENCRRLNTLGAGNIAVCAKNNGARLIHISTDYVFDGSPQGVPRPYREDDTTNPIGIYGLTKRDGELAVLNNNPSSYIIRTAWLYGRHGNNFVHTMLRLMNERDEVKVVDDQRGSPTWAFDLASAVLDLD

SEQ ID NO: 97074 - protein, 276 aa, Unknown
  Obtained from environmental sample
  misc_feature (1)..(276): Xaa is any amino acid
LQSYAELKERGWSLDVTLMPAHDIPPEYAGKPDEYIKIVSEEWQPELVRRHPDVASYCDIFVEKGVFTPEHGRKVFESGRSLGLKPRIHADEFVHTGGAELAAEVGAASADHLMFCSDEGMAAMAKAGVVPTLLPATTLFLGMRDFAPARKMIEAGCNVALASDFNPGSCACMDPLLILRLGCLQLRMTFEEALTAMTLHPAQSLSRSDLGHLHPSARASVLLWDIKSPLELVYWMGEAYRPVIIENEGSNENKRMSFRQLAGASKDAPLEEPNEI

SEQ ID NO: 97075 - protein, 244 aa, Unknown
  Obtained from environmental sample
  DOMAIN (1)...(244): TatD related DNase
  misc_feature (1)..(244): Xaa is any amino acid
MLFDSHTHLNNEDYSQAQRDELAAAIENSDVSYVVDVGFDLESSVMAARHAEKYPWCYAAVGFHPHDTKDMGESDLALIKGLAKKPKVKAIGEIGLDFHHDHSPRDTQRDCFRHQIRLANELKMPMVIHSREADQETLDILKEEQAFSSERIGWFSTSAAGGRPDARVLLHCFSGSARLAEQYVKLGATISIAGPITYKNARKTAEVARDIPLNCLLIETDAPYLSPEPHRGKRNQSPYIIYTA

SEQ ID NO: 97076 - protein, 180 aa, Unknown
  Obtained from environmental sample
  misc_feature (1)..(180): Xaa is any amino acid
MGARDGGRKLGGTVEMDETFFGAPEEGGKRGRGAEKTPVLVSLSLTGGGKPKAVMMKAVGAVGREEVREFAEGAVRKGSEVRTDGLHVYRQLAALGFRHVWKRHDPKGEPAHLRWTHVIISNAKAMVGGTFHGLDARRLQRYLDEFCYRFNRRLSPDGIFGRLLDACLCAGRITAHELIG

SEQ ID NO: 97077 - protein, 636 aa, Unknown
  Obtained from environmental sample
  misc_feature (1)..(636): Xaa is any amino acid
EESLAALNAHLASELEHLKSEAGAFEKGILDQMKTAEVMKQKALDEYRLAQDIEFTRLKALADDSEKKDAELRRYTQEATEQLKDEFSAYQVEAEKLRKAEMENFFLAAARFKGGMAELEKGLEELRAASYDNISEKLKTSEKELLADLYKRNNDIDLRITEWQGSLEGRLSTIADNSETALRESERSHADEMKKNLAALDAHLASELERLKSETAAFEKEIQDQMKAAEEMERQALETNGVRLEEYRRAQDLEFRRLETLADDSRKLDAELRLYMRDLIGQLKDEFSGYKGEAEELRKAETENFSLATLHLKEGMVELEKGLEELRAASYESISEKLRTFEDEFLNDINKRSNDINLKIVEWRSDIEGQLSVIDENLVTAMRELEQTRAEEMKKNLSALDARLVSELEHLKSETGAFEEGILDQMKAADDSVSSFKDQLDRGLEETRKEAEISIKAEIKNYSLTAAETVKKHQRDLDDSWNELSARLRELDENVEEARRRIGDLAAETDNRIASVRVSVEDAERHIREAVDQTKLIDKADMMRLEMERRIEDLKGDIDRLDQRRAEAARIENEFIKIKRIEDEINSKMIKIFSEERRVENMEANFTRFLQISRSVEDKLTEVTASDDTLQAVQLK

SEQ ID NO: 97078 - protein, 226 aa, Unknown
  Obtained from environmental sample
  DOMAIN (157)...(180): 4Fe-4S binding domain
  misc_feature (1)..(226): Xaa is any amino acid
MAEQFLNLKLNVWRQKDAQDEGRFETYQAKDISTEMSFLEMLDVINEDLVKGGKEPIAMDHDCREGICGTCGLVINGRPHGPKARATTCQLHMRNFKDGDTITVEPIRAKAFPVIKDLIVDRSALDRIIAAGGYISTPTGSPQDANALPVPKTCADLAMDAATCIGCGACVAACPNASAMLFLSAKVSQLGLLPQGQPERLTRVRDMVAQMDAEGFGACTNFAECE

SEQ ID NO: 97079 - protein, 293 aa, Unknown
  Obtained from environmental sample
  DOMAIN (150)...(267): CBS domain pair
  misc_feature (1)..(293): Xaa is any amino acid
IELEDIIKSEDFKEIIFQGSSACCFAAFAILGLKFCEHWYEWLAIMVGIYIAIFFIPEILAAMFPDTLSKFCIRAYKILKYLFLPSAKISLFLQRGLLKILGYDSRLSFLPQSMRGAINNEDSSSALEEEEKQMIRNIFVFADTPVREIMTPRVEMHAVDVQTPLQDVIKLLNSERHSRLPVYSGSIDNIIGILSNREFLQWYTERPHETFDLEKLVRPALFVPAGKKIDALLHELRESNNHLVIVVDEYGGTAGLATMEDILEEIVGEIKDEDDSEEGSGFVKLQSGQYMLD

SEQ ID NO: 97080 - protein, 436 aa, Unknown
  Obtained from environmental sample
  DOMAIN (1)...(111): Histidine kinase-, DNA gyrase B-, and HSP90-like ATPase
  misc_feature (1)..(436): Xaa is any amino acid
VKQVLNNLLSNAVKYTDEGTVALSMAWSIHSAGTVKLVFTVRDTGIGIRAEDIKKLFASYAQLDTGAKRKAGGTGLGLAITKNLVEMMGGSIGVESEYGSGSVFTAEIIQGISDGKPIGIGDETAEALRNFRYASKGKDKIITPSWLGPQVQVLVVDDLPANLLVAQGLLAAYGLRVDTAASGREAVELASSHSYDLIFMDHMMPEMDGIEAAAVIRKMKGHAHTPIVALTANALRGMKELYLEKGFDDYLSKPIGPEALDAIINNCLDKPTPLSLEIEEKRIDKLNHYRAAFEMSKTSTGLEIDAEYYRRFTALVESFDKLPVGLQADKASLIEAGQKEDAQRILKMLPAFCESLAAMHRSKADSGGTEDEIVGLLLQRLKKAIRDGDAAASKKIVAELGAKSLSPRERELYLKLYDLRMVGNTEKALEALDSYA

SEQ ID NO: 97081 - protein, 339 aa, Unknown
  Obtained from environmental sample
  DOMAIN (171)...(339): Prolyl oligopeptidase family
  misc_feature (1)..(339): Xaa is any amino acid
MDSETGAVKNPITKGEWVVRSVVNLDKKNRTAILSVSGIRPNEDPYFIHYAIVNLDGSGFRLLTEGIGTHKATFNEGHTHFVDVWSRVDSPPVAELRRVSDGKVTLELEKADISDWRKTGIKMLEPFKAKGRDGKTDIYGVVCLPSNFNPRKKYPVIEYIYAGPHDSFVPKTFSPLQYHLHAMAELGFITVQIDGMGTDNRGKAFHDVCWQNLGDSGFPDRILWMKEAQKKYPQMDLERVGIFGGSAGGQSSTRALLAFGDFYKVGVSDCGCHDNRMDKIWWNEQWMGWPIGPHYEEQSNVTQAHNLKGKLMLIVGEVDTNVDPASTMQVADALIKADK

SEQ ID NO: 97082 - protein, 269 aa, Unknown
  Obtained from environmental sample
  misc_feature (1)..(269): Xaa is any amino acid
MSKHKGGFTLPGEAGYEELTLRLAEKWGADVIRDSDGTVLSDEILNSGYDIYSTVCVIREHNEWARNNMDSLQQCFLMTSPQVASSGEMEIDLLESFFREQFAVNESDGSLALWQVFDRTSNTELPRDKWTYSSSKGAVALKGIIPWHKYTVNFLAYRIWEEISMYNHVTNSWDKEHLMQIDPMHSGARKYLLSWMDKWCAAHPRTNVVRFTSLFYNFVWIWGASERNRYLFSDWASYDFTVSPCALSEFEKVYGYKISSEDFINKRYL

SEQ ID NO: 97083 - protein, 219 aa, Unknown
  Obtained from environmental sample
  DOMAIN (28)...(213): Ribonuclease HII
  misc_feature (1)..(219): Xaa is any amino acid
MLDILPKNLNLFQAQQALSEHFKNHILIGVDEAGRGPLAGPVVAGAVVLVAGSAISTLNDSKKLTEKQREQIFAELPKYCEYHSIAEASAGEIDEIGILNATFLAMRRALAPIISELNEKKLHYKILVDGNLHIREMDKDLQMPIVKGDGRVACIAAASIFAKVHRDGLMVKFAEQFPNYGFEKHKGYGTKAHLLAVQKFGQCEIHRKSFKIPFINNEN

SEQ ID NO: 97084 - protein, 607 aa, Unknown
  Obtained from environmental sample
  misc_feature (1)..(607): Xaa is any amino acid
MFSTLHTFHIPVMGTSYTADTPARVAPFGISSVVSLVDDFLLERFRKIYAEEYKLKYEPIPPKEPDGRAKRITAYLNTLAEVVKIRFESIKKQPFFMKNEKAKYFEMLPTGHHLRGLYLKLMGMKDAPSKEREEIETTLNHSMEEGSIDVNIMVKLDRLPPNPNGKEPLSDEFTDAKTALKGYAKSSLKNSAIVFSAGINQSLYNYMAQFKEFYRNATGEIGKRIIIKASDFRSALIQGKFLARKGLEVSEYRIESGLNCGGHAFPSQGMLLPTILKEIRSQRSLLHQFRETVVNFYKSKGWNTEVAKEAPPPKITVQGGIGNYAEDLRMREYYGMDGTGWGSPFLLVPEVSPVDKETREQLEKSTPQDLYMSDASPLDIYFNNLRGSGSEKYQQKQIAAGKPGSPCVKGFLQNNTEFSETPVCKASRFYQERKLKQIEESDASEEQKENLRKDVYAKQCICDHLGNSGLIFLGAEKTEEAPQAICPGPNIAWFNRSYDMQEMIDHIYGRIADLTPPERPHMFAKEVEMYGNWFALQVEKFNGDKDLATWLKTAAKNFAEGMDYCLEVAQTAPFPGENLASIPPRVEIERKRLMGNLSALEKKCEYF

SEQ ID NO: 97085 - protein, 568 aa, Unknown
  Obtained from environmental sample
  DOMAIN (89)...(158): HAMP domain
  misc_feature (1)..(568): Xaa is any amino acid
LTEIKPTKNSFILLCAPEQDYVISGTRANIVTGASIKSLPWDINADSFTLDDIQYLRFGRYMDNGWLLSVQIPKTEIFDEVEEQNNRYSLLIAFATAIMIGLAYYLISKFVNDPIKRLTEDVSRLALGNLDTRIEINSNDELGMLAQAFNKMTSDLKKSIEESARERAEKERIGAELGVAAAIQASMLPNIFPPFPERTEFDLYASMIPAKEVGGDFYDFYLIDKDNLAVVIADVSGKGVPAALFMMITKTMIKDGSPGNSLKDLFESVNKKLCEGNEADMFVTAFMGVYNIPSGRFVFVNAGHNPPLLKKHGSGYEFLETEPGYVLAWMKNSQYKEKEISLEPGDVLYLYTDGVTEAMNRRKELFGEQRLFDALNANRDVPLKKLLPAIKREVDNFEDGTEQADDITMLALKINSESSGEPPKDMMKKLELEASLENLNKALAFVNTELEQHECPQDIQGKIEIAVEEIFVNIASYAYSPGNGNAVIFISVADNIVIRFEDTGRPYNPLEKPEPDLDKPLMDRDIGGLGVFLVRKLMDNVEYTRVGNKNVLVMTKKLGMRSEEEIRN

SEQ ID NO: 97086 - protein, 577 aa, Unknown
  Obtained from environmental sample
  DOMAIN (93)...(162): HAMP domain
  misc_feature (1)..(577): Xaa is any amino acid
VIKELTAIKPTKNSFVLLCVPEQDYIISGTRAGITSGASIKSLPWDINADSFTLDGVQYLRFGRDMDNGWLLSVQIPKDEIFDEVEKQNNRFSLLIALSVVVMIGLAYYLISKFINAPIKKLTQDVSRLALGNLDTHVEINSNDELGLLAKTFNKMTCDLKQSIEENARERAEKERISAELEVAAAIQASMLPNIFPPFPERTEFDLYASMIPAKEVGGDFYDFYLIDKDNLAVVIADVSGKGVPAALFMMITKTMIKDSSQGKNLKDVFESVNKKLCEGNEADMFVTAFMGIYNIPGGRFVFLNAGHNPPLIKKHGSAYEFLETEPGYVLAWMKSAKYKETEISLDPGDVLYLYTDGVTEAMNQRKELFGEQRLLSVLNANKDCPPKELLSTVKREIDNFEDGTEQADDITMLVLKVNGEHSEEALENAMKKLEIKASLENLNKVLDFIITELEQRGCPQEIQEKIEVAVEEIFVNISDYAYAADGNSPDSGDGNADGAVVIFISVTDKIVIRFEDTGKAYNPLEKPEPDLNKPLLERDIGGLGVFLVKKLMDNVEYERVGNRNVLVMSKGLGIRD

SEQ ID NO: 97087 - protein, 167 aa, Unknown
  Obtained from environmental sample
  misc_feature (1)..(167): Xaa is any amino acid
SLHACRSTLEDPTDDPKGLRTADGGGSLEGALYGGINSDRVILQSLFIGGTLAGLAGSLEILGNYHRIMTGFSSGLGFDGLSVALLGGSHPLGVVIVAILLAGIRQGAQLGLQIGLQIPRELGGVLIALIILFIAAENIYRPLLERLYDRIAGQIAMLKKAARKKRE

SEQ ID NO: 97088 - protein, 269 aa, Unknown
  Obtained from environmental sample
  DOMAIN (71)...(259): Adenylate and Guanylate cyclase catalytic domain
  misc_feature (1)..(269): Xaa is any amino acid
MTILQILALSVSVVFGILNSLLYRKKAIQIEEAHNKLQYFNNNMRQAFSTYLSEDVVEEIISDPARLQLGGVNRHMTALFSDIRGFTGIAEMLTPNHLVDLLNYYLSTMSDIILEQKGTIDKYQGDSIVSFFGAPMELEDHALRACTAGIIMKRIENDVNKYVLEKGISPSPLLTRIGVNTGEMVVGNMGTQKKMNYTIISNAVNLASRLEGVNKIYGTWILATDSTIQETKGKLLTRRLDRIRVVGINEVVRIHEVLEIKAEASDALF

SEQ ID NO: 97089 - protein, 287 aa, Unknown
  Obtained from environmental sample
  misc_feature (1)..(287): Xaa is any amino acid
VRVLLMSNTILLVFEGEKIEGQVFNSIKKIFFTNSSEKQIIRSSFKAEIYQLWNEIKDDADLDIVEVLKQRPDSDIKDLARKDVSEVHLFFDHDGHSHSDIISPEISLQDYNHYYNEMINKLLNTFNNEFEQGKLWLSYPMTEAIKHCTNNPNDCFKDILLDMSDNINYKNIIDRISHYKDIKKYDENTWRYLTIINIQRTFCLVNNYYEIVSDYQSIKHWFENNAIIVKQIQEKQYKNFILPKNQIVALSPFPLFLINYFGEKYFNECKKEIVTKTCSFDCYQNTQ

SEQ ID NO: 97090 - protein, 189 aa, Unknown
  Obtained from environmental sample
  DOMAIN (3)...(130): B12 binding domain
  misc_feature (1)..(189): Xaa is any amino acid
MSAIVLATINAKWIHPSLALRLLKANLGSLETHCTILEFALRQPLKEKISPIIAERPRLIGFSVSIWNHLATLELLKALEAEWINQTQKPFVVLGGPEVSWLPEDADIFRYADYVIRGESEDSFRSLCFELLGEGHENVEAKIDKTIFIGKGDAIVNVNNISSPYRLYTDEDVERKLIYVEASRGCPFI

SEQ ID NO: 97091 - protein, 280 aa, Unknown
  Obtained from environmental sample
  DOMAIN (113)...(280): Radical SAM superfamily
  misc_feature (1)..(280): Xaa is any amino acid
IWNHSATLELLKALEAEWKNEKPFVVLGGPEVSWLQEDAEIFRCADYVIRGEGEESFRSLCFELLGEGQTTEKTKTGKTILIGQGGAIVNVNDISSPYRLYTNEDMERKLIYVETSRGCPFNCEFCLGSSRNLPAAQKIREFPLEPFFADMETLIKRGGKTFKFLDRTFNLDIDRARRIIEFFLVKINDRPFCVHFEMVPSRFPESLKELLYRFPAETLRLELGIQTFNTQTRALLQMSGNIDEEIKTLEFLREKTNAILHVDLIAGLPGENLASFKSRF

SEQ ID NO: 97092 - protein, 450 aa, Unknown
  Obtained from environmental sample
  DOMAIN (103)...(305): Peptidase M16 inactive domain
  misc_feature (1)..(450): Xaa is any amino acid
MTYPDKTLYPASSVNEHDYFNLMSVYGDAVFRPLLSEWTFMQEGHHLFFSPEGKLQISGVVYNEMKGAYSSLDAYAGLWSFKSVLPGTPYEFESGGDPECIPELDWQGLKDFHRAWYSPANCRVFLAGNIPTEKQLAFLDEKFFSSLPAGNKNAPLHKTERWQSPRSFKVPCPAGAEQKPTVMLSWLCGDVNDTVETLALTALTEILLGHDGSPLTRAIIDSALGEDLSPVSGFEKELRETSFCAGIRGVQPLELQGVRGLNFDDPGLPVEEAAKKVEAFIIGELERLEKEGIPKEEIEAALLGMEFSIREIRRSGGPFSLVWMSRSLRAWLNGGSPWDSLLFASPFSGLKQRIKEDNRYFEKMIRRYLLDNTHRAFIIIEPKENFLEEKEAALSVRLEETEKSMGRGEKKAIRSKMAELKKAQEKEDGPEALAAIPHLSRSDLSAEIEV

SEQ ID NO: 97093 - protein, 223 aa, Unknown
  Obtained from environmental sample
  misc_feature (1)..(223): Xaa is any amino acid
MRNMLAVLHSAVTIMTPLLFAATGGLFTELTGMLNIALEGLLLAGAFSAIAAVYYTGSFVAGLFAAIFVAMTLSALLAFTTLNLRSNVFITGLAANLLAGGLTVVLSQHFFNTRGVVVIDNIALGGISRLPLVTIPFINTVPVIGALFSGHSVYVYAGWLLLLVSWLIIYQTPFGYRLRACDKHSTALVSLGLQPDSYRWIAFLISGFFCGIGGSFLSLNLGA

SEQ ID NO: 97094 - protein, 85 aa, Unknown
  Obtained from environmental sample
  misc_feature (1)..(85): Xaa is any amino acid
MENIVFLMCGKDKEIFKTQAKYLYKSKRFQKSLQYAKTLADENCIFILSAKYGLLELEKEIEPYDKSIYDMSIIEKDKWAKMVIS

SEQ ID NO: 97095 - protein, 258 aa, Unknown
  Obtained from environmental sample
  DOMAIN (1)...(257): SNF2 family N-terminal domain
  misc_feature (1)..(258): Xaa is any amino acid
MGLGKTIEVLSLLLHRQQHCPESGPPSLLVCPTSLLGNWEREIKRFAPTLPFFVHHGNNRQDLPKQFAPHALVLTTYGVVRREEDVFSARHWGMVVVDEAQAIKNSSSAQAKSVRRLRAPFKLALTGTPIENRLMELWSIMAFALPGYLHYESTFKERFSTPIEKYRDPDAAAELRARIGPFILRRLKTDKSIIQDLPEKQEMKIFTQLTREQAVLYQARVQQMEKDLAESSGIERRGRILALLTHLKQICNHPSHFL

SEQ ID NO: 97096 - protein, 88 aa, Unknown
  Obtained from environmental sample
  DOMAIN (6)...(88): Endoribonuclease L-PSP
  misc_feature (1)..(88): Xaa is any amino acid
MEIVQTQAAPAAIGPYSQGMVVGGLLFTAGQIPLDPATMNIVEGGIEEQTAQVLKNLDAILSQAKTSWDKVAKTTVYLTNLNDFATFN

SEQ ID NO: 97097 - protein, 333 aa, Unknown
  Obtained from environmental sample
  DOMAIN (1)...(26): Bacterial regulatory proteins, lacI family
  misc_feature (1)..(333): Xaa is any amino acid
MTVHEIAALAGVSIGTVDRVIHKRNRVSPATRAKVEAIIEKYQFTPNPIASGLKRSRPYRFCALLPKRDQDAGYWGQIIAGIERAAGEIKLLGAETEIIEYDRYNPKAFEKTSAAVYDKKPEGLLFAPIMQKRTRPFVEKISAEKIPFIFVDSDMPETEPLCVICQDSFNGGYLAGRLFHLFAGTVSVPAAILDAHGDDYNITRRREGFLSYAEKNDIPVIVREYSDYGGGDISTEKIAQFLKEHDNLSGLFITNCMAHRAAEAVKQRRKKEPFLLVGYDLIPSNRQFLLEGHINAIISQRPEEQGREALLTLFRSVTLGQKVEKRVEIPLDV

SEQ ID NO: 97098 - protein, 483 aa, Unknown
  Obtained from environmental sample
  DOMAIN (24)...(481): V-type ATPase 116kDa subunit family
  misc_feature (1)..(483): Xaa is any amino acid
MNLTSRKMKRVQMTVLRSDVNTVIEYLGRHKVMHFVISDSASANISSGADSASKTNKAKNARGANTDDSKANSVSNSNTVIDTNSTNNAKISGNEEFLRVKGLMEKLRSSCEFLGVELPAEPTQDSVLPGEAEEALCEKLCSTINALKQKEIIVRQEKQSVEEAYSEAKAFSNLNAPFSDLDQLSFLTLRVGRLDPKVQSELKQTLGERAVIIPLGGGTSDGGEGNDRLLAASSRKGRFALDSELKKCSFKPIAIPEGYQGVPAELLEGLEGRLKNAKKELEEIENEKNKIRDESQAMLYRLGSILLMGIAAEDIKSRLISTSSVYLLSGWIPADMINQTAGDLSKITHGRTAIRIYVPDEVPEVLDGSEKVPVSMRHGKFVKGFEGVIFSYGAPLYGTIDPTPVVAIFFTLLFGIMFGDSGQGAVLLLLGLLTGKYSRLAKFKNYSTPLISVGIASIVMGFFTGEIFTREDLLVAPTRAITQ

SEQ ID NO: 97099 - protein, 576 aa, Unknown
  Obtained from environmental sample
  DOMAIN (88)...(308): MutS domain V
  misc_feature (1)..(576): Xaa is any amino acid
AGHFNEVSSSGQTVFVEPLDVVEKNNDILVEKRNLDAEIHKILRELTGNISIHAENLKQFHLTIIELECLRAKARYSAETKGHFALNTDTGQSLLLKQARHPMIKKAVPINIEMGSAIRTLIITGPNTGGKTVALKTLGLFAMMNQSALALPLDEGSVLPVFDGIYADIGDEQSINQSLSTFSAHITNISGITAHATDKSLVLLDELGSGTDPQEGGAIAMAVLDYLIEKNARMIITTHHGILKHYGYTRAGVENASVEFDAHTLSPTYKIINGLPGESRALDIASANGLNPEIVSKARSYIDEEKSDISEMIKSLEQKQRELAGLEKKSTIEKNKLTEEKRRADLKELQLRQKEAELKRESVGKLQQFLSESRKTLENLVRELKEGEVDREKTLKVKEFLNELAHNAETESETLEAEERAIRKLTKEKHYETSRVSAGSASDDSDSADGREFSPGMEVFAGSSKQRGVIIRADKKTSRSSQDADFSWLVKIGSLKISFPESELIPADPAKTAAAHTGKKTAFKSWEAEYGESTQAAYEIMIRGMRFEDAMEAVRKQVDAAVLFGLKNFAIIHGKG

SEQ ID NO: 97100 - protein, 83 aa, Unknown
  Obtained from environmental sample
  misc_feature (1)..(83): Xaa is any amino acid
MPENNIKEQIKLSVITVNLNNACGLKETAQSISRLTYKYHEWLIIDGASNDDSLQVIKGFNHLITKLVSEPDNGIYNAMNKGV

SEQ ID NO: 97101 - protein, 144 aa, Unknown
  Obtained from environmental sample
  misc_feature (1)..(144): Xaa is any amino acid
MSGIPPITSVDDLPAALAASLSVEERELIQKIKNSPFPFAVTPHFASLASPERDDPIRRQFIPDPLEETDDPFALNDPLGEERYRITSRLVHQYRDRALLLAGGICAGFCRYCFRRARMKAGFISGAELEPVLAYIESRPAIRE

SEQ ID NO: 97102 - protein, 378 aa, Unknown
  Obtained from environmental sample
  DOMAIN (209)...(371): N-acetylmuramoyl-L-alanine amidase
  misc_feature (1)..(378): Xaa is any amino acid
VQSFSEPLFQQGGFLDHCGSITFVQNNLFYRVDTATGIIPYPPVRKESALYLPALYLVKVFGTKYSGALSWNASASTITVNTLKHNVLSISSDVKQNGTLVSIALADSLPYEYTYYHPNLAVNFGGGKLDPKAVKRSLRAGVVDSAFTLQYDESAQVSFILKQAVEPPYIEYSAKTRTLMISLKPKIEQKKPKAAASQVPLDASLIRTVVVDPGHGGKDPGAIGPTGVKEKDVVLGIGLELRPMLEKAGFKVFMTRDKDVFIPLGDRTRFANEKKADLFVSVHADAIAGDAKKRSSARGYKVYFLSQAKNEEDKMVAMRENAVIELEDKDKRSNYDALQDVLISIAGAEYLRESQDLAIFIEQSLGANVKQIPRLQLG

SEQ ID NO: 97103 - protein, 446 aa, Unknown
  Obtained from environmental sample
  DOMAIN (182)...(404): Methyl-accepting chemotaxis protein (MCP) signaling domain
  misc_feature (1)..(446): Xaa is any amino acid
MVDAKNKEIIGILFIGNEMTAITKVIHDNIIKEIKLIALLASAILLASIAVNALSYRFILLKPINSATAMLREISEGEGDLTKRLTVSSKDEIGVMARYFNDTLEKIKSMVIVIKKETASLNKIGNDLSSNMTETAAAINQITANIQSIKGRVINQSASVTETNATMEQIVTHINKLNGHVEDQAATITKRSAFIQAMVDNINSVNQTLLKNLENVQTLKEASEKGRNGLQEVAADIQEIARESEGLLEINSVMENVASQTNLLSMNAAIEAAHAGEAGKGFAVVAGEIRKLAESASEQSKTIGNVLKKIKGSIDKITKSTENVLNRFGAIDSGVNTVAEQEENIRQAMEEQGEGSKQLLQGTGNLNEITQLVRSGSEEMLEGSKEVIRESQNLEKATQEIANGMNEMATGADEINAAVHHVNEISGKNRQGIETLIQEVSRFKVE

SEQ ID NO: 97104 - protein, 207 aa, Unknown
  Obtained from environmental sample
  misc_feature (1)..(207): Xaa is any amino acid
RFIKSIIANWQVRVEEHYTKNPFSPDELAKASEKYRERYQKGEFLNKAYGTTLIAAAITECYWLGIHIGDGRFTVLYPDGTFAQPIPWDDKCFLNVTTSICDDDASERARVGFFSITSEKPPPVAVFLCTDGVDDNYPVEENEKHLEKLYKTIALAFANDGFESTCEQLKALVKKFATEGKGDDTSIAGFIDMEGVKKVKSIWDEEK

SEQ ID NO: 97105 - protein, 51 aa, Unknown
  Obtained from environmental sample
  misc_feature (1)..(51): Xaa is any amino acid
MPRLTPQEQQEIIRFIEADKPLPDKYRFLLFDDKREVELVWNGKTGEVCNV

SEQ ID NO: 97106 - protein, 209 aa, Unknown
  Obtained from environmental sample
  misc_feature (1)..(209): Xaa is any amino acid
IFSKAIDFSADVFYEDADSVTAIELKTVKPNSGEMGGEKRKILEGKAALFRLFPGKAVTFYIGFPFDPTADPASEKETSHNKNRFLKSIINMNKFFDSEEVLIANELWNFLSGAENTMEEILRIINSISTTAFLNKYKLLDDNTKRNKPEYLAQLKEWNLFSEIFLIENNALIQNQLYSKQLVRVFNKSIFTSNGKYDRNRYNALKELI

SEQ ID NO: 97107 - protein, 75 aa, Unknown
  Obtained from environmental sample
  misc_feature (1)..(75): Xaa is any amino acid
MIPKLNLYERAGVSEYWIIDPETQIISVMELIDNRYAIRSYSGEDEVPLATIPGCTVDFKKIFRIGNGDQITNNR

SEQ ID NO: 97108 - protein, 186 aa, Unknown
  Obtained from environmental sample
  misc_feature (1)..(186): Xaa is any amino acid
VLFLRETYLIALNSFREAVRDKIPYVVLLSAIALAAFSVLLGEWSVFDREFVVKSVTVSVISISGLFIALFAGIGQVQKEIQKKTIHTLLAKPVSREAFLIGKYIGLLALIALHVALISLTLFFVLWAIDGSISTPVIQACYLVFWELAIVLAFAILFSTYSSALISSIFSVGIYLIGHLGNRNMK

SEQ ID NO: 97109 - protein, 58 aa, Unknown
  Obtained from environmental sample
  misc_feature (1)..(58): Xaa is any amino acid
CTTLAYKSDNVATELTTAESKGVALLDKTPRKGAGNMNIGFLHPKSTGGALTEFCSPA

SEQ ID NO: 97110 - protein, 271 aa, Unknown
  Obtained from environmental sample
  misc_feature (1)..(271): Xaa is any amino acid
MGEKGDEEQCLAFLNAVLGSKGIKPVTLLRILENKTFVAEVIGDKSSILDVRAETDTGEKINIEVQLKDLFNMEKRTLMHWGREFTAGISAGGDYKDLPRVITINIVNFDYIKLDDFHTCFHLWEDDHHDYLLTDVLEIHFISMVKFRRLKTGDIANNLLERWLTFLDVNTPEKTLQEVIRMDSAINKAFQRLNSVTQDKEFLREYHLREMALSDWTTGINTATEKGIEIGIEKGIGIGIEKGIGIGIEKGIEKGIEKGIEKGIEKSIGKG

SEQ ID NO: 97111 - protein, 323 aa, Unknown
  Obtained from environmental sample
  DOMAIN (1)...(217): AMP-binding enzyme
  misc_feature (1)..(323): Xaa is any amino acid
MMFTHFRDLTFRLLPNFHGRIRVIDSIIGFLPWVLLLPFRGLAQLIVFNKIAQEFGGRFKAGLSGGGSLPAKVDLFFNSIGFRLQEVYGLTETSPLLTVRQYKHSRRGTIGQLLPNTYAKIIDDKGKIMPPGKNGIIHVKGDQVMLGYYQKPEATAAVLSEDGWFNTGDIGMLTHDNELRITGRAKDTIVLRGGENVEPVPIECRLRESPYIQQCMVAGQDQKYLAALIIPWQQTIMDFAEENSIPVVDYELLLQQPEINEIIATEISERVNPKTGFKPYERIYKFVLLPKPFEPGKELSGKGELLRHNIAALYAKEIYKLFK

SEQ ID NO: 97112 - protein, 234 aa, Unknown
  Obtained from environmental sample
  DOMAIN (10)...(227): Putative undecaprenyl diphosphate synthase
  misc_feature (1)..(234): Xaa is any amino acid
MQKPVHVGIIMDGNGRWAKQRGLVRTQGHLEGLAAAKRIVKAASEMGIKYLTLYAFSTENWKRAADEVGFIMSLIKQYLRAEFDFSKKNKIRVRHAGDITGLPKDIQKEITDTIRDTADFDGLQVVLAINYGGRDEIKRAIGKLFAAGKDMAALREEDISAYLDNPDIPDPDLIIRSAGEYRTSNFLLWEGAYSEIYISKKFWPDWEKEDLEAAIDDFLGRDRRFGSVSAASQE

SEQ ID NO: 97113 - protein, 550 aa, Unknown
  Obtained from environmental sample
  DOMAIN (37)...(469): AMP-binding enzyme
  misc_feature (1)..(550): Xaa is any amino acid
AFSGEWPALPEMFRITVSRYPQRPCFTIYEPDRISLNYTEALRRVEALARWLHSKGIRKGDRLAVTGKNSPEWAVAYLGILFAGAIVVPIDYQLKTEEIDLLIKTAEAKILFVDEEKHDRYAQSPGALTAVISLKKGIGTYIYDLDGPQADIEQAAETDIAAILFTSGTMGHPKGVVLTHRNIVSDCYLAQGTPLLIYYTDVFYAILPLHHSYTMLAVFIETIGVGAEVVFGKRMVTSQMLKEMKEGKVTMLLGVPMLFNKVLTGILRGVKEKGPVVYGLMSFLMGISGLIKKIFKVNPGKKMFGFILEKASLTSIRICICGGGPLAPSVFKKYNQLGIDFVQGYGLTETSPIITINPVEHYKETSVGRPCPRADIKILNPGGRGIGEIIVKGPMVMTGYYNMPAETSETFTADGYLKTGDLGYMDSENYLYLTGRERNMIVTEGGKNVYPEEIENEFQLFDEIEQILVKGYTPDKKTMSENIEAFVYPNPEFKDETNSRPSGEKMKARINNIISIVNQRLLPYQRIERTTILDQPMEMTTTKKITRGNL

SEQ ID NO: 97114 - protein, 198 aa, Unknown
  Obtained from environmental sample
  misc_feature (1)..(198): Xaa is any amino acid
VFLKDITPPIAPIENHRRREKGVLVYPVYSRRSGGLSVGINLFPGQKQCPFDCPYCEVFPFSTDAVFSLEQMEADLRAAIAAALEQNVPVQDICFSGNGEPSLSSDFPMALKLADGIRREMVPAAELVLITNGAGLLQPEIFSLLQNAAALNIWLKLDAGTPDWYQKINRTAIPFEKLIAKIKEFTASAPVTIQTMIC

SEQ ID NO: 97115 - protein, 211 aa, Unknown
  Obtained from environmental sample
  DOMAIN (30)...(181): Imidazoleglycerol-phosphate dehydratase
  misc_feature (1)..(211): Xaa is any amino acid
GLHACRSTLEDPTIKLNIDGTGIAKLDYPIGFMGHMLNTFARHGLFDLEIAARGDLEVDQHHLVEDTGIVLGQCFAKALGEKRGIRRSGSCLFPMDETLARAAVDIGGRSYLFFEGQLGGTPLLSADDSDGLFRFQSDTIEDFWQGFVGAAGCNLHLEIIRGRSDHHKIEALFKAAARSFRMACEFDDRARDVIPSTKGSLPGFDAPGVLV

SEQ ID NO: 97116 - protein, 146 aa, Unknown
  Obtained from environmental sample
  misc_feature (1)..(146): Xaa is any amino acid
MTDIELGPIRPPSESQSLLIRVTRGCHWNKCFFCGLYKGMKYSVRPTDDILEDIKKSAELYNKIGSVFTSCFLQDADALNVPTEDLLLILDKLKTYFPSLKSVTSYARCDSILRKSESELSALREAGLNHLYRGIETGSDTILKTY

SEQ ID NO: 97117 - protein, 465 aa, Unknown
  Obtained from environmental sample
  DOMAIN (282)...(464): AMMECR1
  misc_feature (1)..(465): Xaa is any amino acid
MAVDEKIRKAAVAGRFYPASPKELRDDVEKYLAAAAPSAPSSTPSVNILIAPHAGYVFSAAVAAGVYARVSRAVRTAILIGPSHHKRFDGVHVTDAQYYETPLGKVEVNREINAKLSKHPLCLRASGAEDSEHCLEVQLPFLQVILGAGKFTIVPLLTGNVGAKAVAEMLLLFIDDTTMIVASSDLSHYQPQSDARDIDDATISTVVSGNTEGFMEACGDTAIRVAMEIAAKRGLTAELIDARTSYETAPEYGDPHRVVGYAAIAFVKSGASDSGTEDFSKQEKEYMLKLARETLTSAVRDGAQRSPSKPKQELSRLAQNYGCFVTLNSHGQLRGCIGNIEPIKPLYKGVADNAINAAFHDPRFPRVKAAELGDINIEVSVLTKPAPLGAKSPDEILKKLIPFEHGVILKMGSRQSTFLPQVWEQLPDKVMFLEHLAMKAGAGRDDWKRADVWVYRAVHFAEGGE

SEQ ID NO: 97118 - protein, 164 aa, Unknown
  Obtained from environmental sample
  misc_feature (1)..(164): Xaa is any amino acid
MIIFAARCEKPVAAERSSTSGVMDEGEWYPVKPKPGATGSHYVDWSRLLDAPAGKHGFLKAKDGNLYFEDGTPARFWGTNLVAKDVFAPNAQLDSAVSRLAKMGCNMLRLHHIDAPWTSPNIFGNAEGTRALSAESMRQLDYLISLCKERGIYIFLDFLVHRGF

SEQ ID NO: 97119 - protein, 308 aa, Unknown
  Obtained from environmental sample
  misc_feature (1)..(308): Xaa is any amino acid
MISTGDTDPNTFDLSTIVLNETDHGTLSYALGTFADQAGANKILTAQPTLSGHTLTYTGTGKESGTATQVIKITSQNYADITATITFEATKKTEVEISGIEAQDHEYDGNQKKGYTGTATSGAYTGTLTYTYGGTGDYGPTETPPTNAGDYTLQVSVPETNPYYTGSERYTFKITKVKIAKPTVTAASLAYTGGEQSAGIAENAAYTVTGDKSSSVGSHTATVVLKDIVNYEWADGTNTDLTLNWSIGKASGLANTVPVEIQISTSNTETHTYNLHALAFNKSDHGTLSYALGTLTDAGGILASAPTL

SEQ ID NO: 97120 - protein, 87 aa, Unknown
  Obtained from environmental sample
  misc_feature (1)..(87): Xaa is any amino acid
MPLLKVSDESVRQAAAVLVQGGLAAFPTETVYGLGGDAFNPLALAHIFEVKGRPRFDPLIVHIAAFETLEKVADLSLLNTQSRTNLA

SEQ ID NO: 97121 - protein, 120 aa, Unknown
  Obtained from environmental sample
  misc_feature (1)..(120): Xaa is any amino acid
GSIVVGVIVSLFAILQFWPDPGPVILIISILLGLNIITSLLDPKIIGDNMLISPLVVLASVAIWGYIWGFAGMVLAVPMMVIIKIVCENIPIMEPVSILMGSKRSAYAKKTDNEKTPEED

SEQ ID NO: 97122 - protein, 164 aa, Unknown
  Obtained from environmental sample
  DOMAIN (1)...(154): Bacterial trigger factor protein (TF) C-terminus
  misc_feature (1)..(164): Xaa is any amino acid
IGDYPNADALKGEFRKNIEARESRKAKESAHEEAIEALVKENPIQLAPATVESLAKRMMDDYLNKQESTVAKAGLSEEQQENFYGIAARILKRVKIIDYVAEKEKIKATQEEVDNEIMQMAQAYGQDFTALKQKFRQDGVTNRIRIDIRERKTLDFLIGEGGSE

SEQ ID NO: 97123 - protein, 439 aa, Unknown
  Obtained from environmental sample
  DOMAIN (301)...(366): His Kinase A (phosphoacceptor) domain
  misc_feature (1)..(439): Xaa is any amino acid
DSPTLKDNMQSLVSLANENVSYEMDLLKGDAVAVAQTLVGHPVHEMQQLLVEQIAAYPNFEAVSIINEKGTTITSYSAGSEPPPDNAVFKNFREMALAGQRVITSTYKDADGQLVFYVFVPLDEAGYTRSRNETSDNPAILGATVSGMYFNTIVNRLMMWNSGRITIVDNKGKIIADVHNEWVGEQLNFLDLAETNSRYSNYARVIERMISRSEDNIGTARYKLKFMGEKFDNVTAFMPVSSPERWAISVSTAIADSAYYTVTGMIGVSGLIFLVLGMVAAAVASGFIAKPFELLKEATKAKTAFIANMSHDLRTPLNAIVSLSQLSRTMNLPEGVMAHQTKIYESGMTILGVVNDLLDISNIEAGKFGVISAEYNLPDFIMATATSNMRHIGGSKDLALTIIPDDKLPVKLNGDSLRIRQVFNNLLRNAIAHSKKRDY

SEQ ID NO: 97124 - protein, 167 aa, Unknown
  Obtained from environmental sample
  misc_feature (1)..(167): Xaa is any amino acid
MLNNKKDPVFIVKVCMLMLVGAFVFSSVSAAFNARAQAQTVASSEELPSFRNMGGIIPNSRNIPRIDFLSFLTNIGRTTGIYAFITNITNTETPAGLPITVYGWQELIMVLVGFLVIYLGAAKGFEPLLLVPIGFGVVFANIPNAGMGSPGVWNEAEHIFEHPGVPQ

SEQ ID NO: 97125 - protein, 582 aa, Unknown
  Obtained from environmental sample
  DOMAIN (515)...(581): Biotin-requiring enzyme
  misc_feature (1)..(582): Xaa is any amino acid
MPKVKLTDLVLRDAHQSLFATRMVTADMLPVCGKLDKAGFFALEAWGGATFDSCIRFLNEDPWERLKKLKKALPNTKIMMLLRGQNLLGYRHYADDVVAKFVEYAAKDGVDIFRIFDAVNDPRNFKAATDAAKKTGKHIQAAISYAVTPFHTIEKYAELAKQYADIGADSLCIKDMAGLLKPYEGYNLVKAIKKVTSIPIEIHTHATTGMSVATLTKCAEAGAEILDTTISSMSMGTSHSPTETMVEIFRGTEFETGMDINLLLEIAAYFRKVRNNYKKFESSFLGADTRILVSQIPGGMLSNLESQLKEQGAAQKMDEVLKEIAVVQKDSGYPPLVTPTSQIVGTQAVFNVLFGRYNKLSGEFQDLVAGKYGACPAPKNADLVKKALEALKMEKEITHRPADDIPAEYGKLEEEAKKVLGTGTVTTEDVLTYAMFPKVAPNFFKTRADGPVVFKPEDTPAPAAKAVPGQAEKYNVNVNGTDYAVVVSPAGSVAVTAAAPIVAATPGAPASSGGITIPAPVAGTILRYSVAEGAQVQKGATIMIIESMKMELEIKTTETGKVHFMVPAGTQVASQQPIAEVG

SEQ ID NO: 97126 - protein, 309 aa, Unknown
  Obtained from environmental sample
  DOMAIN (174)...(301): Protein of unknown function DUF115
  misc_feature (1)..(309): Xaa is any amino acid
MNNTHYTFLTSRSGEIVPAIIDKDGVSRPLHSAIDPIREAERLVSTIPQDTGFVIFLGLCGGFAQQIALSKTSAQIVVIDFNKDGIKELLSSKDYTPLLNNGRFSLLTDFTLDEIKKYILTYYNPALCGGIKVIPLRTRTEHDLEKFNKAAAVIQETIDNTAADFSVQAHFGLRWFSNIIRNIKNAAVTDQSFYAKKINEAAIVAAGPSLDGQITALAEYKSRRVFLICSDTALPVLLNNGIEPDAVVSIDCQHISYYHFFGCNIRNIPLILDIASPPLLSRFSSLPVFFSRRPSSCALYFPLLETFAP

SEQ ID NO: 97127 - protein, 283 aa, Unknown
  Obtained from environmental sample
  DOMAIN (1)...(197): MutS domain V
  misc_feature (1)..(283): Xaa is any amino acid
GGGGSPPYFEMITGPNMAGKSTYLRSAVLITLMAQIGSYIPASQGRIGLCDRIYCRVGASDNLARGESTFLVEMNETAYILNTASEKSLVIMDEVGRGTGTNDGLSIAWAVSEELLDRIKCRTFFATHYHELSLLQHPRMVNRSMEVLEKDGGIVFLRRLKEGPTAESYGLHVARLAGLSPAVLERARQIMQRLRERDTGLGVNQQPKPDNVNHNDYTVNKKVSDAIIRELSVLEPEKMTPLQALGLFNEWKRRFTIEGENVPPVSPKPRGGKTADSSPSLFD

SEQ ID NO: 97128 - protein, 79 aa, Unknown
  Obtained from environmental sample
  DOMAIN (4)...(50): Bacterial regulatory protein, arsR family
  misc_feature (1)..(79): Xaa is any amino acid
MFSDNSRLKILWALFCKQMCVCDLAFLLGMTKSAVSHQLKLLRMSNLVKYEKQGKIVFYSLADKHVKDIFEKGFEHIKE

SEQ ID NO: 97129 - protein, 308 aa, Unknown
  Obtained from environmental sample
  DOMAIN (109)...(307): E1-E2 ATPase
  misc_feature (1)..(308): Xaa is any amino acid
MACNCCEHNHEKSAVKKRFEIELSEKQNVIRMIVGAFLLIAGIVLEKVFHDNSFVSFTLITAAYLLLGFDIIIKALSNLLKGQVFDENFLMCIAAIGAFAIGEYPEAAGVMLFYQIGEYFQDRAVDKSKKSITSLMDIRPDYANFLKNGEIIKTSPDNVCIGDIIIVKPGEKIPLDGIVTDGTSMLDMSALTGESVPKKADVKNEVLSGSVNLSGKLTIEVTKTFGESTVSKIINLVENAASKKAKTENFITRFARYYTPIVVILAVLLAVLPPLFFMFEWKLWIHRALVFLVISCPCALVLSVPMRF

SEQ ID NO: 97130 - protein, 335 aa, Unknown
  Obtained from environmental sample
  DOMAIN (64)...(224): Radical SAM superfamily
  misc_feature (1)..(335): Xaa is any amino acid
VNRFQKSECLYNRAVSNDGAGISEDDMREIAEWPLDRSALLFAAADQARRHFFGGAVDPCAIMNVKSGGCGEDCAFCSQSAHNRADVAVRGLSASKEIVSRCREAWSKGLPFCAVSSGRRLSPSEFKTLCDTLSECGNDGEKHASLGILGENDFAALRDAGVVCYNHNLETSRDYFGKIVTTHGYDDRVDTVRRAKAAGLRVCCGGIFGVGESWEDRIALCLELRGLGVDTVPINFLNAIEGTRVEPPKETPIEFLKIVSLYRLAMPKSTIKVCGGREKNLGALQPLIFFAGANGYITGGYLTTGGAGLEADDGMIGALGLHRESQHQNHFGKMN

SEQ ID NO: 97131 - protein, 186 aa, Unknown
  Obtained from environmental sample
  misc_feature (1)..(186): Xaa is any amino acid
MKKIEVFDGNELHDKPVQYSVDNPICAFLGIDTKEANLTVPLDADLLSRHLMFLGGIGTGKTNAFEQIISQLRSKMSADDIMIIFDTKGDFYRSFYKQGDVVISNDRTATGSNGVDYWNIFNEIENDEHMEENIVEISKALFYKKLEKTNQPFFPNAAKDLFAAVLTHFKKNRNTLKGDNQVLRAF

SEQ ID NO: 97132 - protein, 258 aa, Unknown
  Obtained from environmental sample
  misc_feature (1)..(258): Xaa is any amino acid
FTPNGNERKAIADIDAAMTAASNLPENRGKLVKRGQFWQYNGKDVRIKFMIRVDDPSGRLPAGRYIADQIEKAGIKVERLEYDRSKASTLAYYSDPAAYDWHLYTEGWGAGATRAWWDVTISQMYAPYYGYMAGGAEEGNWNYTNDRIDELGKKGLNGQYLTEEDYWAGNLEAMELGLYEACRVYLAAQFDTYIARKDRFNSRMAYGLGDGLNKWSIRTADVKPDADGQFKGQKVLRVVQYSARGSLFMNAWDPVGTQ

SEQ ID NO: 97133 - protein, 377 aa, Unknown
  Obtained from environmental sample
  misc_feature (1)..(377): Xaa is any amino acid
MKIKIKLSIMMIAIVAIVAGGVAVIQLVRSSNITLNLAKQKTLYLARQRAQYWDGRLNGYISTLQALSNIFNFYESISVEDRRQQFEDNLKGIFEDMPDFVRMGTIWKPNAIDGQDAANIGRRGSTPTGQFAFTLTREKGTIETITNGDVSGIMAILNGPNSKVVNMSDPAPMSNQGVETYAVRICVPIINKRLNEAVGVVLCQLDIAIIQPRVEMTIKEFDEVTSMVIYSDNGFILANYIPDFIGKQIDTETQYGHQLNDVKEAIRKAEEWEGTEFDPELKKNMVMAVANIPIGASPTTWSVMIGSTEEYILTDVNALRTFVIILISVALVAAIILIYVILGGITAPIVKVADVLKIIAESDMTKQITVHTKDEIG

SEQ ID NO: 97134 - protein, 166 aa, Unknown
  Obtained from environmental sample
  DOMAIN (110)...(142): Ankyrin repeat
  misc_feature (1)..(166): Xaa is any amino acid
MRFSYFRDRRHTAVPAIIIFCVAILYISCAGNTEEKTLEFFRALEAGDHAGAQALLKYIDLTAADARAGLTPLHWAVLSGDGDLIARMIERILKDAEDTQPALLDARDAHGLTPLMWAAGDGNLAALEALVPAGADINLRSPSGNTALHYAIASARPIAKRVAQRC

SEQ ID NO: 97135 - protein, 163 aa, Unknown
  Obtained from environmental sample
  misc_feature (1)..(163): Xaa is any amino acid
VLEVRGERVKLYETGLDYVEFLLSPNLGEEVRPLRKIASGGEMSRIMLALKAVLTKGGACETLVFDEVDAGIGGVTATAVGKKLRQVAAANQVLCITHLPQIAAMADQHILVSKQVSDERTKTMVRRLSFEERQSELARMLGGEVVSATTLQQAREMLAAHRT

SEQ ID NO: 97136 - protein, 1019 aa, Unknown
  Obtained from environmental sample
  DOMAIN (904)...(1011): OmpA family
  misc_feature (1)..(1019): Xaa is any amino acid
DYPETAWISPNNDGKADDLEFPISITDERYIMEWVFEISDEYSTPVRVYRNKEIRPETQGVQNFLGRLQSVNTGVEVPQSMRWDGTLDSGGIAPDGRYFFTVSAKDDNGNTAIKGPYEVNVDNTAPEVTLIQFTGEMNIFAPGSGGGRNTLTITQTGSREDLWEGGIYNSSGSKVKTFNYIDNEPASILWDGTDDSSTIVSDGVYSYRIAATDKAQNSAEASLENIIVNTIRPIVGLAIADAYFSPNGDGVKDTEVFTLTIPVRDGIASWELQVKDISGSARRSYSGTSVISERIEFDGRDNSGRTLGEGQYSASLSVRYRNGYLSTANSPVFYLDVTPPSAAIQIEDRDQGPGRPAVFSPIGIKNRLVVIQEGTSEFAWTGEIRRDGDRSGSPVRTFRYSGTPPRRIEWDGINNSGALAPDGLYTYELYSTDLAGNFGRSNAVTFEIDTRDTPVFITTDLRSFSPNGDGIKDTINLIPQIQETGNILTWKIEIFNLGTAGASGGAAGVRSFEGRDQAPSTTAWNGRTNAGTIAPDGSYVARLDLEYRSGNRPTSISMAFNLRTTPPQGDISVPYTVFAPNGNGNRDTLPIRVTTEGNDEWNLVVSSSGNTAVRSWNWTGRAPAVSIVWDGKDEAGNIVDDGTYNITLSSTDDAGNSTRKNINNIVVDARVPKIFLTASAQAIAPKPGQTEAVRFNIMATPAEGVTFWKLELRDENNELIRSFPSQSGGTGPLPTSVPWNGANERNAIIEGRITASLTVNYSKGDVVNVSAPPVMVDITGPILGFHSQPEFFSPDNDGVDDELYIFLSARDISPIAEWSLDICETEGTKQLFYRFSGRGSPSERIIWDGRSSWGELVQSASDYEFTYTAKDTLGNASTMTGIISTDVLVIRDGDILRIQIPSITFRANEADFIGIPRERQETNTRVLKRMAEILNKFRDYKIIVEGHANPVLRTAKEENEVLKPLSLARAQFVIEHLVNNGVSRSRLSPTGQGGTRNVANSQDQNNNWKNRRVEFLLIK

SEQ ID NO: 97137 - protein, 258 aa, Unknown
  Obtained from environmental sample
  misc_feature (1)..(258): Xaa is any amino acid
ARVKGYYDNLNAETVRSLASSVLHEHYDLYMGEVLDKAYKRLKTSDNVSRYRQGIFKQVTALLKDDKWLDESAGKYMRILQTSREECRKKLMFMLEEIRDDLKSVDPLEDEIDRRNAAYSRSSTEIIKAYIEPDSTIAGKIGQLIKAIYGGNEEVKSGIAHGLHRIRFLSPSSLVLSQKRADGDFITSPSKADVEALTQSEAEFLERMKKRLSIKRINAWLDEQGGKENILTPEKLITGEDSYIRFIYALLYGVTEQF

SEQ ID NO: 97138 - protein, 151 aa, Unknown
  Obtained from environmental sample
  DOMAIN (10)...(149): Glutamine amidotransferases class-II
  misc_feature (1)..(151): Xaa is any amino acid
LRILEGDTICGIIGYVGNEDAVPIIVDGLKKLEYRGYDSAGIAVYGQNGFDVIKQKGRLTALEARLAERPLTGRLGIGHTRWATHGEPSDVNSHPHLGSKEKIAVVHNGIIENYKLLKERLEHWEVSFASQTDSEVIAQFAEHYYKGDLLD

SEQ ID NO: 97139 - protein, 393 aa, Unknown
  Obtained from environmental sample
  DOMAIN (195)...(226): Putative Fe-S cluster
  misc_feature (1)..(393): Xaa is any amino acid
VIGPCAAKKQEILRPENDGAIDVVITFTELSQWLLSENIQLENCSESGFDQSYETGEARLFPIQGGMLKTGGIQSDGTQTDVLHISGADDILELFSNNSDFDGKLIEPLFCKGGCVGGPCFGSEESETPGQNLFTRRESVIRYAESAVKINKEFPVEKIFHQANFVLDEQKQQEVTENQIHKIFELTGKITPELQLNCGACGYNSCIENAIAVVRGMAEPEMCIPYMRRLAQQRTDRVIDTTPNGCVVLDSELCIVKMNPAFQKMFTCNNGILGRRISYLVNADGFETLHSGASEKCESIQTKYGIKYHEILYALREENQYVGIYSDISRIKYDAGQLDTIKTQTLMHAREFLNHQVRFAQEMAHYLGKSTAQSEEIAKRLIGLYEEDSGEVT

SEQ ID NO: 97140 - protein, 381 aa, Unknown
  Obtained from environmental sample
  DOMAIN (334)...(367): Tetratricopeptide repeat
  misc_feature (1)..(381): Xaa is any amino acid
CGTLAFLARGSSGELPLLADFSPEILRFTDKGRVLGEVVIRYRFLGQEREAVRSVILAANNRNMVTEGDAAALAAFISPTSPETADYAKSIAGLARNDRRTGHNQNFQYAIWLLEGLRAGGVILGNTDKPEVQFPAETLSFRSGTSRDLALLFAGCLESVGISAAFVQMENDFLAAVSLNVNTSAAETLFNGTGKILIINDEVWLPLSMAAFNDGFTAAWTRAVKALDDTFKADRQADFIMVEEAWAVYPPAPFPEQGGRVVRTDAAVASREVNRVMQQYIAQEIQPVLTQVQAKVNASPTAALYNRLGIVMVRAGKIPEGKTNYEKAAGMGSIPAMTNRGNLAFIEKDYATAERWYRQALSKDSKNAAALSGLEQISVNK

SEQ ID NO: 97141 - protein, 186 aa, Unknown
  Obtained from environmental sample
  misc_feature (1)..(186): Xaa is any amino acid
MAKTSQRKSFIKVTLASFAVSSLLFLTSLDNKFFDLFLRFLPSLTESEKVVVLTLDDDTINLAGGFPFRREVMADVVILLKELGVQTIVFDLSYLDESPYRLDPAYAADVFGHSLDTNFDRLNEAAVTVIDKISPSAGRRERELYKQDMKSLFRSVRGELEMSFSLLTMDVDGYFAQAIAFSDCSW

SEQ ID NO: 97142 - protein, 254 aa, Unknown
  Obtained from environmental sample
  misc_feature (1)..(254): Xaa is any amino acid
MLADFWQYCVHPAYKTLLLGDWASKGGDKGDPTLAALQMNATRPSDFIISHLKAYKAVDSAHNWQEVIDATYGVIKDVYADVKAKHGTSRGLLPDFVIRNDANTAWVVPEGHVLEADTDGSYSYNSCRIPWRLGTDYLLYGGNTTLPGFDTFTETIQPLDKLATEIYGSADLDIFGPLTITGDGIWNTENWDEFWDDPQSFTAPFLITAAATGNKALVNEMWKWDGLKDFWCDTWGDYIKMIVMLTASGNYWKP

SEQ ID NO: 97143 - protein, 170 aa, Unknown
  Obtained from environmental sample
  misc_feature (1)..(170): Xaa is any amino acid
FVGQNVTEAKVKELSRRGDLAKYPVIHFACHGYFNSEAPILSGLVLSEVSGRLPRNSEDGYLTVPEMAGLNINAHIVILSACETGRGEIIRGDGMVGLTRSLLVAGTRSVGVSLWSINDEPTVDFMLSVYRKALHEGKTFRAAYFETKQQFRKNSKWKHPRYWAGFALYE

SEQ ID NO: 97144 - protein, 277 aa, Unknown
  Obtained from environmental sample
  misc_feature (1)..(277): Xaa is any amino acid
VQAHHSPNQFIKAKAIIRRIDETLENRPFTPCFREAKQECPARFTGLYNKYLESLAKRGHKKNTVNIRKRYAGRFLSRIPETVSSLEELSAADLYNTFTKYEWLPVCLIAARNFLSYLFETGATKTNLSVCVPKPACPEPLPSIYSGGEIKQLLLSIDRACSSGKRDYAILLLASHLGLRSSDIVELSFKDIDRTAKTIEIVQIKTGRPLKLVMNTEVEEALADYIQNGRPESPSDKIFLRLHAPFLPIKASCCYAITCKVFDLAGIAAQGRRRGTH

SEQ ID NO: 97145 - protein, 281 aa, Unknown
  Obtained from environmental sample
  DOMAIN (91)...(200): Glycosyl hydrolases family 2, immunoglobulin-like beta-sandwich domain
  misc_feature (1)..(281): Xaa is any amino acid
MYLTHRIVDPGLRDGENELVIHILPACLEARKNAVSAGNYHLKYNYECLRLRKAPSMFGWDITPRLVSAGIYRSAGIYLRPTESLRQCYLMTVHTNPERTTAKLELFYEVDIGDNPVSDYSITISGKPVAENRGGGDSGARGFSHSGRLWFTAGKLRFDVTNAELWWPKGYGNANLYDIEVTLLKNGKPVDSYKTKTGLRTVKLVRTGTTDIFHNGAFHFVINGRKVFVMGTNWVPVDSYHSRDKGRIPQIMELLEDIGCNAVRCWGGNIYEDPLFYSYCD

SEQ ID NO: 97146 - protein, 833 aa, Unknown
  Obtained from environmental sample
  DOMAIN (178)...(637): Bacterial DNA polymerase III alpha subunit
  misc_feature (1)..(833): Xaa is any amino acid
ELLDKAASFGVKEVSICDLNNLYGVHSFCEEAKERGIRPIIGTALTNGEEQRVIYCFVENRAGFGRLCEILTARNKDKERFDPIPILRENTDGLVLASSDEAALAYLAGHVKRLYAAITPTGVGAAGLGRKLNIPLAFIDDSIFLEAEDFAVHRVLRAIALLKTTGSLARAETAEEDRIFRPAKELNRLLMSWPEAATGSTEIAEICQFNTLFDGFIFPSYGENPGAELRKRVYDGALLRYKTLDEITIKRIEYELNIIENAGFSPYFLRMDEIVKMARNINGADRTCGRGSGAASIVSYSLGITNVDPVRHNLYFERFLNPSRSDPPDIDVDFAWDERDDLIKAVIERFGPEYCARVANHNFFRPRSALRETAKAYGFSDGEISRHERRLFELRESVEDADPLWKEVYKIAARIKGLPRGLGMHCGGLVITPEPISRFAPVEKSAEGFPLLAWEKEGVEAAGFVKIDLLGNRSLAVIRDALQNLREQGIDIDPQTWRPIDDKATMEALSRGDSMGVFYIESPAMRQLQKKTGAGDFEHIVIHSSIIRPAANKFISEYVRRLKGGKWEPLHPRLEGILGESYGILCYQEDVSKSAVALAGFNEADADRLRKLIAKKAGGAKLGIYEKQFFEGCRKNGVEEDVIQKVWAMMLSFDGYSFCKPHSASYAMVSFQSAYLRVHHPAEFMAAVLSNQGGYYRPHAYIAEIRRMRLFTLGPDINLSRWKYYGSGRDVVIGLMAIKGLSASGAKAVLEERGRGGDFTSLDNFSRRVSLNCDDIVALCPAGVFDSIADGLPRHLQARRLLSAGSREFGVGNGELFAADDTPVYGVEKPSIA

SEQ ID NO: 97147 - protein, 135 aa, Unknown
  Obtained from environmental sample
  DOMAIN (45)...(135): Response regulator receiver domain
  misc_feature (1)..(135): Xaa is any amino acid
VNSDKVKTLEMPVHSISIANLLNGATDAAYTENPQGATPFMAPSARILIVDDLMTNLRVAEGLMLPYKMQIDVCQSGAEAIEHVKEKDYDIVFMDHMMPEMDGIEATVKIRSLEGDEYKNLPIVALTANAVSGVK

SEQ ID NO: 97148 - protein, 270 aa, Unknown
  Obtained from environmental sample
  misc_feature (1)..(270): Xaa is any amino acid
SGGFDFTAQWAKRLSAMNNNAPFFKGDETYAYPDGFASRDEYNSAYKLPPREFLMEYNQFYLSLGFSTGYRWFTPVGNLSVGGGIRTGLIRNEYDDEIYRPFDPALRERHNDWTPKNSIWTTVSLDQRDLYYDPSKGYYIYERFGIYGLLGIEDEEPRIEREYYLRNDLKAEYYITLFNLPVTEKWHFKSVLAFHSGLSFIFKQPGRDINSLTPTIEEANQLSVDGMFIGRGWSSEYRYKGLVLWDNWIELRFPVVPGILACDFFFDAAG

SEQ ID NO: 97149 - protein, 288 aa, Unknown
  Obtained from environmental sample
  DOMAIN (115)...(250): MutS domain II
  misc_feature (1)..(288): Xaa is any amino acid
MLDQYRRIKREHEGDVLFFRLGDFYEMFAEDAIEISSLLNLALTSRNGLPMCGVPYHAARSYIARLLKHGKKIAICEQLSEPTGKGQKIIDRRVVEVITPGTTVDEDYLEQGCSNYLAAFASKGGKCAFAYIDLSSGGFYATSFPAANSSDRLRLELERLLPREMIVQESLLEEEPDIARALYERPNLVLNRWADWLFDIERSNKRLLRQFNVSSLRGFGLEDNSPQLLCAGALLDYLDDTARSLLPHVRSVTVYTDNEFVGIDESSQRNLELVKNLRDGDVRFSLLE

SEQ ID NO: 97150 - protein, 293 aa, Unknown
  Obtained from environmental sample
  misc_feature (1)..(293): Xaa is any amino acid
SLDRREFTDISFVSRLEKTWFSYFCDFNTLGKSDGQLVFHVTDAAGVVTEVLPEYTIEPNPPLPIIIVNSPAEEEVITNPFEISGLAYDDVGINAVYWRILGPKMESISKGAAGEEARKAAAVFATIREVPFQELLTDQNFRIPVDFSMVTDGEYTVEIYASDIYGVQSEMVSRIIKVSTAPPETEVLSPVITRYNRKAIVVKGFSSDANDIENVFFSMDNGNTFQKVELFTNGNWELALNTADYTDGIYSALIRTYDKYGVSSYSNAMINIDNTPPEIFLTYPVDGQHVGTN

SEQ ID NO: 97151 - protein, 875 aa, Unknown
  Obtained from environmental sample
  DOMAIN (148)...(261): MMPL family
  misc_feature (1)..(875): Xaa is any amino acid
MEKLFKHPALIVGVITLITVFLGLWIPRAELDNNNIRFLPDKNPAKLISEYIDETFGGQVLILVGLERPYRTVFEKGFLRRIREFSQAVENTEYVKSVNSIMSTQYITGDNDSIVVSDLVPEDFSGTDEEITELKRRIASWDLFSNSLVSDDLSATQILITLDAVTADFTRPEVTRSIEKIRKIAGEIFTGEAEVYFTGQPIINAIINESIITDNLLLIPLVVIVVLSMLFFSFRRFTYVVLPFLTVIIAVVWAIGMAALLGIKLSVITTILPVILVAVGSAYGIHIVTHYMEDMRGKTLNVTEHRELVIGLVKKLIKPVFLAALTTMAGFVSFCFTPIVPMREFGYCASFGVFAAFAVAVLFIPSMFLLRGPRVLKGKQKEKTSSGFNNTIAVFFTGIAEKKVLVLIIAALAVVISLYGLSKVIVDNAVVEFFKNETDISRSDRFIREYFGGSKDLSLVVTADTTEELLHPDVLQAVDNLSAYLTANVPDVGKVVGFTDIIKRINQVFNVGESPEGLQNTMSHNAGDGFGFSDNASGDFGFGNFDSDDTHYIETQRQENGFQESGFNITQYNTADILRFLDSAAGKSPHLSGSELVRELKRLTNYDGMAYYEIPSNPRRYGKETPEELQRLIANYLVLLSGDDDSGYSNDPLEPTAIRTMVQMRTTGSRDSQAVIDTINEFIAVNFPKNVEVIIGGGVTYEMAVTDLIFNSQIISIFISVFIVFLIIAISNKSLIAGVIGAVPLTLAILCNFAVMGFLGIKLNLGTALISSLAVGIGIDYTIHFIEFFRREYKSGEPAFLHRTFIGCGKAIMINALSVGAGFGVLAFSQFKIIAELGALIALSMLITALVSLTVIPALLTAIKPKFTYRLPSPD

SEQ ID NO: 97152 - protein, 801 aa, Unknown
  Obtained from environmental sample
  misc_feature (1)..(801): Xaa is any amino acid
LKHVTLAYELDTTVGDSYMEAVPQAHGNSRALFHFERPRLNQLFTEAVKYPLVVVCAGAGYGKTSAVHDFAEEYQASTTWIQLSARDNVGARFWENYTHSLSQVNAPLAEAMTKLDFPDTREKKNHYRTLIHSMVEMKRRIIVMDDFHCIEEPSVLRFAEECILQSMPPGTSIFLISRSTPRVNIAGLMYRDQIFNMSEDDLRFTDNELAQYFRRLNIPSQTNTLREIMQDTEGWAFAINLIARSYQKVPGYGGYIRSAMKTNIFRFMETEIWDGISENLQNFLVRLSLIDHLSVDLITQLSGDEKGLIDDMEKQSAYVRRDGFINAYLIHPLFLGFLRQKQESIPEEQKRETYAIAGAWCSKNGFRVDALSYYEKTKNYQAIVSLLGELATQIPHDIVNYAATILDRAPEDACYNVAFFADMHLRSYICLGLLQKSLELVKHYEAKFFELPDNDIVKKRNLTRLYICWTYIRCLMSVTDDIFDYDIYTEKACKCVHEADSGKLDINYPGAWLSYAGSSRKGSPEEYIAAITRNQAHISQSHLKGFMAGELELAKGELEFYRGDTSSAPSNIILAIKQTRAYKQFGLMHRALFYTLRIAASQGNFAQVEQVIQETKAQMDEVEYINRFMDYDISLSWYYCFLGMPEKTVDWLKEDFLAYSHAASIDNFANQIIARLCYATRNYSPLLSYIEEMKRRESFLFGRVEMLAMEACIHYKMKNKVKAFAVFEEAYKNAEPNGILMPFIEMGKDMRTLASAMLKESKKIIPAAWLEDINHKSATYAKRRSHVIAKYTQASGTAGGI

SEQ ID NO: 97153 - protein, 409 aa, Unknown
  Obtained from environmental sample
  DOMAIN (181)...(247): His Kinase A (phosphoacceptor) domain
  misc_feature (1)..(409): Xaa is any amino acid
IDVQLHTQYLTLTISLRLGLTLLSLLCIFAIAFIKFFRVRPVILLSALVAYISIATAIITATANVDSISPYMGGFVLVQMIPVFAPLPLPYKFSITLFSAAIFFVLGSAMGIDFYSNSISYSTNDTINSLVMTLILSYAQNTLRFNAWRQQVTLRFLVEKDQERLNTISKLATKAEVASKSKSEFLARMSHEIRTPMNAVIGISELAMREKEVPQSTYNLLVTIRQAGLNLLSIINDILDFSKIESGKMEIVNANYHFPSLIKDVVNIIGIRATNSMLDFQVNVDKHIPDTLFGDEVRIRQIFLNILSNAVKYTTEGFVALTVSGQPLDNENITIIIEVADSGRGIAQDDMDILFDDFVQLDVAKNKGIEGTGLGLAITYNLVKAMNGTISVRRIRQGSVFTVTLPQKI

SEQ ID NO: 97154 - protein, 858 aa, Unknown
  Obtained from environmental sample
  DOMAIN (127)...(503): Peptidase family C25
  misc_feature (1)..(858): Xaa is any amino acid
IKYAGAMSSGSYYELSAVEVRYSRPLSIGGGVGKLEVFSSNAAEPVRYKLSNAGGGLAYIVRVPADGRGIELVDTVRSSSYTWGDVGGEGVRYMTMLDREIVDYSDSLSAWGGPSSGQQSAQYRIRDLRNVDNATDFLIVTHEEFLSAALKLAAHKAGMGFRNPAVVLLGDILDQFGGGNMDPVAIRNFLYYVYGYWAGGQQDLSYVTFFGAGHYDYKNVSSRAVNFMPVPYINGRFNEDFYVFFEQASLASQHSCYYFMGRLPAGSLSEAYDMVDKVKEMEDPRVAKFDFWRNRVLLSADDDQQGAREDRTYPAHTSSSELISRIIDNGRPDIGQKKIYLFEYGWDERYHKPAATRAFINEINSGAALVNWFGHGSMNQIADEMLFIRDQVSALENRGRYPLFTMFSCSVGRNDQPGSESLAAMLVKQPIGGGIACVASAREVYARSNEFLAMPFFSELFSREDNSELSIGGALVKAKIQYTDYWNRYYVLLGDPSIKVIGRGSGVEDLKITDTAGVPIDTLKALQRVIIKGKASGVRESDSAYAAITLFNPQQDSVRRKDGGSNDTVTAYRPYSMPGSPVFSATKVRVGRDGGFEQPVLLPMNLAFGKPGVKLTAYVWKEKEAAASAAAYMGAGYRDGLVFYGSENANLSDKEGPKISVRPLYYKDGTLEPNQAMNNAGLFVKNRITAQLPLTLEIKIEDQSGINKIGSGPDEGITLEVKGALSKRSINHLFDFDTGSFTQGKAVLAFEENMLSSGTYDLIISAQDLLGNVSKLSVVWDVSNGSEIKLDHVINIPNPVKMGQETRFYYTHSNVSGDLNADVTIRVYSLGGRLLSVIRSRDLVNGYKWVPRDNRGNL

SEQ ID NO: 97155 - protein, 429 aa, Unknown
  Obtained from environmental sample
  DOMAIN (169)...(311): Radical SAM superfamily
  misc_feature (1)..(429): Xaa is any amino acid
MPMKLKLIYPKWNKLPGQTTFNLPPHGPVVFAASLPDYVDINFTDENVQNLDFDESCDLVAVSMMLSTQVKRGWAIADEYRKRGKQVIFGGISTMLHAEETIQHADSVFLGEAETRMAQVITDWKEGRLQKVYNFMSQQPPVESIGPARRDLYRRELYNHKGVQMVDLFHASRGCRFSCYPCAVSYLGGRSFRPRPLDRVIEELAGIENNRLFIVDNSLAQDKKWEMELFREMIPLKKKWISHTIEDDPKVLELAAQAGAWYVYQAVYDTSDYIKERVKRYHDHGIGVEGTILLGLDNQTEDDCKRLIDFLLEINLDLAEFTIMTPFPHTKAWDDLTRQGRIFDQDWDHYNAGQVVFTPKNMSAERLQELYDDAWKIFYKDETQEEKMFHLLSSVVSREMDDGTYRPRNRRLIHKSFGKDVVRSVGAGS

SEQ ID NO: 97156 - protein, 98 aa, Unknown
  Obtained from environmental sample
  DOMAIN (24)...(91): Phosphopantetheine attachment site
  misc_feature (1)..(98): Xaa is any amino acid
LGNILVTWDYIRNEVILDKTAIYEKIKELLISNFELDADSIGPEKRLDDDLNLDSLDIVDLILNLSDFLGERIDPTLFKDAYTVQDLINSITPHWKSK

SEQ ID NO: 97157 - protein, 88 aa, Unknown
  Obtained from environmental sample
  misc_feature (1)..(88): Xaa is any amino acid
MIGIIGGSGLDNPEIFHESRDENVSTVYGEPSSALKYGSIDGIMIVLLARHGREHTIPPSQVNYRANISALKKAGVQPYNSDYCGWLP

SEQ ID NO: 97158 - protein, 425 aa, Unknown
  Obtained from environmental sample
  DOMAIN (188)...(311): HD domain
  misc_feature (1)..(425): Xaa is any amino acid
MVLGSGGQDFGLRSLKGRGMKKVLVTDLKEGVVFSQPVYIDGQNILVPAGVAVRKKDIARLHSWGIEAVETDGEPVVPSPKAKKAPDAGDSKTQEPAKKDTAGKASDHKKKAASMISLPEVQENSGAYRNYINLIERMDEVCKNIADGITMEARSIDNISGRLLQSVREERNSFIGYILGGEIKGHEMAKSQVNTAILSAMIALEMKIQNHKVLQIVTGALLHDVGMLRMPKEIVEKRGGLSESELQRIQSHTLYAYKIVNKELLYPEEVGLIVLQHHERWDGEGYPRRLSGTAIDIGARIVSVADAFEAMVSKKPYRNSMMGYQAMKNLLSDNLRRFDPDVIKAFIQTMGIYPIGSIILLNNGALGRVVDVQASAPLRPTVRILADEFGNFFKNDSGDLFDLLIEKSLFIARAVDPKEIADKDF

SEQ ID NO: 97159 - protein, 82 aa, Unknown
  Obtained from environmental sample
  misc_feature (1)..(82): Xaa is any amino acid
MKKASAIAYNDEEGIPRLLAKGRGREAERIIALAEEAGIEIVEDSSLAALLDAGVKPGDLVPPWCWEAVAKILAFVLSKEEG

SEQ ID NO: 97160 - protein, 230 aa, Unknown
  Obtained from environmental sample
  DOMAIN (167)...(206): Pentapeptide repeats (8 copies)
  misc_feature (1)..(230): Xaa is any amino acid
LEHENGLGGSHRVKHKFFEVIGHAKPFNKSKVLELLKNGCKKAVLDYDLSGADLSDADLSGARFSGARFSGADLSGARLSGADLSGANLSGARLSGADLSGANLSDADLSDADLSGARFSGARFSGADLSGARLSGADLSGANLSGARLSGARLSGARLSGADLSGADLSDADLSDADLSDADLSGARLSGARLSGARLSGANLDFSCLPLRCGGLKWHIDKRIACQLAY

SEQ ID NO: 97161 - protein, 284 aa, Unknown
  Obtained from environmental sample
  misc_feature (1)..(284): Xaa is any amino acid
FLRDAAGVDCAFATLTLEDPGSFGRVVRRNGKIAAIIEAKDYDPIRHGADPREINAGLYLLNLPAVVPLLPRLTRDNKNSEYYLTDLVALAAEAGLAVRGLNRGCEPGLLGVNTPEELAEAEETLRRAIVREHLAAGVIMHGADSIRIGPDVAIEPGAELSGPCELYGTSRIASGASVASHCWIRNSTVAARAVVHNFCHLEDAEIGPDCRVGPFARLRPGAVLEEQAHVGNFVEMKKTRLGRSAKANHLTYLGDADVGDGANVGAGTITCNYDGKNKHRTVIG

SEQ ID NO: 97162 - protein, 86 aa, Unknown
  Obtained from environmental sample
  misc_feature (1)..(86): Xaa is any amino acid
MQIEAAGLLKSAKNKDNAKVFLDFMISPDFQNIIPLTNWMYTVIDIPLPDSFRVNPKSDKPLLPGTVSEADLNEWASLMTSGGQNK

SEQ ID NO: 97163 - protein, 481 aa, Unknown
  Obtained from environmental sample
  misc_feature (1)..(481): Xaa is any amino acid
VLVSLAIGLPGAWFIGNSRSRFTPILKTLTAIPFAMPSILVVLGFVLFFGNSGWVNRIYGTLPFSGEQPLRILYKPLAVILAHGFFNFPLVIRLAGDGIARARRAYAPAAASLGASPLKIILTVILPLTVPSILAASFLAFMYCFTSFAVVLVLGGGPNTTTLAVEIYRHARIFLNYGNAGFLALIETLIAVCVFLTYVFVGKKSMSIQTNVIEYAEAGKKSTASRIIMIVYFIMMAFIVLGPLLSIPLESFLYTPSRSASQVLSVRWWSDLGGTCFPALGRSLILAFFSATTACVLAFFAAGAVKLLETNNKETSLPANLIRFFAAAPVISSGIVLGLGWIIIYGRNFSRSPIALVILHGVSAMPFAFNFISEGFRSLPANTLNAAAVLGADPLRGLLTVALPLSLSRVRSAWGFAAALSLGELNAVMMLGMEGWETLPLYIYRAVSAYRYGTACAAGTLLILCCAACFLFSETGRKKYA

SEQ ID NO: 97164 - protein, 87 aa, Unknown
  Obtained from environmental sample
  misc_feature (1)..(87): Xaa is any amino acid
MQIEAAGLLKSAKNKDNAKIFLDFMISPDFQNIIPLTNWMYPVIDIPLPASFRVNPKSDRPLLPGPVTEADLNEWAALMINLSGQNR

SEQ ID NO: 97165 - protein, 545 aa, Unknown
  Obtained from environmental sample
  DOMAIN (50)...(282): Binding-protein-dependent transport system inner membrane component
  misc_feature (1)..(545): Xaa is any amino acid
VTKKTAACLLALPPVLAAVFSFILPYAASFGPAIRGFISGEISALQNNALFNITLFTFKQAFLSVLVSLALGLPGAWFIGNSRSRYTPLLRTLTAIPFAMPSILVVLGFVLFFGNSGWVNRLYTALPFSNSQPLRILYKPLAVILAHGFYNFPIVIRLAGDGIARARRAYAPAAASLGASPLKIILTVILPLTFPSILAASFLVFMYCFTSFAVVLVLGGGPTTTTLAVEIYRHARIFLNYGNAGFLALIETLIAVCVFLTFVFVGKKSMSIKTNIDEHAETGKKSPASWIIMIAYFIVIAFFVLGPLLSIPLESFLYRSSRATAQALSVRWWSNLGDTCLPALGRSLTLAFFSATTACVLAFFAAGAVKLLETNNKETSLPANLIRFFAASPVISSGIVLGLGWIILYGRNFSRSPAALVILHGVSAMPFAFNFIFEGFRSLPANTLNAAAVFGADPLRALLTTALPLSFPRVRSAWGFAAALSLGELNAVMMLGMEGWETLPLYIYRAAAAYRYGTACAAGTMLILCCAACFLLSETGRKKYA

SEQ ID NO: 97166 - protein, 233 aa, Unknown
  Obtained from environmental sample
  DOMAIN (25)...(206): ABC transporter
  misc_feature (1)..(233): Xaa is any amino acid
MLEVKALKKSYGDFSTLLDLSVGEGETLSLVGPSGCGKTTALNLISGLAEPESGSVLIDGEDITRLPAWKRNISVVFQDLALFPHLDVGGNIAYGLFIKGVPKKERRIAVEKTLEIVRLQGYAARRIDTLSGGERQRVAIARALASSPRLLLLDEPFSSLDAPLRKNLRQDFLEIRSHSKAPCIFITHDREEALMLGDKVTLMKDGRIIETAARGEMLSAPKTEFAREFFGKE

SEQ ID NO: 97167 - protein, 148 aa, Unknown
  Obtained from environmental sample
  misc_feature (1)..(148): Xaa is any amino acid
MGKKIGIDLGTTYSCVSYVDENGIVKIIDNSEGEQTTPSVVYFAENGEITVGSTARQEGGLTPERLQERVKNYMGDPNFVVTQNETDYSASAVSAVILKKLVRDAQAYFGGEEIEGAVITCPAYFGEAARAATKAAGEAAGLNVLKIL

SEQ ID NO: 97168 - protein, 285 aa, Unknown
  Obtained from environmental sample
  DOMAIN (215)...(284): Elongation factor Tu domain 2
  misc_feature (1)..(285): Xaa is any amino acid
SDTLDHGKTTLTAAITRVMSTKGLSKYVAYDEVAKASESQGRRDPTKILTIATSHVEYSTANRHYAHVDCPGHADYVKNMITGAAQMDGAILVVSAADGPMPQTREHILLARQVGVPYIVVFLNKVDVVDDPELLELVELEVRELLSKYDFPGDDTPIIRGSAIGALTNPEDPEKSKCILDLMDAVDTYVPTPQREVDKPFLMSVEDVFSITGRGTVATGRVERGTVKVGEEVELVGLRDSRKSVVTGVEMFNKSLDRAEAGDNIGTLLRGVDKNDIERGMVLAK

SEQ ID NO: 97169 - protein, 287 aa, Unknown
  Obtained from environmental sample
  misc_feature (1)..(287): Xaa is any amino acid
IRKYIVLAVVFAFCFFVYMKGYKKLLSFFVITFFIAFVPFSIKNLFSINTEYKKLSQYYKPEQKTEESISPIFHLSKTDKNVIVIMLDMAESVFVPYIFEENQELYQKYDGFIYYPNTVTFNGWTSGGAPPIFGGYEYTPEGLNNRSDISLRKKRNESLLMMPTLFSANGFSVTITDPPYADDNWIPDLRIYDNEKNVSGYITDGVYTNLWLKRNNIHLPPHSEVLKRNILWYAIFRQIPLTFRQAVYYSGSWCAPFSEYRMRLFLNGYTVLDFMDELTDFILKKKN

SEQ ID NO: 97170 - protein, 278 aa, Unknown
  Obtained from environmental sample
  DOMAIN (16)...(189): Radical SAM superfamily
  misc_feature (1)..(278): Xaa is any amino acid
MHLKEVKSILSAQNGMNLSRGCTHGCIYCDSRSKCYRIEHDFEDVEIKSNAPALLNAALSKKRNKCMIGTGAMSDPYIPIPESLANTRACLEIINKHGFGLVIQTKSNLILRDLDLLVSINQKAKCVVEITMTTYDENLCKIIEPNVCGTRRRFETLCVLRDNGIPTIVWLCPFLPYINDTEENLRGLLDYCIEADVYGILCFGIGLTLREGNREYFYSNLDRHFPGLKNEYQKKYGLNYVIASDNNEALMKLLYSTCEKHNIVCNNDSVFGYMRDLQ

SEQ ID NO: 97171 - protein, 146 aa, Unknown
  Obtained from environmental sample
  DOMAIN (12)...(141): Peptidase family M50
  misc_feature (1)..(146): Xaa is any amino acid
MNIIYWIFQIILGLLGLSLLVFIHELGHFLAAKFCGVRVLTFSIGFGKKLLKINRDGTTYCISAIPFGGYVAMAGENPEQVREGKPDDFYIQPIWKRALIAFAGPVFNVIFAYFLLTGIYMLGYPEPISDKLVVGVVERDSAAEEA

SEQ ID NO: 97172 - protein, 94 aa, Unknown
  Obtained from environmental sample
  misc_feature (1)..(94): Xaa is any amino acid
MMKFCAETTSPYGVKTYASLNSIMVDGTGMCGVCRVTVGKEVKFVCVDGPEFDAHQIDWESMLKRMGTYKQREALAREIALAKLSGETCGCGNK

SEQ ID NO: 97173 - protein, 322 aa, Unknown
  Obtained from environmental sample
  DOMAIN (92)...(297): Flagellar assembly protein FliH
  misc_feature (1)..(322): Xaa is any amino acid
MTKAVYSPEELVLIDERVVISAPTDFGSAHNEPVSNDEEAEEVQAAEVYTGPTAEDLRHEAEAFKIEWDIEKQAMIESAQAEANEIVQMAEMAASKEKQEKTAEAQTLLDQAREDAKRIVGDATQLAEKIETETRATLDDEKNAALNQAREEGRNDGYAEGKAEVDRLIERTHTVLERAQDKRGEILVQTEEEVIRLVLLMVRKIVKVISENQREVVISNVIEALKKVKDRGNIIIRVNTADLKLTTEHTKEFIKELEGVKSIQVAEDSSVDAGGCVIETDFGEIDARIASQLGELESKILQASPIKSKPKSLTRSSLKTEI

SEQ ID NO: 97174 - protein, 65 aa, Unknown
  Obtained from environmental sample
  misc_feature (1)..(65): Xaa is any amino acid
MGISKPDPAFYAYILKAEGIKAQDVFFTDDTIENVNVAANAGFNAFHYTSAQALKNQLRSHGLLK

SEQ ID NO: 97175 - protein, 79 aa, Unknown
  Obtained from environmental sample
  DOMAIN (8)...(65): Protein of unknown function (DUF433)
  misc_feature (1)..(79): Xaa is any amino acid
MNELRTHIVVDPEIRFGKPCIKGTRITVGDILQWLSAGMTEREIIADYPELQETHIRAALAFAAERDAMTRVITHETVA

SEQ ID NO: 97176 - protein, 98 aa, Unknown
  Obtained from environmental sample
  misc_feature (1)..(98): Xaa is any amino acid
MNSANKQKQIESVYKILSEEFKKNRTPIVDLIDVQTGDPFKVLIATILSARTKDETTAAASRKLFERVKKLSDLDQLTEKELAKLIFPVGFYKVKARH

SEQ ID NO: 97177 - protein, 53 aa, Unknown
  Obtained from environmental sample
  DOMAIN (1)...(52): Helix-turn-helix
  misc_feature (1)..(53): Xaa is any amino acid
MRTLREMKQAELAKKIGVNPQQISDMEKGRVPIGKKMAMKIGEALNFSYKLFL

SEQ ID NO: 97178 - protein, 109 aa, Unknown
  Obtained from environmental sample
  misc_feature (1)..(109): Xaa is any amino acid
SEIICYHCQQAVEKYLKAFLCYNGVIPPKIHVLEALCALCSEFDSSFNNLARDCAYLSTFAVKARYPLEMEITDLNIIKSLEITQKVKDFIPIAELKTKLLNEKENNNV

SEQ ID NO: 97179 - protein, 289 aa, Unknown
  Obtained from environmental sample
  misc_feature (1)..(289): Xaa is any amino acid
FLFSADFTGLQTFFDDYSEAEDAFPLCTMAEWGWHSYSNTEDSSLLRLTPYDTFGRTVCYATDDKGQEELFKRIRVNAHKFHLGLTGFELAGKKLTIENCEPVSQTLSLWEGVLSSEFKIENHIVHTETFVHPNEDTLYVRAASPLLKERALHITLVFPYGSHKKTGADFSATQLHETEVCVSRDGFVYIERKLDDTVYTVAIGGSGFTVLLNERQHTLQLIPHDECINFNVRFEPVRIPSFSNAGIALDKPKSESTDSFNEAKSKCLSFWERYWNTGGFIDFTGSSDS

SEQ ID NO: 97180 - protein, 383 aa, Unknown
  Obtained from environmental sample
  DOMAIN (7)...(351): Uncharacterised protein family (UPF0075)
  misc_feature (1)..(383): Xaa is any amino acid
LQSGIQTLYLGFTGDDWEVFSTAYLPYPQRVAELITRIIETQEPVALSELGWLDYKITMLFLESAKNAFSGAPKAISAPHYAVLNKPTLWKGATGENLQQSSWNLTVGDQVFVANALGVPVITEFLRHNILAGGSGVLPTFPGSLIVAKYTTGVGLFVNIGLVSRMTVIDSDAQALLFESDTGPGTVLIDKCAQEAECDGGFDRDGALTATGAPCSECLETLAADPWIAKAAPKQASPEIFSHLLDHPCLKRLSPVDKLATITALTARSVYDFYRREYREAAQPSALWLSGGGANNLTLVDFLKASFDPIPVRSVEDLNIPPDMKVPLTLGLTVDAFVCGKEYSVGVGEQPQNQTAGTVGASVGGGGRTGAYLSASIIPWELF

SEQ ID NO: 97181 - protein, 406 aa, Unknown
  Obtained from environmental sample
  misc_feature (1)..(406): Xaa is any amino acid
LKTIKYLFFALFVFFSIIFLNALETGDTEREKPDSVYIIREIEFDVTGRSRPFALISSGNFKEGERIKGKDNLDKYIALKKQLLINQQVLEDVSIEYFTGESESDGALPVKLLVHVTDTWNLIVLPYPKYDSNEGFSITLKARDYNFLGTMSALRADLGYKNNNGEQSVNFLLDSGIPFNFVGLRWILNFDNAFRYTFNEPLYYQNVTGLSLLLPWQTTIFTLGFNQYLTVNEENLIEDMDVFDLADRYYGVYASTELFVFWKLPLGIEIGDFGEIEYTPSLSGRINYPYNSMDDPRKFLTTFNHSIGFGRIDWIGNYRKGLSASVDNFFNWYFDRSDAPLRIGLNAEATLHWTFSKYFGVSSRLNYRQWWHWSDKLDGYIPYYSAGDMTRGLINDDIRAYQILTF

SEQ ID NO: 97182 - protein, 188 aa, Unknown
  Obtained from environmental sample
  misc_feature (1)..(188): Xaa is any amino acid
MILIGNGKIVTRDKACAFIENGAVLVDGKTIRETGETSALRAKYPDAEFIDAKGRLVMPGFINTHMHYYSTFARGISLGGKPATTFGEVLTGLWWRLDKQLTLDDVYYSCIGPMIDEVRSGVTSVIDHHASPFAVEGSLFKIAEACKLFGLRSNLCYEVSDRDGEKIALAGIKENADFAKYCKEQNDD

SEQ ID NO: 97183 - protein, 172 aa, Unknown
  Obtained from environmental sample
  misc_feature (1)..(172): Xaa is any amino acid
VLRLKRGKEELLSKRHPWIFSGALLEPPPAPLVRIADHSGNVMACGTASNVNPLAARIFRFEDKPLDEHFFKECFESALALRRTLGLDGADLGCRWVFGEADGLPGLVIDRFGAALCVQVGTAGLEALRPTWFPILQDLGARNGIKTFVERSQAGRKEEGLPPENRILKGSL

SEQ ID NO: 97184 - protein, 58 aa, Unknown
  Obtained from environmental sample
  misc_feature (1)..(58): Xaa is any amino acid
MQGCWLGATAIGNQLVLLGGIFWTKVQVWGVWAIFIVCCLVSAVVMFSLLKRIERVTS

SEQ ID NO: 97185 - protein, 153 aa, Unknown
  Obtained from environmental sample
  misc_feature (1)..(153): Xaa is any amino acid
MSSLYGIVRPLLFSLQPEMAHSLAVAIGRAAQLVPGACGLMRVFAGGLRPFPQTLARRVAGVAFPAPVGLAAGLDKGAELLPTWKALGFGFVEIGTVTPRPQPGNPKPRSFRLADEELALNRMGFNSEGAAVVAKRLRRRPSGLVVGGNIGKN

SEQ ID NO: 97186 - protein, 256 aa, Unknown
  Obtained from environmental sample
  DOMAIN (2)...(166): 3'-5' exonuclease
  misc_feature (1)..(256): Xaa is any amino acid
MDFETDSLDAWNARPIGISFAVKPKEAFYAPVAAHQGAGEDSPSPFLDGEKVKALLAPFLADPSMTIVAHNAKYDYKVSRGWGISRWQCKIWDTMVAAWVIDPERGGYSLDSLAVFYFGVSPIAFNDIVPKGKTFDSVPLETACRYSAEDADFCLRLKHCLEGKLGNTEPLFKNLEMPLLPILAEMEGEGIRIEKDILKNYGAELGKELEDIQARTYKLVGHEFNLSSTQQLQKVLFEERKLKPDKKTKTGYSTDV

SEQ ID NO: 97187 - protein, 179 aa, Unknown
  Obtained from environmental sample
  DOMAIN (1)...(144): 3-dehydroquinate synthase
  misc_feature (1)..(179): Xaa is any amino acid
LPDEVFHDGCAEMIKHGVILSAELFELLKKPIRSQMEDIIARNVTIKRDIVVADEKDTGIRQILNFGHTIGHGIEKHSNYGVTHGKAVAIGMVIASRGAARMDLCGEDCHTEIVEAVRCYQLPTETDIPPDKLIEAAFFDKKRSGQRITLILPEKIGKCVAKSFSMDELANFIHLGMSK

SEQ ID NO: 97188 - protein, 315 aa, Unknown
  Obtained from environmental sample
  DOMAIN (124)...(206): Histidine kinase
  misc_feature (1)..(315): Xaa is any amino acid
LGNQGSEEAWRFRYWTTIPFFAVIIVFYANFSFLVPKFLFEKKRISYAFINLAIFAVALFLISVWRNHVISLGVIKVKSDDWLLKSVMSYTFTVGMAISAYSTTMWSKSRDAMYNLELENIRSELSFLKMQISPHFLFNTLNNILTLIDENKELAKESVLQLSKLLRSVLYESENDTVTIKQETEFLTNYSNLMRIRYGSELNFSFEADLNEPGAPIAPLLLMPLLENVFKHGICNSVKDSFIDIKISSKNGKIIYESTNTYFPKTPQDKSGSGIGIANMQKRLDLLYEDRFYYDCKIDGENYITKLELQYDPSN

SEQ ID NO: 97189 - protein, 166 aa, Unknown
  Obtained from environmental sample
  DOMAIN (90)...(166): HRDC domain
  misc_feature (1)..(166): Xaa is any amino acid
LGFDTLSTFAIMSDTKAHRIKQIIDHLIDKGFLFVEEGEYPVVIPGNAERLLKEEVRVLMKLPQEYEKAHDEKKSKKNGEENIEAQKVFGNIDDGLLDKLKKLRKEIASKESVPAYIVFSDASLRDMCRKKPLSLVQFSGVNGVGSVKLEKYGDIFTCLIRKHYEG

SEQ ID NO: 97190 - protein, 503 aa, Unknown
  Obtained from environmental sample
  misc_feature (1)..(503): Xaa is any amino acid
VIAPEHPQPASLTTPEQKEKVEAYIKAAALKSELDRTELSKEKTGVFTGSYAINPVNGKEIPIWVADYVLTGYGTGAIMAVPAHDTRDFEFAQKFDIPVICIMEPDNSCPPELKEKVLAGEACWTSDGKYIRSSNDELNLNGLSKKEGIAKITEWLEKKQIGKATTNYKIRDWLFSRQRYWGEPFPIIHWEDGEISLVDEAEYPVMLPELSDYKPGDGGVSPLAGATDWFNVTDKNGRKGKRELNTMPQWAGSCWYYLRYIDPKNDSALLAADLEKFWMPVDLYVGGAEHAVLHLLYSRFWHKVLFDLGFVSTDEPFQKLFNQGMILAFAYETSSGAKVPSDDVDERDGKFYRKDTSEELKQIIAKMSKSLKNVVNPDDVVNQYGADSLRLYEMFMGPLDAVKPWQPQGIEGMFRFLSRAMRSVAGDEGTPEYTSDTPPEELTRLMHQSILKVSDDIENMRFNTAISQLMVLNNELIKQPGALPRALRNLRETSAPICSAPMR

SEQ ID NO: 97191 - protein, 74 aa, Unknown
  Obtained from environmental sample
  misc_feature (1)..(74): Xaa is any amino acid
MEPIIKTAVPGPVSRECWAEREKYVANGISNSTRVFADYAEGALVRDVDGNVFVDFAAGIGVINIGHRPQEIMT

SEQ ID NO: 97192 - protein, 274 aa, Unknown
  Obtained from environmental sample
  DOMAIN (2)...(274): Aldehyde dehydrogenase family
  misc_feature (1)..(274): Xaa is any amino acid
MTVREPIGVCGLIAPWNYPLMMAAWKIAPCLAAGNTAVFKPSSLTPLSSVRLFELFESVSLPKGAANLVMGGGTDVGDAIVRHPGIGKVVFTGGTDTGKSIMRTAADTLKGVGLELGGKSPCVIFDDVDIDIGVDWALFAIFCNQGEVCSAGSRLLLQDTIYDKFLTRLADRSNKIKVAPGTTDGAEMGPLVSEAHMHTVLGYIEKAKSEGARLICGGKQLTGPVYDNGYFVGPTVFADCTPKMTIVREEVFGPVLAVQKFSTEEEAISLAMTV

SEQ ID NO: 97193 - protein, 251 aa, Unknown
  Obtained from environmental sample
  DOMAIN (9)...(131): NifU-like N terminal domain
  misc_feature (1)..(251): Xaa is any amino acid
MTGEMEIPQSLEQIARFPKRRGAIFQMEANDKGLALVDVKSGTLKVYVLIDPDAEQVLDTKFFTYGGPVLTALADILCEALLSKKVNEIQNLSCENLFEKFDVKPDNADFQTVAKLPAMVTEAYPEKKNVALAARAAMGSAKLKAHTAEGRAEADAQWEALSESQKLEKIEECLNDNVRTMLAGDGGGLEVLGIKDGATLLIRYSGACAGCGSANGGTLYYIEDQLQQHVYYGLTVEPELQLWNTGENYEH

SEQ ID NO: 97194 - protein, 604 aa, Unknown
  Obtained from environmental sample
  DOMAIN (239)...(316): ACT domain
  misc_feature (1)..(604): Xaa is any amino acid
GFFTGNELEKTKESLAAMVSELLKILDGVAILRETSRRTLDLVMSFGERLSAFLFAQILMQRGIPAVFLDARPLVKTDGNFGNARFIPGETYPVIQAFFNAPGGGEKPLYVATGFIGSTKDNSVTTLGRGGSDLSAAIFAAALEAEELEIWTDVDGILTADPRQVKNAFRIDSISYVEAIELSHFGAKVIYPPTIRPALEKGIPIRIKNTFNPSCPGTAIINDADEGNFAIRGISSISGIALVCVEGSGMVGAAGFSARLFNALAGRKINIILISQSSSEYSICFAVLPSDAEAASDAVKEEYAQEIASGTIEEPVVEKGLSIVAVVGAKMKKLSGISGKFFHALGRNGINVSAIAQGSSEINISAVIAQRDETKALNAIHEAFFLSGLRSVNLFLLGTGLIGGTLLDQIAAHKEILAKEYKIKINLAGVGDFNRMILRPEGLDPKTAKATLKDAAKNDETAALDLAAFVSAMKAMNLPNTCFCDCTASNEVAGLYAEILQSSIPVVTPNKRANSGSLDYYKTLTGFSRARGIPYLYETTVCAGLPVISTLRDLFLSGDKVRRIEAVLSGTLSYIFNNFDGSKSFSALLREATNKGFTERDPRD

SEQ ID NO: 97195 - protein, 302 aa, Unknown
  Obtained from environmental sample
  DOMAIN (4)...(302): Aconitase family (aconitate hydratase)
  misc_feature (1)..(302): Xaa is any amino acid
MAKNIVQKILDNHIVTGTPKPGDVVGIKIDQTLTQDATGTMAYLQFEALGFDRVRTELSVSYVDHNTVQDGFENADDHKYLETVAAKYGILFSKPGNGICHQVHLERFGKPGKTLLGSDSHTPTGGGIAQIAIGAGGLDVAVAMGGGPFNLTYPRVVKAELTGTLRPWVSAKDIILALLEILGTKGNADSMVEYGGPAVTALSVPERATMTNMGAELGVITSVFPSDEKTRQFLKAQGREKDFAALSADDGAAYDRVIKIDLSTLAPRAACPHSPGNVKKLSELSGTKVDQVLVGSCTNASY

SEQ ID NO: 97196 - protein, 412 aa, Unknown
  Obtained from environmental sample
  misc_feature (1)..(412): Xaa is any amino acid
EIKAVEALKEQTDSFIYGTIDSAESFIRLDGKIGGYSALFCEWLSQLFGIPFRPVLYEWSDLLAGINANKIDFTGELTPTEERLKIYFMTDAIVERTVKTFQLADSKPVSDIIKTRPLRCCFLKGTTTINDVTSRLNGKYNTITVNNYKAAYHALKSGEADAFFEENTSEAAFNMYDDIIAEDFLPVIYSPVSLTTKNPGLQPVISIVQKAIHNSSLGYLAGLYRQGETEHRRHKLFMRLSEEEKAYIRDRPVVSFAAEYDNYPISFYNKYDGEWQGIAHDLLRGLEALTGLTFEVVNSKNTDFPVLLDMLSSGEASMLSELLHSPEREGFFIWSKTAILEDHYAFISKLDYPRLRINDVLSVSVGLIKETAYASLFKGWFPDHKNAVEYENTNAVFDALERGEVDLVMANL

SEQ ID NO: 97197 - protein, 330 aa, Unknown
  Obtained from environmental sample
  DOMAIN (11)...(327): Domain of unknown function (DUF377)
  misc_feature (1)..(330): Xaa is any amino acid
MSGLIVNGNSLPNIPWEDRPSGSNPEKELMWRYSGNPIIPRNLTTHSNSIFNSAVVPFKGSFAGVFRCDDTARHMDIHAGRSKDGIKWEIEDKPIQFIKTDPEVPDSDYKYDPRVIFIEDRYYIIWCNGYHGPNLGIGYTYDFEKFYQMENALMPYNRNGALFPRKIGKNYAMYSRPSDSGHTPFGDIFYSESPDLIYWGKHRHVMAPNGGWQSTKVGAGPCPIETSEGWLLFYHGVLTSCNGFVYSFSAALLDLDKPWKVIARPKPYIINPREIYELAGDVPNVTFPVAALVDKDTNRVAIYYGCADTVTGLVFGNIDEIVNWVKKNNK

SEQ ID NO: 97198 - protein, 122 aa, Unknown
  Obtained from environmental sample
  misc_feature (1)..(122): Xaa is any amino acid
MFGHLHTHMHGRGHGLKMFLGVLALFVVFSLIVMLLWNSVMPELLGVGSLNYFQAAGILLLCRILFGGLGHGLWGSIALKGMHGRFPAMSPEQREAFIRRKQALFPRHPDHREFETQPRLWR

SEQ ID NO: 97199 - protein, 59 aa, Unknown
  Obtained from environmental sample
  misc_feature (1)..(59): Xaa is any amino acid
CGFGLGATPTAIANMQAITERFGPSHMAFLVVPMVGAFFIDIVNALVIKLYLMLPIFAG

SEQ ID NO: 97200 - protein, 43 aa, Unknown
  Obtained from environmental sample
  misc_feature (1)..(43): Xaa is any amino acid
LFEGGYPVLAKVAKRKGLPYPHVNQQGEIEADADWWATMQAAG

SEQ ID NO: 97201 - protein, 402 aa, Unknown
  Obtained from environmental sample
  DOMAIN (25)...(100): OB-fold nucleic acid binding domain
  misc_feature (1)..(402): Xaa is any amino acid
MASKLTVSELTELIRCRLEEHFSSVTVEGELSNCRPASSGHLYFSLKDTGAKIDAVMFKNRLRFLTFEPKDGMLLRVRGSLSVYAPRGSYSIVCEEMELAGSGDILAMLEERKRRLAAQGLFDESRKKPLPRFPSTIGVVSSPTGAAVRDIINVLERRAAGVRVIILPAPVQGNEAAPIIARRIEQANQWKLADVLIVGRGGGSLEDLLPFSEEIVVRAVAASAIPVVSAVGHEIDWALCDFAADLRAPTPSAAAELASGERAVVLEMIQGMAEDFAAVMRNRIEKARLLLRPFGAEDLEYRFRAILQPRLIRLDDAKEALINNLSAQVAGRRKRLELALAVLEAGSPLSVMERGFSVVTNARTGKIVKHSGDARAGDRLKIRPLKGTITAVTEECYGENAR

SEQ ID NO: 97202 - protein, 77 aa, Unknown
  Obtained from environmental sample
  misc_feature (1)..(77): Xaa is any amino acid
MTDREILERIDHTLLKAAASWQEVKTLCDEAVRFKTASVCVPPSYVKSIQNEYADSLNICTVIGFPLGYSITAAKTL

SEQ ID NO: 97203 - protein, 291 aa, Unknown
  Obtained from environmental sample
  misc_feature (1)..(291): Xaa is any amino acid
DQKVTETREKAAQSEAFSAEEREQLNALKEEEVTDEQIRAVSKKNNLERFIGLNVLNVIGIFLLFVGAVAAMRYTYLKLSDLFKGIAIFILGGIMLVIGEILNRKKPNIFSLGISAGGIAILYAALAISYFVLQILGMYPAIIICVLLTAGAFVLSSRYNSQIIAAFALIGGYLPIITIDENIKFVYGAMVYFAVLNLFAFLVSWNRKWRVTAFIGLFLNITGTAYICLFAGPGSFNSPSIAPAASDTLGMTLSIIYAVFSFLIYTAIPVVSTFRAKLKFRKSDIVLLAIN

SEQ ID NO: 97204 - protein, 351 aa, Unknown
  Obtained from environmental sample
  misc_feature (1)..(351): Xaa is any amino acid
MTYPLYDTVLKEGVELRGTAFDRNGIKEVRASIDNGNTFNKVRGTFGTAAETIQWNYQFNTTILKDGPHVVFIKVLDRYDIPATYAFMINVDNTQPEIILDSPGDGSISVGNISVMGRVLDPNLKEVSLELRSLDGFTIPANLRSRKLDLSSIIRENIDISAMADGQYNLAIIALDRAGNMTRFSRNVQMARQTYRNYIEILYPLDNEETSGEFNLYGYAGGSSPAGTVTIKINGADSQTAPVDDAGYYAFKLNSEYLTPGNNAITVTSNFGGPTIVSSRAYNIVYRDGGPWVTIDSFKFAEFSYDRAYLSGRTGYVLSEDDVQLLADKSTDKEVKCGDTRKNTGLYGNKF

SEQ ID NO: 97205 - protein, 299 aa, Unknown
  Obtained from environmental sample
  misc_feature (1)..(299): Xaa is any amino acid
MADQGLATYISTLEQTLIARKDWLEKTELIRLKDELRIYQISYASLYNIYLKKKIIDEDPYKQDTKINEIEAPSSEPIPEARKIEQLSIRLSNFDNQLDYLVNFYQLSVDFLNLDRIKRIVGLIRYIDWINLTPDSQSQMTKTLSEMTNNAKVGVDQLTLSIIGESLTKLSKTTTSAMNILKDLNIYYREVYKLSVRQNVTKDMSPGEANVDNIRKKVHSGMPGAPFYKELIEEIIKEDYSSSSMDLRDTVLNALRVVENKQTKAKAVVNFKAILLDGIVVIGGASNSLNEILAKLQEN

SEQ ID NO: 97206 - protein, 157 aa, Unknown
  Obtained from environmental sample
  DOMAIN (3)...(90): Beta-galactosidase trimerisation domain
  misc_feature (1)..(157): Xaa is any amino acid
GLHACRSTLEDPTWSGSPLEGTWKADLLCDIIRTEGAETVARYADDFYAGTPAICRNKYGKGQVWYLGSRPQAKFLYRFVALICGELGITPVFPPQEWLEATRRIKGEKEFIFVLNHNKAAAEITIPFACRDLLSDKKFTAGERHSLPVAGVVILEK

SEQ ID NO: 97207 - protein, 112 aa, Unknown
  Obtained from environmental sample
  misc_feature (1)..(112): Xaa is any amino acid
SPLRGSLFEGFIISELLKNRLNLGETPELWFWRDNNGMEIDCLFGGAEKIAALEIKSGKTFNDEMTSGLERWLKIYAEGGDRYLVYAGLQKSIYKGIKLIPWKDIVNLGISS

SEQ ID NO: 97208 - protein, 185 aa, Unknown
  Obtained from environmental sample
  DOMAIN (1)...(31): Ribosomal protein L9, N-terminal domain
  misc_feature (1)..(185): Xaa is any amino acid
VKDVAKGYARNYLFPRGIALPYAAQTIKLFEARKDEIEAKKAQKRQDAMGLKERLESLELSITMPAGANGKLYGSVTSHTVADELAKLGFQIDRKRIDLASAGIKNVGKYKAVIKLYENSQAEIQIHIIGQEIKTETHEAPPARPHRRRRDEVAPTAEKPASEGEAPASAEASMSAEAPAVSSEA

SEQ ID NO: 97209 - protein, 298 aa, Unknown
  Obtained from environmental sample
  misc_feature (1)..(298): Xaa is any amino acid
KGAAGPITFNIEAKGGALTYQWYQYFTPREYVEQVGRLLYDETEADFTVPSSVSVNEEGMYFYYVVVTNTDNGANGRRKVSVKSLPAVLAVVNPNNAKFPTLTKQPVGGETLIFSTRMTIKPLEVEAEVTPPEASEEIRYQWYVSDIFDNTQGIPIDGATAQRLIPPVLIKGQAEDETKISRPGDYYYYAVVTNYNFNVSGQREASIASIPALVSIVANPDAVEPVITKHPASAIYFNGDTVKELKVEVEDPEDNGELSYQWYSNTKPANTGGRAVDNENRPSFMPPVSLGTPRSIFI

SEQ ID NO: 97210 - protein, 272 aa, Unknown
  Obtained from environmental sample
  misc_feature (1)..(272): Xaa is any amino acid
INEEDLRFSENELAYYFRGLNITPYPEHLREIMGDTGGWAFAINLIARSYQKAPHYKAYVSKAMKTNIFQLMEREIWENISKRLQRFLVRLSLIDHLSFDFISLLAEDKELIEELEKQNAYVRRDNYINAYHIHPLFLEFLAEKQDLISEEQRRKTYKTAGVWCGKHGFMIDALSYYEKIGDYDSIVSALLSLPQQIPRDIANYAAAILDKAPEHAFNTVNNLATMHMSTYMYQGLLEKSFRLAEYYEAKFLKLPDNNPFKNQTLGVLYHYC

SEQ ID NO: 97211 - protein, 299 aa, Unknown
  Obtained from environmental sample
  DOMAIN (35)...(214): ABC transporter
  misc_feature (1)..(299): Xaa is any amino acid
MDMLTAENVTKVYRRGFRAVRVNAVTGVSFVLAENRVTGFVGPNGAGKTTTIKMAMGLARPSAGRITLMGKDAQYPAARRGVAYVSEQPYFYKHLTVGETVDFSARLTGVKRSSVDAERKRVLDAVELTGREKSKVRNLSKGLQQRLNMACGLLGDPKLLIFDEPMSGLDPPSRRLFRTLFKTLAAEGRTIFFSTHVLEDIETVCQDVVVLDGGKLRLTGSVASLLEKGTLGTEFIVPSLPDSIADELRNDGTEITSTPDGEVTIFIPAKMNAETYQRKLYENGVFCRSIQKRSMPLES

SEQ ID NO: 97212 - protein, 289 aa, Unknown
  Obtained from environmental sample
  misc_feature (1)..(289): Xaa is any amino acid
VLFDSNKKSGNTTSRIYIGLSRETDNFYVSDDAGVTWNAIAFPSNLSKKVMPQRAVLTPGGRFLYLATAVYAGPHGNGASRGALLRYDTVNKTFADISPENVLDDPPGDGGWGAYLGGIGGVSIGSDTNFIVASTINAWKPQIWNGSGKAAWGDKIFASMDGGQTWTAVFGNISDADAGNTAGNEQIAVLDKNGYNWIEGESIHWAGSIEIDPFDPKRVFVTSGNGVYMADDFTIGKRFSFKFTVRGIEETVPLDVASIPGGPLISVIMDYDGFVHDDITKPVKGNRHN

SEQ ID NO: 97213 - protein, 186 aa, Unknown
  Obtained from environmental sample
  DOMAIN (97)...(176): Transporter associated domain
  misc_feature (1)..(186): Xaa is any amino acid
TIDQITGILYVKDIFPWISEHNKTEWNLENIVKKCHYVPMGKKVKDLMKEFKLKHLHLAVIVDEYGGTAGIVTMEDILEEIVGDIQDEYDEEEKEIVPIDGNVYFVDPHIDLRDLNDELNLDLNEDADYNTLSGLIYHECGDVPLEGTQIECGGVRINVIKMDNQRIEKVKLEVLQSVEKTEAEPF

SEQ ID NO: 97214 - protein, 671 aa, Unknown
  Obtained from environmental sample
  DOMAIN (498)...(584): Hpt domain
  misc_feature (1)..(671): Xaa is any amino acid
MKNDKTVIRELFQESPKTGKKAVFESVLSPLKQNGEVVGLLCVSRDITMRKAMENEIRAALDSKTAFLAHMSHELRTPLNVVIGLTDLILEDGRLDVSVANNLLKINNAGGTLLSIVNSILDFSKIESGKLEITPVEYFTASLLNDVSTVVITRLGEKPVKFNLDVEGDLPERLRGDDLRVKQILINLLTNAVKYTREGNIELSIRHTREGKTVWLDIGVSDTGIGVRENDLKKLFNDYVQVDTKFNRSIEGTGLGLPITKKLVELMQGQISAESEYGKGTTFRVRLGQGFVDNSIIGPEVVNKLRSFQYAEDKRIANKKLLRLDLSYARVLVVDDVLTNLDVTAGLLRKYRMQVDCLDNGPAAIQRIRGGNPVYNAIFMDHMMPDMDGIETADNIRALGTDYAKNIPIIALTANAIHGTEQLFYEHDFQAFVTKPIDMTELDLVIRKWVRDETRDDVPVISAPVYNDYYEQITIEIPGVDTKKGLSLYAGDTGVYLALLRSYVANTPGLLDKLRIVSKETLPKYNVSAHGLKGSSANIGAETIRETAFELEKISKEGNLQGVWALNGKLIADTKIIVSNIKTWLEQYDAGKEKKPVQKAPDRELLKRVRISCENYDIRGADKVLTILESADYEKDGDLIKWLRDRIENSEFTEAAQKLKEYEKGGIKNGK

SEQ ID NO: 97215 - protein, 304 aa, Unknown
  Obtained from environmental sample
  DOMAIN (165)...(230): His Kinase A (phosphoacceptor) domain
  misc_feature (1)..(304): Xaa is any amino acid
MSDNLKKIIVVDDNAENLTAIKNALKVFYDVYPTNAVSHMFELMKRFQPDLILLDVDMPDINGYEAARMLKGSDNFKEIPIIFLTSMDDPESEMEGLNLGAIDYIHKPLVAPLLLRRIKTYLSVLEQQKVILERNKKIEELLKLKTKEVSLREAAEQEARDASRAKGEFLSHMSHEIRSPLNAVIGMISMAAETDDIPTIKDYLKKAYNAGRHVSGLINDILDMSKIEANKLELAYSDFNFMKMLTGIINEANVRAGEKHQNITVNVNENVPPFIIGDELRLSQIITNLLTNAIKFTPDNGRMK

SEQ ID NO: 97216 - protein, 428 aa, Unknown
  Obtained from environmental sample
  DOMAIN (306)...(417): Response regulator receiver domain
  misc_feature (1)..(428): Xaa is any amino acid
MDDPESEMKGLNVGAIDYIHKPLIAPLLLRRIKTHLDLIEHQAEALKASQAKSDFLSHMSHEIRSPLNAVIGMITIAKDTDDILKIKHCLDRADNASRYLLGLINDILDMSKIEANKLELSYDELNIERMLAGIFNVISVRAGEKHQEIALNVNANVPPNIISDGLRLSQVITNLLTNAIKFTPENGKIVLSMEKPDEKDGEITLRIEVADNGIGISPEQQKRLFTSYSQADSNISQTFGGTGLGLAISKRIVELMGGEIWIESELDKGSKFIFTIKTKRGTDNAVTWGSGGEEESDEGEYNLSDYTILAAEDIEINREILSALLEKTGVSIDYAENGKTAVSMFRENPEKYNLILMDIHMPEMNGYDATQAIRAIETELRSASIASSFTSGETRAAGEEGMEFPKETPKQLWECPKSIPIIAMTANV

SEQ ID NO: 97217 - protein, 359 aa, Unknown
  Obtained from environmental sample
  DOMAIN (213)...(359): HD domain
  misc_feature (1)..(359): Xaa is any amino acid
MASETIDFKSILEIDSELNQIQDLDLLLERILLEARKVVRADAGSIYVKQAEKEDNAIIEKIAIKYAQNDTLQKKLPPGQKMIYSVFSLPINEKSLSGYCAFTGKTVNVPDMYNIPSEAPYSFNAMFDRLTGYKTISSLTFPLSTADGRLLGVIQVLNKKNEEGEVIPFSEGDEFLITHFAANATVALQRAFVTRAMILRMIKMAELRDPKETGTHVNRVAGYAVEIYDRWAYNNKIPDAERENFRDVLKISSMLHDVGKVAISDMILKKPDRFTPEEFLIMQQHTLYGASLFDDPHSSIDKIAGEIALTHHENWDGTGYPGWIDPVTQIPIKTNEEGKPLGKKGEEIPLAGRIVAVAD

SEQ ID NO: 97218 - protein, 195 aa, Unknown
  Obtained from environmental sample
  DOMAIN (47)...(195): Protein tyrosine kinase
  misc_feature (1)..(195): Xaa is any amino acid
MHILDESEVEKTFVERAPVLPPYDESPPTPPPATAARPVVGQTRIGFSLVVDTIGIGGMASVYKVWNERLELFRAVKMLSADALHARFETEVKISAKLRHPNIVEVYNVGEWNGVPYMEMEYVDGSNLQEVLAERGRLPDAVCCAAAIRIAAALDYAHTLKFTLGGKSYNGIIHRDLKPANILVSENSEIKLTDF

SEQ ID NO: 97219 - protein, 982 aa, Unknown
  Obtained from environmental sample
  DOMAIN (784)...(904): ABC transporter
  misc_feature (1)..(982): Xaa is any amino acid
LGFKSFADRTEVEFADGITALLGPNGCGKSNVVDAVKWVLGEQASKSLRAEKMEDIIFNGTETRKALNVAEVTLTLANETGLLPLDMPEVEIKRRLYRSGESEYFINSQLVRLKELRELFWDTGVGKTAYSVMEQGKIDQVLSSKPDERRYLFEEAAGITRFKVRGAEVERNLTKTSENMHQVELVLNEVKRSYDTLKVQSEKTLKYRALRDEIFNCELDIQLLRLKHFKYERDERNETLRRRTADRDRIRQQMEEESKALDAHMDEVNSMEVRLVEMQKNIYGLALEKNAKENEARLLGERRNECKTKIEQGEVREKQINNKIEELNDDAATQDEVVSELRQKAAGIENNIKSFEENIRLASTRIGDNDKAIHKAESEIHGLEKEQAQFEVQLAQITDDIVAELDAGLKKAGYSASERRNIEASLNETLSRLRTVLTGRGTLINDLASAASVEAAELQRIAGTLATELTNAAADAENALTLFESYRSHSPLFIDEFLAPEGIITKKRALDAQIRGVKDGIEERRQRIRVLASDNAALTAKINEYRSTLEDLRVNLARMNAQAKSAEEQARLIRRELSGQQAMLENISSELVLDRKRLAEIDERIAGTHAEIAEIELQAQNLNKELEKLEKDIKKRSGDVAGKQELIRKRTAELGRVQEALEKIHLELAQSETEIKNIQDNFRETHSRDLMEFEERIFTITAHPADLREKLTAAKANMKDLGSVNLMAPEEFAETKERYEFLSNQIADLEKARKDLEDLTAEIRTESSELFTKTYNRIKKNFHNMFRRLFGGGRAELQLSDINHVLESGIEIFAQPPGKKLEHISLLSGGERSMTAVALLFATYMVKPSPFCLLDEIDAALDEANVGRFVQLLREFGSTSQFIIITHNKKTVTGAGTLLGVTMEESGVTKLISVRLEHEELALAKEEPPQHELWDSEGNFAEEDVPPEEGRELPIGVNDPRKVTEAQLRPITAARPQTAPQT

SEQ ID NO: 97220 - protein, 174 aa, Unknown
  Obtained from environmental sample
  misc_feature (1)..(174): Xaa is any amino acid
MQIADLHIHSRYSRATSSKLNPASLERWARIKGIGLLGTGDCTHPQWLSELRENLDDAEPGLYTLREEMRAAFDEGPALAEEIPKPFANGADAQAPRFVLTGEISTIYKRGEKTRKIHHVVILPDFKSAAAFQLKLERAGNIRSDGRPILGLDSRDLLSMLLDVDERATCSFRP

SEQ ID NO: 97221 - protein, 332 aa, Unknown
  Obtained from environmental sample
  DOMAIN (30)...(310): Succinylglutamate desuccinylase / Aspartoacylase family
  misc_feature (1)..(332): Xaa is any amino acid
MIKPVSVAALPVAENFIIQKNRIENNAAAGSKRVCVVTGTHGDELEGQYVCARLAKILSDGKDKLSGIVDIYPAVNPLGIDTITRGFPMFDLDMNRIFPGSSSGSLAEVAASDIIRDIEGADMCIDIHSSNIFLREIPQVRVSEQNEAVLLPYAMMLNVDLVWIHASATVLESTLAHSLNMRGVKTLVVEMGVGMRITESFCTQLVDGILNLLRELGMWNGTSGQTQIRQPLVSKDHSVGFLNSDACGIFIPRAAHASHVNSGDRIGSVIDPLTGSVVEETLAPCGGLLFTLREYPVVFGGSLLARIMEDSKNGKNIIYSIKSPYRQNMDIV

SEQ ID NO: 97222 - protein, 63 aa, Unknown
  Obtained from environmental sample
  misc_feature (1)..(63): Xaa is any amino acid
MDMSATTAYEINKLMSRYGVKFGIYKNGQFIEQLFPYDAIPRIISHNEFALLEKAACSACRRA

SEQ ID NO: 97223 - protein, 292 aa, Unknown
  Obtained from environmental sample
  misc_feature (1)..(292): Xaa is any amino acid
DTATVTVTATPMVKVTVSPKTVELEPNDYQYFNATVTGTANTAVTWTVTPGGGTISPAGRYTAPAVPGKYTVTATSNADPTKFGTATVTVPAPPTVTVTVWPKTVELKLNGYGYQQFNATVTGATDTSVTWSVSGGGTIDVVGFYLAPAVPGKYTVTATSNADPTKSDTATVTVPVPPTVTVTLSPKTVYLVPEGTQQFTATVTGSTNTEVSWSGAGGGTVTYTGHYTAPKTEGTYYVTATSKADTSSSDTATVIVGNGAPPTVKVTVSPKTAELKPNGTQQFTAAVTGLTN

SEQ ID NO: 97224 - protein, 223 aa, Unknown
  Obtained from environmental sample
  misc_feature (1)..(223): Xaa is any amino acid
MICMNRKITDVFFKHLFSIVALFSVLALGAILLFVFVQGGMPFFSSTAKGIRLVVQRIDEFTVNGVSYKDHNTFIDIPNNTENIVISFLNGDEEEYLNISVNNKEKNPEKKLSFTYNGKVGITYPESYVYTASWTAIIKAMEKRVHIILPEPPYNIFSFLGGLEWHPTRDKIFGVFPMIAGTLLASFGAILLGVPIALLCALFMAEFLKPKPASVVRAGVECC

SEQ ID NO: 97225 - protein, 133 aa, Unknown
  Obtained from environmental sample
  misc_feature (1)..(133): Xaa is any amino acid
MYKYRTWHDYCYVNGMDRARTLLQPIFSNRTAKITIWKDVGELRTEIIRKAIHFLIALTPSLAAINKTATVAILVVGTLGYTLMEYLRLSGVKIPVISSITSMASRQRDIGHFVMGPVTLGLGALLALLLILK

SEQ ID NO: 97226 - protein, 51 aa, Unknown
  Obtained from environmental sample
  misc_feature (1)..(51): Xaa is any amino acid
MIQRVNDMKAAGIDVEFYLYPYVGHGFGLGTGTTAEGWLNNAVRFWKKHIK

SEQ ID NO: 97227 - protein, 255 aa, Unknown
  Obtained from environmental sample
  misc_feature (1)..(255): Xaa is any amino acid
ISYILIGALFAGEFIVRKIVQGKMPKSIPLSAFKNNSRPLSTVLCYEGKWSDAVYRTWGDFLEGTSELRRVINTHNGEKWLLHCEDCWYFLLALTALLQCKKEILLSAYVCPAYIEEIRCSAANGSEQSTVPFLTDHIFPEGESTQNTFNIPSLLKSPQKTDAPAEEAPAINADETSIIMYTSGSTGKPKAVQQRLTEFEADNRFIISKWGDEFLKRKLLSTVSQHHIYGLLFSIFLPFPWEFLLEENGLNFPKR

SEQ ID NO: 97228 - protein, 94 aa, Unknown
  Obtained from environmental sample
  misc_feature (1)..(94): Xaa is any amino acid
SGSEQNDDPALIAQDWAGIRHTMWNYVGISRTSSRLRRAFEDLRDLSRHIHDFYKRTPVSKRLVDLFHGCQAAYVITQSAMRNKKSLGCHNRVD

SEQ ID NO: 97229 - protein, 282 aa, Unknown
  Obtained from environmental sample
  DOMAIN (13)...(229): Beta-eliminating lyase
  misc_feature (1)..(282): Xaa is any amino acid
AVRRVLVEDGYLGMGAEVRLFEEELAAYLDRAPDQLVAVNSGTAALHLAVQAVVEPGCEVLVPSLTFVASFQAVTAAGCTPVACDAYEGSAGIDLQDAATRITPRTRAVMPVHYAGNPAGLDAVYAFARKHSLRVIEDAAHAFGCRHKGRRIGSFGDVICFSFDGIKNITCGEGGCIVTADPGAAGRCRDARLLAVQNDTQARYSGARSWDFDVTDQGYRYHMSNIMAAIGRVQLGRLENEFGPRRMRLDALYREGLADLSDLVFFRSGPEDVIIPHIMPVR

SEQ ID NO: 97230 - protein, 267 aa, Unknown
  Obtained from environmental sample
  misc_feature (1)..(267): Xaa is any amino acid
MMQKRKIKKDYAKAVREAKEAAQRIKKAGSATAKIAKALASIVSRHPVVVVVVVLIALLLFMFMSLFGLGSGMGNSGFTAVISSSYLAEDKDIESAELLYSELETDLLIQISNTESIYPDYDEYRYYVGDISHNPFELLAYLTAVYQDFTYDGISTYLQAFFDEQYSITFTETTETWYADPTDADGDGDYEPYEWNVMTVTLTARSLSDIIYTKMTSDEQEQYDLLMLTNGNRQYAGNPFEVGWLPYVTSNYGWRVHPTTGVKDFNC

SEQ ID NO: 97231 - protein, 170 aa, Unknown
  Obtained from environmental sample
  misc_feature (1)..(170): Xaa is any amino acid
VQFSSFGANVEGENRWNLFGYGVAGTIYKLNQFEVPLTQKNAIPQVMEKILGKKIFNVHIERLALDCRRKRNPHYVCNAVYSLEKDSGEVPQNFSTQTLLEKYNKNKSMPSEVSIVGAGPAGLWAAYALLLNGHKVNLYEQGKPVEERFRDIRRFLKSGFFLENSNIFSA

SEQ ID NO: 97232 - protein, 410 aa, Unknown
  Obtained from environmental sample
  misc_feature (1)..(410): Xaa is any amino acid
MTSKPILIKNVRAFAQGSWQKEQDIFLENGIWGQGTAAAEIDGSGLLALPALYAIGADFQEPARDDVYSFEDGIEAMRRGGFYGCLYESNANPIDDLQQLVSFKQICENSKFDISILASVSKANEHKNISEMLELANRGAYGFGDGGNPVGNLRFLRMVFEYGQATGKTFYLHPLEPDLCNTGFVNEGLYSDMLGFKGIPEQAETVVVYRMLEFSRWFKVPVHFREISCEKSLELIEISRNRKSNVSCDVGIYHLLFDDSSLVELSSEYSFSSPLRTQKDKEALWKGLLDGNVQHISCNHFPVRKQDKQTNFEDAIPGAVSLEIALSALWHITAQKTGGHPERLLDWLSAGVLEQGKPANLILFNPDLEWEVSENTFAGPVCNSPLLGQTLKGKIVGTYLGTEWREQFIN

SEQ ID NO: 97233 - protein, 491 aa, Unknown
  Obtained from environmental sample
  misc_feature (1)..(491): Xaa is any amino acid
MAFYIPLMFSQYLSQSALKGSVKDLMTSGLAVEFIQPWYTPLTTTPSTTGIALGGIGSAYTVTPAGTTPVMHFLPGIQVRGEKEGDLKLNDFYFKESVQGSPFFIEEVQPVYELLSFFPLIDIKGGTLVPQGLDAKEMAKHLENATKKGDLYAANEERLNRWHIEWSRRTEAMLANNKRDARFQRLWLIDFFNGLLGETPERKGSLTAAWGENQEICQQKGYDPELMEYCALYPISATKYISKKTANIRKIQISPVLPGNERMSSLPVSATIFELENPTNKTREITIVQMQDNLCGYNVLKDRHGVQDSSFVLQPNAKFQEAQSYGQVQTDGRNTIGIEFYTKKFPTESDCAGKMAMAATWNPGTIAQASTKPMFYKQDEAAVLKGALLSGRVSKSWVKNVYSGRETMAGVLCVTVELPPNTSARIQFSLALDFPLIRMNGLTSVKKYTEFYPDPDKRVKPMLAEFIEAIPRLESAIPQNYNRLVPEHASK

SEQ ID NO: 97234 - protein, 390 aa, Unknown
  Obtained from environmental sample
  DOMAIN (13)...(279): HMGL-like
  misc_feature (1)..(390): Xaa is any amino acid
MNRKPFFYDITLRDANQALAKPWNKEEKEVVFKQLLKLGVQAVEVGFPIASEMDFESCENLARIAPENVVISALARSKNADIQKAWDAIKDAPKPRIHVFLAMSPLSMENVLQLEPAVVREQAIEAVAFAKSLVGEKGDVEFSPEHFGDCVENFDFVLESLKQIAQAGATTINLPNTVERYRPMLFVDMVRKVVEALPKNITVSVHCHNDLGMATATTVESYFAGSAQMECALNGLGERSGNTNMFEVAVALHNCGVEMDMNLNEIYETALLTSKWAKVPIYSKAPLIGIEAIAHRSGIHQDGASKTKNMKKGAYRPIDYSLIGRNENDILTFTSQSGKTAVYEILNHNGYPVDLDEAAELQPVLKEISEREGELSDSRILEIFSEKCCN

SEQ ID NO: 97235 - protein, 468 aa, Unknown
  Obtained from environmental sample
  DOMAIN (29)...(267): DEAD/DEAH box helicase
  misc_feature (1)..(468): Xaa is any amino acid
MKKLDSEQIISALREGGDVANRLSSYEPRQSQLDLLELIIRAFNEDAHVMAEAGTGVGKSFAYLLPAIHFALENKEKVVISTATITLQQQLYEKDIPLVAGAIGDAKIKAVIMKGRGNYLCLRRLDEALREPPLIIDENDSEYDEIRRINEWAQNTKTGVRSELSFQPAETVWGSICSESDLCLGIHCPWRENCFVFALRKEAANAHIIVVNHHLLFADLAARFQGAGYENAVVLPPFNRLVIDEAHTIENAATSFFSAEFGRTGIFRQLGRLYHKKKKSKRGLLVRLCAMLPPGSKHLNSMVKQADQIRDSSQALDNSALELCAEAGVFRLSPDMHEAPLKENLLPCLKALRKDILALTSMIRDITEELNDTQAAEPSVWEIKAIARRLEEIAEICDSFCKYKKLENEVLWIAKQLFSGVNPWAIFTKTPLDLSPKLKESVFAPNKTGCLRICCSRHKRQFFLWASR

SEQ ID NO: 97236 - protein, 280 aa, Unknown
  Obtained from environmental sample
  misc_feature (1)..(280): Xaa is any amino acid
VDTIGYGADGLPDRWRDRRSGANGVPDYVDEAAFALDSAWSMEVERFGFPKPKAAPDPDGSTAHYCVVIIKSDDYGVTYPSARSSSSGTQYGFASYIEVNGNWSGREWAGLGYDRRPYDALRVTCAHEFFHSIQYSMVWTIDLDYLTYGWLEGSAVLMEEIAFPEVNDYLQYLTSYFSNPRIPLLSNNDNYVYMNSIVLKYLYEKGIDGGENIGIVKAVHDNNLAQKNISFHRNITMSVSEQAGREWASALNRFHAESYFTGARARPPAFISDARLMGVW

SEQ ID NO: 97237 - protein, 237 aa, Unknown
  Obtained from environmental sample
  misc_feature (1)..(237): Xaa is any amino acid
FHIEGYYKYIFDRTYIPVQFGIDEIDIRPQFNGEGRVWGIDVMLQKLQSRFWDGWLSYSFSWAKYRDPNTGDSNLGISGGTQGNDWYFPEYHRFHNLNLVFNVKPAPHFNIYTRFGLASGAQLPRRVGDRPISYPVYVSDGYFIERYEWPSVRDENNRSTPSMPMDIKFSIFGKNDKGMGKTRYEMYFAIENTLSLLYTSRGNTRFNPNTGEIDNGSESASYEMPIPIPSVGFKFSY

SEQ ID NO: 97238 - protein, 286 aa, Unknown
  Obtained from environmental sample
  DOMAIN (13)...(283): Alpha amylase, catalytic domain
  misc_feature (1)..(286): Xaa is any amino acid
MAVKNDVPAVIYNLFPRLFKTIGDWSAHIDAVASMKFNSVYVNPFHEVGGSKSLYAVKDYYKLNAEFLPSKAKTDDFTPLKEFVEKCKSSGVEVYMDLVINHTANECPLIKQHPKWYKRDESGEVAHPFAIDPGNPGSITVWGDLSEIEFEKNTDLAGMKKYWDDLVAFYQEIGINGFRCDAAYKIPKDMWSPLIVNARKRVKGAKFLAESLGCTVDQTLALNGCGFDYLFNSSKWWNFEGPWCLEQHGQFRHIAPSISFPESHDTTRLAQDQPGTIEMQKNRYVL

SEQ ID NO: 97239 - protein, 66 aa, Unknown
  Obtained from environmental sample
  misc_feature (1)..(66): Xaa is any amino acid
MQKGAQAYLSTHIATTDQGQLLLMLYDGALKFLAQAREKILARDMAGKGVLISRSIDIVNELASSL

SEQ ID NO: 97240 - protein, 338 aa, Unknown
  Obtained from environmental sample
  DOMAIN (175)...(314): ATPase family associated with various cellular activities (AAA)
  misc_feature (1)..(338): Xaa is any amino acid
SHGEWDTPHLAAALLDIPDARLKNLFKAKKAKSQEMRSSVQKILDKLPRIVESTNADNHASSDLANILRAAVKLARSEQGNSAEPGHLLVALIKHSGDKQLVSIFENALGNAEAVRTWLSDPMSAAAVAKEDSALNKFGKELVSLAAEGKLDPIIGREEEIRRVVRILARKTKNNPVLVGEPGTGKTAIVEGLAHRIHKNDVPDALKGKKIFSLDLSALIAGAKYQGEFEERLKAVLDELEQEQDTLLFIDEIHNIVGAGKTQGSMDLGNMLKPGLARGELHCIGATTTAEYRKYIEKDAALERRFQPVPVSEPSQDEALSILRGIKESFDAHHGVRI

SEQ ID NO: 97241 - protein, 92 aa, Unknown
  Obtained from environmental sample
  misc_feature (1)..(92): Xaa is any amino acid
LEKSELIQIAQIKLNALAKRLSAQRIEAEFLPAVAEGIIENSYDSQYGARPIQRYIQKHLESMLSKEIISGNIKVDSKIKVGWEKGGLVLLS

SEQ ID NO: 97242 - protein, 198 aa, Unknown
  Obtained from environmental sample
  misc_feature (1)..(198): Xaa is any amino acid
MEIKRNAVEIINNIDSQNINEIITGISDNNNITVSITGLNGRSLQGDLMQRIPPDSRRRIEENAALITRAKDNGGEIYEYVTPSAEDRPRINTESARVSAWFQNFSAEERPRINTETDRTGNSRMMVRVRLPVQSLIYVKMANNKQGEPFAVIIRAVISPVNATVTTLRYQLYCISCVIIFLSVILAFIIAKRVSKPI

SEQ ID NO: 97243 - protein, 198 aa, Unknown
  Obtained from environmental sample
  misc_feature (1)..(198): Xaa is any amino acid
MITKWGVKNFKSILEADLELAPLTVFTGVNSSGKSAFLHSIAMLTQTVRNKDGGVIKLNGNLIDLGHYDQIYHKNSFEIKKQPTGEIVLNFTIKPEEYEYIRLELCLSDAKQGNEKLSLHQWNDEINILKDSINKVNKLIDDKLIDENKSMEENISSNIFSVGHVIHVLKDIEKIKKSINKTYIDILSQKLFINQALI

SEQ ID NO: 97244 - protein, 265 aa, Unknown
  Obtained from environmental sample
  misc_feature (1)..(265): Xaa is any amino acid
DIEVAVSFEVTDPPIYGITASPLSWLFAPAVEGYNAVTVPAVQTFTIKNTGSTGAVTLKPLPSSSKFEITGLTPANGVIAASGTATFTVQPKLRLGPGTHEESIQITGNNGASASVIVSFTVTEEPTWTISASPSELSFGAVLGPPPYTAPASKTVTITNTGTNEVALTVTKQTGSAYDVGPLSLNIAAGKFATFTVQPMAGLPIKKYNEKITITGSGASAEVDVSFEVVGEPQYAFSVKPEDVDFGSAREGYKTLPVAQTVTIT

SEQ ID NO: 97245 - protein, 253 aa, Unknown
  Obtained from environmental sample
  DOMAIN (110)...(192): Sigma-70 region 3
  misc_feature (1)..(253): Xaa is any amino acid
VLYLKEIGKLQPLTSEREAELAAKIKSGDRESLDALIKANLRFVVSVARNYQNQGLSLCDLINEGNMGLVKAARRFDEKKNFRFISYAVWWIRQAILQALAEQSRIMRLPLNRAGAIHKISKMQIELEQRLNRMPDTSEIARELSMTEATVQETISISNSHVSLDAPIKDNSGSTLIDLIVNTPESSGPDENIQSMSMHEEIRQMLDGLTDRERDIIKLYYGIDHDNAYTLDEIGRKFKITRERVRQIKTKAL

SEQ ID NO: 97246 - protein, 234 aa, Unknown
  Obtained from environmental sample
  misc_feature (1)..(234): Xaa is any amino acid
MKICVYAAALSALSIMIASCANQAPPSGGPEDKTPPKASALFPKNGQVNVDTRVSVEIRFSEWINRSSAAGAVSMYPAATQGVAVRVKGNRLTVTPKAPLSANTTYRVSVSAALQDLRGNAIARPIDVVFSTGAELDSGRADGAIVALKSKAAGYRVMLFWADSAWTDGRYFSPPEYAAQSDSAGAFGFSHIKEGRYRIVAFADQYRTGKLRVGDTCFTSLEKTVAVTKSPQTI

SEQ ID NO: 97247 - protein, 281 aa, Unknown
  Obtained from environmental sample
  misc_feature (1)..(281): Xaa is any amino acid
DISSDDVPLVPFDKDDADTTFYEAIDYALEHGGSYTLLLDGDVDTSSVFDLKVTPPLTLSLTIRGLDSNRVISNLSSRMDSFFTVSGGGSDNQLILSENITLRGGLQTFASLVTVDGGSFTMIAGSAIKDNTTINTKAKGGGVYVKQGTFEMNGGEISGNKALCNSDSSDAYAGGGGVFVDEYGLFYMRGGEISRNTCENSEEATGELNGGGVLIRGHFYMYGGQISGNTAEFGGGVCMDVEMDSVFENFIMYNGDAKISGNNAINGGGVFIWSGEFIMEN

SEQ ID NO: 97248 - protein, 532 aa, Unknown
  Obtained from environmental sample
  DOMAIN (3)...(257): Peptidase M16C associated
  misc_feature (1)..(532): Xaa is any amino acid
LPQQEARLAEELAKTEQGLSGAEKNRITEKSAALEKIQSESDSPEALATIPHLSRGDLSPEPEMIPRSLEDLRGIPALCHDLYTNGITYIDLALPLDILPPEDYLWLPFFARAAISVGLPGMDYGEVSSLLARTVGGFNAILHTGSAAPVADSPLIQTPTGEFALAGRDWLIYRLKCLDEKTAPALDIVQRLIHEADFSDIRRIRDLVLEMKNDLRSGFAPSGHSYASCRAGRFSSSSAQTTEIWNGISQLEFAHRLAELDTAEAAAKLQYLREAITSGGLIANMSGSVTALKSGGALIAQRFNRIGPPRAAPQTASDINVKMAHNTVSEVFASPSLQIGFAAMTLRAAPFDTPAQTAETVLAHQLSTGALWEDIRMKGGAYGASASSDSLEHCFSLSTYRDPNPLRSLDTFSSILKDSAANAGGVSKGDDAADALEKMIIGCYGKETYPRTPSEKSVNDFLRFLSRIDDGCRRRKLERLINISENDISAALGGIASQLASQPAPTRVVIAGTNSAEQAAKALGVEVQLLPV

SEQ ID NO: 97249 - protein, 272 aa, Unknown
  Obtained from environmental sample
  DOMAIN (78)...(240): Methyltransferase small domain
  misc_feature (1)..(272): Xaa is any amino acid
APPRTQAYPAAFIPEGTLAGIIEKSTARVRELEGLPPVEGMLWGTFPETGIVIFEGGLPFIVDLLQGQKTGYFLDQRDNRLLAARYAAMLRKEAGTALKILDACSYTGGFGLHAIGSDGKLTMLDASAAALETGGRNAALQGVEDRVTLTQADVFDGLKDLTRRKEQFDMVILDPPAFAKSRSALGEALRGYKEINLKAIGLVRPGGILVSCSCSQAVDEITFKRMMVEAAADAGRRLIQVDFRFQAQDHPVLAGYDESSYLKCGFYRITAL

SEQ ID NO: 97250 - protein, 434 aa, Unknown
  Obtained from environmental sample
  DOMAIN (62)...(100): WD domain, G-beta repeat
  misc_feature (1)..(434): Xaa is any amino acid
AAQAGERGLEVEELSKTNADIAVFPQLGHSSSVYSVAFSPNGTQMLSGSYDKTIKLWDVASGREIRTFSGHASYVLSVAFSPDGKQVLSGSGDFSNSNNNVDNTVKLWNVASGRELRTFSGHTGQVRSVAFSPDGKQVLSGSGDKTVKLWDAASGRELRTFSGHEMEVISVAFSPDGKQMLSGSRDKTVKLWDAASGREIRTFLGHTYYVQSVAFSPDQRKALSCSLDGTVRLWDLGAGKETAQFISFGNDEWIAFTPEGFYNASPEGDKYLNVRVGLNVYGMDQYRRAFKNSALIAQALSGNTSAYIAGAREIGKTVPDASIAPPQVAVSASPVSRSATVNISASVDGGSQSIQYLAINVNGKITARDLGVTEMLIIDFMPVIQFNALAEGQTNKKKTNFNLDIPLDPGDNTVEVVAFNGYSEGRAVITVTRQ

SEQ ID NO: 97251 - protein, 362 aa, Unknown
  Obtained from environmental sample
  misc_feature (1)..(362): Xaa is any amino acid
MDNTSATKIANFEYFDEEFPTEKAALEYWEKIKWNGHPVCPKCSSLKVSKWRDDRPGWYRCKKCRKEFTARHDTIFACTKIPLRTWFKAWYNMVQHGGISMRLAEDIGVVQETAWFMTHRIREAMRTHKENMMLGGPGIIVEIDETYPGGLERFKHCDKRLFPGGGPGGKKGGVSLVERGDNGRRITIKLPVKWVKNKKGKKIKTPYLSKKMARDIALRYIKPGTVVVTDTAEVYDILKGLGYSHFTVNHKRHQYAKKENSPLIKKSYTNTVESSHKGVKTRHRNYVHYSRKHEQRYYDETDFKWNQCRKLKEKDGSLVFAKRRSPTVKAFNDFLRGCLGKTLSYKQLTGKYRNSKKRRKAR

SEQ ID NO: 97252 - protein, 287 aa, Unknown
  Obtained from environmental sample
  DOMAIN (1)...(268): Phage terminase large subunit (GpA)
  misc_feature (1)..(287): Xaa is any amino acid
SRWGNHEQLKVFINTVLGETWEERGERFDETGLMERREVYPADIPDGVCILTCAVDTQDNRLCYEIKGWGAGRESWGIEYGELWGDPRISDSPVWGLLDEVIKKDRSYKNGRPVKISCTVIDMGGHAANEVCIYAKLREGWNVCAVRGVGGQGKLIVINKSRHEKTRSIFYNLGVDTIKDDLQARLNVKKPGPGYCHFPYGNQFEEVRGYDHRYFVGLTSEKKVPRKNRAGFIKYEWVKDPNRHNEPWDVSVYNRAALEILNIRSKHLSKLAAAEPWNMPAAQRTVA

SEQ ID NO: 97253 - protein, 205 aa, Unknown
  Obtained from environmental sample
  misc_feature (1)..(205): Xaa is any amino acid
MSVKFRPYKLLADFDKVNKYLTDVFNMETLNGYLLPQYFEYAHTHPLFNFKLAHRFGLWEDENELIGIACYDMYPGECFISVNNNFKSLLPEMISYSEEYLSEKNNGKTSLAISVIDKEIDKKDLLKKSGYEKTHSEPVTVFSYDKPFPHQIIPKGFSVISLEDENDFKKMIVYGMVLITVWNQIPIMILTDECWRKADRIFEKT

SEQ ID NO: 97254 - protein, 253 aa, Unknown
  Obtained from environmental sample
  misc_feature (1)..(253): Xaa is any amino acid
MKYIYRLLAAICSIFCTVCSCATGTEAAAQILGKNSEAPVFISCKAVSETAIDFQFSLPVKVTSLHFSPEIQPDAIENGSTVRVSFSKGPGPGERVTVDLLAEDDNGNTINVLVPFRTKNSRLPSLLITELRTEYSKPKCEFIELKTLEAGNLGALRVFVAGNYKAPLVYVFPSIEVARGEYITLHLRTTEESNRDELGRNLEASGGADSSPTARDIWIPGSAKLLHKTDAVYLLDHDDSIVDEVMLSESADP

SEQ ID NO: 97255 - protein, 282 aa, Unknown
  Obtained from environmental sample
  misc_feature (1)..(282): Xaa is any amino acid
AKAELDGGFEGGNVSAEERTLKIELNDTNRPDLWGTAGCARQLRLYNGGKAPVYPFFSTPTEMKSTGHKVKVEKTVYHVRPFLTGFVARGKKITDPILIDMIQTQEKLAGNFGRKRKTISMGIYRTSIIKWPIIYKGVDPDSVSFVPLQWDVPLTLTEILKQHPKGKEYAFIQQHEKIHPLLTDSTGAVLSYPPIINSADLGAVQVGDNEIFVELTGTDQRAVNLAGSIMACDLADSGFTIEPVEIEYEYDTPFGRKCVTPCYFQERVFCSLNRVEKFWAKN

SEQ ID NO: 97256 - protein, 279 aa, Unknown
  Obtained from environmental sample
  DOMAIN (1)...(84): 1-deoxy-D-xylulose 5-phosphate reductoisomerase
  misc_feature (1)..(279): Xaa is any amino acid
IRNFPPSSVYIADKENADKIKNLFGNKLKVYYGDDGLERIADETDYDILVNALVGAVGLKPTVAALKRDKTVAIANKESLVIGGDCIRAIITQKHPKMNMFYDVTRLIPTLLPIDSEHSAILQCITSYIDAAESIIITASGGPFRNLPKDSLAAITPEQALNHPTWSMGKKITIDSATLMNKGFEVIEAHHLFAFPYDRIRVCVHPQSIVHSLVEFHDGAVIAQLGLPDMELPIQYALSWPERFPIPGKRLNLPDIGSLDFFEPDTDKFPCLKLCIDAG

SEQ ID NO: 97257 - protein, 327 aa, Unknown
  Obtained from environmental sample
  DOMAIN (1)...(116): Bacterial type II secretion system protein F domain
  misc_feature (1)..(327): Xaa is any amino acid
MINGGVPLPRAVEQLSRNEIPVFKRMLEQVVYDLGMGSNFSDALSKHPGAFGGMFVAVVRAGETAGALDTVLNQLADYMENTEAMKSKVKAAMRYPTIVSVFVFVIITGVMIKLVPIFKDMYADFGTKLPGPTLLLISVSDAIRNNALITLLIIAAAAGAIFVLQSVDSTSYMIDKYALKLPIFGNILRKNILAIYCRTMSLLMNSGTPILQATQITEAAVNNKHYARALQGVYNDLRHGEPLSKALIRAEVFPVLITQMVSTGEESGRVDDLLTKAAEFYDKEIRNIVDSLASIIEPILIVVLGGIVGSILIALYLPVFYIGKLIR

SEQ ID NO: 97258 - protein, 247 aa, Unknown
  Obtained from environmental sample
  DOMAIN (10)...(157): Heptaprenyl diphosphate synthase component I
  misc_feature (1)..(247): Xaa is any amino acid
MALQKAIWLLAAVALNAVELAIPRLPFLPWLKPGFANIITVLWIMKYGFGDALLYTALRVWISGFYFGFSLFTLSLSLSGGLLSTAAMFIIWATLGQRGLTGTVGMAIVGALFHNAGQLGVIYLMMSQNIGVLGQIPFMLCAAVVFGGIVGALTPGVGKILGFGIDTGNINTDSVNTNRIDKTHTKTPFTAKLIIAATFAVSISLMFINDLHILTAAVITYSIVSFSLNYKKPSVLIYPVRFYTLFL

SEQ ID NO: 97259 - protein, 134 aa, Unknown
  Obtained from environmental sample
  misc_feature (1)..(134): Xaa is any amino acid
MVKKIAFLFLLFVIAVSSASFAQDDTLTLKIAVMGPGDQLYFWWGHIALIVEDSSDDTSYFFDYGIFSFDNDNFFYNFAFGRLLYSCGVSKSERNFELYKRNNRDIIVYTLNLPPEVKIKVKNFAMLNVLPENR

SEQ ID NO: 97260 - protein, 276 aa, Unknown
  Obtained from environmental sample
  DOMAIN (1)...(276): Protein of unknown function (DUF342)
  misc_feature (1)..(276): Xaa is any amino acid
EGANGRVNFKELDIIQNVVQNQPLAKKIPPEDGIDGKTVTGRFLPARAGSDIPMPVGTNVHVNDDGDTILSDINGQVIIANGKINVEPILNVEGDVNLKTGNIIFLGTVVISGNVEDGFSVKAAGNIEVKGTVAKAELDAEGDIIIYQGINGKSGEKRIRAGRSIWSRFIENANVEAGNMVVVTDGIINSNVDAIKSIVCMGKRASIMGGRLRAGEEINAKVLGNPTSGTETICEVGFDPHSKLELERLLEMKATSETELDAIRLDLQTLINTKKQ

SEQ ID NO: 97261 - protein, 232 aa, Unknown
  Obtained from environmental sample
  misc_feature (1)..(232): Xaa is any amino acid
MTSNSQFETSNIRLEFEYGTDMDKVVNDTQVLLNRLVNSLPDGVQTPVVRRFDASAMPIMRLVVRGNYPPDQLRIFAEDEIQPSIERIEGVAAAEVTGGTTQIVKVEVSLNRLAAFNLTLNDITNSLKGQSVLSSGGNLRRGTREYQIMTQEELVSIDQIKRLAVKTVNLSGAGQPPLYHSIRLEDIADVSLGYNDNASRVNVNGQSGVYLQVTSESGSNQVKVSDRVQAAL

SEQ ID NO: 97262 - protein, 312 aa, Unknown
  Obtained from environmental sample
  misc_feature (1)..(312): Xaa is any amino acid
MGNRERSAIFCQSLRDFPCPVTLGKNAPSFGLHRFKQGLRFIPPDDEGFTLRGDKQWLVYKGRRRSHRFTILGDTAFEYDCILKKEPESNVISLRMEGAENFNFFRQPDFVEEPFLQGSYAVYKKDTLVGEGTGKLCHIHRPEVIDARGRRCWGELSITGNELRITIPESWLAEAKYPVVVDPTIGTTAIGSQITGPNPYPLNIVTYDRPTLDSEFAFNKYLVAQTGNGLCNAYVYCYDDDCDWDFIPCIYTNMNNKPYARKSMNENIIDVTVYPPKWPIGWKTNTFQINGSITAGDYISLWRLGALFLDKI

SEQ ID NO: 97263 - protein, 273 aa, Unknown
  Obtained from environmental sample
  DOMAIN (29)...(258): Baseplate J-like protein
  misc_feature (1)..(273): Xaa is any amino acid
VPYSIFKFTRKKGQRASGTAVFSRTKPLPTRTIIATGTKVSYENKDYVTTETGFIEAEAVNSNPIKILAVDIGASFNTPSGVIETIKTAVPSDVATVTNNAAITGGTDVESNTEFDDRFKIFFNGLSGTNSYAIKNAVLELDMVRSVSIQNHKPPLRNIFNLTVYVDDGSGTASEETIAAAKLAVEGDGTEEHQGHLAPGVNARILPPQTVPVPFTIIAYAYRADIQGAETEIRRIVTEYVNSLTIGKPVILSEIVSRIKAIPFIRDVQIVSP

SEQ ID NO: 97264 - protein, 265 aa, Unknown
  Obtained from environmental sample
  misc_feature (1)..(265): Xaa is any amino acid
MKIHNDFTLYYRETTSGKRIVYFYAYDENGKRTRGRSTGQVNKTAARVLVNRLLKEGALLPKKDDVPTFGAYAVNWWDWENCEYLKKRRKRANLTQSYSDHMKRNLNKVVLPYFKNMKMDAITPTVIEAFLDSLIKQGYKHATINDYYGTFKTMMIEAVEREIIAKDPTAKVERLINNCKTIRIITPLEFKKLFVGDWRKVWEDNRIVYTVNKLAALSGMRVSEILGLKGIVFLMIIFTSVCNMTYTVTDRPKQKTGTIYRFQIP

SEQ ID NO: 97265 - protein, 398 aa, Unknown
  Obtained from environmental sample
  DOMAIN (1)...(119): DEAD/DEAH box helicase
  misc_feature (1)..(398): Xaa is any amino acid
MAPTRELAVQIEEEAKLIGKYLPIKVGSFYGGVGYTQQTAMLKDNVQIMVGTPGRVLDLNQSGQMNLMDIAFLILDEADRMFDMGFYPDLRKLIRRVPPADRRQTMLFSATLNAWVKNLAWEYTKNPFEIAIEPETVTLEEVEQVLYHVSSGDKMRLLLGILKNENPESVIVFCNTKRYSEIVAKRLKLNGYDCEFIMGDLPQKKRLKIIDDIKAGKLHLLVATDVAARGLDIEGLAMVVNYDLPNESENYVHRIGRTARAGKTGKAVNLASEQDVYALPGIERYIGQKIPSETAVEELFAEDKSEGRHIHTEFYEDRGGHKADDRSHRRGSGGINVSGINASSKKHEASRQSRKERHGLPSPSIEQRRGEKKNRVSDHGRHSQNQMRDFQKDVSGIL

SEQ ID NO: 97266 - protein, 485 aa, Unknown
  Obtained from environmental sample
  misc_feature (1)..(485): Xaa is any amino acid
SAVWGPTGGGKSTLLNLLEMQVFKYPGSLVIVFDKGRSCRQPCMACGGLFYEPASDNADGVNFQPLRDLETDGDVMDAIDFIETCVTVNGGNVPPPMRAAVKDSLELMRSIPRKRRTVTTFLQNINYRDPETGKPVVKDFLADYMIGGKYGKIFDADASELSLDTRFLAIEMEFLMNRGENCVVPALVYLFNYIERKFDGRLTLLILDEAWLFLRNETFSEKIAEWLKVLRKKNVGVVFATQDVADVANSPLKTTIIQQCLTKIYLADPSALTPGMTNVYREFGLSDPEISLIASGKMKRDYFYTSPLGRRLFQLDLGPLALALIGSPDHRLLDALASKYEPGSALCVEILAAKNINYKTLLDGDAPADPEPAPRLSPPQKTEIGSRITDEREEPAPGQKTGKSKISGLLEAVSNLPERKKNDGSGRAAAAVAVEFNVSVSTVYQARTVLKHGAPELVDSLRRGEIPIKTAYKKLLKERDLEPKR

SEQ ID NO: 97267 - protein, 139 aa, Unknown
  Obtained from environmental sample
  DOMAIN (9)...(124): Response regulator receiver domain
  misc_feature (1)..(139): Xaa is any amino acid
MTNNTNSRKAILIIDDDEVHLVYTQTSLKDDYDVLMVKSGKETLEFLGKDQNIPDLVLLDILMPEMDGWTVFDKINAIADLKFTPIMFYSSLEEEDAKEKAYELGAFDYITKPCKKSVLLDRIKDTLQKAELKKQHYGI

SEQ ID NO: 97268 - protein, 302 aa, Unknown
  Obtained from environmental sample
  DOMAIN (6)...(299): Domain of unknown function (DUF377)
  misc_feature (1)..(302): Xaa is any amino acid
TDVAVFPQPDYTTESYPVFNSIFNSAVVPFNNGFAGVFRCDDTARQMEIHSGRSKDGINWEIEDHPIKFIKTDPELPDSEYKYDPRVIFIEDRYYIIWCNGYFGPNLGLGYTFDFEKFYQMENALMPYNRNGALFPRKIGRNYAMYSRPSDSGHTPFGDIFYSESPELVYWGKHRHVMGPVGGWQSTKVGAGPCPIETTEGWLLFYHGVLTSCNGFVYSFGAALLDLEKPWKVIARSRPYIINPREIYELAGDVPNVTFPCAALVDKDTGRIAIYYGAADSVTGLVFGKIDEVVEWIKANKL

SEQ ID NO: 97269 - protein, 448 aa, Unknown
  Obtained from environmental sample
  DOMAIN (1)...(84): SRP54-type protein, helical bundle domain
  misc_feature (1)..(448): Xaa is any amino acid
KLTEKISDAFRFVAGKSTITEKNIDDAVEAIKMALLEADVNLRVVRRFVNSTIEEAKGEKVLRSVDPGQQFVKIVHDKLVSFLGDTEKGPTGRSAQELQLKGPDTVSVILMLGLQGSGKTTSSAKLALRLKKEGRKPLLAACDLIRPAAVEQLSVLAGQTGVPVYKEEEATDTVKVFRGAMDWAKKNLIDTLIVDTTGRLELDEHMMAELQRLKDAAKPDELLLVADAMTGQSAVDIAKAFDEKIGLTGVVLTKFDSDTRGGAALSLKTITGKPLKFVGTGEKPEDFEPFHPERAAGRILGMGDVVSLVEKAQEVIDEKEALALQKKMEKETLTLEDWLQQIRSVKKMGSLKSMLNMIPGMAGQISEEDIDKAELKSQEAILSSMTRKERTNHLIIGPSRRARIARGSGTSVAEVARLLKKFEKMRGMMKKMTKMGKDPNFMQGGFPR

SEQ ID NO: 97270 - protein, 264 aa, Unknown
  Obtained from environmental sample
  misc_feature (1)..(264): Xaa is any amino acid
LGGHQYLVKDFEGFRVGIIGITTLRTRIIATPDKSLTFLPEIQAAQDAVDQLIKKEKVDIIIALTHIGDKKEDDDHVISPELAASVSGIDIIIDGHSHSKFEEPLKVGNTYIVSSNEWGKFVGEGKLRIVDGKIANFSWKPVAIDGTYAPDAQIAALITPYKEKADASLKEVVGQAADTFIFGNRLTRYQETAIGNMICDANTWYFRSIGQDIDFAFHNGGNIRAELPKGPLTREQILTVLPFENYLYIVSLKGSQVIELFHFI

SEQ ID NO: 97271 - protein, 488 aa, Unknown
  Obtained from environmental sample
  DOMAIN (276)...(473): haloacid dehalogenase-like hydrolase
  misc_feature (1)..(488): Xaa is any amino acid
MDSLIAVGTTAAVVYSVYNLFRIAGGDHHAVDALYFETAGVIIALILLGKSLEAVSKGRTSEAIKKLMSLAPKTAIIIDNGEEKEIPIKEVMPGDIIVVKPGAKIPVDGLVTEGQSAVDESMLTGESMPIDKKSGDPVYAATINSNGVLRFKAEKVGGETALAQIIKLVEDAQSSKAPIAQMADIVAGYFVPVVCAIALIAGIAWFVTASIGVVNLPHGKTVTEFALTIFISVLVIACPCALGLATPTAIMVGTGKGAENGILIKGGAALETAHKLNVVVLDKTGTLTEGRPELTDIILANGDSDDNNSSRNSDYLLLLAASVENGSEHPLGRAVVREAEKRGLALIQAGDFRAIPGFGVEAVIGANGSGEDSAIVSIGNRKFMDERGVILGTLESEADRLAAEGKTPVFVSITGKNAGVMAFADMIKKNSKAAVKKLKESGIDVVMITGDNKRTAAAIAKEAGIENVLSEVPPEGKAAEVKKLQNEN

SEQ ID NO: 97272 - protein, 339 aa, Unknown
  Obtained from environmental sample
  DOMAIN (15)...(335): FecCD transport family
  misc_feature (1)..(339): Xaa is any amino acid
MNNRNRIIAGVIISLLIIIAAASLGSSGISLRDTVSIVLHKMFKLSLKAGIDPKNVSIVWLLRLPRVLLAFLTGGCLAMSGAVCQSILRNPLASPYILGVSSGASLGAGIIIISGITLPLLGAFTLPLTGFVFGLLTVFFVAAFSSRIDKSMSNNTIILCGMVFSLFLNALLTLLSAIFSDDLKRITLWQMGSFAMRGWTYVQLLLPFLIVGTAGVLLYAKEMDIMTFDDDQAQSAGVETTGLRKKLLALCSVLTGAAVALSGVIGFVDLIAPHAARKITGSLHRHLIPMSFFIGGSLMVITDLIARTIISPSELPVGAITALIGAPFFAWVYIRGRRR

SEQ ID NO: 97273 - protein, 278 aa, Unknown
  Obtained from environmental sample
  misc_feature (1)..(278): Xaa is any amino acid
MKRVVFMFAFILAGISAFAQNGVIKELSGTVELKNANSPAFVAAKAGDIVNQDTVVSTGFKSTALIEVGSTVITVRPLTRLTLTEIKATSVSETLNVNLQSGRIRVDVNPPAGAKASMAVSSPSATASVRGTSFEFDTRNLHVISGNVIFKGIKGVSTLITAGYNSTTDVKGSAVNPLAFGDAAYKPQMPVGTQANASPASIATGSSGEPTPTEPGKPTNPTNPTTPTNPNTPNNPGTTNPGDNTGGNTGGNTGGNTGGNTGGNTGGGGNTGVDVNFN

SEQ ID NO: 97274 - protein, 210 aa, Unknown
  Obtained from environmental sample
  DOMAIN (3)...(206): N-(5'phosphoribosyl)anthranilate (PRA) isomerase
  misc_feature (1)..(210): Xaa is any amino acid
MRIKVCGLFRDEDIDYANESQINYAGFVFAKSPRQVSAPLAQYLRFRLADGIIPVGVFVNAPIAFITELYHNSVISIAQLHGEEDESYITQLKKLSKTTIRQTVIPPIKVIKTLFFGSENFKSQLRKLSNIVDYFLIDSGAGSGKTFDWKQLDAVKLSKPWFLAGGINIDNIKQAMELNPFAIDVSSGAETDGIKDRKKILELTETLRQG

SEQ ID NO: 97275 - protein, 185 aa, Unknown
  Obtained from environmental sample
  DOMAIN (37)...(170): Possible lysine decarboxylase
  misc_feature (1)..(185): Xaa is any amino acid
FSNRVPEPYLNAARELAAAMVREGYSLVYGGADAGIMGLIASETHRLGGRVIGAIPQKLADKGLAWDGLDECVVTTDMRERKRVMEERADAFITLPGGFGTLEEVLEIITLKQLQYHNKAIVFLNVSGFFDSLLALFARIFSENFAKPEFERLYHIAADPADALSYIREYRPPVPIEKWGSERAV

SEQ ID NO: 97276 - protein, 76 aa, Unknown
  Obtained from environmental sample
  misc_feature (1)..(76): Xaa is any amino acid
MLIASDVSLAFGKRVLFKDVHISFTPGNCYGLIGANGSGKSTFLKILSSELEPSTGTITRDRMNGLRFSGRIISVL

SEQ ID NO: 97277 - protein, 455 aa, Unknown
  Obtained from environmental sample
  DOMAIN (179)...(331): Anticodon-binding domain
  misc_feature (1)..(455): Xaa is any amino acid
SWLWPFSTLGWEGEGRSEKGEVKSEQGTDNRKTSVPSPQSPVPSSDFDLYYPTTALITAYDIIFFWVSRMIMAGLEFTGKAPFRDIYIHGLVRDKQGKKMSKSLGNGLDPLELVDEFGADALKFTLAFMCAQGQDILVDKESFRMGSKFANKIWNASRYILMNLEGLNLVPNPDLLPVDKWIYSRLNAAAKKMEEAFLSYRYNDAAQTAYEFFWNDFCDWYVEATKLSMKTSEDANTAEKDRAATVLLDVLSESLRLLHPLLPFVTEEIYGKLPNIDGLLITAPYPRYREERCYPAEEKDFSFLQEFVRMIRTMRSECTITQEKKLRVMARLGSEQEQTLRQNEGLVKLLAGIGELEIKTPEKESGERPAGSIGMAGAGFEIFVFIGEAVDIAALKKKFEKDLARDNAFVQGLRTKLANEQFVKNAPPELVVAEKVKLEEGLARTGKIESYLCGL

SEQ ID NO: 97278 - protein, 97 aa, Unknown
  Obtained from environmental sample
  DOMAIN (1)...(96): D-Tyr-tRNA(Tyr) deacylase
  misc_feature (1)..(97): Xaa is any amino acid
FNDKDGKMNLSLKDLAAVDNQAGVLAVSQFTLLADARKGRRPSWNGAAPPEKAKQLYEYFIDAVKKTGLYCECGEFQAHMMVTYTNDGPVTIILDTK

SEQ ID NO: 97279 - protein, 224 aa, Unknown
  Obtained from environmental sample
  misc_feature (1)..(224): Xaa is any amino acid
MKYGVRHFHIEDDNLGMNPTRLGELLDALIAKKWGVTWDTPNGIRADRIDAKLVAKAKASGCTYLIFGVESGNQRVLDEVVNKKLDLSAVTKIARIAYRHKLDVHAFYVVGFPGETAKEIHDTFRYALRLLASYDVIPHLGLARPLAGTRLYDICEEGGYLTSPRRPQIGKGLRGEVFSRQMIETKDFNAEDLESWVKGFNRKMILWIIVKSSIFLLLHPIAAL

SEQ ID NO: 97280 - protein, 57 aa, Unknown
  Obtained from environmental sample
  DOMAIN (3)...(56): YcfA-like protein
  misc_feature (1)..(57): Xaa is any amino acid
MKKGELLKRIKAQGCIFIKHGKKHDVYRNPRTGVEERVPRHNDINEVLASHIIKNLS

SEQ ID NO: 97281 - protein, 93 aa, Unknown
  Obtained from environmental sample
  misc_feature (1)..(93): Xaa is any amino acid
MMQANCQNLSFGYDGHIAVSGLNFYVQSGDFLLIAGENGSGKSTLIKGLLRLIPPMEGTINFSPEFAPYRTGYLSQQTAAKQDFPAGVYEIVL

SEQ ID NO: 97282 - protein, 284 aa, Unknown
  Obtained from environmental sample
  DOMAIN (10)...(266): ABC 3 transport family
  misc_feature (1)..(284): Xaa is any amino acid
MIDTIINMFSFAFLVRAFVVGALVSICASLLGVSLVLKRYSMIGDGLSHVGFFSLALATALNTAPLYVAIPIVVAAAFLLLRMSENSKIKGDAAVALISTGSLAVGVIIISQSTGMNTDVCNYLFGSILAMKKSDVYLSVALSVTVLFLFILFYNKLFAVTFDETFAKASGVKTGLYNMLIALLTALTIVLGMRIMGAVLISSLIIFPALSSMRLFKKFRSVTVCSAVISILCFFTGIVISYIYATPTGASVVLVNIIVFALFWLIETMRNSAIINKYRRENHA

SEQ ID NO: 97283 - protein, 150 aa, Unknown
  Obtained from environmental sample
  misc_feature (1)..(150): Xaa is any amino acid
AIIHADLIAGLPGEDVSSFGKGFDALWAALFPGCGNNRIEIQLGILKLLPGAPITRHIEPFGMKFNPLPPYEVIETSAIPASGLDRIKNFARFWELIVNRGLLDTGPAPVFDHFMALSDSLLARFGRNWGIAKDELREQIIGTGDWGSGT

SEQ ID NO: 97284 - protein, 149 aa, Unknown
  Obtained from environmental sample
  misc_feature (1)..(149): Xaa is any amino acid
MGSPRYPKPEQEDGSELPDMPAEAKPSRLIITGDTEFATSFMNITDARSNIDFFIHAADWMSNDDDIIGIRSRESRSNRLDRIIDPEKRAAAMGFARIVNVFLIPLLVIIAGLLHAWRRRTQGTSTKGTRAAGGAKYKGSERKEPQNDI

SEQ ID NO: 97285 - protein, 278 aa, Unknown
  Obtained from environmental sample
  misc_feature (1)..(278): Xaa is any amino acid
ILRENAVYAKCGGQYAYDPAIQTCDNGTVKAKCGIEYYNPAGQFCANNIIYAKCGGQYVYDPATQTCENNAVKARCGSGDYYNPALQFCYNDSIYNKCADTTYDPATQRCQNNIVQAKCGNDYYSTAAQFCALGIIYPKCAGKEYDPSGFKCENDILKTKCGDGYYNPATEFCSNGTVMATCGGKTYDPSKQKCNGTTLVNITTVTLAFNANGAAGATPASIVAEAGDSVTLPLKGAMAREGYNFGGWNTNAAGSGTNYNAGAKFKVTGSAGSTVTLY

SEQ ID NO: 97286 - protein, 169 aa, Unknown
  Obtained from environmental sample
  DOMAIN (71)...(104): Tetratricopeptide repeat
  misc_feature (1)..(169): Xaa is any amino acid
MRINHILTTRAKATVAALFFIAAISHPALSAETASSHRARADALYDNREYLKAAESYAKAAALESPGRAQAVYYRNIGSCYKNAGQPDKAIEAYTKAISLDPKDYMYYVVRAGLYADKGEKASAIRDYTKSIELDTSRGVKDGFPYKRRGDLYMKAGDYAEAVRDFESA

SEQ ID NO: 97287 - protein, 400 aa, Unknown
  Obtained from environmental sample
  misc_feature (1)..(400): Xaa is any amino acid
GSTSPGQSSGNRTVTFTPRGSEEDAWESGIYNSTGQKVKTFDIQNGAPKPITWDGINDAGQVAPDGVYSFRISATDKAKNSASAELTNIILDSREAGAFITTSVSAIAPANNQTANMVNFNIRLSLSDGIDNWKLELKDETGSVQRTFTGKPPVPAVQGWNGLDESGQIREGLFTPELTVNYTRGDVVKASASPVLVDISGPVLTVATSPEYFSPDNDGENDELFISLTTKDASPIAAWTFEIRTPVESGTTQVFRKIEGHGSPSNRIIWDGKSDKGELVQSAMYYPYTFTATENLGNTSSTEGKIGIDVLVIRDGDRLRIQIPSIQFRPNFADFQNLPKDVVDNNMRIIRRIAQILNQFRDYKVQVEGHANPTQPVGPARDREEPELKRITELRARAIV

SEQ ID NO: 97288 - protein, 291 aa, Unknown
  Obtained from environmental sample
  DOMAIN (123)...(185): Bacterial SH3 domain
  misc_feature (1)..(291): Xaa is any amino acid
GAFSWCNSLTSVTLPNKLTGIEPHVFNGCESLKSIIIPNSVNSIGTGAFSGNLISVTFQGTIPSAGFFDVPRFSDALPAFSGDLRNKFYATDKTIGTPGTYVSTDGTWVKQGGGAANIYYATTNLRLRSEPDTSKDNRIAGISKGSKVELLEVGKNDTIDNIKASWYKVKTANGTTGWVFSGYLTSPAGLYDYTNILNGDFYDFAGTWENGKGYIQTLKKDGMFGESWKRVLGIKYETNGSYYWFVEADHDGQQMWLYPVGIDIPNIQSDTTKVRLVSEGYSSPDDVYYRK

SEQ ID NO: 97289 - protein, 79 aa, Unknown
  Obtained from environmental sample
  misc_feature (1)..(79): Xaa is any amino acid
MKANPKIEICASTPEGKWLRICGSVAFNPGKAAKEKALETMPALKKMYSPDDGIFEIFHFENALAVFSDMQGGKKEVKI

SEQ ID NO: 97290 - protein, 185 aa, Unknown
  Obtained from environmental sample
  DOMAIN (18)...(179): KR domain
  misc_feature (1)..(185): Xaa is any amino acid
MENKKYLKFKEKYGPYALVAGGSNGLGAAYAEALARRALNLVLIAREKERLEKTSSRLREQYGVEVIALTADMADYEKVKNLLASLNVSIGLLIYNAAYAPIGLFENISEEQLSQAAAVNVRAPLLLAKFLSARMIHNKRGGIVLMSSLAGAQGSPKLAAYAATKAFNAVLAEGLWNELKPHGID

SEQ ID NO: 97291 - protein, 530 aa, Unknown
  Obtained from environmental sample
  DOMAIN (14)...(292): Periplasmic binding proteins and sugar binding domain of the LacI family
  misc_feature (1)..(530): Xaa is any amino acid
MPNANNTGDTEKRRLTIGFFVSELENAYAQTLCRGIMDAASAADANVMIFPGKSPKVPYDYRYQYNSIYRLANKDTVDALILATGTMVNFLSDEEFKEFYGRYRDIPLVSISIPIDGVSSVLIDNTVGLRGVLKHLVEDHGYKRIAFIGGPESNVEAKERYAVYRDVLRENGLPFDPDLTVVGDFTKYSGVRAVGDFLDVRNVKFQALAAANDEMALSAMEELQRRGYRVPQDIAVVGFDNVESTHFSSPTLTTVAQPIYEQAYKSVELALGLINGDSPKNVSLPTSMVLRESCGCFSRSVTSVSAQDDTVSAAAPAAVGDEDTAKIEALLQKALGYAVEGKLDDAADLEILKEMNEVVGAVENHRQMNLRLWQNTLTNFRAKVGIKTHGLDAVVSIEDFFHKMRMLLLETYFKNDSKRWSIYINDIVGLRDVLSQLIRDVNNPNEALRSIVPNIRNMGISDIYIFLHYSLERHSINTDWYFSGELCLAVTDDKRRPESLELRGQSMPVSSILDRELYPKDRRYTFVVST

SEQ ID NO: 97292 - protein, 337 aa, Unknown
  Obtained from environmental sample
  DOMAIN (1)...(243): tRNA synthetases class I (C) catalytic domain
  misc_feature (1)..(337): Xaa is any amino acid
MESGAAREGKSVWDIAAFYTDRFMADIVSLNILQPDLWPKATEHIPQMIALVKTLEEKGFTYRTGDGIYFDTAKFPSYCDFARIDPSSLRAGERVDMGEKRAPTDFALWKFSPAGAKRQMEWASPWGTGFPGWHIECSAMAAAHLPQPLDIHCGGMDHIRVHHTNEIAQTEAATAKKCARYWMHGEFLVLDKGKMAKSGGNFVTLSALKERGVSPLGYRMFCYTAHYRTPLTFSFEGALSAEHALANLKKSVLSIDGRSNGKSRDSCGEGADIERVNVALEPFADAVCDDLNMPRAVAALWEGLRGDKLPAAEKLAFVREADKVLGLDLLSPSCGGD

SEQ ID NO: 97293 - protein, 562 aa, Unknown
  Obtained from environmental sample
  DOMAIN (305)...(520): Methyl-accepting chemotaxis protein (MCP) signaling domain
  misc_feature (1)..(562): Xaa is any amino acid
GCSIISAIFTIQNSSGKIVGLIGINFISTVQIVVDDLVKEVYNGAGLSAIYSDNGTIIAHWDKARVKGNIKTNAKEKNLFGNDIDRLASAILHGGENGRNAVTLEKYSPDLKTKVYFIFEPILVSGFESTPWSLQLGIPIAEIMKPIHALVSYSIIFAVILLVLAAVITLLVARSIVKPIIGVTATLKDISEGEGDLTRSIAVSSKDEVGDLAKYFNKTLEKIKGLVLLIKKQAGVLSEIGADLSSNMTETAAAVNEITANIQSIKGRVINQSASVTETNATMEQVVTNINKLNGYVENQVRNISQASSAIEQMVANINSVTNTLVNNAANVNMLKEASEIGKTGLQEVAADIQEISRESEGLMEINSVMENIASQTNLLSMNAAIEAAHAGEAGKGFSVVAEEIRKLAESSSEQSKTIGTVLKKIKGSIDKITNSTGNVLTKFEAIDSGVKTVSQQEENIRGAMEEQEQGSKQLLQSASGLNEITQKVKISSGEMFNGSKEVMNESQNLEKLTQEITNGMNEMASGADQMNTAVHHVSEISGKNSEAIETLLKEVSRFKVE

SEQ ID NO: 97294 - protein, 484 aa, Unknown
  Obtained from environmental sample
  DOMAIN (157)...(180): 4Fe-4S binding domain
  misc_feature (1)..(484): Xaa is any amino acid
IGFAPVDRWVKDAAAVLPGTPMPSEPRENYYPKNIWPWSKTVISGIVPIPLSVIETTPSNFYSELYNTTNRLLDDAAYRLTSLLISLRFKAHFFPRDGYGEIGALVEKPEAAFSQALAAKYAGLGTIGRNHCLLTKEFGPRVRIVSVITDAEFPPDSIIEKNLCVDCSNCKNACPVGAFTPRNDIEIDDMEKYKCSKYHAFLRTEMRYPCGVCVMVCPVGEDRKQYGSEAVSKQGKDHLQNFGSKERNASEFFERRRRFIMENRNYRFETIQIHAGQEKPDPTTDARAVPIYQTTSYVFPNSKSAADRFALTEAGNIYTRIMNPTWDVFEKRMAALENGAAALATSSGAAAITYAVLNIARSGDHIVSDNQLYGGTYNLFANTFKDLGIDVSFVDGGNPTSFENAIKPNTKALFFETIGNPNASIVDIEAVVAIAHRHGIPVIVDSTFATPYLLRPIDYGVDIVVHSATKFIGGHGTSIGGVIV

SEQ ID NO: 97295 - protein, 169 aa, Unknown
  Obtained from environmental sample
  DOMAIN (55)...(138): Acetyltransferase (GNAT) family
  misc_feature (1)..(169): Xaa is any amino acid
IRFRDALKTDLDRIVDIYNSTIPSGMVTADIEPVSVESRKKWYDEHNSTKRPLWVVENKLNKIIGWVSFQSFYGRPAYDATVEISIYLETEQRGRGIGKQILQYCINNAPKFGIKNLLAFIFAHNEQSLKLFRHFGFEDWATLPNVAELDGREYSLKILGKRIFNASFN

SEQ ID NO: 97296 - protein, 73 aa, Unknown
  Obtained from environmental sample
  misc_feature (1)..(73): Xaa is any amino acid
MTRAFSRNFERFALEQKRLHRTDAMLLSTKWLRELTPCDATAQTISDRLTMLGLEVEDIRHPFADLKDVLVGH

SEQ ID NO: 97297 - protein, 292 aa, Unknown
  Obtained from environmental sample
  DOMAIN (5)...(49): tRNA synthetase B5 domain
  misc_feature (1)..(292): Xaa is any amino acid
RAFCRTTLISLGCGMEENQDAWTVRVPSWRHDLRREADVIEELGRVYGLDNIEPELPRAERSLDAATVQESTYSFWGRVKNWACGLGLNEAVNYSFVGHADLDLLRLPAEGRISIMNPLSAEQDVLRTALAPGLLQNLRHNLAQGAQGLRLFELAHIFAADAVSETTAREYGRLAILLYGQRFDSAWPHKGEEADYHDLKGLVEHLCVAFRLPRPECRTSEGWGCLLPCVEILLGDSLFGRMGRVLPEIADSFHARKDVWLAELDLDLLYALHHAAKARFVPLPVFPPVRRD

SEQ ID NO: 97298 - protein, 277 aa, Unknown
  Obtained from environmental sample
  misc_feature (1)..(277): Xaa is any amino acid
EQECREEQERIEREPTAEDETKREESIPVISDVRKRIAKYQNCISANRFNTYGLKEDSTVIATRTNIEDQCNTGSWRDIVAISTYNGPTASIIVGLKADGTVIALGDNKYDRCNTGSWRGIIAIATGGYHTIGLRADGTVFAVGNNDNGQCNTEGWRGIVAIAASEYHTVGLKADGTVIATGRKDEGQCNTGSWRDIVAIAASEIRTVGLKADGMVLTVGEKDEDQCNTGSWRGIVAVTVGVFHTVGLKADGTVIATGRKDEGQCNTGSWRDIVAVT

SEQ ID NO: 97299 - protein, 301 aa, Unknown
  Obtained from environmental sample
  DOMAIN (1)...(76): Histidine kinase-, DNA gyrase B-, and HSP90-like ATPase
  misc_feature (1)..(301): Xaa is any amino acid
KIHFEVRDSGIGMTPEQITKIHEPFVQADSSTTRKYGGTGLGISIARNIIELMGGELHIESTLGVGSKFSFDIVFKTADIPVGVKPERTSGKKIEKPIFNGDILVCEDNEMNQQVISDHLGRVGLRTVIAGNGKEGIAIVQRRMTEGKKPFDLIFMDIQMPVMDGLEAAPKIAALGTGAPIVAMTANVMVDDKELYKMNNMHDCVGKPFSTQELWHCLLKYLKPVEQKSIPQEVQIEEEMDMQKILETQFAKHNQTKFAEITDALEAGDIKTAHRLAHTLKSNAGQIGKSALQNASAEVEK

SEQ ID NO: 97300 - protein, 203 aa, Unknown
  Obtained from environmental sample
  misc_feature (1)..(203): Xaa is any amino acid
MKADESGDDIAYVNTDTVTVKGKNGETADKFCYRLTLMTEDTNVTPTVRLVTATFKNTQEDREIARIHDDVISQDAIDSFIGTLDVKPYSQMIRDPQFSSGICSAVSSCMILDYKGVHILPEMAAMGVLDTYYDGYGNWPFNTAFIGSFGFESYVEYCDGLDDIKRELMMNNPVICSVRYKRDDSVDGNLPILSAAPIDRTPS

SEQ ID NO: 97301 - protein, 262 aa, Unknown
  Obtained from environmental sample
  DOMAIN (1)...(257): Bacterial extracellular solute-binding proteins, family 5 Middle
  misc_feature (1)..(262): Xaa is any amino acid
DIKKIDSHTVEFTLDKPRADYLLMFVAEIVPEHQWNVNKTKDDFLKYENPNPVGTGAFILVEEVVDEFARYKANDNYWGGRPNVDELIFVFFANDDTKLQALEAGEIDMTSLTAAQLNYAGSLSNVSLVKFGTIRLTELGFNMWNDKASKGNPIIRDVKEIRQAIDHAINYDELIEFSKGGLANPEKGLIPHLSTPWSYWPDASKLREFSPQKAVQLLEKAGFTTVGADGIRSNARGQKLSFRASVIESSYKDQGLLIQKYL

SEQ ID NO: 97302 - protein, 100 aa, Unknown
  Obtained from environmental sample
  misc_feature (1)..(100): Xaa is any amino acid
MKFTEKIKNFFAGRSSVSQEFFDELADLLVEGDIGAQEAFGTVELLQQACRKEKISQPEEARERLALLLEKILVEGVSSVVNSSLIDCSRQTVILLLGVN

SEQ ID NO: 97303 - protein, 275 aa, Unknown
  Obtained from environmental sample
  misc_feature (1)..(275): Xaa is any amino acid
AVNGLPAVEVLVIISATPVAEDFNISGTGTFTYNGRPRIVNVTPKEGKSAGTVTVRYNNDTTAPSAANTYTITFDVAADLPNWNAASGLSAGTLIITVAPQTPVVGDYNIAGTGTFIYDGGIRAVVVTPKEGKSAGAIIVKYNNSTTAPSAVGTYTITFDVAADLPNWNAAIGLTPGITLTITNSTPTAADYEISNLTQTEGSVIPVTITSKPGKSTGEVTVYYNGSTTLPTVAGTYPVTFAVEEASGWNAASGLSAGDLVIGKPIYETPVASDT

SEQ ID NO: 97304 - protein, 273 aa, Unknown
  Obtained from environmental sample
  misc_feature (1)..(273): Xaa is any amino acid
GAFIFSPPDLDKFLENVRDEGFKHPLILVLFDVHESLVDQKVIALLKRMAADKLNRDKYKLTVFIISSRLFIPPELEKYITVLDVPVPEINEIASIIDEFGRANEIEIEKDLAGDLAISLKGLDRLPIQQILNLAYQDGGNIRHADKKLILREKKQIIKKVGMLEYIESADQFNSIGGLRVLKKYLEKKSLIFKNLSAAQEFGVDIPKGILILGMPGCGKSLAAKATASLFEVPLVRLDVGRLLGKYVGESEENMRRALKLAEAVSPCVLWID

SEQ ID NO: 97305 - protein, 486 aa, Unknown
  Obtained from environmental sample
  DOMAIN (22)...(464): Amidase
  misc_feature (1)..(486): Xaa is any amino acid
MYKESALKLTALIKAKKLSAVELTKACIDAVEKNDSRYNAFLALSKEKALARAKEIQSRIDNGETLSPLAGVPIAVKDNISTEGIETTCASKMLKGYTPVFNATVVEKLEKAGMVIIGKLNMDEYAMGGSSETGAFGPVHNPWDLSCVPGGSSGGAAAAVAAGEIPLALGSDTGGSIRQPSAFCGVTGIKPTYGSVSRYGLVAYASSLDQIGPIGQNIDDCAALLSIISGPDTRDSTCVIEKPFEFGEAKSKLEGVKIGLPRNYFASGIDDEVKTAVLAVSKELESAGAIIEEFEMPFLDYVIPTYYIIACAEASSNLSRYDGLKYGYRSSNAQSLSEVYRLSRNEGFGLEIKRRIMLGSFVLSSGYYDAYYKKALQVRALIKDAYTKLFTKYDMILSPVAPTTAYRIGENSGDPMKMYMGDIYTVSINLAGLPAVALPCGFDSNGLPIGFQLIGDAFSENKLINVARGYQSRTDYHLQKPKGIKA

SEQ ID NO: 97306 - protein, 219 aa, Unknown
  Obtained from environmental sample
  DOMAIN (1)...(191): tRNA synthetases class II (D, K and N)
  misc_feature (1)..(219): Xaa is any amino acid
MVSGFDRYFQIAPCFRDEDSRADRSPGEFYQLDFEMAFAEQEDVFQVAENVMYGVFKTFSKKEVSPVPFVKIPYAEAMLKYGSDKPDLRNPLVITDLTDFFADVDFKPFKNIPVRGIVAGGAALQSKSFFEKMLAFAEEIGMKGLGYISVMEDGSLKGPIVKFLSEEKQNTLRKDLNLKINDTLFFIADAPAKVNGLAGQIRTALGNQLNLINKDKFEF

SEQ ID NO: 97307 - protein, 264 aa, Unknown
  Obtained from environmental sample
  DOMAIN (20)...(89): S1 RNA binding domain
  misc_feature (1)..(264): Xaa is any amino acid
VRLSRDRAEKMKIWDEVEKAFRANLTVHGVVLEKVKGGLAVDIGIRAFLPGSQVDSKPVRNLDPFLGKSFDMKVIKVNRRRGNIVLSRKLFMETVNASLKEETLSGLEEGKLVEGQVKNITEYGAFIDLGGVDGLLHITDMSWGRLNHPGEMFHVGDKIEVAVLKYDRESERVSLGYKQKFPDPWLSVEERYPLNAMVKGKVVSITDYGAFVELEPGVEGLVHVSEMSWTKKVKTAKGMVNMGDMVEAQILQIDTENRRISLGM

SEQ ID NO: 97308 - protein, 192 aa, Unknown
  Obtained from environmental sample
  DOMAIN (142)...(191): Sigma-70, region 4
  misc_feature (1)..(192): Xaa is any amino acid
LLFKVGEKLGDDTQTAGSEKAAGEEWDSQVGYSQHEFKCLYDSIFPVLFRVAYRISNSKEAAEDLCQDCFFRLYEKNIVFPSPEEAKYWLIRVVKNASLNYAKRKERERKAYQKAFREEVKREESGESALVRKETSHEVEAALEKLPENLRIVLILKEYAEMNYKEIGRVLGISEGNVKVRVSEPGKGLPRY

SEQ ID NO: 97309 - protein, 341 aa, Unknown
  Obtained from environmental sample
  misc_feature (1)..(341): Xaa is any amino acid
MSLKVKLTTIILVMILVSIAVLSVFNLTRSSALQLDTTYTYAQTLVKLNAKETQRQMEVYTDYGNVLVQIFNGYEDTEMSGRRQMYDDVMHSLISSVDSILGIWTAWLPNTIDTYDARLGQYQTYFHRRNGPLVREPAGFAGWQDQLKRITPQGLTSTTGREPAFQELADVFWADVTGRGNVPVVAVIYSFKNSKDQIIGLVGINFISTAQEIVDGLVRELYNGAGTATIFSDNATIIAHWDKERVKDNLKTNAKEKAVFGNEIDSLSKAILHGQELTLEKYSQSLKTDVHYILQPILTSGFETTPWALRIGIPISEIKKPIHALIKYSIIFAIVILALAV

SEQ ID NO: 97310 - protein, 512 aa, Unknown
  Obtained from environmental sample
  DOMAIN (53)...(212): ATPase family associated with various cellular activities (AAA)
  misc_feature (1)..(512): Xaa is any amino acid
MDELFSAKNDKSSQSPLADRMRPRVLEDIIGQDHIVGPGRLLRRAIQADRLSSIILYGPPGTGKTSLAAVIANTTRAAFENLNAVLSGVKDIREVIDRADERFRLYGKRTILFVDEVHRWNKAQQDALLPWVENGTVILVGATTENPFFEVNRALVSRSRIFQLKALDSRDMTEAARRSIADTERGYGKWRITFEEGALEHLVEVAGGDARTLLNALELAIETSEGWPAPAGNEIHISLRAAEESIQRRALLYDRDGDYHFDTISAFIKSVRGSDPDAALYWLAKMVRAGEDPKFIFRRMIILASEDVGLADPNAISVVISCAQAFERIGFPEGNFPLSHACLYLATAPKSNTTMSYFDALKAVESEDAEVPNHLRDASRDAESFGHGEGYVYPHAYRDHWAAQQYLPNSLRGRTFYIPSSSGYEGKIKEDVLRKRELQAAIVLGSQNADTDGEFLTWSAAAKGREGWFKRLESGRSRLLLNDRNAIFSSACVSRQDRVLIPLANDGLLLWE

SEQ ID NO: 97311 - protein, 239 aa, Unknown
  Obtained from environmental sample
  DOMAIN (48)...(239): eubacterial secY protein
  misc_feature (1)..(239): Xaa is any amino acid
MLVVYRIGVHIPTPGVDTVALAQFFNNFKGTILGLFDMFSGRALSQFSVFALGVMPYISASIIVELLTVVWPHLTRLKKEGGQDGRRKLTQYARYGTVALSLFQGYLIAVGLEGGAGGGLRIVAEPGLQFRLLTMLTLTAGTAFIMWLGEQITERGIGNGISLIIFAGIVEGLPSAFLRTIDQVSNGEMSAATALLLAAGMLAIVGAVVFCERAQRRIVVQHAQRMVGRNLMKGGMSHL

SEQ ID NO: 97312 - protein, 323 aa, Unknown
  Obtained from environmental sample
  DOMAIN (61)...(323): Methyl-accepting chemotaxis protein (MCP) signaling domain
  misc_feature (1)..(323): Xaa is any amino acid
VKDKVLDVGYSNMPLLDSSGKMIAVLMLFVDMTEVKNTQRLIVDVASHAVDISHRLAVASDELSTQVSQMSAGAERQRQQAASTSTAMEEMDGSVAEVARSAGDAGEQARLSHEKASDGEGVVRKVITAINEVNRVTQELQKNMYSLGRQAESIGGVMNVISDIADQTNLLALNAAIEAARAGDAGRGFAVVADEVRKLAEKTMTATQEVGANIAAIQQSAQTNIREVSEAAKAVFEATELANTSGQALTEIVDLASANSAIVASIATAAEEQSATSEEINRSLEEINKITGETADGMHQSAMSLHKLSETAHELHRVMEELK

SEQ ID NO: 97313 - protein, 85 aa, Unknown
  Obtained from environmental sample
  DOMAIN (6)...(77): Phd_YefM
  misc_feature (1)..(85): Xaa is any amino acid
MTAESSAQFNIHEAKTNLSRLVDRVEHGEEIIISRAGVPVARITKYSKRVNRSARGSLRGELVLSPDWDSDEVNEAIAEDFGMTS

SEQ ID NO: 97314 - protein, 340 aa, Unknown
  Obtained from environmental sample
  DOMAIN (135)...(324): Phage integrase family
  misc_feature (1)..(340): Xaa is any amino acid
TPLTSPFNFWTPNSEYAQFKRDVQKNPLTPYYIEMNHDDVRRHVQPFPGFDGVTVGSLTKAILKKWLIWLAGRKTISHKKDGTIIEGNNLSGRRANTVLQAVRVAIRWAVDNEEIDTDPFRKLGEVSESIKEKGVLSFEERNRLTTLPINDYRSRLVMLLGSYCGLRRGEMRGLQWGDIADGIITVQHNFIDIEGVKQPKYNSTRKVPITADIQKLLDIARKNAFNTSPENYILESPLTPGKPLCNNFFREAVTKELESIGITAARQKERVLTCHSLRHTFITLAQLSGIPDVVIRALAGHKSEQVQQKYSHVPQVIDFNDARNKLEAYGQNELKAANVR

SEQ ID NO: 97315 - protein, 168 aa, Unknown
  Obtained from environmental sample
  DOMAIN (14)...(168): tRNA synthetases class I (K)
  misc_feature (1)..(168): Xaa is any amino acid
VSTQAQTAQRRETVHWADETAVKIIREKGEKALYTCASGITPSGTVHIGNFREIISVDLVVRCLRDMGKNVRFIYSWDDYDVFRKVPLNMPKQEELKNYLRFPITMVPDPWDRDPSYARHHEVDVESALPIVGIHPEYLYQAERYRASQYAEGIRRALEHVGSSRVDR

SEQ ID NO: 97316 - protein, 72 aa, Unknown
  Obtained from environmental sample
  misc_feature (1)..(72): Xaa is any amino acid
MLAPCVDVDHDIACRTGLHCTPMVHEHLGTDKLHGAVRFGIGPFNNEEQIKKTIEAVAEIAEGQRKRAAVSK

SEQ ID NO: 97317 - protein, 92 aa, Unknown
  Obtained from environmental sample
  misc_feature (1)..(92): Xaa is any amino acid
MRIGFASDHAGYELKERLKQWAEGHGHCAVDFGAHGTESVDYPDFAHKAASLGESWDRLVLICGSGIGVSITANRHSGVRCALITDTEHARL

SEQ ID NO: 97318 - protein, 70 aa, Unknown
  Obtained from environmental sample
  DOMAIN (1)...(52): Uncharacterised ACR, YggU family COG1872
  misc_feature (1)..(70): Xaa is any amino acid
TGYKARIQCPPVDGKANDALIMLLSKEFGVAKNSIEIVKGKTSRNKTVLVKTQTPHKLPEPHNFQNAPNL

SEQ ID NO: 97319 - protein, 266 aa, Unknown
  Obtained from environmental sample
  DOMAIN (8)...(266): ABC transporter transmembrane region
  misc_feature (1)..(266): Xaa is any amino acid
LKPYVLHCFVFLVLMLGGAVLEVMPSEFTQRLIDHHLLTKSLKGAGPLFATFICFVCLSFIVQLTRSVLLGWVGQKAMLDLRLQLFGHLMHRSTSFFQHNPVGRLMTRVTTDVQNLNEMFSSGFVAVIGDALSLLAIVIWMYLRHPGMATIALFILPFLIVATEIFRRKASMAFRETQGRYAAIQAYLQERLSGMSLVQLNSNENASKRTFDGLNQSYLEAFLKTVLAYSVFFPVVEFLTSVTLAAIIFYADYKVQIGDVTLGLLL

SEQ ID NO: 97320 - protein, 225 aa, Unknown
  Obtained from environmental sample
  misc_feature (1)..(225): Xaa is any amino acid
MVSAIHRVAGKRFAGLSLAVAALVLLPLFPGRVLRAQELAPRRTSSNPAFVEWQKEQKEREARIALGLPVEPRDSRLGRIPPPFLRPAISGPISEASAKVGAGLAVFPSRFDLRANAIQDGIVAPVPPIRDQEPYGTCWAFAALASAESNIQCAKDLSEWHLAWFAYNPVNGMPAFTKSQVSQGEHSTFDQGGHDLIATAILSRGTGPVEESRAPYLGATPNGTE

SEQ ID NO: 97321 - protein, 461 aa, Unknown
  Obtained from environmental sample
  misc_feature (1)..(461): Xaa is any amino acid
MQTEQGLVYCDSTGVAPRENGPIGPGSTFTFSTTKKNAILQCASFKDGIATSKTIMRTYLIERLPDLPIVSIAVDPVEMFTAPRALYKSSFEPGADCGGASSPFRRDDSLLVHVDFFEKDFNRKGEDVAWSYPAAIKIHGGCSRQWDKKSVIISFREIYGQKNLKYPLFPEFPDLIKFKHFMLRNNGNNYPYDYIRDLLMNQLTEGLNIDYQKGRAVVVFYNGEYYGIHNLRERTNSDYFETNYGIDEEFIDLVKVERYNGAPEEVSRGSDADYQDIISWLNGVSLANDDNFKQLEKRIDVDNFTNHFQSRIFYKDCDWPGKNMKRWRSNLTQSKWRWLLYDTDHGFGSWGSSSERPTCGTMEYITATSGPSWPNPPHSTFMMRKLLENQNYKNAFINRFSLLIATYFTTDRMNARKNELMSQINSETSYDQQKWGSKSEDILPKSMDRFASDRPADMQGK

SEQ ID NO: 97322 - protein, 133 aa, Unknown
  Obtained from environmental sample
  misc_feature (1)..(133): Xaa is any amino acid
MWLDFKITNRCNNNCLYCGVSHDKVTAKELVAIDKIIDTIKSALKIGFKNFALLGGEPTVRENVEDLFSAFQGCEDVNVLVITNGLIFNEKLVNSAFACGANNVRIVQSFDSFSIPNYKRQNPQKILANSGIL

SEQ ID NO: 97323 - protein, 98 aa, Unknown
  Obtained from environmental sample
  misc_feature (1)..(98): Xaa is any amino acid
VRTETFDVVILGGGAAGLSAALAAAEAGVAVAVVSKVYPMRSHTVAAEGGAAGVHRPEDSFELHIADTLRGASGLADPAAVDYIVHEAPGALARLEHL

SEQ ID NO: 97324 - protein, 251 aa, Unknown
  Obtained from environmental sample
  misc_feature (1)..(251): Xaa is any amino acid
NVSDNGFMGGRIGGGDRLSLVYLNNYAINSLKVALGLAAAMLTFLYTQEWWFLAWFGAIIWFAITALRNIIQSVLSGGVFRRTLLRWSDYVSVGRVCDSLMYTGFSVPLLELGMRYLLLDKGLGVTLKTNPVLAFTVMAVVNGLYIAAHNVYRGFPRAAVVGNLFRSVAAVPCSVLYHALLLALLHALNAPEPEMYLQLGAAIISKTASDTVAGLIESVADRQRNLRLREMDYTDKIGQWWKKDPVGTGIL

SEQ ID NO: 97325 - protein, 242 aa, Unknown
  Obtained from environmental sample
  misc_feature (1)..(242): Xaa is any amino acid
LIISQRKRFQDLFDYLLSDKIVNAPEEDRFCIWEILDLTVHKHRKFKKAQWAFNKKTIDKLQDVANKIKPNNPKYLYRNLFSNNDHFYFYKDDNWENYLKKIEKARTKALQEVYHNNGVNGILELAFSVEDKYKIGFSLRVINENIRNAILPEYLDSTNISIKQLVKGFINGCFSNQKEAWINTYDFTAWKKTQICSLLLNIAYHEKIWNLAESLLGDSVNVFWEKIFESPYAMCGKKIIAI

SEQ ID NO: 97326 - protein, 232 aa, Unknown
  Obtained from environmental sample
  DOMAIN (1)...(232): tRNA synthetases class I (K)
  misc_feature (1)..(232): Xaa is any amino acid
DPWERDSSYARHHEVDVESVLPDVGIFPEYLYQAANYRASKYADGIRKALENREALKTILDKFRDEDHKIQGEWWPVSVFCEKCNRDETNIDGWDGQWGLSYTCELCGNKETVDLRKTGAVKLVWRVDWPMRWEYEKVDFEPAGKDHHSQGGSFDTARHVCKDVYGWEAPVTFRYDFIGIKGSPGKMSSSTGKLVDLPDVLRVYTPEIARYLFAGTKPNEESQFHLTLMLLK

SEQ ID NO: 97327 - protein, 177 aa, Unknown
  Obtained from environmental sample
  misc_feature (1)..(177): Xaa is any amino acid
LFAKESIVGVMSTLYSQNAEAPEEKPEKEFSLTEQFGAAFASIANNAKKLGEKITDPLGIGKKEIIDESVSMFEQMQKAFNYSSSAAFAFLIFVLLYVPCVSAVSVAVREVGYALVILQSIYSTILGWCLAVIFFQTTEGHSLPFIAMAVLVLFATVFGVIFYAKKSGRFEGGTNPP

SEQ ID NO: 97328 - protein, 270 aa, Unknown
  Obtained from environmental sample
  DOMAIN (16)...(267): Alpha amylase, catalytic domain
  misc_feature (1)..(270): Xaa is any amino acid
MQNENFCWWKHGVIYHIYPQSFYDSNGDGIGDLQGIIQKLDYLAELGIEAIWLSPIYPSPLIDGGYDITDHKGINPIYGDMNDFKQLLKTAHQKGIRVILDLVLNHTSDQHPWFLESRSSRDNPKRDWYIWQAPKNKQIPPNNWRTNFGKKAWKFDQTTGEYYYHSFFYEQPDLNWRNPEVKKAMFEVVEFWLKQGVDGFRLDVINMLYKDKKLRNNPITNFILNSKVFNRNRGSVYEMLKEFRLLLNKYPDKASVGEWDPLESTCRHAS

SEQ ID NO: 97329 - protein, 154 aa, Unknown
  Obtained from environmental sample
  misc_feature (1)..(154): Xaa is any amino acid
DLTVAFLHSTISFKRHEINYPHTQIFLDRILPDCELHNDIPMKLGDMFIPIVGVNDFPEETYPAILDGLNRARLEYRWACTPIQIFSLFPFPAQCPAFAHSVRYGPGISLHSTCTVKLGADKPETDTAVPVVLTGVVPVRGTQVFGRIAPAPAA

SEQ ID NO: 97330 - protein, 649 aa, Unknown
  Obtained from environmental sample
  misc_feature (1)..(649): Xaa is any amino acid
MESTFEANHDSTASFHFERPRLNSLFTEAVKYPLVVVCAGAGYGKTTAVEDFLKGYKAAAARVQLSDSDNVGVRFWENYTRSVSVVNPTMAKKLFEFGFPNSIPKIQGYKKIIDEYIVREKRILVIDDFHCIEDPAVLQFMEGGFFRDMQPETTVFLISRSLSRVNIAGKLYRDQAFNINEDDLCFTENELAQYFRLMGISAQPDSLREIMQDTEGWAFAINLIARSCQKAPGYGGYVRNAMKQNIFRLLETEIWDGLSEQMQNFLVRLSLIDHLSVDLIAQLAGGEDLIAGLEKQNAYVRRDNFINAYFIHPLFLEFLSTKQEILSEEQKRETYAISGDWCARNGFKIDALFYHEKTGNYQSILLTLTGLTTQIPQDIAKYAADILDRAPEDAFDKVEFLADMHLRTYICQGFLQKSLELVKYYEAKFLKLPDDDPLKKRTLTRLYICWTYIRCLMSVTDDIFDYDIYVEKACKCAQEEDSGKLDIYYPGAWINYTGSSRKGGPDEYIAAIARNQAHIQKSFIKGFMAGELELARGEKEFYRGDTSSAETHIALAVKQARAEKQFGLMHRALLYTLRIAAFHGNFAAAEQTLKDTKAQQDETAYLYSFSDYDISLSWYFCFLGMPEKVSGWLQEDFSLESLAGSIENF

SEQ ID NO: 97331 - protein, 321 aa, Unknown
  Obtained from environmental sample
  DOMAIN (49)...(247): DnaB-like helicase C terminal domain
  misc_feature (1)..(321): Xaa is any amino acid
MESHEVLDKVEESVYKLRDERQAFPYKKLSEVLLPTLDKIEDVYKTKNALTGIPTGFEKLDEMTTGFQPADFIIIGARPSVGKTALALNMAAHIAIRNKIPVAFFSLEMTDMSLAQRLISSAAQVDGNKMRSGHITSDDFRRIRDSLGFLYDAPFYIVEIPNKELHQLRSQARKLRTKEKVQIIFIDYIGLIVHENSKLPRHEQIGEISRSLKGLARELDIPIVALCQLNRDTEKTGHGQQPTLANLRDSGSIEQDADLVMFLHRKPPAKDKKGGEDEPVTNIEGIPTELIIAKQRNGPVGVIDLMLQAKYTRFVPVEKDH

SEQ ID NO: 97332 - protein, 235 aa, Unknown
  Obtained from environmental sample
  DOMAIN (104)...(191): PDZ domain (Also known as DHR or GLGF)
  misc_feature (1)..(235): Xaa is any amino acid
LGDSDSTKVGEWVVAIGNPLGLEHTVTQGIISAKGRSSSSVSGNPNAWVGGFLQTDAAINRGNSGGPLFNLRGEAVGINNSIRADGQNIGFAVPMSPVKKVLNELRTGKPLNRGWLGVSTGDLDKDFGEGLGISQGAMVGSVTKDSPAEKAGVKPLDVIVSVDGQPIKTSNELVESIASRREGDAVRLEIVRGGKKQTLSVTLGNRASLNDDDDSPSGRRRREEAPKDSSGSMDL

SEQ ID NO: 97333 - protein, 68 aa, Unknown
  Obtained from environmental sample
  DOMAIN (1)...(68): gpW
  misc_feature (1)..(68): Xaa is any amino acid
MTRQEELAAARAALHDLMTGKRVATVQKDGRRVEFTATSVSDLKKYIAELEVQTGMTQRRRGPAGFYV

SEQ ID NO: 97334 - protein, 244 aa, Unknown
  Obtained from environmental sample
  DOMAIN (1)...(192): MutS domain V
  misc_feature (1)..(244): Xaa is any amino acid
MLITGPNMAGKSTYLRQTALITLLAQIGSYVPADFAEIGIVDKIFTRVGASDRLARGLSTFMLEMTETANILQNATPKSLVLLDEIGRGTSTFDGLSIAWAITEFLHDVPEKAAKTIIATHYHELTDLIENLEHAKNFQISVKESNGKLLFLRKILEGACDSSYGIHVAEMAGVPEDVVRRAKRILLRLEKEKIDPSDKAHKPKETQLSFFEPLPIGLNAELLLKELSSTNPDEMTPIQALQFW

SEQ ID NO: 97335 - protein, 88 aa, Unknown
  Obtained from environmental sample
  misc_feature (1)..(88): Xaa is any amino acid
VHEQVISPLHSHLTRLIAAWTGCDANDTRMILHTHALIGEILAFRLGKETILLRTGWTAFDEEKTELINQTVTCHIDLILQGLSQRSL

SEQ ID NO: 97336 - protein, 85 aa, Unknown
  Obtained from environmental sample
  misc_feature (1)..(85): Xaa is any amino acid
MHQLPQLSAIHRLVWIALMAALTAAGAMISLPILPFSPVPVSLQSLFPLLAGLILGPRGGAAAMLLYLAAGCLGLPVFAGRKAGL

SEQ ID NO: 97337 - protein, 288 aa, Unknown
  Obtained from environmental sample
  DOMAIN (1)...(122): Domain of unknown function DUF21
  misc_feature (1)..(288): Xaa is any amino acid
VLIGNNISNIASSTLATALFIGLFGVNGVSIATLIMTILLMLFCDISPKALAKETPELTAMRVAPLLRFFVFIFTPVNFLTVAWKKLLMKIFPVKQDRSTTEGELLTFVGEVREEGGININEEKMIRQVISFDELKVSGIYTSRIDVSAVSVSDSVEEIDRKFRETGFSRLPVFQDTIDNIKGIIILKDFYHHVIREQKTPLEIIKPVVYVTKTIKISKLLRTMQKKQAYMAVVIDEYGGTLGIVTIEDIVEELVGDIWDEHDKVVELVRKSTLIGVIRFLEALISGI

SEQ ID NO: 97338 - protein, 211 aa, Unknown
  Obtained from environmental sample
  DOMAIN (1)...(198): DAHP synthetase I family
  misc_feature (1)..(211): Xaa is any amino acid
MAEGLDTLAYVRSDHGIPVLTDVHEPGQCPLAAATADVLQIPAFLCRQTDLLLAAAATGKAINIKKGQFLAPWDMRHAVEKVKSVPQAGPVWVTERGASFGYGNLVVDFQSFPHLRKTGCPVVFDATHSVQKPGSLGDATGGAREMIPTLARAAATCTDGFFFEVHEEPERALSDGPNVFRLSDFGQLLDELLSIWKTAQPAVMRETQGKG

SEQ ID NO: 97339 - protein, 268 aa, Unknown
  Obtained from environmental sample
  misc_feature (1)..(268): Xaa is any amino acid
MLIVLGALLVCVAIILVWFHIPYSPLKRQFLRDAARLGSNGSSSTGRVLTEKDFEAFPAIIQKYIQCCGYIGKPVMSYMKMEYKNVAFMQSRSGPALRIDYTQYNFADSPCRLAFISSNLFGTPFEGYDYYVDGNGGMKGVIGKAIRLFHQTGKEMNEACLVTYLAECLFVPSSFLHGAITFEEIGKLQVTARLECYGISVSGVFSFNESGEMISFTTNNRAVAKSDGSFEYVRWTALCSNYHAFRKRNQISNTSSSRLVGSSRVDLQ

SEQ ID NO: 97340 - protein, 495 aa, Unknown
  Obtained from environmental sample
  DOMAIN (7)...(84): Surface antigen variable number repeat
  misc_feature (1)..(495): Xaa is any amino acid
FYETEFPEVSLYKFAGNSSVRRSELSDVISTKTSGFHNPVKVRADVEAIKNKYTEKGFPNANVTVTETPSGDSSITLTFVISEGNKITIKSIEFQGNTKFSHSTLRGQLSLKPKTLLKDGAFQESKLLADIEAINKYYQDRGYINASVRDVTRTYDVDDKGTQMTLTFMIEEGNRYTFDGVTFEGNIIFSTAQLEKLIYSRKGEVINFSKIMADLQRVSDLYYENGYIFNTIERTTQKDDQSNTVSYKVFIVERGRAYIEDIIIVGNEKTKTDVILREIPLEPGDVFSKTKVMDAMRNLYNLQFFSTVMPDTQMGSAENLMVLVFNVEEQPTTDVQFGLTFSGSSDPESFPVSGMIKLNDRNLAGTGNQIGVEINSSVVDTTTVSLNYLHRWIFGLPLSGGVDLTADFSKRFATMNNTPPFFNGDETNYAFPDGFQSWEEYVAHDKLPPKDYLMEFKQWYISLGFSTGYRWNTFMGIFSLNGGTRFGIVRNNYDN

SEQ ID NO: 97341 - protein, 93 aa, Unknown
  Obtained from environmental sample
  DOMAIN (1)...(86): SpoVG
  misc_feature (1)..(93): Xaa is any amino acid
MEITDIRVRKVAGEGKLKAYVTVTFDDCFVIHNVKIIEGKNGVFIAMPSRKTRAGEYKDVAHPIHPEFRAELQNKILEKYDKGSGPDDLTMEI

SEQ ID NO: 97342 - protein, 449 aa, Unknown
  Obtained from environmental sample
  DOMAIN (18)...(134): Histidine kinase-, DNA gyrase B-, and HSP90-like ATPase
  misc_feature (1)..(449): Xaa is any amino acid
EQSLSINIDSDVPKTMIGDDQRLAQVIANLLGNAVKCTPEKGSITLETHLEKEQDGVCTIQISVSDTGIGISVEQQANLFRSFQQAESSTARKYGGTGLGLAISKNIVEMMGGRIWVKSEPGKGSTFVFTVNLKRGEDRRQEFGEYPLEKDDVRVLVVDDSQVILDYFKVVAKKLGVYCDTAISGKDALALVDRDHYHICFVDLQMPGMNGVQFTREMKSRMSETSVVIMMTANEWTTDAKEAKEAGVDKFMSKPVFPPVIEEVINECLDEKEREKLNVPSLDGVYKGRRILLAEDVEINREIVLTLLEPTLLEIDCAENGMQAVKMIAEAPEKYDMIFMDLQMPEMDGYEATRRIRALDNPAAKKIPIVAMTANVFREDIEKCLEAGMNDHLGKPLDFTLVMEKTPYLPVLSSARFHSRSCFRGVSHHLFYRKRDKRNNTLQVIFSSP

SEQ ID NO: 97343 - protein, 87 aa, Unknown
  Obtained from environmental sample
  misc_feature (1)..(87): Xaa is any amino acid
MKVVIIKDIIRKDVPIYYRLLYTGVAVIQLTKGTADYRIDFTVEIKPTGLKEISVTFLDNIEYPLLPVIKELKVLIDKMHEDELLPD

SEQ ID NO: 97344 - protein, 219 aa, Unknown
  Obtained from environmental sample
  DOMAIN (22)...(200): Glycoprotease family
  misc_feature (1)..(219): Xaa is any amino acid
VNLLAIDTATEKLSIALAANKGVWLFEADAGLRHSELVMETIDMLFKKAALKPEDLSGIVCMGGPGSFTGLRIGFSLAKGLALALNCPFAAIPTLDCMARPLSSLKGLTVPVLDAKRSSFFCALYKDGARICADMDAGPSAIADAIAVETAKQQLKQILLFGPGAEMLYGKLTQLPQSPLEDIDILVGKGLQRGNAQTLLEIALEKDVFANVGSSRVDL

SEQ ID NO: 97345 - protein, 232 aa, Unknown
  Obtained from environmental sample
  misc_feature (1)..(232): Xaa is any amino acid
LKIVERIKGVDMVFIDEIQYLEGKRALNLVLEVIKFMVSIDKQMVITSQKMGIDKTDIIPDLAERLDNFEYIKILPPDSEDRLKMLEDFMKEENLSLENPNLRDVWSKNMEKRSLKCLMNKLNRLVCEAEDRVITERTMEQLFEAKDSAEKILYIISSHFKIDVKILISDERKFSYERSLAMYFIKNANRDMDFCEVGKKLCRSENTVRIACDGIERALNGGKEFFNKIKPA

SEQ ID NO: 97346 - protein, 288 aa, Unknown
  Obtained from environmental sample
  DOMAIN (10)...(191): Penicillin-binding Protein dimerisation domain
  misc_feature (1)..(288): Xaa is any amino acid
AEENRIRKVNIKASRGYILDRNGVVLVRNRPSYQISLLYNRLKTKEMRDSVFERLLRITNSKGTRLLDSASLAFSFERGRWQKFKFQRLVEDAPEEMVALFEERSEELPGIEILVESRRDYPFGSHGAHIFGYTSEISETELELPENEHYVMGDRIGKKGLELSYEKEFRGENGSKFIEVNAMGREIGPVIGMPFIEPISGNALVTTIDWKIQQVAENAIPEGLKGAVVALNPRNGEIYAMVSRPPLDPNIFSLEKRELHKAWASVALDTAKPLTNRAISGVYPPASV

SEQ ID NO: 97347 - protein, 248 aa, Unknown
  Obtained from environmental sample
  DOMAIN (2)...(248): C-5 cytosine-specific DNA methylase
  misc_feature (1)..(248): Xaa is any amino acid
MGGFPEGLRKASFQRKFAFEIDELASKAYKLNHKKTNVITKDIRNVDIEEIKQKLKDKTIHLLAGCPPCQGFSSIRRLNKPKPVQDERNTLINEFVKFVEKLKPYTFMMENVPGLALDESFHKAKEYLETKLGYYVDYKIVNVKNYGVPQSRKRLVMIGSRLGEIKVAAPINEKITVRKKIGSLSEPELSKDPLHKIFPKHTDKISQLIKEIPKNGGSRKDLGKEKQLKCHLKKNVGLKKVTGWNSCS

SEQ ID NO: 97348 - protein, 253 aa, Unknown
  Obtained from environmental sample
  misc_feature (1)..(253): Xaa is any amino acid
VQSIWKRALIAFAGPAFNIVFAYALLTGIYMIGNPEPVSDKLVIGIVEHNSAAEEAGIAGGDTIFTIDGKKAEGWEKFREEMGISISRNIALEIGTKEGRKTVNVVPKELRDLGVGTAGIHPRHRVFVAADPLKDSPAGKAGIKQNDTILSVDGYTIGYYQDMIDIISASDGGAVEVVFSREQKDGKVDTLSASMNPFWNEEAERYLIGIQMGLAQFDELQVVHQPLGEALAMAPKKSISMWDPLESTCRHAS

SEQ ID NO: 97349 - protein, 163 aa, Unknown
  Obtained from environmental sample
  DOMAIN (1)...(163): Protein of unknown function (DUF574)
  misc_feature (1)..(163): Xaa is any amino acid
EIDPAARVVYVDNDPIVVSHTRALLATNAATGVVDADAADPASILSAPETERLIDFGQPVAILFVAVLHFLTTPGHHRHVAGTLTPAQIVAAFTERAAPGSVLVLTHVTSDGPSPERVRVLEDVFESVSSPMIFRPQAEIEELFRGWRLLPPGLVQPWLWPSE

SEQ ID NO: 97350 - protein, 148 aa, Unknown
  Obtained from environmental sample
  misc_feature (1)..(148): Xaa is any amino acid
MQGNAHKGRLNEGIAPFPRHGYIPKGAAGARAVSYAPRSHAQAFFPLVPGAACMSQSGTLSVSPVTTALLLAQSEDFAVIDRRALREAGVGHVRVMTGGVHAARFLAGKEKNDQGAMPDVVLVHHQLADMTGADLKELVRSHPRLAGL

SEQ ID NO: 97351 - protein, 237 aa, Unknown
  Obtained from environmental sample
  DOMAIN (29)...(94): His Kinase A (phosphoacceptor) domain
  misc_feature (1)..(237): Xaa is any amino acid
MGLAGIAGIGSLSFAINRKRLLAEHKEQMKSAFLANMSHDMRTPLTGIMGMAELLQDAADETKKRQACRYLHSAAAALLDMVTDITTHAALDAGKLQCARQAFPLRACLESCLDLFRPACAEKGLTLDLDMAAGLPPIVVGDAFRLRQALGNLVGNAVKFTQHGGIRVEVEGESDADGKECLLRLRIRDSGPGIAPEEQAHIFERFAQGRRGQMHYTPGTGLGLAITRELAGLMRGS

SEQ ID NO: 97352 - protein, 200 aa, Unknown
  Obtained from environmental sample
  misc_feature (1)..(200): Xaa is any amino acid
MITKLIKIALMVSIALSVSFTLSCGQHDFWDDIFGPSCGSGGNFDYGYVTDKDGNTYRTVKIGKQRWMAENLATKVYGSVCYGEGGEVLGGGGYSTLSPAEVQANCDKYGRLYGWAMAMELPCECDKDIVELGSYGCTIEATQYQGICPAGWHIPSDDDWDVLMQFVNSSCSDNSQCADEGTKLKATCGWDSDTKRKKSG

SEQ ID NO: 97353 - protein, 239 aa, Unknown
  Obtained from environmental sample
  DOMAIN (45)...(233): ABC transporter
  misc_feature (1)..(239): Xaa is any amino acid
LSPAITAGGEGPPGIDAPVMKVRGLVNRFGSQVVHDGLDMEVERNEVFGIVGGSGSGKSVLLRCILGLLRPHAGTIRIEGKDITTMSAGQLRAVKTRYGVTFQAGALYSSLTVLQNVQLPMIEHLRLKAGELDELARLKIQLVGLPPNAADKHPAELSGGMVKRAALARALALDPLLLFLDEPTSGLDPISAAEFDELVLYLRQELALTVVMITHDLDSIFRTCNRVGVIVNRRMVSDT

SEQ ID NO: 97354 - protein, 155 aa, Unknown
  Obtained from environmental sample
  misc_feature (1)..(155): Xaa is any amino acid
MAQLLLAGGVSALGFEPHNLWPLTILAFAFLAERGFRAARPRDAFAVGWYFTVGHFVVALNWIAEAFTHQDKMPAWIGWLGTFLIAAILSLATGLACALAHWLCRRSPAGRSAAGPSAAAPSATGWAAAAGSRLDAGRVGALQVGSSRVDLQACK

SEQ ID NO: 97355 - protein, 162 aa, Unknown
  Obtained from environmental sample
  misc_feature (1)..(162): Xaa is any amino acid
MAIGTYGRGIYVADIYPMKEFKPEIFDKAAHLFEPAPAIRWNRYYRRGDTYGSPNRADNPPIGVNLYYYLKSDAGKASLVIKDLEGNTMATLAGNAKSGLQKIFWGLTRDMPQNQAGPGGRPGGGGAAGQGGRFGRGPALDLGTYKVTLLVDDKEVGTHRLT

SEQ ID NO: 97356 - protein, 50 aa, Unknown
  Obtained from environmental sample
  misc_feature (1)..(50): Xaa is any amino acid
EVKCKAKVTAIDGKRISFIGEMWDEAGKIGEGTHTRYVINVEEFMKRVGK

SEQ ID NO: 97357 - protein, 214 aa, Unknown
  Obtained from environmental sample
  misc_feature (1)..(214): Xaa is any amino acid
DAFDIAVQLGYMVFDSRLIFTGAATYEENATYGKHIRNGDTIIRLDLNPDAKIITDSKEFETFAANREAGRDLAKYIAENYFDDPKEAQAFMDQINKYIKNSELRDQGYITFWAEMDPVKPNPPGKLERWFMEKGYDYHDSFFDGSFHERLKEFGEEYEAYHKKYGQIQGKFQKEAFSWEEIKEMECDPKYSMYSEKNKTWYADFNQKANLCKT

SEQ ID NO: 97358 - protein, 117 aa, Unknown
  Obtained from environmental sample
  DOMAIN (1)...(100): Restriction endonuclease
  misc_feature (1)..(117): Xaa is any amino acid
VLTYFVKAKVKIINIAVNKNEWADILAEVNTPKWSDLIMFRFIRTQGIVGEMIVRDFHLHLKEVKAGKGICITVGSFNEEAKRYTEARLIDLIEKDRLVAILNAVDAKTAALSGGKK

SEQ ID NO: 97359 - protein, 135 aa, Unknown
  Obtained from environmental sample
  misc_feature (1)..(135): Xaa is any amino acid
SGQFYYSFSHGYVYFMVLSDGEDKPDDHPEYGGLAAFDKYRAEQAKWIEQELQGATAKSALYRVVFTHIPAYIAFEPVGGRATSHSLAMLSKLWTPLFVKGKVDLVISGTPTATSGGKVMRKGANTPCWWPQTKR

SEQ ID NO: 97360 - protein, 90 aa, Unknown
  Obtained from environmental sample
  misc_feature (1)..(90): Xaa is any amino acid
LVFLVFLCIALSAQTGLKITLEENNGAWTISKSQGKTKELAIPETINDKPVIAIGEGAFTGKGLTLVTIPDSVTEIGEGTFSFNDLTTLE

SEQ ID NO: 97361 - protein, 206 aa, Unknown
  Obtained from environmental sample
  misc_feature (1)..(206): Xaa is any amino acid
IKIADHFLKRVEEIKKDMPEGVVIQITFDNTHFVRMALNEVEETIVIAFLLVVAVIFLFLRDFRTTFIPMITVPISLIGVFFIIWILDFSINILTLLGVVLAIGIVVDDAIVVLENIYAKIEKGLEPKEAADKGVNEIFSAVISTTLVLCAVFTPLLFMEGFTGRLFREFAILIGGSVLISAFVAVTLGSMLSSRILTRGKHNRFY

SEQ ID NO: 97362 - protein, 205 aa, Unknown
  Obtained from environmental sample
  misc_feature (1)..(205): Xaa is any amino acid
EISYDNGRTFRQALGKGDWRWRLEPLDLPPGKQPVVVRTSFENGEQAVRRVLLFVDPDAPKVETVAPEEKTVHRDELKVYGAADDIFELTDVNINLRPYDKFWYEVPYAIRGLYIDVKTLGATYFDVGIGLSFFDNNVRFQGQFGVAPPWGARNALVEGGRYVGDVVGFKLIANIVTIPFDWLFRDRDWVFYKVNVGVGAELLLV

SEQ ID NO: 97363 - protein, 204 aa, Unknown
  Obtained from environmental sample
  DOMAIN (8)...(97): Biotin/lipoate A/B protein ligase family
  misc_feature (1)..(204): Xaa is any amino acid
VAVPLIHLGVVDSTQSFLLRHPELGFCGVLADSQTAGRGRGDNSWESSPGAGLWLSARLPVVPQAGVLLSAMEAVAEILGPCDVRLGIKWPNNLVAYKAAGQAKTLVKIGGIIGEQKKDCAILGLGLNIYSAPEMPERAIPPASLVSLGVGPIPSIVKLAQSILSAWQDLKTPRQAAFRWPAQGDRIKWEEGRGTCQGWQDDGR

SEQ ID NO: 97364 - protein, 69 aa, Unknown
  Obtained from environmental sample
  misc_feature (1)..(69): Xaa is any amino acid
VEQDQVSPQVAAAIAGMAGRAKQGAKRLALANRAEKDQLLNSLADALESHAEEILQANQQDVTGRTQVE

SEQ ID NO: 97365 - protein, 274 aa, Unknown
  Obtained from environmental sample
  misc_feature (1)..(274): Xaa is any amino acid
VAVARIAANEIGINFFDDSTYQPERLMYWPACPADADYVFEVFDGPCFDPDEYLAKVADWRDLPLLSQSNRKNALPNGVPAGTKQQDPETKDGIVGVFCRVYNIAAAIAKFLPDIYQQTDVCDRYDYVPAKSSNGLVIYNEGNLAYSFHATDPASDHSRNSFDLVRVHLFKDQTEAASFKAMSELAAADEAVIALLTQERQQQIAEDFADGDWEAKLRYNRHGKLEPSIPNLLRIMRGDPALQGIRLNRLAHQIYTDGLPWKRDVGSSRVDLQA

SEQ ID NO: 97366 - protein, 240 aa, Unknown
  Obtained from environmental sample
  DOMAIN (140)...(240): D-ala D-ala ligase C-terminus
  misc_feature (1)..(240): Xaa is any amino acid
LTVNNRFTVGIIFGGKSAEHEVSLQSAKNVYDAIDRSRFEPVLIGIDKNGVWRSTGDSLSLLNSSDPRRISLNTSGEPVTLAPASAGLLSSQAGSGAKLDVIFPILHGPLGEDGTVQGLLKLAGVPFVGSGVLGSAVSMDKDVMKRLFRDAGLPIGKFLSFRSYERLPSFAEIKAALGSPFFVKPANMGSSVGISKVKNETEYANAVKEAFQYDVKIIIEEFIPGREIECAVLGNENPIA

SEQ ID NO: 97367 - protein, 662 aa, Unknown
  Obtained from environmental sample
  DOMAIN (70)...(95): The GLUG motif
  misc_feature (1)..(662): Xaa is any amino acid
MNVTGTITQNGTGTNVSTGGIVGLNMADGTIDNCSFSGTVSGTGCDQVGGIVGQNNGTVINSRSAATISGRTSVGGIAGVNNGTIENSYNTGNITGTNQVGGIAGANSGTGSFIKIRNSYNTGDITATTTSTANAGGIIGMNQSSSTVEYCYNTGNVTGSTAVGGIAGANQSGSTLQNCVSLGARVTGTGSTNRVIGIANGNMNDNKARTDMKIGASGAEATVSGAATNSNGASVTVGTAMSTFFSGWDTTTIWNTGGNLSVGINLPTLKTNTQTPAPTLPAAYSPPGTADNPFLVATEADLRKVGTETATGGWTLSAYYKQTANITVTSTNNFPAIGTNANKFTGSYDGDGKTITGLTVTATSSYAGFFGNIGTGGTVKNVTITNGTITQNGTGMECIGGIAGLNQGTIDNCSFAGTINSGSNNDDTGGIVGRNSGTVINSRNTATVGGRNNIGGVTGFNNGKIENSYNTGAISGTQQVGGIAGTNSGNSTYIKNSYNTGNITATASTSNVGGIAGNCTTGSLVEYCYNTGTVTGLQYVGGIVGTGGSTVTVQYCVSLSTRVITTTNSTYAGRISGAEGVTMTGNKARSNLILGPSSETGLIYNGTGSNKNGENADVGTSVQTVFTSFDPNIWYIWNLSMTVGGDLPTLRKKEQTPAPKLP

SEQ ID NO: 97368 - protein, 289 aa, Unknown
  Obtained from environmental sample
  DOMAIN (1)...(111): Glycosyltransferase family 28 N-terminal domain
  misc_feature (1)..(289): Xaa is any amino acid
IIFADRAAPSMEERLLSSKFDYRNIKAIPLKRNSIAKNLLLPFNLSSSVLGAAKLLEKEKPEYIVATGGYVALPIMLAAIFKKIPFYAVEPNAVMGVANKICAKFAKKIYISSKVLGNPVRKMPENLPVPEIFADDKKFRILITGGSQGALGINKKIEQISKNLFGNENLSVVWQAGAKHADALIEKYGKVKNVCITAFLDNIYAYMQYADLIISRSGASTLAEILVFGKASILLPYPYATANHQEHNARVVEKEGAAYVELDSEPNALWEKIMNLSGDREKLGNMSKE

SEQ ID NO: 97369 - protein, 141 aa, Unknown
  Obtained from environmental sample
  misc_feature (1)..(141): Xaa is any amino acid
VGYTTLRACVADLERTGRLVRIDAELDPFLELASVQRRAFRVGAPALLFTRVKGTRFPMLANLFGTRERLHFVFRDSVRALEALFRLKADPAELRHFRRYGGVPRLLWNARPRRSLTARRLPAHARRGTAAARGLAERRRR

SEQ ID NO: 97370 - protein, 226 aa, Unknown
  Obtained from environmental sample
  DOMAIN (2)...(226): Amidase
  misc_feature (1)..(226): Xaa is any amino acid
EEITRACLALIERAEPRINALLSRRDNAALEEAKHMDSRGPDASRPLWGVPFTLKDSLLTRDMPTTAGSRMLENFTSCYDAFVVRRLREAGAIIVGKTNMDEFAMGSSTEFSAFGPSKNPWDITRTPGGSSGGSAASVAACQCFASLGSDTGGSIRQPAAFCGCVGLKPTYGRVSRYGGIALGSSLDQIGPMARTAEDCALVLKVIPGHDPRDATCSPVPADGGIL

SEQ ID NO: 97371 - protein, 90 aa, Unknown
  Obtained from environmental sample
  misc_feature (1)..(90): Xaa is any amino acid
MLCSNCKEKLEDYMNFCPYCGTKISVSNDIFTDPRDGNVYKTVKIGNQTWLAKNLVYAAEGSKYYEKKYGRLYNWITAKNACPAGWHLPT

SEQ ID NO: 97372 - protein, 247 aa, Unknown
  Obtained from environmental sample
  DOMAIN (39)...(158): Biotin and Thiamin Synthesis associated domain
  misc_feature (1)..(247): Xaa is any amino acid
VDDVGLGVLYGLYYWKYDTTALLMHAEHLEAARGVGPHTISVPRLRTAAGMAPGDFPYLVSDAHFKQLVAILRLAVPYTGMILSTREPSDFRREVIAVGISQVSAGSCTGVGGYAGSAKLEKESECAAGCAALRQFEPEDRRSPTEVLKTLLKDGYLPSYCTACYREGRTGDRFMQLAKSGQIANVCQANAILTLQEYLIDYGDAELKELGERVIQRELDAMPNKKAREKALEMLAQIKNGARDLRF

SEQ ID NO: 97373 - protein, 63 aa, Unknown
  Obtained from environmental sample
  DOMAIN (5)...(56): Preprotein translocase SecG subunit
  misc_feature (1)..(63): Xaa is any amino acid
MAILSTVLLVFFVIIAILLVLLVLVQNEEGDSLGGIFAGGSGSAFGSRSGNVLIPGYDGFRVF

SEQ ID NO: 97374 - protein, 421 aa, Unknown
  Obtained from environmental sample
  DOMAIN (1)...(390): Ethanolamine utilisation protein EutA
  misc_feature (1)..(421): Xaa is any amino acid
VTGETARKEKSESAINTLSGFAGDFVVATAGSDLESILAGRGAGTADMSRNVWDKALVNLDIGGGTTNIGVFRLGAPADTSCLDIGGRQIIIDPKTNTLTYVAEKMKTLGKRMGIGLAEGRIAAHSDIERLCTRLAEIFAESIGLAPASEDLELFITAHPLRSQWQFAGLTYSGGVADFIYHEYDPGGNPYPYGDIGAVLGNRIRVCPVLNRIERMVPKETIRATVVGAGSNAVDISGSTIAWNDKSILPVRNVPIVKMTADDEGDAYRLFPGRLAEKLTWFKDESGNCQLAAVGFTGIHNPSFELIKDLSVKIIQGMGDYLKTDNPVILIIENDMAKSLGYALMNALPEKKFIVLDSIKVDTGDYIDIGLPAAAGRVIPVVVKTRGVWKMKKRLIRFCRGTSIPSLFSIYSQMWAANSPA

SEQ ID NO: 97375 - protein, 405 aa, Unknown
  Obtained from environmental sample
  misc_feature (1)..(405): Xaa is any amino acid
MNKKHLLAFAFGLMLTFSGYAQSESKGNYFFSVGVYDGIFSRGPIVPFTNFEIKKLIAGTVGGYYELPYGPGNAFFGLEAGYSSGSKFGGSGGVDFIPFDLTAAYVFPLTSFFYLGPRLKLGALGLLSPDWNKAVFTAGARLDAELRSKSFPLGLFVAGGIDIFPIAPELAILPVVEAGIRFPRGKFKKSSSPASAKNKEPPATNTNGSKDDLTGQNITTSTTTIVPDPADTVAIVPQPVEPAPIEPATIVPPLPAPDVAVVPAETPAIVPPPVAVAPVVPTLEEHIPAEVVPEEPATIVPEPAAPDVAVVPAEPPVIVSPPVAIAPVVPTIVEPTPEEHAPAEVIPEEPAAIVPEPAAPDVAVVPAEPAVIAPPPVAVAVTPTEPVSIVPSPVPPPSVVSPPVQ

SEQ ID NO: 97376 - protein, 373 aa, Unknown
  Obtained from environmental sample
  DOMAIN (294)...(372): Alpha-L-arabinofuranosidase C-terminus
  misc_feature (1)..(373): Xaa is any amino acid
MNRIVVKAQDGDVKISRHIYGHFSEHLGRCIYGGYWAGEDSPIPNVRGIRKDVVAALKKIKIPNLRWPGGCFADEYHWKDGIGPRSERPKMINTHWGGVTEDNSFGTHEFLDLCALLDCEPYICGNVGSGTVQELSQWVEYCNFDGVSPMADLRKKNGRGDPYTVRYWGIGNENWGCGGNMTPEFYADNYRRYATYARSYGDAKLYKIACGSPGEDFNWTRVLMEKAGRHMDGLSLHNYTVTGDWSHKGSATEFAESEWLVTMKKAGRMEELVQKHSKIMDEFDPEKKVGLIVDEWGTWFDVEPGTNPGFLYQQNTVRDALVAGIHFNIFNNHAERVHMANIAQTINVLQSVILTEGPSMVLTPTYHVFGGIL

SEQ ID NO: 97377 - protein, 240 aa, Unknown
  Obtained from environmental sample
  misc_feature (1)..(240): Xaa is any amino acid
LAAQIVKPVSEFIEGHTTVAVERASLRLVGANGADSNGIPVPNLIVDQLKGQLEGGALRWYINALLKMGHAPDALNAQIADGFSLKDVPLGDPSQIEAKGGQLASQHISRIQVNRKHRETKLEQFKGKNRDPLLYVIVATGNIYEDIKQAQAAAEQGADVIAVIRTTAQSLLDYVPHGATTEGFGGTYATQENFRIMRTALDESSEKLQRYIYLTNYASGLCMPEIAAMGALDEAGHDAE

SEQ ID NO: 97378 - protein, 339 aa, Unknown
  Obtained from environmental sample
  DOMAIN (227)...(324): Signal peptide binding domain
  misc_feature (1)..(339): Xaa is any amino acid
MSLVLMLGLQGSGKTTSSAKLALRLKKEGRKPLLAACDLIRPAAVEQLTLLAAQTGVPVYREEGASDTVKVFRGALDWAKKNLIDTLIVDTTGRLQIDEHMMDELGRLKDAAKPDELLLVADAMTGQSAVDIAKAFDEKIGLTGVVLTKFDSDTRGGAALSLKTITGKPLKFVGTGEKPEDFEPFHPDRAAGRILGMGDVVSLVEKAQEVIDEKEALALQKKMEKETFTLEDWLQQLRSMKKMGSLKSMLNMIPGMAGQISEEDIDKAELKSQEAILSSMTRKERANHLIIGPSRRSRIARGSGTSVAEVARLLKKFEKMKGMMKKMTKMGKDPNFMLK

SEQ ID NO: 97379 - protein, 152 aa, Unknown
  Obtained from environmental sample
  DOMAIN (16)...(95): PDZ domain (Also known as DHR or GLGF)
  misc_feature (1)..(152): Xaa is any amino acid
MKKVITSLLISAALATVAFAGESETFGGLGISVWTGKDGVKIAGVIPNSPAESIGLQAGDLIVSANGTELSAIEPENQVSHLRGEAGTSISLVVSRDGDVFSVSTKRAGLSVQSLDTKDISDWYGKNQGLTAEENNFLARWDPLESTCRHAS

SEQ ID NO: 97380 - protein, 122 aa, Unknown
  Obtained from environmental sample
  misc_feature (1)..(122): Xaa is any amino acid
MADAAKTTEAGWPAARYQWIFSVQTPVTLPEYAGSMLRGVFGQALRQIACMTRERVCPDCPLYRTCPYAALFETPPPPAHPLQKFSAAPHAYVIEPPPWGRRVYQPGDSLVFEMTLFGQALE

SEQ ID NO: 97381 - protein, 171 aa, Unknown
  Obtained from environmental sample
  DOMAIN (61)...(139): Acetyltransferase (GNAT) family
  misc_feature (1)..(171): Xaa is any amino acid
MHVPDPAALELFRLSLHELDALAELEKRCFTLPWRKEQLAGHLGLPNFAAFGLRTPPGQDSGAEGEASLAAYISFYHGPDELEILNLAVAPEWRRCGCGARLLRFVLYMAARRGIVRAVLEVRSGNAPALALYKGQGFTQVGCRRAYYHDSGEDALILERVLQKPLPFPVS

SEQ ID NO: 97382 - protein, 146 aa, Unknown
  Obtained from environmental sample
  DOMAIN (51)...(145): Peptide methionine sulfoxide reductase
  misc_feature (1)..(146): Xaa is any amino acid
MKRSTLLCILSGVFLAATLAPAAGIPQPKKSGKAGGAAGTESAGGSPDTLRDLYFAGGCFWGVEEYFSRIPGVFDASAGYANGTTENPTYEQVCSGTSGYAEAVHIRYDPQRVSLRTLAEQFFKIIDPFSVNRQGNDVGSQYRTGM

SEQ ID NO: 97383 - protein, 72 aa, Unknown
  Obtained from environmental sample
  misc_feature (1)..(72): Xaa is any amino acid
GSHTISLTVPTVVAIAALTGQKLTLGLSVPNILLLTATLLLCQTSLTGGRTNAHSGSAHLILFAVYVMLIFS

SEQ ID NO: 97384 - protein, 378 aa, Unknown
  Obtained from environmental sample
  DOMAIN (6)...(64): Polyribonucleotide nucleotidyltransferase, RNA binding domain
  misc_feature (1)..(378): Xaa is any amino acid
MVKTQLYPAMEALEEKALASEAVVAIVGEDGSLKNLAKAAFKDIERDTMRKMILDEGVRIDGRKTTDIRDIEIQLGILPRSHGSAIFQRGETQALVTCTLGTKNDEQHIETLQGDVTKSYMLHYNFPPYSVGEVKKLGMSRREIGHGHLAERSLNAVLPTPEGFPYTIRVVSEIMESNGSSSMASVCGGSLSLMDAGVPISSPVAGIAMGLISEKGSVNEGGKIEILSDITGTEDHLGDMDFKVTGTEAGITAFQMDIKIKGITPEGVGKALEQARQGRLHIIGKIKEAIPEPRTKLSRLAPTMLQMRIPTTKIRDVIGSGGAVIKKIQAQTGCKINISDDGNLEIAAPGAKAGSMAKQMIEEITSEPEPNKVHKGKV

SEQ ID NO: 97385 - protein, 266 aa, Unknown
  Obtained from environmental sample
  misc_feature (1)..(266): Xaa is any amino acid
FCNCKNFLSLIIPKSVTKIVQGTFLGCTGLTSITLPDSFTSIENGAFSDCKSLTAIIVDANNPVYISDGGVLFNKNKTSLILCPAGKTGTYIIPNSVTNIGEDAFCGCTTLTSVIIPNSVTKIGWNAFFRCTGLTSITIPNSVTGIEGYNNKNTGAFQNCTSLTSVAIGNSVTSIGKDAFYGCTSLTSITIPNSVTSIGYRAFEYCDTLTSVTFATGSNISDADFGGSAFPEKWGYPSSGNTLKTAYSTGKAGTYITETDTWKKRS

SEQ ID NO: 97386 - protein, 312 aa, Unknown
  Obtained from environmental sample
  misc_feature (1)..(312): Xaa is any amino acid
MEFRTTRGGAPDFPLFLPVNRSNTLPEITYMTPNSRFGPVERATTASGIVNYFIPLDEISYSMDGGETYKQIEFTRKYGRAWFNEFLDFSDINARGMELVVKVVDRAGNTVEASPEVEFDSNATAARIVHNVPEEGDVITRDFEISGLAYTDVGVSSVMWRILSPKNPWDPPEVTLAYGGDIEFKRIDTPQNYLVNVSLSEVRDGENILEIYAEDIYGVPGEMVTKVFGVSTAVPVTAVVEPSRDIWNKGNIIIHGTSFDRNGIDEIKISMDNGISYQRADVIDNQDRPSLWTISLNTRVYMDGQYSMGQER

SEQ ID NO: 97387 - protein, 91 aa, Unknown
  Obtained from environmental sample
  DOMAIN (8)...(76): Peptidase S24-like
  misc_feature (1)..(91): Xaa is any amino acid
MAEMYLVKARGDSMLPKISNGDIVFVRRTNTAENGDTVICVNDGEGLIKKYQKDKKQIVLSSLNSEKYAPFTAAGDFRVEGVVKGVLSYKF

SEQ ID NO: 97388 - protein, 265 aa, Unknown
  Obtained from environmental sample
  misc_feature (1)..(265): Xaa is any amino acid
MPAKRKYKDSVFTSLFKDKKRLLELYNAIEGTSYKDPNIITINTLEGVLFANRQNDISFTIGGKLVVLIEHQSSVNENMPLRFLIYVSKVYEKIIDPKGIYKQSLIKIPRPEFIVLYNGVEKYPREKILKLSDAFEQIGIKKAPELELSVRVLNINKGHNPKLEQRSKNLAGYSAFVAKVREFQSNGKPLKEAIEKAVVYCINKGILRDYLKQNSSEVVNMLSTKFKLKDALAVAGEEGEVRGIKKLLALWEKGIPLTEAKAWDF

SEQ ID NO: 97389 - protein, 213 aa, Unknown
  Obtained from environmental sample
  misc_feature (1)..(213): Xaa is any amino acid
MNISSTKVLLEKCLGLGLSDQYWINNPQNPLEWERINFFENTFSEDVGNALFGKTQNAEIDLFSPDNTSDGWQKKKWIIIDKKRFLLKGGSNPAQQEPLNEVLASMLMRRLNIPHVSYTLTEIDDFPMSLCENFITTETELVSAWHIFSEGKKRQNHISIYEHFLNTCETLGIPNMREYVDKMLVIDFLIANTDRHFGNFGAIRSANTIEWQG

SEQ ID NO: 97390 - protein, 104 aa, Unknown
  Obtained from environmental sample
  DOMAIN (16)...(90): Ribosomal protein L6
  misc_feature (1)..(104): Xaa is any amino acid
MVTGVSTGLSRTLLITGVGYKAEVKGNILILSLGYSSDVYIGIPEGMTITAEASKVVVSGIDKQRVGELASQIRKLRPPEPYKGKGIRYENEKIIFKVGKSGVK

SEQ ID NO: 97391 - protein, 799 aa, Unknown
  Obtained from environmental sample
  DOMAIN (427)...(452): The GLUG motif
  misc_feature (1)..(799): Xaa is any amino acid
TYTIVINISDNVTGDNVTVSPDKGTAGTSVTLSYTVENTAANNQLEFGGVNAEIASVESEGSGTRTYTINSGDAADGVITITAVFTHTNLVIDHIAFSEHNEGHITKTYGDAAFTNAITTAHQGTGQITYHSSDESVATVNGSGQVTIHNAGFAVISAEKAADGTYAHATTTYTLNVNHKSVTITGLSASSKTYDGTTAATVTGTPVISGLVAGDAVTVVTGTAAFADASVGNNKTVTFSGWSLGGAKAGNYTLSAQPASVTANILPDGSATAPFLVTNETELRKVGTGTDGWTLSAHYKQTADINMTGGNFPVIGTTATKFTGSYDGGGKTITGFSQSYTSSNVGLFGYIGAGGTVKNINLTGTITQGGSNSSYIGGIAGTNEGTIDNCSFSGTVSGGANNDNVGGIVGTNDGTVINSRNIATVSGRTSIGGIVGENNGTIENSYNTGNITGNSQVGGIAGANSGTGSYIRIRNSYNTGDITASATNTAYAGGIVGANLSSSTVEFCYNTGNVSTAGTNIGGIAGQNQSGSTVQNCVSLGARVTGTGDVGRIAGSSNGTLGNNYARSDIKIGASGAEAAVPPAGANTPNGGTVNLSTALTVVFSGWNTALWNISGNLTIGGALPTLKTNTQSPAPTVPAAYNPPANGTASSPFLVATEADLRKVGTGNDGWSLSAHYKQTANITLSNNFTRIGNSSTKFTGTYDGDGKNITGLNMSTSSPSFFLGLFGYIGAGGTVKNVNVINGTVTNNGNESTGGIAGANEGTIDNSSFSGTVSGSACDQVGGIVGYNYLGTVTNSR

SEQ ID NO: 97392 - protein, 247 aa, Unknown
  Obtained from environmental sample
  misc_feature (1)..(247): Xaa is any amino acid
AADYARFVNDVLTLAKEKSKESEYGDPFAPSTGKRVILIAHAGANRLIDGGTLGTKGANTPGDFMDAYIDSTWCDESQCFWRGFEVKPADEFNRADSVFSVIVTSETASQDGLNWGISGTITSQIGRELGLPYSFDVVKGFSRLGYFDGMDFAGYNAGNGFFPSLPSAWMRAYNRWATVKEILPRLNGKETVEICAAGYACSGAAQVVKIPINNNEYILLENRQRTNRADGKVSVKMPGGKLVELPV

SEQ ID NO: 97393 - protein, 254 aa, Unknown
  Obtained from environmental sample
  DOMAIN (18)...(254): Aldose 1-epimerase
  misc_feature (1)..(254): Xaa is any amino acid
MKVSKKVFGLLPNGKKVHLYTLKAGDLSLSISTLGATWTSLLVPSRSKGTDDVLLGFGSFDGFVNNSYYGVTVGRFANRIGGAKFSLGGIDYVLYKNDGENSLHGGRMPFSSRVWKAEAYEEQDGVFVRFELKSPNGEEGYPGNLWTAVSYGLTKSNEIVADYMAKVDAPCPVNLTNHAYFNLAGEGRGMDVLSTELKLYCPSYIEVDETLIPTGKILPVKNTPLDFQIRKPIGRDIGEFTSKKIGGYDHCFVI

SEQ ID NO: 97394 - protein, 197 aa, Unknown
  Obtained from environmental sample
  DOMAIN (9)...(196): Class II Aldolase and Adducin N-terminal domain
  misc_feature (1)..(197): Xaa is any amino acid
MDAYKTLREEAFQANLEIKKQNLAIYTWGNASAFDPGKAVFAIKPSGVPYDELSPESMVLVDLDGKIVEGKLKPSSDTKTHQVLYREFSQKTPGSGIKGITHTHSPYAVAWAQAKKSVPVFGTTHADHSTEEIPCTDFISEQALKNDYELETGNLIVEHFRKGKLNQAHVTMVLVAGHGPFTWGNSTSQSVYNGAVL

SEQ ID NO: 97395 - protein, 229 aa, Unknown
  Obtained from environmental sample
  DOMAIN (1)...(229): Lyase
  misc_feature (1)..(229): Xaa is any amino acid
MLGKQGIIPKDSASKIVKELDRIAADIKSGSLKIDASVEDIHSFLETVLTKRLGDDGKMVHAGRSRNDQVAAAFRLYLKRTVPELQNELSTAANVLLDAAQSHITTIMPGYTHLQRAQPVTLGFHLTAWCAALERDFSRFTDALARLDECPLGSGALAGSTLPLDRKATAHNLGFSRPSINAMDSVADRDFALELSSACAITMVHLSRFCEDIMLWSSEEFKYIELAES

SEQ ID NO: 97396 - protein, 205 aa, Unknown
  Obtained from environmental sample
  DOMAIN (101)...(205): Carbohydrate binding module (family 6)
  misc_feature (1)..(205): Xaa is any amino acid
MGPYTLQKMILQNPKEIFNQHGSGSNNHHAIFEFRGKYYILYHTRLLEMAMGVPGSIPREGYRSTHIDEVTILANGSIKEVTGTRKGAAQSGRFNPFELTSAATIGTQAGINTTAVPGEQRMKVTDINSGDWIALYGVDFGGEGAQKFYCRVTPPKSGRGAIQIKQDGPDGKPIGYVNIEPGKSEINRQNLPHTVTGVHDLVFYF

SEQ ID NO: 97397 - protein, 164 aa, Unknown
  Obtained from environmental sample
  misc_feature (1)..(164): Xaa is any amino acid
EYNVLKISGGKDSSESSGDKESSKTSGAKDSDESSRDKESSNGYGGKDSSESSRGKASGDNDSAAEENKTTVQTETGSPKQTTEKRTSVDTKSSVKKYDTVILIKSFEQELPYFPLPKNLEVGPYSLIFEAVGRTNTLSLTESDIFYLGNVEFRLNDISMYLPG

SEQ ID NO: 97398 - protein, 109 aa, Unknown
  Obtained from environmental sample
  misc_feature (1)..(109): Xaa is any amino acid
MKTVKALRARRILTLADARPAARRNDLLAPLSILDNAVVLSKNGLILAVEPYARCKRRTDCLIEDAGEVTLLPGLINAHSHLELAGLKGKTRLGQGFAVWVQSVIALRR

SEQ ID NO: 97399 - protein, 168 aa, Unknown
  Obtained from environmental sample
  misc_feature (1)..(168): Xaa is any amino acid
MPWRICVALAVFALSLVYALPSVPGIGESLLGRVLPDKKINLGLDLKGGIQNTLGVEVSKAIANSLAQTGHDLRATAQEDGVVVLRPRVIAGNVLEFTLPRSEQKEKFQELAARKFSALALGTPIAADAGQLRYTARFTDEHIKQLSDMALEQPLRTIRNRIDQFGVA

SEQ ID NO: 97400 - protein, 77 aa, Unknown
  Obtained from environmental sample
  misc_feature (1)..(77): Xaa is any amino acid
YRVLRHARRYNSCGAGRALGFAGKRVIQDTIGAVLPDRFQTSEFVHEHGFVDAVYHRRDLPDMLAKIIALHGYKGGQ

SEQ ID NO: 97401 - protein, 221 aa, Unknown
  Obtained from environmental sample
  misc_feature (1)..(221): Xaa is any amino acid
MRDAFAEKKASSRFSWREFAKRAGYASPVFLKLVAEQKSSLSPEGVERVGLALGLTNMEQEFFRLLVLFTHEKDNKKKQKLFSEMRHVAALCKSHILEANLYDYYKEWYHSVIRELAPNVSSEMEISKLLTPKIPLPQVKASIALLLKLGLLEKDLKGKYHQTNKHITTGDNINSMAIRKHHENMAALAIEALESVSKDERDISGITMGLSKDGFDAVKAE

SEQ ID NO: 97402 - protein, 129 aa, Unknown
  Obtained from environmental sample
  misc_feature (1)..(129): Xaa is any amino acid
MNVYDEAPDEKEILKRIEACRLAGGKTLDLSRLYMTELPDKVKDLEGLTELNVSYNQLEKLPDWIGALHSLKKLNLRGNRIEILPDSAGELRGLTFLDLGLNTFREIPECLKAFSALEHLDLETLQHHD

SEQ ID NO: 97403 - protein, 212 aa, Unknown
  Obtained from environmental sample
  misc_feature (1)..(212): Xaa is any amino acid
LPKSKFPSGLKFYRIHAQNLSEVQEIFCGDIYAVKGMEHKKTGDYSPLLQMRIECLKESDWEATNAALKSIERMDNSVKATDNSDGSWTLHAMGAVQFDFILSRLKREFRCEVRAGEPSVEFREMLSIKLEAIQNFCQIGDTSVKVSISAEPNCEGFAVEGCENIWKDAIISALDEFCQSGVLGKGTLRNVKFALHKFEVQGNSQASVKKAC

SEQ ID NO: 97404 - protein, 196 aa, Unknown
  Obtained from environmental sample
  misc_feature (1)..(196): Xaa is any amino acid
FSPGKYSGLAGTFKVFAPEYPKFPAAVKHMFVKRHDRSLPALHASNSPVSLAHLVQGRLEAKARNRKELHLVQLWKNWGMAMGNDLAEQVFPLGHREGILLAGGEDHLILQELSYSIPEILMRVNAFMGEDFFAKVELQLLMGRIPLNAIQAAPPPVPLSPVRPEPLGRLSGEGALNPYVEQCYKAYVRCFNLIET

SEQ ID NO: 97405 - protein, 317 aa, Unknown
  Obtained from environmental sample
  DOMAIN (47)...(166): S-adenosylmethionine synthetase, central domain
  misc_feature (1)..(317): Xaa is any amino acid
DIARDIGYTDPSYGLDCNSMAVLDMIHNQSPDISQGVSGTGLKKFKGQQGAGDQGMMFGFACNETKELMPMPIMLAHKILIHAAKLRKNKTIKWLRPDAKSQVTIEYEGHKPIRIDAVVVSHQHDPDITHKDIEETVIEKIINPVLEPTGLLDKKTKYFINPTGRFVIGGPFGDTGLTGRKIIVDTYGGMGRHGGGAFSGKDPSKVDRSAAYAARYIAKNIVAAKLADRCEIQLAYAIGVPFPVSIMVDTFGTAKVDEKRIGKAVEKIFDLSPAGIIKMLDLRRPIYLKTASYGHFGRSEFPWEKTDKVEELKKAIN

SEQ ID NO: 97406 - protein, 89 aa, Unknown
  Obtained from environmental sample
  DOMAIN (4)...(79): Bacterial export proteins, family 3
  misc_feature (1)..(89): Xaa is any amino acid
VSIGEVTMLLRGGILQVLIIAAPLLLSALVVGLIVAILQATTSIQEQTLTFVPKIFTILLVLAFLGSWMFSTLRGYTIELFRKIPDMVR

SEQ ID NO: 97407 - protein, 145 aa, Unknown
  Obtained from environmental sample
  misc_feature (1)..(145): Xaa is any amino acid
KHNNWSISTDTGINLLKPGKTPHDNAQFLLFLVAVIKAVDEYQDVLRVSTASAGNDHRLGANEAPPAIVSVFLGEELTEILESIEAGTNYQGKEKRHMEIGVRLCRISRRIQPTVTVHRLLRLPETSLSSVCLVLLFQLPDPILY

SEQ ID NO: 97408 - protein, 71 aa, Unknown
  Obtained from environmental sample
  DOMAIN (3)...(71): Ribosomal protein S13/S18
  misc_feature (1)..(71): Xaa is any amino acid
MARLVGVDLPNKHVNIALTYIFGIGRPSAEKICQKAKLDPMRMINDLSQEELNELRQIIEGEYKVESRLRT

SEQ ID NO: 97409 - protein, 156 aa, Unknown
  Obtained from environmental sample
  DOMAIN (34)...(156): NUDIX domain
  misc_feature (1)..(156): Xaa is any amino acid
MYCPNCGNICTVIDDNGIKREHCSKCNFINYKNPYPCISVLIVNKHNEVLLGKRHKNSIYPEKWCLPCGYMEYNETYVEAAIREVKEEVGILISPKGIINVVSNKLNNNINSLVIVLIAEYNEDEKIIPGDDITDVSFFNINKLPPLAFDADNFII

SEQ ID NO: 97410 - protein, 250 aa, Unknown
  Obtained from environmental sample
  misc_feature (1)..(250): Xaa is any amino acid
VHVHYNNHGKIFKYINNFIYNPNLLEITYAKNEDYTFTPCNNYFPTPLDAPNVQDKPDIPIGFFDILLDDFSDPQSIIQNASPPKEIPKMFYDNFTMDGKICVKSLYYDGRTFGNNVHIQQSEYERVIKALEEKSFKYYGDEINSFYDALDDYDVSGKRVLVFGLERCNCEAIALWKKAAEVYVVDYNKPTCDHESVHTVTHDELQKLALRFDCAISFSSFEHDGLGRYGDPIKSGRRSAGHEGGGKVFA

SEQ ID NO: 97411 - protein, 230 aa, Unknown
  Obtained from environmental sample
  misc_feature (1)..(230): Xaa is any amino acid
KGDWILSLLDIYKKEPGGIDKLNEKNPKWINDDYVKFIRYAQLYVERAGSGIVAYINNHSFLDNPTFRGMRWNLLKSFDKIYIIDLHGNAKKKETAPDGSKDENVFDIQQGVSINIFVKNSKRILTTEDCCLATPNSLELHGGKESIKLADVYHYDLYGLRNDKYDFLFEQKIDSVKWKKLELSMPQFFFVRKNFANQSQYETGFSLVDTFQLNSVGIVTGRDDLGTVPK

SEQ ID NO: 97412 - protein, 189 aa, Unknown
  Obtained from environmental sample
  DOMAIN (15)...(189): Transketolase, thiamine diphosphate binding domain
  misc_feature (1)..(189): Xaa is any amino acid
MKNPHEEMINLAREARREIVRMIGMSGGGHIGGCLSIVEALIHLYYKEMSIRPEQPDWADRDRLVLSKGHAGPALYTVLGMRGFFSKDLFPTLNQPGTRLPSHCDRRLTTGVEMSSGSLGQGLSCAVGMALAARLDKTSRRVFCIIGDGEQQEGQVWEAAMYAAAQKLDNLTAILDDNGMQIDGMTDDI

SEQ ID NO: 97413 - protein, 431 aa, Unknown
  Obtained from environmental sample
  DOMAIN (5)...(428): EPSP synthase (3-phosphoshikimate 1-carboxyvinyltransferase)
  misc_feature (1)..(431): Xaa is any amino acid
MNVRVTPRRFTGTVRIPASKSHTIRQLLIASLADGESEIKYPLDSLDTRSCLSACKSFGAEIAEQRDGDKIVSWKVRGNGGFKKGVNPGAKIDVGNSGTTLYLALAVAGLQQQPIDFTGDEQIQKRSAAPLLDALAGLGVNSQSNNGCAPITIKGPWKGGKVSLPCPTSQYLSAILIAAPLASAGTVTEIEVPLLNEKPYIEMTLSYLKAHGIPYNTSPDFSFFSIPGGSSWKAVFSSVPGDFSSAAFPAVAAAITGGPVTLLGLDPQDTQGDKFFFEMLNKMGCDVQYNGIGENGQSITISRRGSLRGGIFDLNKTPDLLPAAAVTAAFADGDTTLVNVAHARIKETDRIAVMVQELAKLGIRCTELPDGLVIHGKGALTSINSPVIDGHGDHRIVMSFAAAALGSPVPIEITTAECAAVGSSRVDLQAC

SEQ ID NO: 97414 - protein, 223 aa, Unknown
  Obtained from environmental sample
  DOMAIN (7)...(123): Response regulator receiver domain
  misc_feature (1)..(223): Xaa is any amino acid
MIEIHNLYVCLVEPSNMQAKVITNHLNHIGITQVGRVGKGQEAIESLGGDTPPDVVMSALYLPDMTGMDLITAIRQHPTCSHTPFVLVSSETDPQNLEGVRQAGPVGVLPKPFTENQLLRSMQNTLDFLNAAEIREDDPDLRLSGLRVLIVDDSRLSRRHIRAVLEGIGFEDFTEAVDGRDAIPCLEKTLFDLVVTDYNMPNKDGLGLVDYIKTKSNQCSVPI

SEQ ID NO: 97415 - protein, 138 aa, Unknown
  Obtained from environmental sample
  DOMAIN (21)...(138): Integral membrane protein DUF6
  misc_feature (1)..(138): Xaa is any amino acid
MVKGWSDSKGVAWLLFAVVVFGWGISFLGIQTAIQGFTVLGLVSVRNLLAALGAAAVAFATKETWPERRELPAVLGQGLLLVLCGNLFSAASQRFLSTGVAGLLNSCISLWVVALSSKFEPISRRALLGISIGLLGVA

SEQ ID NO: 97416 - protein, 144 aa, Unknown
  Obtained from environmental sample
  misc_feature (1)..(144): Xaa is any amino acid
MSIDWNWGIFLQQAPFGNTTYLGWIWSGFQVTIALSICAWIIAFLVGSFFGILRTVPNRFLSGLGTLYVELFRNVPLIVQFFTWYLVIPELLPEKIGMWFKAELDPNIQFFLSSMLCLGLFTAARVCEQVRAAIQSLPRGQKNA

SEQ ID NO: 97417 - protein, 66 aa, Unknown
  Obtained from environmental sample
  misc_feature (1)..(66): Xaa is any amino acid
MLRKDDPQFKKLMDDTIAQVQTSGEAEKWFDKWFKNPIPPKNLNMNFELSDEMKALFKEPNDKALN

SEQ ID NO: 97418 - protein, 111 aa, Unknown
  Obtained from environmental sample
  DOMAIN (51)...(74): Domain of unknown function (DUF1610)
  misc_feature (1)..(111): Xaa is any amino acid
MKCPYCDAEFEIAALEEYQKQLQVPEESINWDGKDTAWDENELEELSTGSCPSCGAELLGDKNTASMVCPNCGNSQIVLRRLSGLLKPEYNYPVQIGQKSCGGSFKKFLQR

SEQ ID NO: 97419 - protein, 233 aa, Unknown
  Obtained from environmental sample
  misc_feature (1)..(233): Xaa is any amino acid
MSVMTPGKPPAAGVFSAPRLAPCARGPDKSLDRACPPIETVRMAKARFQAMADKGLPLLRGLLRTDSGRLAVSSCRILPGEEARRLLPDGKLAGDGTSQDQARASALMKLAESYSFYSFWERLPRLPGMVRGGWSEAQAELGSALIDLEEILRSARDAVSPGRLHTARKLFDLMPWTFVPALHLGENRIVWIPAEWFRMLGADNGCSAGNTVTESILHGVRELIERHVCAVIA

SEQ ID NO: 97420 - protein, 164 aa, Unknown
  Obtained from environmental sample
  misc_feature (1)..(164): Xaa is any amino acid
MGINPLYLTIHGHFYQPPRENPWTGMVELQESAAPSHDWNARIAEQCYSPNGVSRIISQYGRIEAIVNNYSNMSFNFGPTLMNWIRVQRPDIYNTIRKGDVLSAERLDGHGNAIAQVYNHIIMPLASEKDKLTQIRWGIQDFEFHFNRKPEGMWLAETAISGIL

SEQ ID NO: 97421 - protein, 134 aa, Unknown
  Obtained from environmental sample
  misc_feature (1)..(134): Xaa is any amino acid
VDLNGDIYHAVPDDEAAWDCGSEKPDPVSGRIYTDWARKKYGSYANDPTKTSPNYCTIGIELCIDAQGNFTPETLQAAVELAAKLLGENKLSVDDIGTHNLIVGWKNCPLPWVKNPALFEDFIDKVKARMGVLL

SEQ ID NO: 97422 - protein, 384 aa, Unknown
  Obtained from environmental sample
  DOMAIN (42)...(338): RNA polymerase Rpb2, domain 6
  misc_feature (1)..(384): Xaa is any amino acid
MMQTAQVMGSNMQRQAVPLLRSEAPVVGTGLEKKVALDSGTLVRAKSDGEVVFVDATCIKVLRDKTNLNYETLGLPPHDIYELRKFERSNQDSCINQKPVCKVGDKVKAGDVLADGTSTDNGELALGKNIRVAFLPWQGYNYEDAIIISEELAIKDTFTSIHIEEYEIEVRETKRGKEEITKDVPNVSEKDRSLLDEEGIVRIGMEVRPGDILVGKVTPKGESELTPEEKLLRAIFGSKSGDVSDSSLRVPSGVKGIVVDTRIFQRRENHASKKDEELRHREEQASKIRAVATDFAERTNLIEEARKPELARLLLGKTSGNVCNGITNEVLVAAGKKWTQDILDKTDFSQLASSSVFCDEPAIQEEVAALLSITNRRITELNDL

SEQ ID NO: 97423 - protein, 264 aa, Unknown
  Obtained from environmental sample
  DOMAIN (1)...(212): Serine hydroxymethyltransferase
  misc_feature (1)..(264): Xaa is any amino acid
VGALAYPRIFDFKAFRDFCNEVGALMMVDMAHIAGLVATGHHPSPVPHADFVTTTTHKTLRGPRGGLVLCKEKYAKDLDKAVFPGVQGGPLMHVIAAKAVALGEALEPSFKDYQDQVVRNAAALAKTLAAKGWRIVSGGTDNHLMLVDVFANGMLGSEAEKALDKAGITVNKNGIPFDPNPPLKPSGIRLGSPAVTTRGLKEADMERVPAWIDEALRNRDKDDVLKRIYREVEALTAKHPIPRVTASLSTPSAHDISFLRTTFL

SEQ ID NO: 97424 - protein, 386 aa, Unknown
  Obtained from environmental sample
  DOMAIN (39)...(386): Phage terminase large subunit (GpA)
  misc_feature (1)..(386): Xaa is any amino acid
VNISNSQVNRLRHFVRAGLRSLFRPEPQTAVEWADANYYLPKESAYQEGRWETLPFQRAIMNAMGSDYIREVNVVKSARVGYSKMLLGVYAYFIEHKQRNTLIWLPTDGDAENFMKTHVEPTIRDIPSLLALAPWYGKKHRDNTLTMKRFTNGRGFWCLGGKAAKNYREKSVDVAGYDELAAFDDDIEQEGSPTFLGDKRIEGSVWPKSIRGSTPKVRGTCQIERAASESPHFMRFHVACPHCGEEQYLKFGDKETPFGLKWTPDDPSSVFYLCEHNACVIRQQELDFTDARYICEKTGIWTRDGILWFSSSGEEIEPPDSVTFHIWTAYSPFTTWVQIVKDWMKTKGDTGKRKTFVNTTLGETWDSKIGERPDAEVMAERKEHIQ

SEQ ID NO: 97425 - protein, 73 aa, Unknown
  Obtained from environmental sample
  misc_feature (1)..(73): Xaa is any amino acid
LSVYDIKELGKQLKKLGMLILQDQVWGRVTANRALKKTTRFYQDEFHLLLKEEQTAAYSVEIWKRFRKWGGIP

SEQ ID NO: 97426 - protein, 259 aa, Unknown
  Obtained from environmental sample
  DOMAIN (154)...(259): Sigma-54 interaction domain
  misc_feature (1)..(259): Xaa is any amino acid
IIQLALAGLDGNRNGTDMANPIKVLIVDDDPGMREGMALSLKRAGFICDQARSGKDALNMTRPGAFDAVVTDLRMTGMDGLQLTARLKALDPSLPVLLVTAFSSLDTAKEAMRLGAFDYLSKPFDNNELVAAVKKSLRTDEKLKAVAIAEAPIILTQDPALAETLALARRAADSRATILIQAESGTGKELFAKLIHSASPRRKGPFVAINCAAIPENLLESEFFGYEKGAFTGATSSKAGRFEQAEGGTIVLDEIGELP

SEQ ID NO: 97427 - protein, 281 aa, Unknown
  Obtained from environmental sample
  DOMAIN (74)...(264): MutS domain III
  misc_feature (1)..(281): Xaa is any amino acid
IQALINHDKIMLTELPRKQFEPEFCNSVLEKHFRTQNELSNLSISASGALLFYLLEQKKSGLSHIIKIESIPWSDYMALDPATQRNLELTAPLHPEDSNSTLLSVMDFTKTAMGGRTLREWISHPLISIEHILGRLSCVEELVDNPMSIDEIGEALKPIPDMERAMGRVGSSRANARDVQSLGKSLLQAEQIARMLKKLKGKKFGEIASKLELAKGKGQEICALLKDELPLTIKEGNLIREGASDEIEDFRQEIKSKKNWLANLESKEKERLGWDPLESTC

SEQ ID NO: 97428 - protein, 266 aa, Unknown
  Obtained from environmental sample
  misc_feature (1)..(266): Xaa is any amino acid
MPRQIRAVRRDPEKAALIASRTNNPNVLRTDFGSGKEYCTNLLGKLLCLIANKYASLDPECLGVEMEGDKPNWCDALNGLPGLFGSSGAESLELLRLISLLKQYLSEIEPAIYTKVAAEIFNFLNELIQITKTIQDNFIFWDKTHTIKEQFREKTRLGFSGKEENCAIGAILEMLAVFEQKLIQNRKAIEDLAENGIVPTCFAFIPESYEINEDAENKRSAAEIARDNATPATDIQAGATAAVMAIAGEKTKSIIVRALNAKIFLS

SEQ ID NO: 97429 - protein, 665 aa, Unknown
  Obtained from environmental sample
  misc_feature (1)..(665): Xaa is any amino acid
MKRSVFCIIALFGFLSVSAFSQNTLYKPFASFRFIETEHFDIIFPKESEQSARLLAFFADSVYDKVSSLLDIEVSGRIPVTFSPHTDLFNGYYNQFFNHIVLYDTPLDIEKMGYNNNLEKLFLHELTHAVSLNTRSPAYKLRHRIFGSLASPSFFNAPYFMVEGVTVSFESLDGTGRANDPRVKQYLRQAVHENKFLTPLQASGVFDRPIRPNGYWYEYGGLFSAWLQQTYGMEKYSQLWKEMGKDSSFSFFVYRSDFYRIFKKVYGVEFTDEWKKFSASFALDGMENNEDELSSRKYRYFAEREYFIAGLTARGNNLYYIESSESKIGVYNTLTGKTKTINAASGIYDIDVSPDGKTMLLSGYKYIEDRAFAIVTEHKTDKGRKTGRDFKGLYKARYFRGGVIGLRSELHNNCIVYENYNGESEVLFKGNEALMFSGPQAVDNERIAFIASIEGKRELWIFNYISRELFKVENTADDNNYREYMRDLGVSDGKLFFSYNSDDRMYKLGIIDLEAMQAVLTGKEFSGGVFSPVCAGGEIYYLAAFVSRNSLLRFPEPVSSVSGNRINLRLTKQEIEDKKTASEPPYTDPSKPYIGLRYMNPLKLWFPLPLIRQKDKDNDFSVKLDGGGIITVMADPTDRNLVYLLAYADVPYKMAMIDQLSGKIP

SEQ ID NO: 97430 - protein, 175 aa, Unknown
  Obtained from environmental sample
  misc_feature (1)..(175): Xaa is any amino acid
MDLRKGYTIQTKNFKKVIVDQKLGEGGQGAVYRVTYDGKPKALKWYSGKKFKNPDKFYSNLENNIKKGKPANAFLWPEDITEHNGAAFGYIMDLRPPEYKDFSRFLIGKEVFSSITAMTNTALHITAGFRALHLKGYSYQDLNDGNFFINPQNGDVLICDNDNVSEYGKNSCIAG

SEQ ID NO: 97431 - protein, 113 aa, Unknown
  Obtained from environmental sample
  DOMAIN (5)...(113): Protein of unknown function, DUF583
  misc_feature (1)..(113): Xaa is any amino acid
MFGGKKKTPGYSYFASGVTLRGRLCFTGVIRLDGRLQGEIIASGTLVVEETAVIIGDILVDNIVLSGTVYGNIRAAKHVQLNASAKVFGHIDYGELSIDGAVHDGSSHKFQHR

SEQ ID NO: 97432 - protein, 317 aa, Unknown
  Obtained from environmental sample
  DOMAIN (206)...(309): Histidine kinase-, DNA gyrase B-, and HSP90-like ATPase
  misc_feature (1)..(317): Xaa is any amino acid
MSDSSGSSEDIPISTVDSPSVVLELIYQLKIKDVMNAAVISARSTDTIRRIQSVMRENYISGLPISDGRELLGIISIEDIIKALEGGYIDEPAETHMTKNVIVLQDDMPLSFAISYLNKYRYGRFPVLNKNKELVGIISSKDVVKSLLVEMNREVMRLEKMHNKETNAQDKFTEMEFTTVRYDFELAGRASTEIKKALKKRNIDPKIIRRVAIASYELEINQVVHSLGGTISCTIQPDKVIIVAADTGPGIKDISLVLQEGWSTADEWIRSLGFGAGMGLPNTKRVSDEFYIESTLGVGTKVRSVVYIDSPKDMEGS

SEQ ID NO: 97433 - protein, 251 aa, Unknown
  Obtained from environmental sample
  DOMAIN (97)...(213): Histidine kinase-, DNA gyrase B-, and HSP90-like ATPase
  misc_feature (1)..(251): Xaa is any amino acid
MNAIIGMVKIGKEAPGIERKDYCFMKIEDASNHLLGVINDILDMSKIEANKFELYPVEFELEKMLRRVVNVVNFRIDEKYQKFSAHIDRSIPRSLIGDDQRIAQIITNLLGNAIKFTPEKGSITLAVRLIQKHNNFCILQFSVSDTGIGITTEQKGKIFQSFEQAESSTTRKYGGTGLGLAISKNIVEMMGGRIWVESDPGKGSTFTFTIQAQCGTEEKHGLLADDINLKNVRILTVDDDPDILTYFLDIA

SEQ ID NO: 97434 - protein, 61 aa, Unknown
  Obtained from environmental sample
  misc_feature (1)..(61): Xaa is any amino acid
AYIKEKAEKAAVKLGDLMMPLRVAITGSRVSPPLFGSLRILGAQESLARVDKALQFLKDRT

SEQ ID NO: 97435 - protein, 495 aa, Unknown
  Obtained from environmental sample
  DOMAIN (20)...(495): Dehydratase family
  misc_feature (1)..(495): Xaa is any amino acid
MAGARALWRATGTKENEFGKPVIAVVNSYTEFVPGHVHLQPVGRLIAEEIRKAGGVPKEFNTIAIDDGIAMGHNGMLYSLPSRDLIADSVEYMANAHCADGLVCISNCDKVTPGMLLAAMRLNIPAVFVSGGPMEAGKATLSSGKEVHLDLIDAMVAAANPDVSEEDMKKIEDAACPTCGSCSGMFTANSMNCLTEALGLSLPGNGTIMATHTERKKLFEQAAKLSVELCNRYYDKDDSSVLPKSIATKEAFENAMRLDIAMGGSTNTVLHILAVANEAGVNFTMKDINELSRSTPCLCKVAPSVNYIHIEDVHRAGGIPAILGELGGAGLLNLNVNMVHSKSLGEYLNKWDIARSSASPEASERFLAAPGRKFNLEAYSQSTKYPNHDLDREKGAIRNLANAYSKDGGLAVLYGNFALDGCVVKTAGVDSSIWKFTGPAVVFESQEEAAEGILNRKVKKGDVVIIRYEGPKGGPGMQEMLYPTSYLKSMGLARN

SEQ ID NO: 97436 - protein, 253 aa, Unknown
  Obtained from environmental sample
  misc_feature (1)..(253): Xaa is any amino acid
NAKELPNCGDVAKEVFKILDLEGKLRDLPEFKELRRQIRTLQKNIESTASRYAGNEEKRRMLQSEIPSQRDGRMVLAVKANFRGRIKGIVHEVSSSGQTVFIEPEEVVEMNNELLIVNRRLDAEIRRVFRELTGRIFSRREDLRTFYRGIVFLETIRSKARYGYENKLIFSENMETEGEGKFVLNQARHPLLGRKAVPLDLFMGEGIRTVIITGPNTGGKTVALKTLGLLALMNQLGLPLPVGEGTLQPVFDC

SEQ ID NO: 97437 - protein, 153 aa, Unknown
  Obtained from environmental sample
  misc_feature (1)..(153): Xaa is any amino acid
MISMIITLCFNLFLPLTTILIYNSGASFPGWNFYEVLLIQSIFTLSLGLTYILFSNVLWATMQYIREGSFEVVLLRPVNPLFYLIATNFDTGSFGLLIGGSVMFGIAIAHTGVVSLAASAQFLFLFIGGFAVMTGFQMVMAATSFKWVGNSRC

SEQ ID NO: 97438 - protein, 87 aa, Unknown
  Obtained from environmental sample
  misc_feature (1)..(87): Xaa is any amino acid
MLSGVFSGSFIPLVFFPKPFQIIQFFLPFQYTSYVPAMVFIGKYTLGDIQLSTPVIVGLQALTLLCLYIMSEILYGLAMKRFTAVGA

SEQ ID NO: 97439 - protein, 368 aa, Unknown
  Obtained from environmental sample
  misc_feature (1)..(368): Xaa is any amino acid
MACLFDYIKWRGDLDFNVSPFNPVDNIIFSQLSYLTLDGIVPAPQDNEGISIALAVRVYNEKSSQPGFKLSSIFKEDHDLIRALGASRRFGNCQLFGFVNNVNEDREIQFSAVCVYTSDDHCFVAYRGTDSSILGWKEDFNMCFKDVIPSQLEAVDYLEKMAPKINGSLRVGGHSKGGNLAIYAASECDSKIQKRITTVYSNDSPGFNKKFIYGDGFNAIKDKIRFYVPQSSIIGMFMEHGTDYTVIKSNESGLMQHNLYSWDVTYNDMVLAEKTTVGSKFVNDTLREWLANLDNVERENFIEAVYHILTVADIKSLSDLDTSWFSLLGRVYKSQSNMEESKKKIIWKTLKELVHSAGRNIETLLKKE

SEQ ID NO: 97440 - protein, 205 aa, Unknown
  Obtained from environmental sample
  misc_feature (1)..(205): Xaa is any amino acid
MLNFADIPYALPAGLLIANILGCFIYIPLIKKSFPFSLKFFGNKIPRELLVYSVPRGFSEVVVSISMRIDVWMILLMLGPGDAGVYAVMSTISNGLRTIRQSYNPIILPVVAGMSKERLATDLKPVFSYCVNMVTLIQLAIGFFIVLFPDKILMIAGKDFIVQPETLGILLLSHLLGGFFLLSAAVLNGIGKSLYTLKMDIASLC

SEQ ID NO: 97441 - protein, 94 aa, Unknown
  Obtained from environmental sample
  misc_feature (1)..(94): Xaa is any amino acid
VAQVLGHTKLQPNIFWESKATFKGLSVNPCIPKAWKEFQVFRKFRGVVYDILVKNPNGVSKGVKRITIDGNAIEGNVLPILEGKKHIVEVVMGE

SEQ ID NO: 97442 - protein, 220 aa, Unknown
  Obtained from environmental sample
  DOMAIN (6)...(216): haloacid dehalogenase-like hydrolase
  misc_feature (1)..(220): Xaa is any amino acid
MSVKVIVTDMDGTFLNDAKTYNQPRFMAQYQELKKRGIKFVVASGNQYYQLISFFPELKDEISFVAENGALVYEHGKQLFHGELTRHESRIVIGELLKDKQLNFVACGLQSAYVSENAPEAFVALMAKHYHRLKPVKDYQEIDDVLFKFSLNLPDEQIPLVIDKLHVALDGIMKPVTSGFGFIDLIIPGLHNPNGISRLLKRMRICHRKMCDPPESTCRH

SEQ ID NO: 97443 - protein, 156 aa, Unknown
  Obtained from environmental sample
  DOMAIN (25)...(156): TruB family pseudouridylate synthase (N terminal domain)
  misc_feature (1)..(156): Xaa is any amino acid
MDKSGLILLNKKAGVTSFKALGDIKRVLGTGKVGHTGTLDKFASGLLVVLAGRALKLSTWFSHCDKQYIGRIYFGVETDTLDPEGRKIAEAPLPSRERAESVLAEFTGSIMQLPPLYSAIHINGERASYLAPSGKTAEMKQRQVSIYRLELRSWEP

SEQ ID NO: 97444 - protein, 94 aa, Unknown
  Obtained from environmental sample
  DOMAIN (1)...(77): Ribosome-binding factor A
  misc_feature (1)..(94): Xaa is any amino acid
ITKVDVSKDLSYTDVYVSEIRGRNAGKGTEGLQSAAGFIQSQLGLSMRIRKIPKLRFHSDTGISESFDLIKKIDELVAPEKESANGQIGINSAE

SEQ ID NO: 97445 - protein, 254 aa, Unknown
  Obtained from environmental sample
  misc_feature (1)..(254): Xaa is any amino acid
IIPWEAAAERIGQLFDAGQYVTPETLADALDNERRELADRLWNFYHDDMGSLPDEWKAEKGGHPEDTAKIKSLLDNPETRQTLINRVSADIAAYNPAEHERHWHNRTSLLYDVRVAGYAPSYPPQAEMDSKPFKYFITQDEVDAQLVNGSNVSDSKFRVLSFFLNHRDEAERVKFLKDEYGTGGGTWSEGNGHENHTPSDGITLQRGDIFTPTAEVNLKWNAVARRIDALIHGGQYMSRPELDYIERYERLIWR

SEQ ID NO: 97446 - protein, 81 aa, Unknown
  Obtained from environmental sample
  misc_feature (1)..(81): Xaa is any amino acid
MPLLQVRDFPADIYEEISFEAKRENRTIAQQTIVLIKKGLGEEISLKEKRQLLIEEIMKRDVPEAAKAIDNVKLIREDRDR

SEQ ID NO: 97447 - protein, 398 aa, Unknown
  Obtained from environmental sample
  DOMAIN (1)...(207): Binding-protein-dependent transport system inner membrane component
  misc_feature (1)..(398): Xaa is any amino acid
VLNSIYAAGTATIISIFFAWGFALCVVRSNLRFREVFSVFVTLPMLIPSISHGMGLILLLGANGILTRFFGLGGTIYGFHGIVLGAVFYAFPVAILMLVDILKYEDGSPYEAAEVLGIPRINQFFSITFPYLRKPLISVVFAVFTLIFTDYGVPLMIGGRYITLPVLMYQEVIGLLNFNRGSVIGSFLLIPAVIAFVFDLLNRDVANQNFVIREKAKPENKLRDAAAACYVILICVIIALPVLVFAFLTFFNSYPMDLSLSFRNIIRTMNMGAGRYLGNSLTIAVWVSVLGTALSWITAYFTARTAGKSSRLLHLVSITSLAIPGLVLGLSYVLFFKGSFFYGGLAMLILVNTIHFMASPYLMAYNSLGKLNINLEDVGRTLGVGRFRIIRDVLIPQT

SEQ ID NO: 97448 - protein, 522 aa, Unknown
  Obtained from environmental sample
  DOMAIN (23)...(118): GAF domain
  misc_feature (1)..(522): Xaa is any amino acid
MEYQLKNTYLAYYWCADDAPPRNAIANLYEFLADIFPVTLPDCSTVPIVVCNDTATNPDAVFQALYAIDVRAVIGAPLYVDGRLWGVMCVEQNSTPRDWTENEKGFVAITASTIAGIIMRDIYTIKLKEALNKAMEASKAKSEFLSNMSHEMRTPLNAITGMTTIGKNAKNMERKDYALDKIEDASTHLLGVINDVLDMSKIEANMLELSPVEFNFEKLLQKTVAVVNFRMDEKRQKLAVHIDREIPQTLVADDQRLAQVVANLLSNAVKFTPEEGSITLNASFMGEEKDVCTVQVSVTDTGIGISKEQQMRLFSSFQQAESGITRKYGGTGLGLAISKSIVEMMGGRIWVQSEPEKGSTFSFTIQARRGTAKEITNDDPETEGQTAKDVHEDIMVFSGCRILLAEDVEINREIIITLLEPTQLEIDCAENGIQAVRMFSEAPQKYDMIFMDIQMPEMDGYEATRRIRALDVPAAKTIPIIAMSANVFREDIEKCLEAGMNDHIGKPLDFMAVMEKLHIYLT

SEQ ID NO: 97449 - protein, 159 aa, Unknown
  Obtained from environmental sample
  misc_feature (1)..(159): Xaa is any amino acid
MIVNENLLTRQIEEYIAYKRSLGYKITIEAQELRRFAAFTRTIDYNESLTSELAIRWASLNPGYSRFYMARRLETVHTFANYIAAFDSNAQIPQTGVFGKCHCRSSPYIYSDEEISLLITEAGKLFSPDGIRARTVSTAVGLLRSTGILVSELTLLKMK

SEQ ID NO: 97450 - protein, 240 aa, Unknown
  Obtained from environmental sample
  misc_feature (1)..(240): Xaa is any amino acid
MPQYVGSVRAQLIGVSQNAFSKDEANIVVKKPLMILQAAPRATKPGDKFKVPVSVFAMDDDVKKTNVSLQVSPELKVIGNNSFTLSFEKPGELDGSFEVEALPILGGAKIIVKAESGKHKIADTIDLPIMSSSAFYTEVLQKQISSGEIWQTKINAFGIEGTHRATLVLSTMPSLGADERLDYLIHYPYGCLEQTVSSIFPQLYIDKLRDLDSKTKQEITGNINSGIKRLTQFSLSQGFS

SEQ ID NO: 97451 - protein, 242 aa, Unknown
  Obtained from environmental sample
  DOMAIN (2)...(242): MraW methylase family
  misc_feature (1)..(242): Xaa is any amino acid
MEAIHTPVLTEETLCYLAPRGKAEFMIDATLGEGGHSAAFLERFPVLRIAGVDADEEIQSRARERLSPFGNRICFYKCWAEEFFADYPAELPSPDTILFDLGISLYHYESSGRGFSFLRDEYLDMRLDTSRGKTAAELIEGLSEKNLADLLYNNAGETYSRRIASAVQRAKKHAPVTTTAALAEVVASAVPAAYRKGPLHPATRTFQALRMAVNGEGERLEPMLKTALERLNIGGRMGVISF

SEQ ID NO: 97452 - protein, 183 aa, Unknown
  Obtained from environmental sample
  DOMAIN (19)...(182): 3'-5' exonuclease
  misc_feature (1)..(183): Xaa is any amino acid
MTPKYKEEAAGYVDKNPEYIWVSDRGSFKAMLAILQQASSCIMDTEADSMHHYQEKLSLIQISVGKYHWLLDPLSKLNIKQLWKCKALKNITFHACDYDLRLLSRFHDFHPESIYDTSIAAKLLGEKQTGLAALVEKYFGIKLNKANQKADWTRRPLSPEMCHYAMLDTVYLEAIKEFQCKKT

SEQ ID NO: 97453 - protein, 189 aa, Unknown
  Obtained from environmental sample
  DOMAIN (124)...(188): KH domain
  misc_feature (1)..(189): Xaa is any amino acid
AALLTPLAEKTIIAVNKIDAPGADFKRAQEFITLRFPAVKVRCYEVSANTGQGIDALLDALYNLAPEGDALYGDEYYTDQETGFRISEIIREQAISRLRQELPHSLYVDIADMEFKDKKFWVRAFIIVERESQKGMVVGKGGEMIKAIRLASLKNLKQIFDWKIDLDLRVKTGKDWRHNDNTLKKIISN

SEQ ID NO: 97454 - protein, 123 aa, Unknown
  Obtained from environmental sample
  misc_feature (1)..(123): Xaa is any amino acid
MTSDLYAKKLEVTADIENLDVVLNFINAELSSYPAELRNNIDVAVEEIFVNIANYAYEPGNGDVAIYISTEQKISIKFEDKGREYNPLEQGEPDLDKPLMERKIGGLAVFLVKKLMDDIEDTR

SEQ ID NO: 97455 - protein, 134 aa, Unknown
  Obtained from environmental sample
  misc_feature (1)..(134): Xaa is any amino acid
MNILDIVGYTPVIELKNIFNAANGVSIFAKAEYYNPSGSVKDRAAKAMILDGINRGLLTKDKILLDSTSGNTGIAYAMFGAALGYQVQLLMPANASEERKKIIRAYGAKVIETDPLEGSDGAYRLAMELAEKEP

SEQ ID NO: 97456 - protein, 394 aa, Unknown
  Obtained from environmental sample
  DOMAIN (130)...(309): Peptidase M16 inactive domain
  misc_feature (1)..(394): Xaa is any amino acid
IPKNREEVAALQLLSSLYSKGGTETLSPAQVDDSLEFLSAKISGSLGSTQSVIHLNCISRDFDKILPLLFAMFNQPRLDSARLELQKSAAIQSYLHRYDSPSSQLGALSARVAYKDNPRLWKADSAAIAKVKRKDLLALKDEFFVPQRVIIAAAGDFNTDSLKNTLTKLFANWKKPKKGARHFSEVEYNNHTGIFISEKDISQANITMVMPFVKRPHPEYYQTAIASYILGGSSFSSRLTNTVRTQNGLAYSIYSFAKSDYEDVALSGISLQTKVESAKIALQLIREEVIKLGKEGPTDEELNFAKKSLIESMPAMFENAETTANTFAVSEFNGRSLEHYREYPEKLKAVTKEQVKAMTAKYFNPDSFKVSIVGSANKMGLDSVTVIPISALEF

SEQ ID NO: 97457 - protein, 254 aa, Unknown
  Obtained from environmental sample
  DOMAIN (1)...(254): Dihydrouridine synthase (Dus)
  misc_feature (1)..(254): Xaa is any amino acid
MLDSTNKHFRYFARILTKQTLLYTEMVSTGAILHNKPEKFLEYNEVEHPVALQLGGSSPKDLAECAKIGEDFGYDEINLNCGCPSERVQSGSFGACLMRESNLVAECIAAMQNAVKIPVSIKTRIGIDNDDSWEFFLNFVESVAKAGCKNWIIHARKAWLKGLSPKENRTIPPLNYEWVFKLKEIHPEFQISLNGGIKNLTEAKEILLSQKADSIMIGRAAYDTPWILASADGEIFGAEAICKDIFEAIEKYLP

SEQ ID NO: 97458 - protein, 275 aa, Unknown
  Obtained from environmental sample
  misc_feature (1)..(275): Xaa is any amino acid
MTEVKTNRNHKDSVFTLLFSEPPAALELYNAVTGQNYPPDTKIEIVTLSNTIFKGQLNDVAFVVDDRLVVLIEHQSTVNNNIPLRMLMYLGREYERITKGKDLYRENPIKIPAPEFIVLYNGRDEFPDFKELRLSDSFKTKGKGNLELVANVYNINKGRNAEIASKSPVLNGYNEFIAEVNRNRETMELTEAIVAAIKNCVERNILVYFLEKYASEVLNMLFTEWNWEDAKQVWQEEAREEGIVETAKSMLKEGLDVVLIERITKLSQKEILALR

SEQ ID NO: 97459 - protein, 125 aa, Unknown
  Obtained from environmental sample
  misc_feature (1)..(125): Xaa is any amino acid
TKGLGDQFCERAQERFGRTRVEGVTFTGSVKEDLAISLEKAFQDISVLIPKDDEQRESLHSVRKIVTTAGNTRYDAAETKAGHGDHFWALALALHAGGKQKGMPWAISSNPWDGPGSAKAILKGF

SEQ ID NO: 97460 - protein, 114 aa, Unknown
  Obtained from environmental sample
  misc_feature (1)..(114): Xaa is any amino acid
MAKKETKKADLNVLTFKFQEMAMPGTGMLNYLPNPDTVLREQGGRIQVYRDMKDGHLGSVRRKRHAGVSSKSWSLQSGQGSYDKARVVETHLWNIGLRDAIKQMMKSLDFGYQV

SEQ ID NO: 97461 - protein, 48 aa, Unknown
  Obtained from environmental sample
  misc_feature (1)..(48): Xaa is any amino acid
LHHVPIVIYSTSDDPSDRAKAKEMGAVDFIHKPAKKAELMEKVKKLMG

SEQ ID NO: 97462 - protein, 243 aa, Unknown
  Obtained from environmental sample
  misc_feature (1)..(243): Xaa is any amino acid
DNVWEITLHGQNLLPNSEIYLVQNGSKIRPQKQTANGESARLVFSGMSLVIGEYSVYVKNPGGLDIALESFVITNKKPFDLNISLGYAPLVPLYGYFFKDSDDFNAPFTDSFYPLSAIVKISYIPFKRVWGYMGAELSGTLSFLKNEKEIYSTQAFFLNTHISLLYQKYFFKKAFAFNANIGAGFSTLLDFYYYYPSGHQTESIINIIPSITFDLSFLVFVFNPLYIRIGADFIHTLPQTTPC

SEQ ID NO: 97463 - protein, 265 aa, Unknown
  Obtained from environmental sample
  DOMAIN (28)...(117): Transglutaminase-like superfamily
  misc_feature (1)..(265): Xaa is any amino acid
FNFSEYQYDLNQGKDSSITALKEFLLDTKEGNCVEFSNTLALLGRFAGIPSRVVTGYLASESLQTNAHLKGIASLREKIPVLQQFPFNNLYMVTNIHAHSWTQFYIPDYGWLDFEATQFAMPPLGAGDFNTWDVVIPILDQNKVFSNVRKFPWRAVLKTAGIMAVFSLVCAYILRYGREAFLFFNSRKGGRKGARSLYLLLLARLAADGNPVKPASKTALEYAELFPAGVSARENPHFREFASLYSELRWREFAWDPLESTCRHA

SEQ ID NO: 97464 - protein, 252 aa, Unknown
  Obtained from environmental sample
  DOMAIN (153)...(250): LytTr DNA-binding domain
  misc_feature (1)..(252): Xaa is any amino acid
MTERLIKAVVVDDEDLARAVVIEHLASHKDIELAAQCSNGFEAVKAVNELKPGILFLDIQMPKLDGFEVLELLDTMPVVIFVTAYDQHALKAFEVHAVDYLLKPFSHERFDEAIERAKARLASGGLTRALAADLVNTAKGDWPLDRIAVKDGPKITLVPLADLDYVQAQDDYVLLKTPEKGYLKQQTISSLEQRLDPGRFLRIHRSYIIQLDRLSRLEKTETESWAAVLRCGAKLPVSKAGYARLKSVIGRE

SEQ ID NO: 97465 - protein, 198 aa, Unknown
  Obtained from environmental sample
  DOMAIN (46)...(187): Phosphoglucomutase/phosphomannomutase, alpha/beta/alpha domain I
  misc_feature (1)..(198): Xaa is any amino acid
MLDAALAYLASPHLEPELKADLESLIKAAETDNNAKIELEDRFSEPLSFGTAGLRGLMAAGIRRMNKPLVRRTTMALASVAKSKATGKLKAVIGFDTRRQSDEFALEAARVLAGAGFDVYLGDRPMPTPFICFALRKLGAACGVIITASHNPKEYNGYKAYDDKGGQVVPPWDKEIESAMAALPTIPEPPKPDADSRI

SEQ ID NO: 97466 - protein, 218 aa, Unknown
  Obtained from environmental sample
  misc_feature (1)..(218): Xaa is any amino acid
VRKGLRERLSRRALGMLHLAWLSEEPGSDGLLFRYIRKVFDARSFMEADLADPDILALRRTADRVACEARLLRGMVRFQKTAQGVYFAAIGPRHDCLTLLVPHFRDRFSGRQWMLYDVKRGYGIFFDGIRCHEAFLPEEAHDNGKLRDALRAEEEKAFQTLWKGYFKALSIKERENPKLQRRCMPRRFWPYLTEMQEEEEPGVGRHGSAEAAHVRPRR

SEQ ID NO: 97467 - protein, 319 aa, Unknown
  Obtained from environmental sample
  DOMAIN (44)...(157): PAS fold
  misc_feature (1)..(319): Xaa is any amino acid
LPKLEWQGRIPFGARLHNGNYFKPAPIAHNSGEQQAGKTNGDNIENAPFGSIMFDKNGKIIECNMRVVKMFELSSKQECVKRFLEFSPKYQPNGKLSRDELAEVTARAYEKGSHSFEWIHQRLNGEPVPYEVTLVRTELGGEIVLMSYMRDLRDTKRMVNEIKNRGLLLSTVNNMASVLLQNHDERNFENSLLKSLELMGQCLDVDRVQIYRNEMIDGEQHFVCRHKWLSEYGKKCTPVPIGLGFSYNKRQEWKKIFLRREHINTLIKDLSQNEKDFLSGYNVKSIVIIPLFLDDYFWGFFNIDDCHAEHKFSREEMEI

SEQ ID NO: 97468 - protein, 189 aa, Unknown
  Obtained from environmental sample
  misc_feature (1)..(189): Xaa is any amino acid
IVLDMPIITYSRRIMDDIGKSLGIICMDLKLDKIEEYVSNVHITDGTYGILFNKQFEIVAHPSPSYLGKSLRQLNDGLSIESDLRQGISISERKVMDYRGNQAIAFRRHLESGRSLSVIIPSKEYCQNWNGRAEFLLVLGFTMAITLSLLLLRITAANNKRERRMGTILKMRHLAALCLIKTAKLLNVI

SEQ ID NO: 97469 - protein, 255 aa, Unknown
  Obtained from environmental sample
  misc_feature (1)..(255): Xaa is any amino acid
GLHACRSTLEDPTIAYDVASVSTGSRGIDMAEWGYNRDGEGLPQVNIGMFLGSESRLPVYYSLCGGSITDKSHLPFMMDSASKLGIGRVRFVLDRGFVTEGNLKYMGREGHMFVTALPQGLLEARRLIDACRGGIRRAANRIGEHGVYGQAAEVELYGSMLCAHVYFDAEKQALDERELCAHVERLEGELERLGRAKRATRRHTDYFVVEEGKAGALRFRRDDAKIDGRLGRAGFFILLTNDAGLASGEALGIYR

SEQ ID NO: 97470 - protein, 158 aa, Unknown
  Obtained from environmental sample
  misc_feature (1)..(158): Xaa is any amino acid
MIAAGLLLEYKHKTSYDDILSDFAFVLGKDVTKRQTKTVSRPYRTGTGSLNFTEMLVEARDAQIDERAKEALTFCKTNGYNTDFCILIDMKIHSGKHRMFVYDFKNMEVERAALVTHGSGKGDKRSTGDAPLFGNEKGSLLTSLGKYKIAERDYSGIL

SEQ ID NO: 97471 - protein, 176 aa, Unknown
  Obtained from environmental sample
  DOMAIN (47)...(173): ATPase family associated with various cellular activities (AAA)
  misc_feature (1)..(176): Xaa is any amino acid
VEVLFKELNGRIGLNQVKHEITTLINTVKINKLREEKQLKQSPLSLHLVFSGNPGTGKTTVARILGEIYHSLGILSKGHLIETDRAGLVAGCVGQTAIKTKEVIDNAKGGILFIDEAYSLSPQDASTDFGPEAIETLLKAMEDYREDFIVIVAGYPDLMKNFLKSNPGYNHGNYVY

SEQ ID NO: 97472 - protein, 380 aa, Unknown
  Obtained from environmental sample
  misc_feature (1)..(380): Xaa is any amino acid
NNLTGWADAHYGITNGGDGKTYIITVSGNVAIPPTGFFANTFGSVKNLTITMQGTGILTLSGNGYLLRIGNGQTVIAKDLTLQGCDNTASVVDVSTGGTFRMEGSARVTGNINSSGSGGGVRISGGAFIMQGEAAVSGNTCGGNQNQEPRGGGVFLNTGSFTMRGKARVESNIASTNYGNANGGGVSVSGGTFTMEGGFIHDNTASGGKYGNARGGGVHVSGGTFVMESGSIQDNTVTGCEIAWGGGVFGNFTMRNGTVSGNTVSVNNIGSNGPAEASGGGVRGNLTMLGGTISGNSAIAGRTTHSNNNDACAYGGGVYGQLTMNGGTISGNTISASNSANANRVIVKGGGVYSLFNFAKTGGTIYGNNAADDLGNIAIG

SEQ ID NO: 97473 - protein, 92 aa, Unknown
  Obtained from environmental sample
  misc_feature (1)..(92): Xaa is any amino acid
DLPGFGVLVSAKGNEYDFVSRCFFPKDSILEDPVTGSAHSTLIPYWSKRLNKKHLNAFQASWRGGRLRCQDCENRVLIAGKAVKIMEGVVFV

SEQ ID NO: 97474 - protein, 271 aa, Unknown
  Obtained from environmental sample
  misc_feature (1)..(271): Xaa is any amino acid
FGSEVLELSKYIFFTDTKGHQLETYSAHIADLLVRVCVEVEAISKELYFDNGGIKPRGSKDIYFDEDCLALLSKLCKTDLKVVKIVATNFHLEKVENKVLTPLKNAHKRSKVFWEKAYQAVKHDRYNSLYKGNVKALLHSMGALFLLNIYYRDIKLTTKYLELHKIDMGFGSKIFTLEVPREDNIIAVINGEEFKNKILESTTSPYIAKYTDIVYKQIVEARKKYLDDRKAYWNSQPELKETAFIQQMLKAEERENKNPYGRVIPFWELCK

SEQ ID NO: 97475 - protein, 115 aa, Unknown
  Obtained from environmental sample
  misc_feature (1)..(115): Xaa is any amino acid
MVREYAYVFGAVSPADGCHDSLVLPWADTEAMSLFLKEVAKRHRGEHVLVFMDQAAWHRSGALKVPRNMELAYLPPYSPDLNPQEQVWDELREKSLANRLFDDLDAVEDAAVEGL

SEQ ID NO: 97476 - protein, 100 aa, Unknown
  Obtained from environmental sample
  misc_feature (1)..(100): Xaa is any amino acid
SQAVACIVDNTQKKLSEAKLAYLHHTLWLNGTIPLLYINNDDKVDVFSCVARSVLKKGSKLVYEPFDTISEKLVNINEQIKRFSADRLADGTFWEDESNK

SEQ ID NO: 97477 - protein, 69 aa, Unknown
  Obtained from environmental sample
  DOMAIN (1)...(69): FeoA domain
  misc_feature (1)..(69): Xaa is any amino acid
MPLSMARTGEENSIKKVGGKEETRQFLANLGFTPGAHVTIVTKNSGNVIVNIKESRVAVSQEMAAKIMV

SEQ ID NO: 97478 - protein, 74 aa, Unknown
  Obtained from environmental sample
  DOMAIN (2)...(74): FeoA domain
  misc_feature (1)..(74): Xaa is any amino acid
MQTLKEVKPGATARVVKVGGGGPVKRRIMEMGITKGVEVYVRKVAPLGDPIEVTVRGYELSLRKADAELIEVEG

SEQ ID NO: 97479 - protein, 340 aa, Unknown
  Obtained from environmental sample
  DOMAIN (17)...(306): Homocysteine S-methyltransferase
  misc_feature (1)..(340): Xaa is any amino acid
MPKNILKELDVLIRERIVIHDGAMGSMLKGYKLSDLLCLSNPELITSVHEAYLEAGADIISTCSFNANAISLAEYGMADKAYEISRAAGAIARQSADKFSASGKRRFVAGSMGPMTKSASIASDLNDPGKRSIGWDELEAAYYDNARGLLDGGVDILLLETIFDTLNAKAAIASVIRLREERKANIPMIISATVSGAGGRLLSGQTIEAFAVSVSHAEPLALGLNCSFGAEKLLPHLAKLSAFTQFPVICYPNAGLPDSSGAYSDGPEEMAGFMKTFFEQRLVNIAGGCCGTTPAHIAAIAELAKNYQPHQLPEKPKTSYLSGLEVLPLPERGSADFINI

SEQ ID NO: 97480 - protein, 262 aa, Unknown
  Obtained from environmental sample
  DOMAIN (1)...(262): Nitrogenase component 1 type Oxidoreductase
  misc_feature (1)..(262): Xaa is any amino acid
MATHYNEPIDIASSSLTEEGTVFGGEANLLKGLKNLIDLYNPEVIGVCTTCLAETIGEDVGAIVKKFYDQNKDTGVEIINVASPGYGGTQNEGWFAALRAVVEQVTPDKTPNGKINVVIPQISPADTRWLKNLFTQMGVDHILLPDISDNLDGVTEKHYNRLKMGGTSLSDVSKMAGAKLTIEFSEYTNADNSPAEYLQKKHGVSFVKLPLPVGVRAMDMLIKTLESSGGVVTKDMNKERGRYLDAMVDSHKYCSRARGGIL

SEQ ID NO: 97481 - protein, 88 aa, Unknown
  Obtained from environmental sample
  DOMAIN (44)...(75): PAAR motif
  misc_feature (1)..(88): Xaa is any amino acid
MPEVARDDDLTGCGALLISGAIKTYANDRLIVRLGDRSNHGGTVISSSESVYAEGKKVARKGDLHSCPIPGHGITAIVTGSENVFAGD

SEQ ID NO: 97482 - protein, 520 aa, Unknown
  Obtained from environmental sample
  DOMAIN (360)...(438): Group II intron, maturase-specific domain
  misc_feature (1)..(520): Xaa is any amino acid
TNKGDVYTVRTANLDEQPVNSRKAALLWDAVDWVKVEEFVTKIQTRIAKAQVKGNRKLVRELQRMLTHSYYAKLWAVKRVTGTTGKRTAGVDNEKWDSPGKKYRGVMKLKQEGYKAKPLKRVYITKSNGKKRPLGIPTMTDRAMQALEALALDPIIESMSDKRSFGFRKGRSCQDAMEHLFRRLASGKCAEWVLEGDIKSCFDEISHNWLLEHTPMDKRILKEFLKAGYVYNKELFPTEQGTPQGGIISPILANFTLNGIDNLMQDNFKQKWVRGERHSISITPKVNPVRYADDFVITARTKEIAEEAKELVRKHIAERGLKLSEEKTLITHISEGFDFLGFNFRKYNGKLLVKPSKKSQQKVKEKIRDVIKSNKSAAQDNLIKMLNPIISGWSNYYRAVAAKETFGKIHNTTFLLLWKWARRRHPHKGRRWIKNRYWKTVGNSQWTFTDTETLLRMSDRKIIRHIPLKLDMNPYIDREYFRKRYRRLLVNRRFGQLPESGTGTKTETGKNRTDDCLHEA

SEQ ID NO: 97483 - protein, 524 aa, Unknown
  Obtained from environmental sample
  DOMAIN (13)...(168): DEAD/DEAH box helicase
  misc_feature (1)..(524): Xaa is any amino acid
MRKFKVVSPFKPAGDQGEAIAALADGIRAGDKYQTLQGVTGSGKTFTMAKIIEEVQMPTLIVSHNKTLAAQLYREFKSFFPNNAVEYFVSYYDYYQPEAYVASRDLYIEKDASINDEIERMRLSAARSMMEREDVIIVATVSCIYGMVTPDVYKKMTATFSKGEILDVDSLIHRFVELQYERNDAVLERGRFRRRGDTLEIYPAYMEEAYRVDLDWDKVERIRRFNPVSGEMLEDLDRALIYPAKQFVMPGEMIQNAMGAIREELKDRLEYYKNNGKIMEAERLKTRVEYDIEMLTEMGYCPGIENYSAHLAGRKVGETPDTLVDYFPKRHLTFIDESHVTLPQLGAMYAGDRSRKQSLVDYGFRLPCALDNRPLRYDEFVERLDKTVFVSATPGKTEIEQSARVVQQVIRPTGLLDPEIEVRPSEGQMEDIYGEVQKRIKAKERSLILTLTKKMAEDLTDYLSGLGLKVRYIHSEVETIERVEILTQLRQGDFDILVGINLLREGIDLPEVSFIAILDADKIG

SEQ ID NO: 97484 - protein, 278 aa, Unknown
  Obtained from environmental sample
  DOMAIN (183)...(213): Putative Fe-S cluster
  misc_feature (1)..(278): Xaa is any amino acid
KKHIESQKIDLSSFPEVEYTSPVPERAAGFSTPGGLMDTAERFVPGISRKIHKIEGIHTIYQYLVELSELLHTDVELSPLVDCLNCEKGCNGGPGTGNHNKPLPVLENPIRKRKAKLEGQLKPQKGDAGIKKYNQNLEKYWKKNLYNRTYKDLSGNNALKTPNEEELKAVFKRLKKFEKKDIYNCTSCGYQSCELMAKAIFNNLNKPENCAHYNIELLKEQTKTEELNRLLKEHINRTTGLIERISHTVHDLNETIEMQAQSVKESSQKTASMIGGIL

SEQ ID NO: 97485 - protein, 250 aa, Unknown
  Obtained from environmental sample
  misc_feature (1)..(250): Xaa is any amino acid
VVKRLTGDDPIPARGLHEKPKTFMNTAQIIIASNMLPRFDRHDTSIIERMVVIPFLVNHAREAKDTKQSKDIMSLLEPEYAGIVRVFADYYIRLKKQHRGVIPISRESNSYKTDVIAEVETDLDKFINVNIAFESGQMERIKDVYEKYLNYYEFDENSAKRGEALSRIRFTKFILKNYKDFVYESTQRVRGADPARAFIGLRLKTLDEIAATEAAKQGEIASTQVSAKPGPAQEPWEKTPATEPDDENPF

SEQ ID NO: 97486 - protein, 136 aa, Unknown
  Obtained from environmental sample
  misc_feature (1)..(136): Xaa is any amino acid
MKVKKKRKNQAQAVLAAPAVSDNKYLALSFIFPVAIMGTVFALNGVYPFGNRQILIGDFAFQSYSFFSGFWHKLREGVVSPWSWTAGMGHDYLALIAYYLASPLNLLTAITPHAWLREALTAILLIKIGCAGLFTA

SEQ ID NO: 97487 - protein, 287 aa, Unknown
  Obtained from environmental sample
  DOMAIN (21)...(176): FAD synthetase
  misc_feature (1)..(287): Xaa is any amino acid
MSLRVIEWPSFLDDSPPDFCSAMAIGVFDGVHLGHQALIERIVRRGPNPTVVTFRENPKKVLSRIAGTETSGQYKRNIYSLKQKIEIFDSLGVKFLVLIDFSEEFSKLKGREFLDLLGNNGKMAFLAVGSNFRCGFAQDTDAVLAKKVNEKKGIPTELIPPVYIKATDSRPVSSSFIRSAVLAGDLDLASGLLGRNFGLDLSDVNCECVESGQIKQKNRGAYAYDLRSVNRIAPVKGQYSVLMFPYGYADGIFGQAYSENGKIFLPIEAESLEFVTDFSPPGFSPPD

SEQ ID NO: 97488 - protein, 83 aa, Unknown
  Obtained from environmental sample
  DOMAIN (6)...(80): Ribosomal protein S15
  misc_feature (1)..(83): Xaa is any amino acid
MALKKDEVDSIIKKFGKNEKDTGASEVQIALLTERINQLTGHCKQFKKDKSSQRALLILVGQRRRMLKYIQVGSSRVDLQACK

SEQ ID NO: 97489 - protein, 255 aa, Unknown
  Obtained from environmental sample
  DOMAIN (177)...(243): His Kinase A (phosphoacceptor) domain
  misc_feature (1)..(255): Xaa is any amino acid
IVGYIYDMTEIFQREMQLTRAGELIEMQITKLNLIVKASKVGLWEMEIVHEDPVNALNTFVWSDELRHMLGYTDEHDLPNMLSSWINMLHPEDKEAALDAFTKHILDKTGKTSYDVEYRLLRKTGEYVYYRDFGESIRDNEGNVLRAVGALMDITDTKNMLKEREQQKEAAEAANRAKSTFLATMSHELRTPLNVIIGLTGIMLEDDRMDEHITKNLVKINNGGTTLLSIVNDIHNFSKVESGKLILSPVECGIL

SEQ ID NO: 97490 - protein, 232 aa, Unknown
  Obtained from environmental sample
  DOMAIN (28)...(232): DNA methylase
  misc_feature (1)..(232): Xaa is any amino acid
MRRIEEYLNTIICGDCLTAMKKMPDNSIDLVVTSPPYNLKNSTGNGMKACTTSGKWANAALQNGYSHYDDNMPHDKYVKWQRNCLTEMFRLIKEDGAIFYNHKWRVQDGLLQDRQDILNGFPVRQIIIWRRKGGINFNPGYFLPTYEVIYLIAKPDFRLVPKANAVGDVWEFTQEMKNGHPAPFPIALIDRIISSTHAEIILDPFMGSGTTAVVAKNLKRNYIGIELSPDYC

SEQ ID NO: 97491 - protein, 241 aa, Unknown
  Obtained from environmental sample
  DOMAIN (1)...(105): Response regulator receiver domain
  misc_feature (1)..(241): Xaa is any amino acid
ELNVDMVEEILKTDYNVLKANNGRQALEILGHAEVLPKIILLDVQMPEMNGREMFEILKADEVFKRVPVIFITAENDSESELLAAGAMDFINKPFKHEIVQLRVRNQIALKNYSDSLEEMVAIKTAEVIKKTEEANKTLDNVLQGLANVIEHRDLESGEHVKRTQLYVGVLANYLIKSKSPYADELFEMQPDIIVKSMALHDVGKIAIPDRILQKPGRLDPEEYDIMKTHTIRGKEIVRQL

SEQ ID NO: 97492 - protein, 197 aa, Unknown
  Obtained from environmental sample
  DOMAIN (1)...(64): LexA DNA binding domain
  misc_feature (1)..(197): Xaa is any amino acid
MKELTKRQKEVLSFISNHINKHSYSPTIREIAEHFSISVKGAYDHVAALKKKNCLKQDGNRSRTMVLTEPKEDDNSKLFTKIPIVGTVAAGVPILAEENWEDTLVLHKSSLKKNRAYFAVKVRGDSMQNAGIMDGDMAVIERQSVVKNGEIAVAVVDDAVTLKRFFKESSRIRLQAENPDYKPIYCQDVRILGRLSQ

SEQ ID NO: 97493 - protein, 235 aa, Unknown
  Obtained from environmental sample
  misc_feature (1)..(235): Xaa is any amino acid
MKKILLPILILLSLGLQAQPNVVYCVRPSGSGIYINPGTPLWAAAGGLDTTMKVVKPGDAIWMLGGTYTPKEPLVLPPSVGMYGGFTGDGITKNLAKRSIIDAQKNYGPIVVLNKHRVLDGFVIQNGLRTGKEKNGGGIWAGDSVVIENCKILNNLAYNGGGVYGKGRVRIINCEVHDNEARAYGADMYGHCLSLATVPFTTLVPPVPSEPPVLCPIPSITAQPSSARYSVVLPN

SEQ ID NO: 97494 - protein, 247 aa, Unknown
  Obtained from environmental sample
  DOMAIN (49)...(138): Elongation factor G C-terminus
  misc_feature (1)..(247): Xaa is any amino acid
IIQERLEREFNMNVITTVPNVSYKVHTTKGEVFEIHNPSGLPNLSTIDFIEEPYIKAQVITKAEYIGAIMTLCIGKRGVLKNQSYITADRSELTFEMPLAEIVFDFYDRLKSISRGYASFDYYPSGYQPSKLCKLEILLNGDTVDALSTLIHVDNSYNFGRRMCEKLKELIPRQQFDVAIQAAIGAKIIARETIKAMRKDVTAKCYGGDITRKRKLLEKQKEGKKRMRQIGSVEVPQSAFLAVLKLD

SEQ ID NO: 97495 - protein, 63 aa, Unknown
  Obtained from environmental sample
  misc_feature (1)..(63): Xaa is any amino acid
MKILLVDDSCTMRRIQKNTLASLGYTDVLEAEDGADALEKIRQSPDVQLTLMDWNMPNMTGIE

SEQ ID NO: 97496 - protein, 95 aa, Unknown
  Obtained from environmental sample
  misc_feature (1)..(95): Xaa is any amino acid
MNAASNVEEDWREFVAKQKEKDLSAIITEENLKADETKKFIDGAFRDGVMKTTGTDIDKILPPVSRFGDGGGRVAKKQSIVAKLTKFCERFLGLV

SEQ ID NO: 97497 - protein, 70 aa, Unknown
  Obtained from environmental sample
  misc_feature (1)..(70): Xaa is any amino acid
MGLEKLEEILDRYSHFGLPLHFTENTIVSGHLMPQDIVDLNDYQIPEWPSTPEGEERQARELPEMYERLF

SEQ ID NO: 97498 - protein, 229 aa, Unknown
  Obtained from environmental sample
  misc_feature (1)..(229): Xaa is any amino acid
MKSILIKGYVFVAVAALIVSVYFIAGVLIFANNQYYEINIENMKEAARALKNFASPEIFSDKDSSNFRFAAEWASLANISGSYRITFINRNGQVIFDTEADSTAMENHLDRIEFQNAINEGIGTARRRSATLGQYYLYAAIAIQDSTGRFAGVLRLSNLIPGFFTRLLNKAFPFLALGFSIILGTCMAIYYFSRRQSLSIETKLNSELNEKTVELKIKAEEADNRKPPR

SEQ ID NO: 97499 - protein, 340 aa, Unknown
  Obtained from environmental sample
  DOMAIN (66)...(227): CDP-alcohol phosphatidyltransferase
  misc_feature (1)..(340): Xaa is any amino acid
MRETRIKPVKIKKRRLKYIAVLPSFITLINGACGFIAIVFASRGTEVRWNVFFVRNLNMSSLVLAGYMILLAMLADMMDGRVARLTRTTSSFGGQLDSLSDTISFGAAPAFLMMKVVEHHIDRPDFYHFGFSLLVGRCILFSAIFYAMCAIVRLARFNVENDENEAAHMNFTGLPSPAAAGVIVSLVIIHQQILPRILARAPEMDKTLDFVTITVFPLITFLSGILMVSRIRYPHLANQLLRGKKSLSMLLLLFACGLFILWNLQLAMVIGFCGFALFGVVRWLIFGIFRKPRRPVSEVKTHEHEISIFRFTVCVPRHIPVNTPRSMELSAKSRPLDRTM

SEQ ID NO: 97500 - protein, 167 aa, Unknown
  Obtained from environmental sample
  DOMAIN (4)...(130): ABC transporter
  misc_feature (1)..(167): Xaa is any amino acid
FQDADAQLIGETVEEDIRFGPANLKLDKNEIERRVKDAMEKFGLTDKKDFSPRRLSGGEKRRLAVAGVLAMGCDTLIMDEPFANLDWPGVIQVLTLIRELKALGKTLIILTHELEKVLAFSDRLAILVRGSIRDSGLPEQVLNRLKPEWGVRDPRHSYAAAADCSWL

SEQ ID NO: 97501 - protein, 186 aa, Unknown
  Obtained from environmental sample
  DOMAIN (25)...(143): Response regulator receiver domain
  misc_feature (1)..(186): Xaa is any amino acid
MNGITEVYSYNEGNVLFVNFIAPDARILVVDDIKTNLTVVEGLRLPYGMKVDLRKNGIEAIKAVQANHYDLIFMDHWMPEMDGVETVKRIRELDSENDYFKNVPIIALTANAISGVNDMFMQNGFNGVLVKPIDTVKLDAFLGKWIPREKQKSPEQAPGKAAEKNRRSNRGNGSVGSSRVDLQACK

SEQ ID NO: 97502 - protein, 76 aa, Unknown
  Obtained from environmental sample
  misc_feature (1)..(76): Xaa is any amino acid
VKIKICGVSREEDIEYVNEARPDYSGFVFAESRRKVTPAHAAKLRQRLAEGIVAVGVFVDAPIDDIVGLCRDGIIS

SEQ ID NO: 97503 - protein, 237 aa, Unknown
  Obtained from environmental sample
  DOMAIN (1)...(193): MutS domain V
  misc_feature (1)..(237): Xaa is any amino acid
TGGIRTLIITGPNTGGKTVALKTLGLFALMNQSGLALPADEGSVLPVFDGIYADIGDEQSIKQSLSTFSAHISNIAAITACATENSLVLLDELGSGTDPQEGGAIAMAVLDFLIEKSSRMIITTHHGILKNYGYTRQGVENASVEFDAQTLSPTYKIINGIPGESRALDIAARNGLAENIVEKARNYLDGEKADVSALISGLKEKHRELNGLEQKTRVEELQLRETRRNADLKETAL

SEQ ID NO: 97504 - protein, 262 aa, Unknown
  Obtained from environmental sample
  DOMAIN (4)...(261): Protein of unknown function (DUF342)
  misc_feature (1)..(262): Xaa is any amino acid
MNGTPLNIKIVTDILEGVDIVYGVRWDAIEQALDECNTSRRQIRDVLIAAGEPAEIEIAEYYELNPIFHKKTARKIDHKGRIDYKEISPFTIVKKGQLLATLKPRRPGKEGMTVRGTALPYGSITPEGVTNGNNTRIEGNTIVADIHGQLIIENKTILNVQDTLIIKGSVDYSTGNIIFPGDVIINGTVSDGFKIFAGGSLTIKQTLDLTRVVTKGDIIVSGGIIGHGTGLIKSGGSIRTKFIENCRVAARNSGLVDLEIIH

SEQ ID NO: 97505 - protein, 210 aa, Unknown
  Obtained from environmental sample
  misc_feature (1)..(210): Xaa is any amino acid
MELKTTVDKSFLELFYKEIECDIENTNSKLNLHVLRIENNKFCYHELIQKLYNCFITYSLSRVEVQTYVDKGRWGELYTKAASKFRNFDENDGEAGELLLYCFLESHLNAPKILTKLEIKLSSNDYAKGSDGIHLLKIKDGEYQLIFGESKLDKKLTTSISEAFKSIHEFVTRDKNNVTDEIGLINSQLFKEAFDEGLYQFLKEVIGQKQ

SEQ ID NO: 97506 - protein, 279 aa, Unknown
  Obtained from environmental sample
  DOMAIN (5)...(169): Glycosyl transferase family 2
  misc_feature (1)..(279): Xaa is any amino acid
MKKISVLVPCYNEESNVVPISGEIIKIFENELPAYDYEIVFIDNSSTDNTRPLLREICRKNRRIKAIFNVKNFGQVNSPYYGMCQTTGDCTIAMAADFQDPPELIPALVKEWENGYKIVSCIKTTSKENKIMRFVRTCYYKIIKKMSDTEQIEHFTGFGLYDRAFIDILRNLRDPTPWIRGLVAELGFKRKDISFVQPKRRAGKTKNNWYILYDLAMLSFTSYTKTGLRLATILGFLMGGLTFAVALAYFVLKLLYWNDIPMGIAPLVIGVFFIGSHAL

SEQ ID NO: 97507 - protein, 286 aa, Unknown
  Obtained from environmental sample
  misc_feature (1)..(286): Xaa is any amino acid
EAEWLSRVKSADIQSLYAAHVNPNGTFFNPWMERPENRGNWRSKDKKAFDDFPAENYSPVENSYSYLLDKNFDSISFAGHASTIIKMNGETIFTDPFFSKSALIVKKKVVVKFDFSNVPSRPVVLISHNHYDHLDKAAIKKMIKKDAVFLVPLKLKKFFTKLGAKEVYELDWWQSVQINQVRYTFLPAQHWSLRIGQKAGSTLWGGWLVQGSKTVFFSGDSGYFRGFEEFGNRFDIDYALVGAGAYEPRWFMHYSHMNVQEFLRASDELKAGLSIPIHLGIISLSD

SEQ ID NO: 97508 - protein, 265 aa, Unknown
  Obtained from environmental sample
  misc_feature (1)..(265): Xaa is any amino acid
MSYNYSHIVPLSSVWAGLRHNEHAGRVSGVDLPHVTCSTLERTPFYLNLNPGGDVGHAAILGPTGAGKSTLLNLLETQFFRYPNSQVFVFDKGRSCRQICLACGGLFFEPASENISGVSFQPLRDLETDRDLANAFDFIESLFKVNDNPVSPAMRAAIKTTLEKMKGIPEESRTITSFLQYCEYIDTVQKKNIFPEQMGDYLYKDGKFGKIFDSSFSGLSLDNRFLAIEMEALMNRGEGCVVPALVYLFNLVEKKIDSQAGSRLT

SEQ ID NO: 97509 - protein, 201 aa, Unknown
  Obtained from environmental sample
  DOMAIN (154)...(201): HNH endonuclease
  misc_feature (1)..(201): Xaa is any amino acid
TDAKRHFSKTGCAAYSLAKDYVSGSAIRQEILETALDWISKGKIKDYMSQNQHEENANELWQYFMKVINWVQTIFPAYRKEMKGLPWGELYNKYEKKKFNNAETEKRIKELMMDDDVTKKSGIYPYLITGDEKYLNIRAFTESQKRSAYEKQKGVCPHCKVHFEIEEMEGDHITPWTEGGKTLPDNLQMLCKGCNRRKGKK

SEQ ID NO: 97510 - protein, 100 aa, Unknown
  Obtained from environmental sample
  misc_feature (1)..(100): Xaa is any amino acid
VRSAGLSSFAGEAVVSWEDFAVGKHYENGKEEPILDRPDRKDVARPIEHSNVLKFRLASGAFMALRPSGTEPKLKVYLQSRTDVALMDRMEAEARALLGL

SEQ ID NO: 97511 - protein, 292 aa, Unknown
  Obtained from environmental sample
  misc_feature (1)..(292): Xaa is any amino acid
IFSALIAHPEIAFKGNRKEHFLEWFVSSEEYKKILDELYLRNYVLVDINDFYTVKYTNNVKTIEVKKFMVPKGKKPIVLSIDDLSYYESNRRNGTVHKLVLDKNGNIAAWTNTSSGGGASSGGEISYDQDIITITEDFIKQHPDFSIRGAKGIIALTGFEGVLGYRTQAERSKTTGYQKEKEDAIAIANKLKELGWRFASHSYRHLNMPKASMSSFINDNKLWDNEVKPILGETDLYVYPYGAALERIEEKHRILRSMNFNLFFSVGSGYGYRIGPKSEYVYLSRMNIDGRY

SEQ ID NO: 97512 - protein, 274 aa, Unknown
  Obtained from environmental sample
  misc_feature (1)..(274): Xaa is any amino acid
MKKIISVCFLGFFITASAFAATAVTIDTALKNSNTYLNSRIPARTKVVVLNFTSIWPNLSDYIIEELIGYIVNDGALTVVDRQNLEVIRKEMDFQLSGEVSDDTAQAIGKKLGAQAIISGSITAIGKTYRLRVRAISVETAQILGMQNIDVAQDSRIAALTKNTQSLPAVASSNASKTVNAPAAIDSYIPRASDMYVVTDAQSKGKSTGSFNINKEVINGIEYNVINLTITLNKSNEYSYQWGDLNIQGSILESARKASGIRFTVYGDGKPWFL

SEQ ID NO: 97513 - protein, 219 aa, Unknown
  Obtained from environmental sample
  misc_feature (1)..(219): Xaa is any amino acid
VDADPSLPEPHYHLARYYHHLGNTHEERVTLRIAVKTFEEAPEVSIRRVKYHIDAIQRYADVLINDREFMPAEENLIKGINLYEDAVARRLISRSPQYGRLYAGMGDLEYFTKTGDMETALRYYRQSEQNGWAPPEMQYRMGSAYYQLEDWKNAMEYLFTASSNLPLNRRVLFALGNTALKRGNYFAAQGYYNRLLDILESQRSRLPVLLPNDRPEYLE

SEQ ID NO: 97514 - protein, 274 aa, Unknown
  Obtained from environmental sample
  misc_feature (1)..(274): Xaa is any amino acid
PRREHLDLIRAALAERADIEALVLQRTIAVPSSGDLRDATLAGHAQARALLKQVHADVMIWGNVLYAGGKSALSLHWTAGADVAPKKSFGRYSPDEAHDLDLPELFWNDMSDVLGMLVAAQRTRLSEQEGHLIADQLKPFIDRVRSLLANSALSPVKKAPLLDALEYSLLTYGEQQGDNASLEEAIAICQQELQGRPRERMALAWAATQNNLGDALEALGAREPGTERLTQAVAAYREALKERTRAQVPHEWAITQNNLAQALAALGARESRSA

SEQ ID NO: 97515 - protein, 165 aa, Unknown
  Obtained from environmental sample
  misc_feature (1)..(165): Xaa is any amino acid
MLNRYQRAFALLILTAILTAILTATPAPADAPDARSVYGATPPATFTLYALDPELLAGWNTPLRDYEKKYIPAKYHDLPILGGWYGQGFVPDRETLLASGLKKAFYLSQGFHDPLPISETLTKLGLEVIRIPGARLADQAPAFRAMGRAFNREARGEALAAYAEA

SEQ ID NO: 97516 - protein, 202 aa, Unknown
  Obtained from environmental sample
  DOMAIN (1)...(202): Uncharacterized protein family UPF0027
  misc_feature (1)..(202): Xaa is any amino acid
MIEVKGKYNSAKVYTDTLDEKSREQIETLCNQPFVSGSTIRLMPDVHMGAGCTIGTTMTITDKIVPNLVGVDIGCGMETLVIPKDDPVSVDFDPARLDALIYKKIPCGRDIRKSAHEYVKSVPLENLRCQKINLIRAVRSIGTLGGGNHFIEADRDDDENLYIVIHSGSRHMGLEVADWYQNEAWNQLNGRRKADIYAEIER

SEQ ID NO: 97517 - protein, 119 aa, Unknown
  Obtained from environmental sample
  misc_feature (1)..(119): Xaa is any amino acid
MNNHADAQQIEIELEGQTLPVKHGENIRSIFRKHLHKRKGGEAAPHMARAPLAAKLNQNVVGLDTHVTYPCRLTPLYIDDREGSAVYRRSASLLLLEAIKETFPKSRAIVGQSLAGGYY

SEQ ID NO: 97518 - protein, 91 aa, Unknown
  Obtained from environmental sample
  misc_feature (1)..(91): Xaa is any amino acid
MWGSVVRGEKKNIFPFQGEADFMFNSSLVYEPAALRPYAERYLLEVPTDDDSFGEAYRLLHFVRTFAPIFPDEIPRTSILREFIGGSGFEY

SEQ ID NO: 97519 - protein, 235 aa, Unknown
  Obtained from environmental sample
  misc_feature (1)..(235): Xaa is any amino acid
MKRIGYLIEGIAEPENLRLAFWKAKKGKSDREEVRAFGNDLDKNLLTLREGILSGSVSVGGYRYFKVFDPKERLICAADFSERVLHHAIMNVCGPLFERFQIYDSYATRLGKGQFAALERVRGWIGKDMWFCKLDARKFFDSISHGILFRQLCRVFKDGRLLDIFGQIIDSYSASPGRGVPIGNLTSQYFANFYLAHLDHFVKERLGVSRYVRYMDDMVILHSSAERLLDFSKGV

SEQ ID NO: 97520 - protein, 106 aa, Unknown
  Obtained from environmental sample
  misc_feature (1)..(106): Xaa is any amino acid
MFQIKNLHASLADGTEILKGLNLSIGKGEIHAIMGPNGAGKSTLSKVIAGHPGYKVTSGSVDFLGKNLLELSVSERANSGFFIGFQYPLEIAGLGNEEFLRAAIDA

SEQ ID NO: 97521 - protein, 295 aa, Unknown
  Obtained from environmental sample
  DOMAIN (78)...(289): Glycosyl hydrolase family 3 N terminal domain
  misc_feature (1)..(295): Xaa is any amino acid
ADTKNDRIVSPNDNSQYDYWLSKLTIEEKIGQLIMIRLHWHTKGVDAKTRELMKDVPVGGVALFRDNMETTEQLLKLTKDLQALGRLPLFIAIDEEGGRVSRVGKFYDKPTPPAYEIGKKGDTAIASANARVIAQRLAKLGINMNFAPIADIWSNPDNTVIGNRAFGKQPDIVGEMVEATIRGFASEGVLSVTKHFPGHGDTKEDSHHQLAIYPHGRERFDQIEALPFIKASKAGTDGIMVGHIITPAFKESDKLPVTFSNFWLQDILRREIGFDGLIITDGLDMRALTDNFTAA

SEQ ID NO: 97522 - protein, 124 aa, Unknown
  Obtained from environmental sample
  misc_feature (1)..(124): Xaa is any amino acid
MENSIKSKNYWIKLVPILIWHILYLVFSSYFDKYTWVYCDLVFYFVVAVYFFLWRDWRFSEWKKALKQGKSFWLPVLLTAFGMAAAFGADIGIMMLFPNVDDGMGVFGVNSWGTLIAFAFVTVL

SEQ ID NO: 97523 - protein, 287 aa, Unknown
  Obtained from environmental sample
  misc_feature (1)..(287): Xaa is any amino acid
DAVDDVTKELDLPITPEISDALADVSGADIENRLDTMFGASAGTGSDAPSASAEMDEAALAAALEAEDAAPPPDLSASAESDEAALAAAPEAEQTSISGDDIENRLTTMFGGAAAATAVTAAALAGSKTLPTSAETDGAASAERDEAAVAAAYGMTDEPALVVDGTDAAPAEDAAPPPDDTAAAVKLPSSIVLDENGVDVARTPTPEDIEDRIDTMFGKDPSAPKEPLVVDEDEPEVKTEDPKTTPAPEEAVGMIDGEEMNGDDVKARLSEMFGASESDTTTAMAVK

SEQ ID NO: 97524 - protein, 235 aa, Unknown
  Obtained from environmental sample
  misc_feature (1)..(235): Xaa is any amino acid
MYLKYVFGALIILSGLLLHSCSSYSKIIKESYQKLEKYNVKTIDTEYGIMSYVDEGSGEIIIISHGIFGGYDQGYKNLYSIFGENYRKIAVSRFGYPGSNLPKESTPKNQAKIFLNLLNELQIDKVFLIATSAGGAPGIRFALDYPDRVKGLILLSSGVPSIPMTKKEIGMSGPPKFILNDKLMLFFTRNFKGIFYSMFGSKNVSDEVFDDLLPVKPRKQGIIADTEITNIDMAV

SEQ ID NO: 97525 - protein, 196 aa, Unknown
  Obtained from environmental sample
  DOMAIN (1)...(196): Glycine cleavage system P-protein
  misc_feature (1)..(196): Xaa is any amino acid
MPFISVTDAQRAEMLRTCGASSIDDLFTDIPDTLSPHPSAKDFFNTEGLSELEALTECERLASANDTRLISFLGGGFYDHFIPAAVDAIASRSEFYTAYTPYQPELSQGTLQAIYEYQSLICRLTGMEISNASLYDGGTAIFEACKMALASTDRHTIVIDGGVNPIYRKMLKSHTVNLDVDIIEAPPLRDGTLDRS

SEQ ID NO: 97526 - protein, 145 aa, Unknown
  Obtained from environmental sample
  DOMAIN (28)...(71): LysM domain
  misc_feature (1)..(145): Xaa is any amino acid
LKIPAEHLEKVSNILESEDLPLIRYHYHVVKTGDTLWSMSRSYGIAVNVIEQHNPGIAGRYLKIGETIIIPAFGNAPLPKIESVSVPVTAPPNFTGSYVVQKGETFWSLSRKYGVDPQVLAEANGLKITDILREGRTIRVPIILP

SEQ ID NO: 97527 - protein, 277 aa, Unknown
  Obtained from environmental sample
  DOMAIN (2)...(275): Alpha-N-acetylglucosaminidase (NAGLU)
  misc_feature (1)..(277): Xaa is any amino acid
DLFHEGSAPKGINVGRTYRDVYDAMKTHSGAKNPSWVLQSWGANPSQVALDSLTPGKLLVLDLFSDGQKRWSNSYKQSNGTPHNFVFCMLHNFGGRTGLHGRLTKTIHEFYNAKTMFPNTMQGVGATMEAIENNPVVYEALFELPWRAQKTEAAEWIKAYSKFRYGVYNEAATQAWTLLNHSIYNCADGQQGTTESVLCARPAMEIKSVSTWGTAKIYWNTQDVRDAAALLLSQNNYLSGDNYHYDVVDIVRQTLADYANELLQRITGAHDDHRYEL

SEQ ID NO: 97528 - protein, 289 aa, Unknown
  Obtained from environmental sample
  DOMAIN (109)...(142): Tetratricopeptide repeat
  misc_feature (1)..(289): Xaa is any amino acid
LLNSSNDKALIKSGNAYYDKKDYDKAIEDFTAAIKIKPNDPVYLNIRGKAYYDKKDYDKAIEDFTAAIKIKPDDPVYLGNRGNAYYDKKDYDKAIEDYSAAIKLKPDESIYLNSRGLAYYNKRSYDVAVTNFEAALRINPNYGSAKENLEYVRQARGTATAKSTFTDSAPAKPTETEITKKAVTKENLEYTKQAQNMATAKSTFTDSRDGKIYKSVKIGNQVWMAENMNYNADGSKCYDNKESNCAKYGRLYNWETAKKVCPSGWHLPSNVEWDILYRFIDGTNGKFSP

SEQ ID NO: 97529 - protein, 262 aa, Unknown
  Obtained from environmental sample
  DOMAIN (5)...(260): FAD dependent oxidoreductase
  misc_feature (1)..(262): Xaa is any amino acid
MKTRELVILGAGPAGLTAAVYARRSDLDVLVIEKGLPGGQIRITAEIENWPGLVNSTGVGLADSFRRHAEHFNAEFLTAEIKGLRLEGGRKVVATSAGDIPAEAVIVATGASFQRLGCPGEDKFIGCGVSFCAVCDAEFFIDETVAVVGGGNTAVEEALYLTRFAQKVYIIHRRDEFRADPLVRRRAAQNGKLVPVLDSVVEAIEGGDLVERVLVRNVKSGETKPLEVAGVFMFVGTRPQADFLDGLLERNEGGWLVTDRNL

SEQ ID NO: 97530 - protein, 308 aa, Unknown
  Obtained from environmental sample
  DOMAIN (105)...(279): Protein of unknown function DUF115
  misc_feature (1)..(308): Xaa is any amino acid
ANSAVLCIEPEPELFAISVGHFSQALKQSSKLCLTNRREAAQLCALIRKEWGSRVFRRVQILRLNGGWQLYPYLNELADSLQREIALDWGNAITLAKLGRRYIRNMIRNLALISKHPSIEGLSFGAEPVLALGAGPSLDAALDSLVQSFGEHCLQPETRLFRIVCADTCLQALRAHGIKADLVIILESQHWNLDDFTGLSGWDIPAAFDLSALPGSANVLGNRLFLFFTPWTRLNIFKRLESAGLLPASMMPLGSVGLSAVAISMRLTQGAIITAGIDFSFTLDSYHARSTPGHLARLRRQNRFQGLF

SEQ ID NO: 97531 - protein, 280 aa, Unknown
  Obtained from environmental sample
  DOMAIN (3)...(280): Protein of unknown function (DUF1343)
  misc_feature (1)..(280): Xaa is any amino acid
MNVLNGIDRLQHEDFGLKGKRLGLICNPSGVSKSLVSTIDILKKQFNLRALFGPEHGVRGDIEAGDKIETYTDKRTGLPVYSIYGKNDEKGEGDNRPGAAMLEDLDMLLMDIQDVGCRFYTYESSMYNSMEACAKTGKTFVVLDRINPINGSDVEGNILDTAFKSFIGIGPVPNRHGLTMGELAQYYNKECNIGCDLKVIPLSGWKRHMYGDEAGFHWVNPSPNIPSLEAAILYPGTCLIEGSNLSEGRGTTKPFEVIGAPWLDAEALADTMNAQEHPGL

SEQ ID NO: 97532 - protein, 64 aa, Unknown
  Obtained from environmental sample
  misc_feature (1)..(64): Xaa is any amino acid
ERGVSRGKTPALQMRTLAARFKKHLVWIPLSTFSTETLSRMRRFHVLNGKQVRSWASRFIGDEL

SEQ ID NO: 97533 - protein, 117 aa, Unknown
  Obtained from environmental sample
  misc_feature (1)..(117): Xaa is any amino acid
MISLIEDLYQNKDLPDTQLKKIIESNENEQELFKKADSVRREYYGTDVYIRGLIEFTNYCKNNCYYCGIRKDNKKVKRYRLNKDEILSCCEQGYALGFRTFVLQGGEDSAFSDDLIC

SEQ ID NO: 97534 - protein, 287 aa, Unknown
  Obtained from environmental sample
  misc_feature (1)..(287): Xaa is any amino acid
MKIKYKLSVMMIAIVLVVAGGIAIIELVRSSAIVIDLAKQKTMYLARQRALYWDGRLNGYISTLQALSNIFNFYEEIPVENRRRQFEDNLEGIFGDSPDFIRLGNIWKPNAIDGQDARNIGRAGSTPTGQFAFTLSRETGQIVKSASLVVSDAMAIMNGPNSGVVNMSDPVPIKNLGKDTYAVTIYVPIINKRLNETVGVVIGRLDIGMIQPILEKAIKDNEEITSASIYTDNGFILANYLPGFVGRQIDEETQYGKDLSKVKEAIKNAKEWQGTEYDHELKDDMVM

SEQ ID NO: 97535 - protein, 271 aa, Unknown
  Obtained from environmental sample
  misc_feature (1)..(271): Xaa is any amino acid
LDSGVFAAPRRGFVYLERDTPFNRGRRGLVAAVDLERYSWSPGARPLIRPTEGTVPERLPPRMDIRRNAPLETPHILLLIDDDTDSLLRGLGERAKKATPAYQGELMLNSGSVNGWFLDKEDDWSFLAGGLEELARRALTRYSAGEQPESAAQPGFVTQPFLFAVGDGNHSLASAKGIWEEHRSGANLSAPRSDKIRSRYALVEIENIYDPAIQFEPIHRVVFGVDFDGALNLLSALPAYSSRIISGREELVRLTAEPVKGNRFGIVCGSR

SEQ ID NO: 97536 - protein, 264 aa, Unknown
  Obtained from environmental sample
  misc_feature (1)..(264): Xaa is any amino acid
MPKIEVNEKVFYALASPNGKPWADKDAFEEALTCAKAELDEDSDKSLPESERVLKIELNDTNRPDLWGTAGCARQLRVYNGGKMPEYPFFSRVGNIQKAAHKVKVEQSVQKVRPYLAGFIASGKAISDPALRDMIQTQEKLAWNFGRKRRTISMGLYRIARINWPIIYKGVDPDSVSFVPLQWETSLTLREILKQHPKGKEYAFIQEHEPIHPLLTDSKGGVLSYPPIINSADLGAVQVGDTDIFVELTGTDISLVTLAASIVA

SEQ ID NO: 97537 - protein, 213 aa, Unknown
  Obtained from environmental sample
  misc_feature (1)..(213): Xaa is any amino acid
MNLNKLRLKWKIFAFLLGFSALLLIVLWLFQTILLDTFYKKIKVTEIRRSAAVIINNIESENIDKIIADISENNNITVNITDLNGRSLQGTRIFPSDNRRWFEENMALITKARNNNNEFHEYIRSQAGDRFRNNRENERTESGGAVYRRGLPIQSLIYVKMANNRQGEQYAVIIRAVISPVNATVTTLRYQLYYISCIILFLSVILAFIIAKR

SEQ ID NO: 97538 - protein, 52 aa, Unknown
  Obtained from environmental sample
  misc_feature (1)..(52): Xaa is any amino acid
VSREKILTEVWGYKNLNDVRTRDTHMKLLRKSMGQYASLITTLRGHGYRFEG

SEQ ID NO: 97539 - protein, 96 aa, Unknown
  Obtained from environmental sample
  DOMAIN (2)...(76): Phd_YefM
  misc_feature (1)..(96): Xaa is any amino acid
MPIIRPISDLETNLPEIANAVHETDEPVFLTSNGYGDMVVMSMEAWEEMNFENEIYQKLTEAQAEARSNPKRLSHDEVFGPLRQKIASYGSPLKNA

SEQ ID NO: 97540 - protein, 253 aa, Unknown
  Obtained from environmental sample
  DOMAIN (75)...(253): Peptidase family M48
  misc_feature (1)..(253): Xaa is any amino acid
LTGAFIAYKIYLNKTNLSYAISASAEAFSSATEDINPEQEYYIGRAVAAKLLSTYNVYTKKPALTTYLNNICAAITLNSPYPYIYNGYHVAILDSNEINAFATPGGHIYVTLALVNAAKTEEALAGVIAHEVAHIQLKHSIKAIKNSRFTQALLVTGTAVAGTAGGMDVKQLTDVLNDSFMEIVQTLVSNGYSQDQEFDADSTAMSLMAAAGYNPSGLINLLMTLGAVQTSDSGFGKTHPSPADRIRNAQKSI

SEQ ID NO: 97541 - protein, 65 aa, Unknown
  Obtained from environmental sample
  misc_feature (1)..(65): Xaa is any amino acid
MAYNIGPSAFCRSSVAKYFNTDDYAAGCRRMAEIYTTAAGRELPGLVKRRQRESQMCLEGLEDKQ

SEQ ID NO: 97542 - protein, 87 aa, Unknown
  Obtained from environmental sample
  misc_feature (1)..(87): Xaa is any amino acid
VRHAALPLIISIGLCSCAAKPSVPEAPRIITAAPCPAPTAPVLPAVNGDALLDDPANVAVLLERDSRMRRYIQGLRAALNCYDKQVA

SEQ ID NO: 97543 - protein, 136 aa, Unknown
  Obtained from environmental sample
  misc_feature (1)..(136): Xaa is any amino acid
MPNSNDVSPNSRTPQQLEAALHERELRELLAEQARRSMAAFVAYTYPEYEHNSFSLAVCEALDCFLQDVRAGLRPVLILQAPPQHGKSELVSRRFPPYIFGLWPDVRIAGCSYSADLACDMNRDVQRIMMDEGYQR

SEQ ID NO: 97544 - protein, 167 aa, Unknown
  Obtained from environmental sample
  misc_feature (1)..(167): Xaa is any amino acid
DQAGRTLDEILDELEAAFGVTISRSALHRHVKGLDKVLERLERSRQIAEAAVRRFGQEPESKAARANIELMHAAISEIMAADDDPETGKAVAKPMDAMLLAKALDHLTKASRHDAEYIEKIRAQARKEVEAEVRNKIKALGSARELKELSDAELERRIAELAHASAA

SEQ ID NO: 97545 - protein, 139 aa, Unknown
  Obtained from environmental sample
  misc_feature (1)..(139): Xaa is any amino acid
VAFIVEDGTGIEDATAYVDAEYVENYLMSERLAQFTALSDEQKEAAIIAGTQLVDISYSWKGTRSTIEQGLSWPRDDVDFEGHDVIGIPAAVKKATCEAVYLFITGENLFSTEGDKEVARERIEGAVDISYVNPKDKEK

SEQ ID NO: 97546 - protein, 282 aa, Unknown
  Obtained from environmental sample
  misc_feature (1)..(282): Xaa is any amino acid
IGQKVQADIMDPETGRALVRRGKKITKLAARRLEEMGVRETEAALDDFIGRYAARDIINPETGEIVIGLNEALTEEALANLANLGITELPLLFIDNSNVSSSFRDTLTLDKVETTQEAVFEIYRKIRPSTPPTPEVAQTFFDNLFFNPEHYDLSPVGRLKLNLRLFGEQGLGDQAADLGVQVLRPLDILAAVKELVKLKDDPTSEVDDIDHLGNRRVRSVGELLENQYRVGLVRMERAIKERMSLQEVDTLMPHDLINSKPVSAVVKEFFGTSQLSQFRTRT

SEQ ID NO: 97547 - protein, 273 aa, Unknown
  Obtained from environmental sample
  DOMAIN (1)...(273): RNA polymerase Rpb2, domain 6
  misc_feature (1)..(273): Xaa is any amino acid
AERLVKEDIFTSVHIEEFETVARDTKLGPEEITRDIPNLGEDSLANLDGAGIIRIGAEVKPGNILVGKITPKGETQLSPEEKLLRAIFGEKASDVKDTSLRVPPGVEGTVIDARVFYRKGVDKDERCQQIENDEIARLMKDQEDELHIITKNTQQRLREHLEGKTLAGPVSDGRKHSPSLKKKDVITAEAVDKIAPPAWAKAQLAEDKSGAVAEAVGRIVADYEEQANLIHILFEKRVAKLKKGDEMPPGVIKMVKVYVAMKRKLSVGDKMAG

SEQ ID NO: 97548 - protein, 274 aa, Unknown
  Obtained from environmental sample
  DOMAIN (2)...(263): Type II/IV secretion system protein
  misc_feature (1)..(274): Xaa is any amino acid
MVEFGGTDLHITTDSPPLVRIDGSLVPLKLPPLDAAQSRWLCYGVMTDMQRLRFESDMEVDFSFSINGVSRFRANVYSQRGSTAGTFRAIPEKIRTMDELGLPQAVQALCDRPRGLVLVTGVTGSGKSTTLAAMIDKINSSEHGHILTIEDPVEYVHQHKKSLVNQREIHSDTSSFKKALRSALRQDPDVVMIGEMRDLETVESALTIAETGHLAFATLHTNSAIQTINRIIDVFPAHQQQQIRAQLSLVLEGIICQNLVPKSSGKGRVVAMEI

SEQ ID NO: 97549 - protein, 245 aa, Unknown
  Obtained from environmental sample
  misc_feature (1)..(245): Xaa is any amino acid
MRPNSGLKIKSLPRDGLLFASGLRPRDRVLSVNGHGVVDELDFFYLCADGFLEIEIERGGRYGAVEVDRPQGVPLAVEFFEKPINRCANKCVFCFIDQMPRGLRRSLYIKDEDFKHSFLNGNYVTLASASRDDLARVASIGLSPLYLSVHASDPNVRAALLGNKRAPDIREQLTYLRENGVAFHTQIVVCPTYNDGAVLEETVRDLFGYGNSLLSIAVVPVGVTKFRKRPLSVVDKSNAIDICNK

SEQ ID NO: 97550 - protein, 277 aa, Unknown
  Obtained from environmental sample
  DOMAIN (85)...(275): Domain of unknown function (DUF323)
  misc_feature (1)..(277): Xaa is any amino acid
VINSNIIKVDPFVDWPAGLRGISGQKLKTVTMPCNHTDTVNGEFTWTKPDTLLGNLKKQSCNLTFTPDDTLHYNIVTKDVEISVIALNMARIPAGTFLMGTTVNDRFYTDDEGPQHQVTLDGFYMSEYLVTQELYEVVMNNNPSEHTSPVIGENKTPAQFPVESVRWYDALMFCNKLSKMMGLTPAYRIPAFNNSTDPLDWGKAPIKSTDPNLPLWDAVEIVPGSNGYRLPTEAQWEYACRAGTTTAYYTGDVIDYDITGWCNDGIWGRPPRDIILH

SEQ ID NO: 97551 - protein, 95 aa, Unknown
  Obtained from environmental sample
  misc_feature (1)..(95): Xaa is any amino acid
VTTAGGDKKAGKKLKARNGWDKKGNGTDDFGFSALPGGNYLGSRFYGVSNYGYWWTATESNSGNAYYRNVYCSYANVDEYGSSKSSGFSVRCVQE

SEQ ID NO: 97552 - protein, 198 aa, Unknown
  Obtained from environmental sample
  misc_feature (1)..(198): Xaa is any amino acid
ASDFRYELTADRKGVRILAYTGNASILIIPATIEDMPVVELGDPAYDLIYPLIIYENLRELVLPESVTKIAQYAFTDNLLTKVTLPKGLKEIPKSAFMACRRLETINLPDGIEKIGENAFFQCNNLQTVNLPASLKEIGQWAFNGCGELNNLSIPDSLSSIKFPRGYADTDNRAFSGCTKLPLKTRGRIEDLGYKDEF

SEQ ID NO: 97553 - protein, 68 aa, Unknown
  Obtained from environmental sample
  misc_feature (1)..(68): Xaa is any amino acid
MKKIFKVLAIIAIVAVIGFSMACGGGGDDGNGNGNGNGNGNGNGNGNGNGDSTKTPVASDYDIGNLKQ

SEQ ID NO: 97554 - protein, 67 aa, Unknown
  Obtained from environmental sample
  misc_feature (1)..(67): Xaa is any amino acid
MRITFATVNRNVQRNLSRRYSDLVGLQEQLSTGKRLRKASDDPVDVANAIKLRAKETQLGQYKRNIQ

SEQ ID NO: 97555 - protein, 125 aa, Unknown
  Obtained from environmental sample
  misc_feature (1)..(125): Xaa is any amino acid
MKTILKKNYIFVAAAILIVSAYFISGVLVFANKQYNAINEENMKATVNIIKEFTPSEVFTDRELAAEWVSNLDISNEYRITLIHRSGRVVFDTEADSSGFENHLDRPEFQMAVKDGIGSAIRRSA

SEQ ID NO: 97556 - protein, 283 aa, Unknown
  Obtained from environmental sample
  misc_feature (1)..(283): Xaa is any amino acid
ASLLPIYDMEIDMKRNYVYQNSVQGLLCGVVLLALVTGCTGCNVSGTEEKTPEKSDSIAIMTWNVQALFDGVDEGIEYDDYRESAGWTPEKYRGRLNIIAGAIGGMGRKPDIIAMQELESAVVVNDLAAALSSQGYGWTYFAHIPGMSLGVGLLSRYPVTGAKSHSVNINGDIAPRPMLEVRINTAVHASEDEPGAGGSSLTLFVCHWKSKLGSEEATEKTRRASARIILRRLRELKETDPDLPVIIMGDLNENYDEFYRRNGTAISALLPDDPRAAEFANLY

SEQ ID NO: 97557 - protein, 62 aa, Unknown
  Obtained from environmental sample
  misc_feature (1)..(62): Xaa is any amino acid
MLVDGNRVPLGMVITGAHRHDVSQLETLLDSVIIERSDPFEDPQNLCLDKGYTGEPALEAVV

SEQ ID NO: 97558 - protein, 296 aa, Unknown
  Obtained from environmental sample
  misc_feature (1)..(296): Xaa is any amino acid
MFVDLRTDMPMGWHVHHTPPSAANALTALRNGIKHHGLPNMLYVDNGREYRNKDFSGNPRGGNNWGAGNNEDGEYWMRSAASILGIDMKFAIAKNPRAKTVENTFGVYKKIIDKSFRAYFGGNPTERPEQIKSVMKDTNKAPSLAEFKSIVEKNLLDIIPNYPCKSKRFEQRTRKEAWEYLYAQRVPMKSITSDTLDMIPTLTEKCIIGRNGASIAKLGVSWYAEWMPARKGDEITVRYNPQDLSRAWGYDKEKNVLGEMGRPHVIPAIIDALPLEEQELSKAKLAEAMAAQRRER

SEQ ID NO: 97559 - protein, 293 aa, Unknown
  Obtained from environmental sample
  misc_feature (1)..(293): Xaa is any amino acid
VSRSLELKPIIEDGAKGTFSWNINYPSDVTVASMKITPLEDSSGTPEQTLYFAGGIPSINKNNTSSPLSLNAGYYQVVFSLSNSQHNTGREEYLHVYKNMDSRFEYTFTQDHFTVYSVTNGTDSGPGSLRHAITNAAANSTILVESGVGAILLTSRLSISKNLTIDGNGVTITRDPSWTTIDSGSQLLYISGSSITVTISRIHFKDGRASSGSAIYISTGSVNLESCIFSRNQSTSQGTIFSSGILDVKGCTFFGNIANSGTAIASSSSITITGNLFYGNTASSTYPVVYSSS

SEQ ID NO: 97560 - protein, 234 aa, Unknown
  Obtained from environmental sample
  DOMAIN (64)...(97): Tetratricopeptide repeat
  misc_feature (1)..(234): Xaa is any amino acid
ISAEQHYSKGELFRAIEEYEWALLADKDNANAWNSLGFCMASLSRHHEAQRYFSEALKRAPDDTVALYNLGMVCLNLGKDSAAGRHFNACLKLRPDHVFARIRLGQLAAKAGRPAVARRCFLKAAEREESAGLAHRLLARLALSRRDSAQARDHLHKALLYNPQDAPSMHMLAGLCLDGGEDPAIAEMLARQSAALMPELTAAWQELSRALAAQGRETEAAAAQARAARMPRRM

SEQ ID NO: 97561 - protein, 105 aa, Unknown
  Obtained from environmental sample
  misc_feature (1)..(105): Xaa is any amino acid
MEQNNKGLLNRLRKPTGTVDVVIDTDTYNEIDDQFALAFLIKSKEKLNLAGIYAAPFFNQNSSSPADGMEKSYNEILKILALMKRDDLKPLVKRGSEKYLPSEKD

SEQ ID NO: 97562 - protein, 159 aa, Unknown
  Obtained from environmental sample
  misc_feature (1)..(159): Xaa is any amino acid
MNYVLENYQHNRPNGLQICPERKAAMKSLVYGSLNIDLVFSVDHIVIPGETISSSSLFKGAGGKGANQAAALAKAGMETWMAGKIGKDGAFILELLESYGVRTEQVVQYEGPSGQALIQVETGGQNSIILFSGGNGKVSQEEIEHAFHFLRKATWSYFK

SEQ ID NO: 97563 - protein, 137 aa, Unknown
  Obtained from environmental sample
  misc_feature (1)..(137): Xaa is any amino acid
IKESIDKITKSTENVLNRFETIDSAVKTVSIQEENIRNSMEEQGEGSKQVLQSAGSLNELTQQVKNGSEEMLDGSKEIINESQNLEKATQEITGGMDKMTLEADKINLAVDHVNEMCEKNREGINKLIEEVSRFKVN

SEQ ID NO: 97564 - protein, 270 aa, Unknown
  Obtained from environmental sample
  misc_feature (1)..(270): Xaa is any amino acid
MLIVGTPGSGKTTFSVSLLDRLWKDHKIPFLVIEPAKNEYRALVRSIPDLQVFTPGKNFISPFVFNPFMPPKNVKLETYKSTLKTAFAAAVSMSTPLDKIFEESVNNCYSDFRWLDTYTSDDKGRIFNITDFIKCFEKTFAAIGYTGEANNIGRAGLVRLQSLVNLFDNYYSIPIEDLLAKPTVIELAAIENSYQKALIISLLLLSILAYVNSNYIGEGKLRNVILLEEAHVLLDADTNAEEGEANPSAVAQGLVKRMLAEIRSYGVRIV

SEQ ID NO: 97565 - protein, 126 aa, Unknown
  Obtained from environmental sample
  misc_feature (1)..(126): Xaa is any amino acid
MALFDKNPNESAYVGGKKHWADVIKNSGSGDLLVWRQPEEDFNTNSTLVVMPGEEAIFIKGGVIEQTFDNGTYKLSTENYPFISRLRNAFTGGISTFNCVVYFVRKTHSMEILWGTTSPIQVRDKL

SEQ ID NO: 97566 - protein, 163 aa, Unknown
  Obtained from environmental sample
  misc_feature (1)..(163): Xaa is any amino acid
KDIQDDYGSSFNDRVKQTPVNDGDWDGDRGDSRWKPNDEDVLRDVRDYGNGAEDIEYSNGFPDFTPVQVFECKLPNQLNERNDDYQFTDCNLALSDHLKDHPDSISNFDDTQLAAIAKGDNPSGYTWHHDVQTGRMQLVPTSIHDSCKHYGGKNVWGGGTANR

SEQ ID NO: 97567 - protein, 97 aa, Unknown
  Obtained from environmental sample
  DOMAIN (14)...(97): ParB-like nuclease domain
  misc_feature (1)..(97): Xaa is any amino acid
MEKEEYKSPVYNVKAIPVEKLRANEYNPNNVAPPEMELLYRSIKEDGYTMPIVVYYHEEEDVYEIVDGFHRYSIILKYEDIYEREKGLLPCSVIESL

SEQ ID NO: 97568 - protein, 287 aa, Unknown
  Obtained from environmental sample
  misc_feature (1)..(287): Xaa is any amino acid
DTGANPTITLDVGDWTITAIAYINISGIDGISDGEYEAARGSADLTVNTGNNNVTIDINGDVEDGTGIFSYELSYPGDTDNAVLKVLSLTGDLKKEVYLTTDDSSGSFTLDAGYYLLRVELEKGEGKIVKTEVIHIYKNLTTTAQGADFSFTGDDFLIDTDVIVTPGTMTGYRADGISFNMAAIPGGITFPTGEYDYGTATVDYSYQMGETEVTWELWNTVRTWAVANGYNMNAGKKGSSGDGSGQQPVTEVSWYDSIVWCNALTEYWNAKTGATLGTVYNSGGSPI

SEQ ID NO: 97569 - protein, 273 aa, Unknown
  Obtained from environmental sample
  DOMAIN (179)...(257): Bacterial Ig-like domain (group 2)
  misc_feature (1)..(273): Xaa is any amino acid
ANVITTLPAGYPTVDFYGNPITAPAAAGAVQSTSVAYTVTFDTDGGEPVPDQQLIEDGGKVTRPATDPAKSGYAFEGWYKEGLTTAWNFDTDTVTAAVTIYAKWTSKNTVTFDTDGGEPVPDQQLIEDGGKVTKPATDPAKTDYTFDGWYKEGLTTAWNFDTDTVTASVTIYAKWNAINVTGVALDKKSIELVVGLTTGTLTPTVSPSNATNKTVQWTSGNESVATVSDGVVTAVGIGTTTITVTTADGSFTDTCSVTVLVKYSLTLSVDTDQ

SEQ ID NO: 97570 - protein, 199 aa, Unknown
  Obtained from environmental sample
  DOMAIN (8)...(163): TolB amino-terminal domain
  misc_feature (1)..(199): Xaa is any amino acid
MKKILALAVALFIFVPAAVSAAEKFDLEGYASRFDSIPIGVIKFKSTNGNTLKENFPWNIIENNLDISGKFGVVARPEFDSAFFADKGIGIYVDGQYTLEGNTIVIECSLRDVATRSPLVVKRYKGDVAVLRNMVHRYSNEMVEMLFGDKGIFESRILYVKTEGQNKNIAIMDFDGYNRTKLTNDKVINIFPTLPTNRR

SEQ ID NO: 97571 - protein, 246 aa, Unknown
  Obtained from environmental sample
  misc_feature (1)..(246): Xaa is any amino acid
KTDSALRNKLKDTRGRLYPTQIRKDGGLHEWYRDFESEDEHHRHLSFLFGVFPGKQITQADGQLMQAVRRSLEIRGDESTGWGFGWRACLWARLGDGDHALRLFSLLFNLVDADKESMHSGGVYANLFDAHPPFQIDGNFAAPAALAEMLLQSHQGYLHFLPALPSAWVNGEFRGLKARGGFEVDLVWKAHKPLSGVIRSSCGEPCALLTPVGASVSANGQTVKTKRLGLMLYFETKKDTAYDIVF

SEQ ID NO: 97572 - protein, 209 aa, Unknown
  Obtained from environmental sample
  DOMAIN (103)...(208): Fumarylacetoacetate (FAA) hydrolase family
  misc_feature (1)..(209): Xaa is any amino acid
MKFGTWIHNGNEEAGIFSKDLQSVHSFASLRMDYSGVLDFIIRHGFADDTNMNKLREAEVKSGRPVSKVKPEAPIPVPHHDIICLGLNYMDHAKESGNFDIKSDEKREKSVYFSKRVVRVLGPGGIIEGHFDINERLDYEAELALVIGKDARRVKRENAWDYVFGLCCFNDLSARDTQRDHNQWFFGKSLDTFTAFGPYIVTMDEFKTP

SEQ ID NO: 97573 - protein, 248 aa, Unknown
  Obtained from environmental sample
  DOMAIN (33)...(239): Predicted permease
  misc_feature (1)..(248): Xaa is any amino acid
GGIVKDSSYFGYYKAYISRLSLNRLADYSDGDCSSVGFFFNSPGAAEQKRRQLQNVLSKQQIQLGPLVYDRDQMALERDRPWNGVRVFLYTLPVYLSEISELLEAMNLITYLLYGMMLLIILVSAAVTYRLILHERAKEMGTMRIIGFYGGDLRLVLWTEVLIIGFISLIAGFILAQIFCWAVSLLSFSWFPGFDIFLKNGKLLPLYLPKTMFVNIILVFILLFVMALLPSIRASRKNLPGLLSGEPL

SEQ ID NO: 97574 - protein, 238 aa, Unknown
  Obtained from environmental sample
  DOMAIN (11)...(238): Protein of unknown function (DUF1016)
  misc_feature (1)..(238): Xaa is any amino acid
MADIDHTEDTVYQSIRTVLTAARQKAYSAINFAMVEAYWDIGRQIMETQKGQRAEYGTGLIKYLAERLTEEFGKWFDESSLRRMRQFFQVFPIRATVRHELTWSHYRLLMKIDNAPRREFYLKECAESNWSSRQLERQITTFYYERLLATQKEDKESVKNEIQKTEPKTEPDYILKDPYILEFLDLKENKKYQESEIEQALIDNLQEFLLELGKGFSFVARQKRITIEGDHYYVDLVF

SEQ ID NO: 97575 - protein, 80 aa, Unknown
  Obtained from environmental sample
  misc_feature (1)..(80): Xaa is any amino acid
MSIDEKRRLSWIDFPNRDLLNRDLLNYDLVGEIMLFGRKKELAELGSIYNSGSFEFVAIYGRRRVGKSALIGHFAKDKRT

SEQ ID NO: 97576 - protein, 224 aa, Unknown
  Obtained from environmental sample
  misc_feature (1)..(224): Xaa is any amino acid
MRPDSEIIRRVKTALLCIQRRSWEQGEAMQAMLELRDYELMIAMARQAAYIRLDDGRTTLMTEWEKRTVTDTCACGEAMMLAAQLTGDRLIRESYEKLLDYTLNKAERSPEGILFHLNDVPQFWMDSIYMMPPFLAAAGYYEEAVKQINGYWNALYDSDVKMLNWIWDDKTKKCVRKHHRSICTGYAVVGLAKVGCRLPEKMKHDKDDLMAKAKIMIDSIFAFI

SEQ ID NO: 97577 - protein, 252 aa, Unknown
  Obtained from environmental sample
  misc_feature (1)..(252): Xaa is any amino acid
MSVAHNDLLTEIRTVEELAAMIDNLSGRYVLVNDIAIDTAWTPIGTSASPFTGNFYGNGHTVTINSFAADPGADIGLFGVVGGGLVRDLTVNYNNVAINPTGAAQFGGIAGTMQGNAQLLNVSVKGAATFNVSGDTTAYTGGIVGLMIKVAGGKNAYSGLNLSVEKAYSSPTATGSLYIGGITGSIEGDAIGIGNGSNIRLLEEGSVVGNITIGGNKEVSVSINKAPVATSYDGLYIGGITGYISGTQTGRN

SEQ ID NO: 97578 - protein, 245 aa, Unknown
  Obtained from environmental sample
  DOMAIN (5)...(245): Aminotransferase class-V
  misc_feature (1)..(245): Xaa is any amino acid
MSNRTINFYAGPAGLPMEPLKRAQDELLDFAGTGMSVMEISHRSKEYDAVHEEAIALTKELMGIPDNYKVLFLQGGAHLAFAMIPLNLLRADRKADYVTTGNWAEKAYKEARLVAGDKVCEAASTKAEKFARLPKPSELQVRPDTTFVHFTSNNTVEGTQWHEFPKTDKPYICDMSSDIMWRPVDISQFGLIYAGAQKNLGPSGVTLVVIRDDFLAMCEAQDLPSYLRYKIHAEKNSLYNTPPTF

SEQ ID NO: 97579 - protein, 244 aa, Unknown
  Obtained from environmental sample
  DOMAIN (1)...(244): Protein of unknown function (DUF1015)
  misc_feature (1)..(244): Xaa is any amino acid
KAELAAEVASVPYDVINAKEARQLAAGKPHSFLHVGRPEINLPEGVDEHSDEVYRAGVDALKGFIADGTLFQEGKPCFYIYQQRMGDHVQAGLVCLCSVKEYESGLIKKHEYTRKDKEDDRTRHVTEQGANAEPVFLTYPAAPYIDGLVNKARETKPVYDITSPDGIGHTVWVVDDESVIYSLTNLFGGVPALYIADGHHRTAAAIRYGQGRRAAAGADATGDEPFEYFMAALFPHSQLKVLDY

SEQ ID NO: 97580 - protein, 262 aa, Unknown
  Obtained from environmental sample
  DOMAIN (198)...(231): Tetratricopeptide repeat
  misc_feature (1)..(262): Xaa is any amino acid
APGPDDGPAEHLFQRILGEVATNNRPAARDDLKFFLETFPDHPRLEVANFLKTELDFRAGPPAETYAAAVEGWKSFLDRWPNSTLSSRAHFLRAEADRLLGFNNEAAGQFALLAQERDDAYARQALLRAADLYMGMGMAEEARKLLAPVLNQGVSDRLGWEAYARAGAADFYQGFYNQAAEVMGEALRQVPDLPKTFPDILYALGETYHYLGEADQSRQYLLQAINLLPDHPKSDIILTRIGDNYRQAGLDQEAIAIYGAVR

SEQ ID NO: 97581 - protein, 232 aa, Unknown
  Obtained from environmental sample
  misc_feature (1)..(232): Xaa is any amino acid
GFYNYNPDFEELDGKPRIVLVASDYTPEVTSTVIWLNKFGLNITCVQLQPYILDNDNIVFESSVIIPLPEEKDFQMEIEGRAGQENLKRTEEEYLKFYTKIMEGIKDKINLQLRRPPIRSYYQISTNIPGIHYEWVFSGRPKCFSVNIHFESKRREFNLKYFNEIIKLKDELEKGTNEKIIVDKNWLKTGLKIYIQKEMGNNNDELIKWGIEKMIIFIKIINDKLNIINNLT

SEQ ID NO: 97582 - protein, 293 aa, Unknown
  Obtained from environmental sample
  misc_feature (1)..(293): Xaa is any amino acid
AALFTCEKVPDYCGKTESYDPSCQFCFAQKAYNSCGGKEYNPLVEGCVDNNQNEVGTRCQNGSVVPKGTPCGGYTLTTAVTPASGGSVTRVPDEPRYVAGEQVTLAAEAKSGYEFVGWSGAEAYANSAPTVTMDANKPMVAIFKPIDNSATRTLIAAAFPENGGDIARNPDKPAYSAGESVTVTAVERSGYTFEGWSGAGAASKSASVAVEMSENKTLVAVFAPVLYTITVGASPWDGGAVYVNTTASEGSARYNAWSDIMVWAKPADGYSFSGWSGSASGITDNPAKINVSS

SEQ ID NO: 97583 - protein, 239 aa, Unknown
  Obtained from environmental sample
  misc_feature (1)..(239): Xaa is any amino acid
MAKYVCNGAKLKCSMGSKESDLGVMPVRRSLVRIKGNLMGTIMDNKPMVNIRPFGQCQSLANPVVAAATAAANGKLQKMPCIPNTATPWIGGKMRVRICGEPTLLNNSKLTCMWAGIIEITNPGQNFVQEGSSSPLNADIKSVTSEKEAAEVEIEVGEAVPDEEIEKLMVKDIAEIFEEIESKQGYEAARYYASHCVNYWIVNKLAKKFVNGTDEDKEDKQKNNDPNLMPSRFMLLYGA

SEQ ID NO: 97584 - protein, 283 aa, Unknown
  Obtained from environmental sample
  DOMAIN (205)...(279): HAMP domain
  misc_feature (1)..(283): Xaa is any amino acid
MEIRGAVEIGFLPEQSFALPEAKYITITGYRPGSAHNDHVWATNDPDILSKIDTAEFRVGVSRITDSLTPFSEQLNAEMNNRARSEVGKLSQSIAELLLEEQSLALRPDAESARRNADIQVMIRSLEVTLTEKLSRISGEIRSYPEFSDKSILKDKNRTFIFYKPVMFRHGADDNYFRGLIRLEVSIDSIMDAIFREQLLLLRTILIAALAATLMGITGAFIFSKLIISPIQKLVSHIEIIRDTENKAKLDGVDIHISAKDELAILGDTINDMTHGLEKRRLR

SEQ ID NO: 97585 - protein, 190 aa, Unknown
  Obtained from environmental sample
  misc_feature (1)..(190): Xaa is any amino acid
MEKTSTPVFEEIMRNVAGIDLAWRAETYVCGPRREDGEYEIEGFGTTTPELHRMLNWLKDRGVASVAMESTSVYWIPLTDLLEANGIEVVLVDTRMVRMVPGRKSDVQDCQWLQKLHSCGLLRGAFRPPEAAAAVRSILREKDNVTAMRTQAIQQMQNSLDQMNIRVHHAVSDIDGKTGTAIVKAIVEGE

SEQ ID NO: 97586 - protein, 210 aa, Unknown
  Obtained from environmental sample
  misc_feature (1)..(210): Xaa is any amino acid
MPISTTHNPENPLIVQSDSALLLEVNNPLFTEARNAVSQFAHLDKSPEYIHTYSITPLSLWNAAALGLTAADVEERLARFSKYPLPRNVVDGVKELMGRFGKLTLEGGGGGLVLRSVDAEMLGQLCRHPQVAPLVGKFNAEGSVPIAPHNRGLIKQALISLGYPAHDLAGYVDGDPYEVSLRTTALSGAPFAVREYQKQAAESFAGSVRS

SEQ ID NO: 97587 - protein, 268 aa, Unknown
  Obtained from environmental sample
  misc_feature (1)..(268): Xaa is any amino acid
MNKTVRTIVWAVMTAVLTVGAAGAWAQSNVMFNKLNKQTAKPTAEEDTAETKVYKHRDRDRDRYKDRDRDRDRQTQTATQTPESAPAPTPAPAPEPAPAQITTPTPAPTTAPAPAPVQTAPTPAPAPTAATAPASADWDIKSLDAARDVDYLTDLEKDIVLELNMVRSNPKRYAELYIQPRLPRYTGDKYAAGQECVAEFSGAEGVGILRPEKGMHLAAKDHATDMVKAGIGGHEGSDGSSPCDRLNRYGSYKGGAENCWYHVMDART

SEQ ID NO: 97588 - protein, 284 aa, Unknown
  Obtained from environmental sample
  DOMAIN (1)...(64): Putative carbohydrate binding domain
  misc_feature (1)..(284): Xaa is any amino acid
MKFGYFDDASKEYVITTPQTPYPWINYLGTQGFFSLISNTAGGYSFYKDARLRRITRYRYNNVPVDMGGRYFYINDNGHVWNPGWSPVKAALDSYECRHGLGYTIIKGSSGGITAELTFFVPQDFNGEVQKVSVKNTGGAAKKLKLFSFLEWCLWDANDDTTNFQRNFNTGEVEIEGSTIFHKTEYKERRDHFAFYSVNAPLAGFDTDRESFLGPYNGFGEAQVVKNGKASNSVADGWSPIASHYLEIELAPGAQKDFVFVLGYVENPFEEKFAPDLGGGDKIG

SEQ ID NO: 97589 - protein, 78 aa, Unknown
  Obtained from environmental sample
  misc_feature (1)..(78): Xaa is any amino acid
MEKQQLPDDFKEFIHCLNSNNVKYLLIGGWAVGLHGHPRSTKDIDFLVFMDNANLENLEKAFIGFGAPPVDIDYLRKK

SEQ ID NO: 97590 - protein, 294 aa, Unknown
  Obtained from environmental sample
  DOMAIN (38)...(192): Pyridine nucleotide-disulphide oxidoreductase
  misc_feature (1)..(294): Xaa is any amino acid
TGAWERPVLGFSGEELTIFGLDFLVEIKNWMGGKVGQEVVVMGGGNVAMDVAISAKRLGAKVVRLTCLEPEGKMPASEEEIARAKEEGIQIDAGWGLSKVSEKNGKIIGLEVKRCISPWDESGAFNPQYDENDKKVIQGENILIATGQGIDLSFLDDKYKIQLNRGRVGVNEDSNETSRPGIFAGGDIVERGAATVIGSVASGHKSAVGVSRYLGVPAVVYPDLSMEEYCTFDTEGVKNAVGLKLTELDAAARAIDKEDSQTPSMDAAQAEAARCLNCACYAVSPSDTAPALIA

SEQ ID NO: 97591 - protein, 126 aa, Unknown
  Obtained from environmental sample
  DOMAIN (2)...(97): Uncharacterized protein family UPF0004
  misc_feature (1)..(126): Xaa is any amino acid
LRYFLDPFGCVKNQVDAENMMHRLEKAGWENTSAEEADLIIVNSCGFIESSKQESINAVLEWRALYPEKKILLAGCLAQRYAKELADSLTEADGLFGIENIAEITQAALKTVNGTASESAKAVNLS

SEQ ID NO: 97592 - protein, 247 aa, Unknown
  Obtained from environmental sample
  DOMAIN (129)...(247): Bacterial conjugation TrbI-like protein
  misc_feature (1)..(247): Xaa is any amino acid
KSTDETPRRNPPAQDNRQPAQASPSPQQSDSHFRSSLVPQVQGSLFSRNTSVQQGAQNVNSGSSQQNATPYDDYLNQLNSSALSYQTQGQGTSSGTPAQNNQQNNQNFFESSIPSGAVYKGSFLGENALWIGTLIPGILETAINTDLPGHVLARVTQNIYDSQTGKYLLIPQGTLLVARYNNSVSYAQNRVQIIWDTLIRPDGFQIDLEGANGVDRAGMAGQEANYHENWFEYVKAAGVISLFSIAN

SEQ ID NO: 97593 - protein, 229 aa, Unknown
  Obtained from environmental sample
  DOMAIN (130)...(227): tRNA synthetases class II (D, K and N)
  misc_feature (1)..(229): Xaa is any amino acid
MEEMKRTATCGDLGKADEGKNVILNGWIHRKRDHGGISFINLRDRYGITQVVVDPAVFPGGAVPDEIAKLCGELRNEFCLAVEGIVRPRPSDMINPEMKTGGIEVAAKKIVVLSRCQTLPFQIDEKTEAREELRLKYRYLDLRSASMQKKMKLRSDVIFALREYMMGKGFYEIETPTFIRSTPEGARDYLVPSRLYPGKFYALPQSPQLYKQILMVSGLTNISRLPALV

SEQ ID NO: 97594 - protein, 164 aa, Unknown
  Obtained from environmental sample
  DOMAIN (1)...(146): Crossover junction endodeoxyribonuclease RuvC
  misc_feature (1)..(164): Xaa is any amino acid
IDPGLADTGWGILDDSEGKIQYIAHGTIKTKAGVPRAERLFFILQSLRLIIRKYKPAEAAIETLYFGRNVTSAIPVAEARGVISACLAENGIPLYELTPNAIKKGVTGIAGAGKKQVQEMVRIILALDEAPKSDHAADALGAAICLLNSASLVTFGKKAKNPRG

SEQ ID NO: 97595 - protein, 192 aa, Unknown
  Obtained from environmental sample
  DOMAIN (4)...(190): Queuosine biosynthesis protein
  misc_feature (1)..(192): Xaa is any amino acid
MVSDLPRILSGDIFLSPCGEKPLLVFNDTKVRKARIFGKHEQQGAESEFLLLEKKNDDCTVWKTMSKHIRRKKAGNIYIIFDNEGRQAAKALVKGTEDGYLLLEFDRTINDEWLDKYGHIPLPPYIKRNDSPKDAQRYQTVYARQTGSVASPTAGLHFTKETLEDIAAAGIESVYVTLHVGLGTFLPVRSEN

SEQ ID NO: 97596 - protein, 48 aa, Unknown
  Obtained from environmental sample
  DOMAIN (1)...(36): Holliday junction DNA helicase ruvB C-terminus
  misc_feature (1)..(48): Xaa is any amino acid
TLEDYYEPYLIQAGLLQRTPRGRVVTSLTYGHLGIAPNTASDEGRLFD

SEQ ID NO: 97597 - protein, 295 aa, Unknown
  Obtained from environmental sample
  misc_feature (1)..(295): Xaa is any amino acid
SGLFPALSHPYTAAILVLFAKGADTSNYGSEASVYAQVEFEGGLLAEEADRLLAAYGEKLSGYAGIKNVETGARTGSGSLLISFNPKQTHAHIVKEMAKQLYIPGGFVFFHESSNRERYWEIRICGDEDKKCRELAEKLARLCADHPLIREHVLNFKQGSKKLILRPDRELFANLGIGFSNAAAEVRYGVYGPVAYKRMDTKGETDVRIRTGGNVMRQSREGALGTLVSGIRIDSIVQASEESESASIRRNDRRRTASITITTGSIDPRRVKRQLEETFKKIDLPAGYFIEFDPD

SEQ ID NO: 97598 - protein, 298 aa, Unknown
  Obtained from environmental sample
  misc_feature (1)..(298): Xaa is any amino acid
SSAGPEERLNLYESRLEQIPKDQTGNDALIAQYMVEVHKKFAIPAACLIFVLIGAPLGIMARRGGLAVGASYSVFFFIMYWVFLITGENMADKMIISPAVGMWAGNAFLILCGIVLIVLMTRETTIGFGFLKTFFGKMSPAFKRFSSFRIFRLPGALFRFPRRLLNKAVGTLPGYLIWIFLSYAGGLLGALIVIFVTIDYVSNLRKFDNATFEQIILYYWYFLPFIVQTVLPIVLFLSSMFSVGRLAKLSELTAMKAAGVNVRQLTMPLLLIGLLLSGGVFYGGEMVLPRANEKRALL

SEQ ID NO: 97599 - protein, 273 aa, Unknown
  Obtained from environmental sample
  DOMAIN (77)...(273): N-6 DNA Methylase
  misc_feature (1)..(273): Xaa is any amino acid
ENVFFVPPSARGSVICESAHKEEIGTVIDDAMRAIEKENKRLKDILPKNYARGDLDKRRLGNVVDLFTNVQMIEHGTDKDILGRTYEYCLAKFAEQEGKRAGEFYTPSCVVRTLVEVLQPFKGRVYDPCCGSAGMFVQSADFVRNHSGNIGNLSVYGQDANPTTRKMALMNLAIRGIEADLGGYNADTFHNDLHPTLKANFILANPPFNLSDWNDGSLNNDPRWKYGLPPSGNANFAWLQHMIHHLAPDGKIGMVLANGSLSSQSGGKAIYGA

SEQ ID NO: 97600 - protein, 71 aa, Unknown
  Obtained from environmental sample
  misc_feature (1)..(71): Xaa is any amino acid
MGEGSADSLSGSAVEQMRPLIPGLLASLDEAMDDVRRGFRQSDPVAVEESAARIAARVDNYGLRVLARMAR

SEQ ID NO: 97601 - protein, 71 aa, Unknown
  Obtained from environmental sample
  misc_feature (1)..(71): Xaa is any amino acid
MVVVGGRESGNTRRLAELAAGTGISALHVESEKELEAAFFRKKNFVGLTAGASTPKSLIDAVEFFLENLPE

SEQ ID NO: 97602 - protein, 199 aa, Unknown
  Obtained from environmental sample
  DOMAIN (14)...(161): CheW-like domain
  misc_feature (1)..(199): Xaa is any amino acid
MTNILLEAGTNELELVEFYLDEEGGKGKPTYRGHYGVNVAKVLEIIRMPKVTELPEVQHAAVQGAFNLRSKIIPLVDLALWLEKKTVKSQEPKTIVTEFNSCTTAFMVSGVNRIHRISWEEVESPNPYVAKASKDTVIGVVKLEGRIVFLLDLERVVSNLNPVLGLRLDDLGEDYDRSTRYRALVADDSALIREMLKDL

SEQ ID NO: 97603 - protein, 71 aa, Unknown
  Obtained from environmental sample
  DOMAIN (1)...(63): FliG C-terminal domain
  misc_feature (1)..(71): Xaa is any amino acid
ALKSATEEMRAKVFANLSARASDMIRDDLEAMGPTKLSDVEKAQQSILRAAKKLEAEGKIALGKGDGEQFV

SEQ ID NO: 97604 - protein, 257 aa, Unknown
  Obtained from environmental sample
  DOMAIN (75)...(257): ATP synthase alpha/beta family, nucleotide-binding domain
  misc_feature (1)..(257): Xaa is any amino acid
MPVGEMSGLTPGSRILSTGHPAMAPVGPELLGRVVDGLGRLIDSRGPINIAENYPVHARPGNPLARGRITEAMDVGVRSINSLLTIGRGQRVGIFAGSGVGKSTLLGMIARHMKADVNVIALIGERGREVMEFIEKDLGPEGLARSVVVAATSEQPALVRMRGAYVATTIAEYFRDQGRHVILMMDSATRYAFAAREVGLSVGEPATTRGYTPSVFSQLPGLLERAGNWPHGSITGLYTVLVDGDDMNEPVADAMRS

SEQ ID NO: 97605 - protein, 220 aa, Unknown
  Obtained from environmental sample
  DOMAIN (25)...(219): Arginase family
  misc_feature (1)..(220): Xaa is any amino acid
LAYASEGAAVTPAFLASEYAPAAPENALFHIIPAPLEHTVSYGAGTARGPAAILAASQHLEPWDGASCPGALGIHTAEAVDCTGSIETALENIARSTREALAHNALPVLLGGEHGATLGVLRALKERYEHFGIVQLDAHADLRPHYRGSVYSHASVMRRATEDLGLRLAQFGVRELCPEDMEARRTFNVCFLDAPELARAGLPAAPLPEDFPDTIYISSI

SEQ ID NO: 97606 - protein, 59 aa, Unknown
  Obtained from environmental sample
  misc_feature (1)..(59): Xaa is any amino acid
VLNKIDLLPYVDFDPARAVHFATRLNRSLAVFEVSCRNGQGLEAWYDWLRARRASKKAG

SEQ ID NO: 97607 - protein, 287 aa, Unknown
  Obtained from environmental sample
  misc_feature (1)..(287): Xaa is any amino acid
CDNKETDLFCEVAFAPWSDMAKLMRENAIPLYTHASFSEIKSFDALGITVQTELNFTNIPYILELANITAFAANRNENEPVVIAGGPAMANPMPIADFFDCLCIGDGEILAPKALRIIGEAKKAGKNKAEILEQIAKLEGFYVPAIHREIKSVKRTYVEKLAKDLFPTKNLIANMPLVHDRFCVEVMRGCTQGCRFCQAGYWYRPTRELDADDVLDIAKEGLKATGDRQLGLLSLSTADYSPVEKMLDSFIEDPFFKNIDVSLPSLRVAVLAAALRIRFMRSRRTQR

SEQ ID NO: 97608 - protein, 246 aa, Unknown
  Obtained from environmental sample
  DOMAIN (144)...(246): UDP-N-acetylenolpyruvoylglucosamine reductase, C-terminal domain
  misc_feature (1)..(246): Xaa is any amino acid
GINVFILGGGANILAADAGVRGIVLDSGGWAGEEELKETTLRLRSGTNLDDAAMIAAKAGLCGLEFLAGMPGSIGGAVWMNARCYGREIADVLVETEIIDFSLSPPGNERLPVNRSEFSYKRSPFQGRDAFILSAAFQLSSDNTEHILARMDANRRDREEKGHYLFPSAGSVFKNNPSFGKPTGKIIDELGLRGLQIGGAKIADWHGNFIVNTGEATSRDIRALTEEAAARVKQTTGIILEPDILF

SEQ ID NO: 97609 - protein, 260 aa, Unknown
  Obtained from environmental sample
  misc_feature (1)..(260): Xaa is any amino acid
DDRLLQQIDASKPLRDLFLDYVDALIINSDDIGTIIGNFFEHIFNGTYRIEEYNSYRKSDFDFTFFLIWEMYICSTAVLLHRENYQDLYNMLNRTYFLREGPNQRTQPASYIEFRPVLSYIEEHIKKSKNLNLLTLAGDILVKREKKPIITQSSMVNADLILYQLSCIYDITVNSSRWRWFPKLYPYCENQQEIWSRMVSLKHCQKLFPLFGVTQIAKLIEQIKKSEPDRDMRYSGSYGGYSVAPPIIYSIELDKIGTMP

SEQ ID NO: 97610 - protein, 294 aa, Unknown
  Obtained from environmental sample
  misc_feature (1)..(294): Xaa is any amino acid
GSDMILGENLTEKELKSVGSGSILASGSVINLIDDGTGKLEVGGTSGVKEIISTNGILELTTTAGSVKVEAGKSITLDDGTIIKNHGGGKISIESGSLTTTGDIDNTVATSFTIASQSTIASASETLQDDTDIVVASNILVSNGTIATNVTIGNSVNLTDKDVNKLAANSILAKGSTIEMLQSGVNSIKIEVKGKEVDITYDAVNGILKVGGEMVAAGKSITLEDGTVLTHSSTLDDPSKANGKIFIEQGSVTLAKTITTAGATANVARFILSKDSTIAAGSDLVTSGGTKLMA

SEQ ID NO: 97611 - protein, 280 aa, Unknown
  Obtained from environmental sample
  misc_feature (1)..(280): Xaa is any amino acid
SIGRFAFANNQFTRIDVHDGVTYIGDGAFSNNRLTTVDIPENTEIIRSSMFSYNLLDKVKIPGKVTNIGNSAFDYNQLKSVVIPDSVTSIGNRAFASNMLANVTFSGGVETIGSGAFAYNQLKGITLPVSVKSIMDGAFENNYLTQIVIPVGVTLIKKNAFANNKLTSITIGNSVTSIEDYAFAYNNLTSITIGGGVTSIGAYAFMDNQLANVTIPRSVTSIGEHAFRNNQLTRVTIGEGVSLGGDPFGDGFEAFYSARRKAAGVYTRAGDGWNFSARGI

SEQ ID NO: 97612 - protein, 202 aa, Unknown
  Obtained from environmental sample
  DOMAIN (63)...(134): HAMP domain
  misc_feature (1)..(202): Xaa is any amino acid
DLIRAVKTGKFFTFTNYVEEIKENMEIFLVPVNIGISATPWSYAVGVTTKTVMASVNEMLVMTVVISIIVLAVASIAAVILSGTISKPIVKVTETLRDISEGEGDLTRVLASGSKDEIGDLARFFNQTLAKIRNLVVNIKKEALKLSEIGTDLAGNMTETAAAVNEITANIQNIKGQVIKPKRQPERNERHHETGRCKYQQT

SEQ ID NO: 97613 - protein, 225 aa, Unknown
  Obtained from environmental sample
  DOMAIN (1)...(225): DNA gyrase/topoisomerase IV, subunit A
  misc_feature (1)..(225): Xaa is any amino acid
MIVRGRAEVIKKANDREEIIITEIPYQVNKSVLYQRICDLARNKIIEGISFTRDESDRRGMRIVIGIKKDDFGEAVLNKLYKFTDLQTTFGIINLALVNMRPQILSLKELMAHFLDHRHNVVVRRTQFDLKKAQDRAHILEGLRIALDHIDEIVALIRASSTTEEANEKLMRRFGLSEIQAKAITDMRLKQLTGLEREKIEQEYQELVKLIEDLTAILASRDRRM

SEQ ID NO: 97614 - protein, 239 aa, Unknown
  Obtained from environmental sample
  misc_feature (1)..(239): Xaa is any amino acid
GNITLYARWVCYITYSSVNNAYGTPRTETVIYGSSIWLHYPSSNSNLGLTFDGWDTNASGTGTVYRAGDSSIILRNDITLYARWLCTVTFDANGGYGKIDAKTVLAGSAITIPSGNNGFGYSGGYLFAGWSVNSTGTVMYSDGASYTPTRSVTLYARWGYRVDFNINGGIGTTPPRQYALLNGSSLSGITLPDSTGFSHPSSMMTFRGWTTWKGGGDKYLSGYSFTPPYSTITLYAWWE

SEQ ID NO: 97615 - protein, 213 aa, Unknown
  Obtained from environmental sample
  misc_feature (1)..(213): Xaa is any amino acid
MRMSFNPQNYRFSAGEHHSKSVIFVHFSYNLQWKNELKEKFPSAKWSASKKCWYLPDVAAIRAEIGMSPKTEMGKAVISQIRSVNQTALKRMHELLLLKAYSPNTIRTYCTEFAQLLYLLKDTPVDTLTPERLRSYFLYCTTMLKLSENVIHSRMNAIQFYFEQVLHREKLFFEEIPRPKKKSLLPKVISQKDIAKIFAPVDNSKHLLMLKLC

SEQ ID NO: 97616 - protein, 304 aa, Unknown
  Obtained from environmental sample
  DOMAIN (1)...(304): UTP--glucose-1-phosphate uridylyltransferase
  misc_feature (1)..(304): Xaa is any amino acid
ERDTLAALGKYADIKTDIPPSFVQHMFPKVNAADLSPAEAPHDRSLEWNPPGHGDLYAAIQSSGVLETLLKRGYKYAFISNIDNLGAALDTRILGYFADRGLHFLMEVTDRTFMDRKGGHIARLKNGQLVLREAAQCPPESIERFMDTDLYRYFNTNNLWIRLDALHDIWNRGTLTLPMIRNMKKIDARDTASPDVIQLESAMGSALSVFENTGALRVPRSRFAPVKNCEDLLLLWSDYYDLTEDYRIVMNQRHKSIQMNVCLEPQYYGTLDKLKERFPAGAPSLVGCESLSVFGDVKFGKDIA

SEQ ID NO: 97617 - protein, 297 aa, Unknown
  Obtained from environmental sample
  misc_feature (1)..(297): Xaa is any amino acid
GIYTYGTNVSAQGSSRVNVVVLVKYNSSGTALWARTASSTEGDSAGYNNQDDSQFNAVAVDASGSVYAAGYQWGNGTFTYGANVSIKGKSFYISSSGTRAYLKNAVLVKYDSNGTALWGIQPDTGAGNSETGTVFFAAAVDSSGNVYAAGDSDGTGNGLYTSRALLTKYNSGGEAQWVKLISRPPGSSSSNGFSRFSAIAVDSSDNIYTAGRQSSNYTYTYGPGVSAQGTYILHNVVLVKYDSSGTAQWAQTVSAGDRISQFNAVAVDSSGNIYAAGKQEVPVYLPMARELPPREYL

SEQ ID NO: 97618 - protein, 191 aa, Unknown
  Obtained from environmental sample
  misc_feature (1)..(191): Xaa is any amino acid
MGEAHPDMPKKSPFREIVQPFIGLAGAPRALWALNLTYFVEGFVYLGTLTYLAMFFNEYVGLNDKHAGWMVGLMTAGITFSMLFFGSRVDAWGLRRTLFASLGLMFLGRAVLALSPYLGLVSGGLLAPMNLVAVLGILLVVLGFGMYQPAVYAGTRAVTTAATSGMGFAMLYALYNLGGWLPTFYNLGGWL

SEQ ID NO: 97619 - protein, 100 aa, Unknown
  Obtained from environmental sample
  DOMAIN (1)...(100): Phosphoglucomutase/phosphomannomutase, alpha/beta/alpha domain I
  misc_feature (1)..(100): Xaa is any amino acid
MTAEFALALGRAVAQHLREDKKNRRPRVVVGKDTRLSGYMLEEAFCSGLLSQGADVFLAGPLPTPGLAFLTTSLRADAGVVISASHNPYHDNGLKIFAAD

SEQ ID NO: 97620 - protein, 314 aa, Unknown
  Obtained from environmental sample
  misc_feature (1)..(314): Xaa is any amino acid
VVSHTTGAVDFARAAVFAPVADLTRASDATRIEGATEAAYRPTIDLLKPGKNFFFAEITNTLDATNKRTELSVPAVIEMEPGETALEPVITSQPVDGFYFTGDSIKPLVVKNEPITDGGTVSYQWYSNTRPNATGGKAVSGETKDTFTPPATAGTNYYYAVVTNTNPSVKSSTKTARTNSKAVRIVVTSPGSPTPNVTFTVTDPKLPANRFQYIRGYGGMDVAWANFPEQTPEDMETMYNPDTGLGFNMNRIMISPANTNVNISIRDIINSHRPNFYENVRIVNKYGGFTLASPWSPPKEWKKHNSINGGGYLI

SEQ ID NO: 97621 - protein, 253 aa, Unknown
  Obtained from environmental sample
  misc_feature (1)..(253): Xaa is any amino acid
VEFDSYNGIKALVGHCINVHGARKIAFLQGPVFHQYAKARLEGYYDALKEAGLFAGFQSPLVTSPFNWEEGAAAAAQLFEERSFIPGRDFDTLVGSSDLMALGAINYFAMQGYHVPGDYRAVGFNNSEESRVAESPLSTVQAPYMEMSSESFKILRGIMNQKKSAPDADVLLRSDVIIRESCGCSGFSVGEITQREETKPGHISGSVEETLIKMVRDYLKPDTASMNAFALPLIHALLYEEPERFLSLFEKAL

SEQ ID NO: 97622 - protein, 84 aa, Unknown
  Obtained from environmental sample
  misc_feature (1)..(84): Xaa is any amino acid
MRLNGKKALLTGALRGIGKTIADLFIAEGAEVWGLDYKTPEDLSARVEEAKGKLHWVAADLSELGAIEGKIETALKESGGSTYL

SEQ ID NO: 97623 - protein, 260 aa, Unknown
  Obtained from environmental sample
  DOMAIN (47)...(189): Penicillin-binding Protein dimerisation domain
  misc_feature (1)..(260): Xaa is any amino acid
RDKTQIVGKKRFVIFASVLALASLGILGRYGYLMLFPKQPERQAINVRRAGRGPILDRNGRLLALETRLGNITLWRPDMENPEELCRDLAPLLELSPEELMGRINNSQSDFIYLKKQVNENIVALIQATISDGRLRGVGIEPVVGRIYPERTLASQIVGFVGDDGFGLAGIEYAFENELKAEQGIFGINGASQVFLTLDMNVQYILESIATQAMDENKAEAVMFMAMDPRTGEILGSASMPNYDPNNWRNSDEISRMDRP

SEQ ID NO: 97624 - protein, 239 aa, Unknown
  Obtained from environmental sample
  misc_feature (1)..(239): Xaa is any amino acid
MSNEQCNEFSLLKMVPAVLRAREFRLYTKAGRLVDLWQNNGAAVLGHTPPSLLRELKNTASRGLYAPFPHFLETRYHKALSRIFPDRTFRLYAAPPPELETLVANASAVLWRPFTDSATPLGVPENPQIVIPVIPGIQTWRGGLPLGLCVLAMKGEADISPGDFLPPVLLAAAARGIYDLISAAPARANPVYPRIAKALKNSLWQRVGIYLRPLQKPTQTDWAALFRRFLENGFLLPPV

SEQ ID NO: 97625 - protein, 267 aa, Unknown
  Obtained from environmental sample
  DOMAIN (44)...(121): 3-Oxoacyl-[acyl-carrier-protein (ACP)] synthase III
  misc_feature (1)..(267): Xaa is any amino acid
ADHNVSRSEVDFLLLCTECPDYFLPATACIVQNRLGLRKSVGALDYNLGCSGYIYGLALAKGLICGQVARRVLLITADTISRTIHPLDKSTRAIFGDAATATLLEDAPYVGVGEFSLGTDGSGANKLMIQAGAWAKPSSPETRVETTNRWGNTRTQEHLYMNGPEILGFSLEVAPACFAEIMEKNGVTLSDIVLVVLHQASYMLLEKVREVLEIPEEKFVFDLENYGNTVSSTIPVALRDMELSGRLKKGDKVLIMGFGVGLSWGGT

SEQ ID NO: 97626 - protein, 91 aa, Unknown
  Obtained from environmental sample
  misc_feature (1)..(91): Xaa is any amino acid
HSDGGTIHCSIQPDKVIITAADIGPGIEDVSLALKEGWSTANEYVRSLGWGAGMGLANTKRVSDEFTIESVVGKGTTVRSVIFADSSKADS

SEQ ID NO: 97627 - protein, 206 aa, Unknown
  Obtained from environmental sample
  misc_feature (1)..(206): Xaa is any amino acid
MTLGAVRFAIAVAALFLMYRFSAKRGAAAAQAETKKDAHSAFKADVPLLIGSGLTGVTFYFFFENNGVALVTASEASIIIAAIPVLTMFADWLSAPAASAPRLGWKSWAGAFISVGGVALVAGVSFLLSGSLSGYIYMGGAALCWVAYSLLTRPLFNRGRSRLYIVFWQNFFGLLGMLPFTLLEYSDWGDPTLKVMLHVVFLALGC

SEQ ID NO: 97628 - protein, 72 aa, Unknown
  Obtained from environmental sample
  misc_feature (1)..(72): Xaa is any amino acid
MAFEITGTGRALPPQRVTNEDLAKKIDTSDEWIRSHTGIGARHIVADDVMCSDLALEAAQQALSMAEPEKAR

SEQ ID NO: 97629 - protein, 269 aa, Unknown
  Obtained from environmental sample
  DOMAIN (2)...(269): EPSP synthase (3-phosphoshikimate 1-carboxyvinyltransferase)
  misc_feature (1)..(269): Xaa is any amino acid
TLYLVMAAAGLGSEPLEFTGDEQIQRRSAAPLLEALAGLGIRAESVKGNGCVPIVIQGPWKGGQVSLPCPTSQYLSALLLAAPLAPAGTIADVTIPLLNERPYIEMTLSYLDSQGIPWEAPPDFSRFVIPGGTSWKPFSRPVPGDFSSAAFPACAAAISGNPVTLLGLDPHDVQGDKFFLEMLATMGCTVNWEQVPLEQVAASVSSAEYSVTISRNGPLRGGTFDLNATPDLLPAAAVTAAFAEGDTALVNVAHARIKETDRIAVMAEE

SEQ ID NO: 97630 - protein, 305 aa, Unknown
  Obtained from environmental sample
  misc_feature (1)..(305): Xaa is any amino acid
EIKDALIQRQKTSGEAPETSINSTVEELWEEVWRGNLSADSWEPMRRAVESGFSQTEHSELQADNRTSGAISGIEPSVRERRAFRVPRAIRERWKSGTPVRGLWFSLASDSSLDENQFNKMSLLEEEELNRERVRLLLDRWGILTRPLLEREAPALSWARLLPTIRRMELAGELVTGRFFAGIASLQFTSPRIASELEEAEAERGIYWMNAADPASPAGLAVEGIIRSTGGDAPAIRRIASSRLCFRGAELLAVSNRSCQELEIFIPPDDGDIAEALEFVKVSRTRKVHKENKITMKKSTALPRL

SEQ ID NO: 97631 - protein, 276 aa, Unknown
  Obtained from environmental sample
  DOMAIN (112)...(214): Domain of unknown function (DUF303)
  misc_feature (1)..(276): Xaa is any amino acid
WEKNIANEDIGIPKEWKDPITDISSWDDITLPSDFLNAGLVNLCGALWLAKDFEVGKDFAAKEVKVWLGTITDSDTVYINGVEIGSTGYRYPPRKYTCKGLIKKGINRIVIRVICNSGDGGVTINKPFRIFTDGESVELAGTWKYKIGIKTTKRPEEFFFHCLPMGNFNAMVCPFLKYPVKGVIWYQGESNDSNPNEYKKLFPLMINDWRSKSNNEKLPFIFVQLPILKEPSDNNEAHSWAIIREAQADAMSLPNTGMACILELGEWNDLHPLTKK

SEQ ID NO: 97632 - protein, 233 aa, Unknown
  Obtained from environmental sample
  DOMAIN (89)...(232): Sigma-54 factor, core binding domain
  misc_feature (1)..(233): Xaa is any amino acid
MQVQRQSVIQEQRQKMNPQLYQSIKLMELPVVNLRERIEQELEQNPALEIIEDKSLITLDETDANSKEEDEYFESTSDPGRQGSEQAADEHRKFIEGALTRPETLQEHLLWQLQLEPVDDELRVIAETLIQNLDDDGFHKEKPETLFKTIPPRLEEAIKLVRGFEPAGSCTADYHESLRVQAALLPDAPEGIETALDNLDLLEREKFSDMAKKTGIDEEQARLICEFIKKLYP

SEQ ID NO: 97633 - protein, 186 aa, Unknown
  Obtained from environmental sample
  misc_feature (1)..(186): Xaa is any amino acid
SFGKGSIELGYVYKRKKDNQININAIPSSVAAEAVFAIWRQKPHLAKYKRSECFNVYYGEIFENLNAAQMIIAVLIFRLCDSYRKRPSSDTEIEAQRRYSNYLLASIIGARLLKIFEISIDKLTHVNFSEIKKYFDTNRDILYQEAEQHLLKHLKQYFGNAPLIETNSRRIAAAFRRFEFVELSLK

SEQ ID NO: 97634 - protein, 90 aa, Unknown
  Obtained from environmental sample
  DOMAIN (17)...(85): Ribosomal protein S17
  misc_feature (1)..(90): Xaa is any amino acid
VAEESLQAKSGKKEFVGIVRSDKMDKTIVVSVETKTLHPLYKKYVVRSKKVKAHDEKNEAKVGDRVRVIECRPISKEKCWRLDAILEKAK

SEQ ID NO: 97635 - protein, 272 aa, Unknown
  Obtained from environmental sample
  DOMAIN (99)...(271): SRP54-type protein, GTPase domain
  misc_feature (1)..(272): Xaa is any amino acid
MSVQDKYRLGLEKTRVSLGSRLSYLFRSRKSEKEFYAELEEILITADAGTSTTKLIISSFKEFTQGQKINDAAEELFISFLEGLLSRVAPFQLPQDVFKVILFLGVNGSGKTTTIGKLAKTFSQENERVIIAAADTFRAAAGEQLAEWASRSNVPLVRQQQGADPGAVVFDALTAARARQASLLLVDTAGRFHNRETLVRELQKIDKIIKGKSGPAARYYKMIVLDATAGTNAFAQAKSFHEAVPLDAVILTKMDSSAKGGVVLPLIIELGL

SEQ ID NO: 97636 - protein, 57 aa, Unknown
  Obtained from environmental sample
  misc_feature (1)..(57): Xaa is any amino acid
MTTFLDLAATRYSVRSFCSRAIEPEKLASVLSAARLAPTACNNQPQRIKVVSAPADL

SEQ ID NO: 97637 - protein, 297 aa, Unknown
  Obtained from environmental sample
  DOMAIN (1)...(55): Bacterial Ig-like domain (group 2)
  misc_feature (1)..(297): Xaa is any amino acid
GHIAPSNATNKNVTWSSSNSGIATVSNGLVTGVAAGTATITVTTSDGNKTATCAVTVTSANVPVIAVSAGNSHSMALKSDGSMWTWGLDYLNLSNGTGVLYAPAQVSTSKDWAAVSAGSCHTMAIKADGSLWAWGYNLNGQLGDGTTTGRALIQVGTSKDWKAVSAGTNYTVAIKADGSLWAWGQNDDGQLGDGTNTDRNTPVQVGISKDWAAVSAGNGHTMAIKADGSLWAWGKNKSNQLGDGTYTNRNVPTQIGTTKDWKVVSAGNGHTMALKTDSSLWAWGWNEFGQLGDGTIL

SEQ ID NO: 97638 - protein, 284 aa, Unknown
  Obtained from environmental sample
  DOMAIN (131)...(178): Regulator of chromosome condensation (RCC1)
  misc_feature (1)..(284): Xaa is any amino acid
TVTPSDGNKTATCAVTVTSPNIAVTGVSLNKTSTSITVGNTETLTATVAPSNATNKNVTWSSSNTGIATVSSNGLVTGVAAGTATITVKTADGNKTATCTVTVTGSTSPIIVTGTSTFAAGHYHTLAIKADGSLWAWGDNYYGQLGDGTDTSRNTPVQVGNSKDWATVSASMWHTMAIKNDGSLWAWGSNEYGQLGDGTTTIRYVPVQVGTAKDWAAVSTGYIYTLAIKNDGSLWAWGANSFGQHGDGTTTGKNAPARVGTASNWVAVSTSHGHTLAVKNDGSL

SEQ ID NO: 97639 - protein, 102 aa, Unknown
  Obtained from environmental sample
  misc_feature (1)..(102): Xaa is any amino acid
AHDICFEAVKQNGKALQYVKEETPQLCLEAVKQDGMALEYVKEQTHDICLEAVKQDGMALEYVKEQTHELCLEAVKQCGQALKYVKEQTPLLCLEAVKHSKR

SEQ ID NO: 97640 - protein, 280 aa, Unknown
  Obtained from environmental sample
  misc_feature (1)..(280): Xaa is any amino acid
MADAAKDAAGDLKDLGKSAEESSGGIGKQGEAAKDAATDMLGMQKIIELLTDRISDMTNAVGAVVGKIDLMANAASGITGSVTTMTNVTKNVALRMSLMCDSIVAVADNMGKMDDKAGEASGALEKTGGKAKAASGDLKTLGNSADQAANKISGMAKAILATMGIMSLKSAVKEVTMLTARFDEMGVAMDAAGLNAGYSREQMAQFEGQLRSIGMSAIQSRESLTHMATANLDLAQSSKLAKGAQDLAVAAGISAEEALNRLVSGIQRGNAMTLRAIGIN

SEQ ID NO: 97641 - protein, 278 aa, Unknown
  Obtained from environmental sample
  misc_feature (1)..(278): Xaa is any amino acid
VESQEEKAPAVFAPPDRLPEQTRLPPFEASFSPLHASKKNGGKLTLCILDSQDSPENDPSGDLEGGESDRLPPVENEARYVAWRIGELLKEKNETGEFKYRPGDIAILFRAHSPQQVFEKHLMLLNIPYACEDLNGFFYGGPVDDLMSVLRLVAYPKDSAAYAQMLRSPFAGLSMQGLAFCAPLVAASAGIGKPFVPFSDEPLSRLSEDDKIKYTHGKRVYQKILDIAQKESISSMVSELWYGKGYRYETEWNPRTAAYRELYDYLFHLAALADEKNQ

SEQ ID NO: 97642 - protein, 267 aa, Unknown
  Obtained from environmental sample
  DOMAIN (34)...(266): tRNA synthetases class II (D, K and N)
  misc_feature (1)..(267): Xaa is any amino acid
MPTGDVEVRISDLKIFNTSQTPPIPIDDSAGEANEDLRLKNRFLDLRRERLQRNMTLRSEAASVTRAYFRKNDFIEFETPMLGRSTPEGARDYLVPSRVHPGEFYALPQSPQLYKQLLQVSGFERYVQICRCFRDEDLRADRQPEFTQIDVEMSFVRPEDVQAMIEGLMVELAPLAVGAGAKKATAPPFPRLPYRDAMELYGSDKPDLRCKVKIADTTALFAGSEFGLFRTAAESGGKQRVRGMFFPGAAAGAASRKQLDAYQEQAR

SEQ ID NO: 97643 - protein, 265 aa, Unknown
  Obtained from environmental sample
  misc_feature (1)..(265): Xaa is any amino acid
MAVFTGSFGYNSVYKAVVTLTAASQFTFETLPENSFTHSDAISITSATGINSVTVTISFRTVPMPDGNIIIYPNTRYQTMHSFSASDAWCGDFVGRYWNNDKKEQIANWLFSQEVDANGNPKGIGLSMWRFNLGGGTLQQGADSDIDDETRRADSFLTSSSTYDWTNRHIGQQYFLRKAKEAGCEHFLLFSNSPPVQYTLNGKGYAPAAGAANLKTDMYDDFAEYMATVAKHFKDTDNIVFDYISPVNEPSYNWTDHDQEGSSWK

SEQ ID NO: 97644 - protein, 276 aa, Unknown
  Obtained from environmental sample
  misc_feature (1)..(276): Xaa is any amino acid
GRTGSALSGLPGNASSLTNTGVVTRPPVGHVPAVVTLTGTFSKLGVKIERDFTVTILAEFDGINADKYELQIDTYMDYFYHEIILPSAGSRGTPVSWVSDSADYPVTGNKVKIRDNVNGDFTFKLTATLTSGGSSLTKDFTVTAKEKKFYGYLFAYFTGNSPNEEQVRFGIGTDGLNFTYLNNNKPVILSSEIADTGSIRDPFILRGADGNFYMTLTDMKSDDGWASNRGIVLLKSQDLINWTSARINIAAKYPENFGNIITAWAPQVIYDRKTGR

SEQ ID NO: 97645 - protein, 297 aa, Unknown
  Obtained from environmental sample
  misc_feature (1)..(297): Xaa is any amino acid
GQTDEAEVVLLGLIEAAPSHFQALIALSGIYDQKNVPAKSRKMYDRAIGLELSDPRQLAVRGDLRAMALDLLGAEADLRAAMKLGLDDNAVRMRLSCLLLNQGRYREAWRLFRPGMILAALFDCYNTGSLRWEGRAMQGRTLIVRTHPHGFGDVIQMSRFLPQVKERSRARVLLSVYEPILRLMRGVPGIDGLIVQEKDKPPFDAVINLMELPYLLDIESTELPPPVSFSLPDTEPMPELERPGFKVGLVWGGNPIHGMDAQRSMGPRPLDALADLPGIVWYGLQKPPDQEPPRLPG

SEQ ID NO: 97646 - protein, 243 aa, Unknown
  Obtained from environmental sample
  misc_feature (1)..(243): Xaa is any amino acid
MALQRHQYTEVSVKYLAHVRKLDNSEWDEPQLLEDHLRGTAELARGFASEFGSGEWGYALGMSHDTGKGTLEWQKYFQVSSGYDEEASSEAHGRVKHSGAGAKLAEEQFGERVGRFISYCIAGHHSGLPDWSGSQAGLAFQMQQSSAKGIDEKFKQSLAGLAPKAPPWKLDLKKLDVSLWIRMLFSCLIDADRLNTEEYDKPDKSKERRGYSTITELSERFEKEMAAITQRPDGPFDTRVYDA

SEQ ID NO: 97647 - protein, 135 aa, Unknown
  Obtained from environmental sample
  DOMAIN (42)...(77): Sel1 repeat
  misc_feature (1)..(135): Xaa is any amino acid
MKKLVVALAVVVLLLPGRPALSAGGQAPDFAATLRAAEQGEAQAQFNLGFMYASGQGVAKDEAEAVQWFRKAAGQGHAEAQCNLGVMYANGQGVAKDEAEAVQWYRKAADQGDADAQNNLGVMYANGQGGRKMKP

SEQ ID NO: 97648 - protein, 147 aa, Unknown
  Obtained from environmental sample
  misc_feature (1)..(147): Xaa is any amino acid
GFGEVANGGNGIPYSDIELYLMGMIRKDDLPNDFQLDIYTGLSYSDKSGPGYFKATGKNSYTIEDIIRLKGARVPDAFNSQKKFKILTVILSDSQDTASSTRYDEIVDDVKWFAGDTSVRLGYNFKQATRGIGSLEVNKIMNSLKAR

SEQ ID NO: 97649 - protein, 280 aa, Unknown
  Obtained from environmental sample
  misc_feature (1)..(280): Xaa is any amino acid
MGTMAHSWVMSFDSEEEAFDCYASLYPDRTIFLIDTYDTLKSGIHSAIKTGQKLAAKGKNFGVRLDSGDIQYLSTEVRQLLDQAGLEKAFITVSNDLDEYIIETLVKAGAPVNSWGVGTKMVTGAQAAAFTGVYKLSARLDGKKAIPVMKFSDNPDKTTNPGVKQVWRIRDQKGEAVADILGIDGADEINTGRRFCFWHPSADYRHFYHTIEGSASMLLNKWIDNGVLIKEQPSLAEIKAHAASDLDSFDSTYKRLLNPHIYKVSITENLRTLKLEIIEK

SEQ ID NO: 97650 - protein, 169 aa, Unknown
  Obtained from environmental sample
  DOMAIN (1)...(168): Pterin binding enzyme
  misc_feature (1)..(169): Xaa is any amino acid
MIIIGEKLNGSIPSVAKAIAEKNEQFIRDLAKKQSEAGANFIDVCASVPEVREPEVLEWMINLAQESCDTPICIDSPSVRVIAQAIRFCKKPGLINSVSGEGDKIDTIFPLIANTGWECIALLSDDKGIPRTVERRIEIFRDIMNKADEHKIAANRLHIDPLIEMLCAS

SEQ ID NO: 97651 - protein, 66 aa, Unknown
  Obtained from environmental sample
  misc_feature (1)..(66): Xaa is any amino acid
MGRGGTYLNAEGMYEGVEKKVIYTNVSRRELPVLLSYIRDIDHTAFVSVLDAHDVLGDGFKPLSEH

SEQ ID NO: 97652 - protein, 71 aa, Unknown
  Obtained from environmental sample
  misc_feature (1)..(71): Xaa is any amino acid
MKIGMILDNEYLIDARVPNEAKHLARNGHEVFVLCLNYGKRPDYETVNNVNIVRFDMSIKQKNILFGIANI

SEQ ID NO: 97653 - protein, 277 aa, Unknown
  Obtained from environmental sample
  DOMAIN (199)...(277): ATPase family associated with various cellular activities (AAA)
  misc_feature (1)..(277): Xaa is any amino acid
EIDINEPSVETAIDILKGVKSRYEDYHHVHYSDEVVETAVRLSAQFITERRLPDKAIDVIDEAGAYARIEAYKHSQEDSGADEKTANETEEASTADLFAQDLFTTEKSAVDKTADDKMHKSSTVQEAQIEKIEITLPVIETVVSKIARIPQRSVGESEKDKLKDLEARLKQRVFGQNDAISAVVKAVKRSRAGFRADGKPVANFLFVGPTGVGKTELARQLAEILGITMLRFDMSEYQEKYTISRLIGSSPGYVGYEDGGQLTDAVRKQPHAVVLLD

SEQ ID NO: 97654 - protein, 161 aa, Unknown
  Obtained from environmental sample
  misc_feature (1)..(161): Xaa is any amino acid
FPAIQVCVLGQGPAEKEIAIIWGSMYGNTRAALDAVIWGIEKEGVPYTLHRVPDENISYVLAAAYKCSGLVIAMPTYEYAVFPPMAYALDIFRRKHIFGKKALRVGSWGWVGGAKKEYDAVLENLKWDSVDSYEWAGYPNEADFAFLEARGKELARKVKAG

SEQ ID NO: 97655 - protein, 274 aa, Unknown
  Obtained from environmental sample
  misc_feature (1)..(274): Xaa is any amino acid
DEYKYVSQLLNPDIPVEDDRYFAIVCELDRNETTEVIKTDDGREIEPGGIIDEIGTDIAIMKSNPVTGYSDAVRENILIQTERAKNKPEEMRNLLTKTYNIWVNDRPMGYINMTRWASCKVEEAELQSIIKEKAAGRCYIGIDMSDKIDLTSVGFIFPFDVDGNKHYALVSHSFMPEEKFLENKDNAPYDVWRKSGHLTVTDGSVINARAVVAWVVNKVEEEGWSPVMACFDSYQAMTLSPIIEEVAMTPVLVKQWIKYMTTPTKDFREAVYLV

SEQ ID NO: 97656 - protein, 201 aa, Unknown
  Obtained from environmental sample
  DOMAIN (2)...(201): Aldo/keto reductase family
  misc_feature (1)..(201): Xaa is any amino acid
AGLCGYFYHHRPDPKTPIEETMNALADIVRQGKALYAGISNYNAKESAAAISALRSLGVPCLIHQASYSMLNRWTEEGLLDVLEREGTGCICFSPLAQGLLTNRYLDGSIPSGSRASKGVFLKASVITDELLKKLNALNAVAREGGRTLATMAIRWILRDQRNTSVLVGASSSAQLKENLSSLAQAPLTAEELEKIDRILS

SEQ ID NO: 97657 - protein, 97 aa, Unknown
  Obtained from environmental sample
  DOMAIN (4)...(97): Large-conductance mechanosensitive channel, MscL
  misc_feature (1)..(97): Xaa is any amino acid
MKKFLNEFKDFALKGNVLNLAVGVIIGASFQGVVNSLTENILSPIIGLLTRQNFDSLKLEVLRIILKYGAFITSVINFIIMAFVVFMLVRIMNRILT

SEQ ID NO: 97658 - protein, 55 aa, Unknown
  Obtained from environmental sample
  misc_feature (1)..(55): Xaa is any amino acid
TLIFVSHDLPAVADVSERIVVLDQGEIIEDAPAFQVIRSPAHPRTKLLLESGLLI

SEQ ID NO: 97659 - protein, 237 aa, Unknown
  Obtained from environmental sample
  DOMAIN (82)...(188): Archaea bacterial proteins of unknown function
  misc_feature (1)..(237): Xaa is any amino acid
MLLKQELREGAIYNSIISAIALGAARINEISSRIGEERTKTNKYLDTLIGLNILYKEYPFGENPEKSRKGIYRIRDNCYRFWYRYVFTNKTVIEQGAGAALFKSFLPELNSYIGGPFEDICMQYMIRMNNLLALPFVFTQSGRWWGTNPKTRQQEEIDMVFSDINRKHFIFAECKWRNDLKDTAALEALIEKSKLLIQQNAFFYLFSKTTFSKSCISLARQTGSVVLIGQKELFSLK

SEQ ID NO: 97660 - protein, 161 aa, Unknown
  Obtained from environmental sample
  DOMAIN (91)...(152): DHHA1 domain
  misc_feature (1)..(161): Xaa is any amino acid
GVLRLSKTSARSFRAAITLLEFGVNPTEVYQELRENTALRSLLLQKKAFASLEIHCGGQVASQVLRTEDFTELGAINDDSDGFVNLPLRAREIVISIMIKESRKGKVKCSMRSKGAIDVSKIAHDFGGGGHINASGFNSDFNIDQTLALTLTKITAYLGIK

SEQ ID NO: 97661 - protein, 268 aa, Unknown
  Obtained from environmental sample
  misc_feature (1)..(268): Xaa is any amino acid
MQDPDKSQGYLVTAETMPSLLLKGENPRLIDEWQVAPVLWDAVRVEVDKRGEDGLFILTGSTSVDDLKIMHSGTGRIARLMMYPMSLFESGESNGTVSLQKLFNDRDYDIGGAKSDLSVEQLIFAACRGGWPASLFKKTDKASLFTASSYLDNICESDASTVDGVSRDPRRMREILRSYARNISTLSGNQTIIKDITANFGAISENTFYSYFNALNRLFVIDEVPAWSPAIRSASAIRASNKREFIDPSIAAAALKISPEILMQDLNT

SEQ ID NO: 97662 - protein, 239 aa, Unknown
  Obtained from environmental sample
  DOMAIN (1)...(239): UvrD/REP helicase
  misc_feature (1)..(239): Xaa is any amino acid
YLVGRGVPPPAILLLTFTRKAAREMLDRAMALAGHRAGEVSGGTFHSLANALLRPTAHLLGYPDGFTIIDQDDAEALLARIRGDLSEIKKYKRFPQKGALFSLLSQAVNKDRPLAEIVAENFAHFQEYTPLLEKIAREYRDQKLKNALMDFDDLLTGLETVLRDHEDIRQRLAGRYDYILVDEYQDTNPVQARLTHLLGRDHQRVTAVGDEAQSIYAFRGASFRNIMDFPQIFPGARIM

SEQ ID NO: 97663 - protein, 262 aa, Unknown
  Obtained from environmental sample
  DOMAIN (8)...(246): Glycosyltransferase family 9 (heptosyltransferase)
  misc_feature (1)..(262): Xaa is any amino acid
LEEKKAEIPELSKTLKETKAVRSIHFPKSLRTPIAAFLAGVPNRIGVSDGGAWLFNTHHAPFWKTGGPFVLRYHAALAKLWPNLPPMPFADYRSTAKASVPSARYICLMPGSAWPSKSWPAEHYRAIVLKAIEEGMEVATLGSLAEKKMCDMVLGDAASNGKGHNYCGQTGLREAAAILRGAVAAIGNDSGLSHLAAACGTKTIALYGPTDPAGSAPWGPNVTAIGPGALPCRPCFKKKCPLPRRACMEDIAPDDVWGLLKG

SEQ ID NO: 97664 - protein, 123 aa, Unknown
  Obtained from environmental sample
  DOMAIN (5)...(115): PIN domain
  misc_feature (1)..(123): Xaa is any amino acid
MNGRFVFDTNAIVYYLQGRNEWVEYIDSTPMTERAASVITRIELLSYPGISPAEQKSISRFLGDLVVVALSEKIENIVIDIRRTVRMKLPDAIVVATALSMGATLITGDHQLKNWNGRGFVSR

SEQ ID NO: 97665 - protein, 136 aa, Unknown
  Obtained from environmental sample
  DOMAIN (8)...(125): Formyl transferase
  misc_feature (1)..(136): Xaa is any amino acid
GRRREFSDRILSFCREKEIGLIVNAGFLSILAGDIIDAYAGRIINLHPALLPKFGGQGMYGEHVHQAVLKAGETESGCTVHLVDDGTDTGPILLQRKVPVLSGDTPESLAERIHKEEHIAIVEAVKIMIRRLEEAL

SEQ ID NO: 97666 - protein, 145 aa, Unknown
  Obtained from environmental sample
  DOMAIN (14)...(129): MGS-like domain
  misc_feature (1)..(145): Xaa is any amino acid
MKKRALISVYDKDGILDLAAFLVQSDWEILSTGGTSKHLQENKVPVTDLSSITGFPECLDGRVKTLHPTVHAGILARRDETSHMDTLKNLGIETIDLVCVNLYPFFEKVQAAGLTQEETIEFIDIGGSSMLRSAATNFNDVIVLT

SEQ ID NO: 97667 - protein, 285 aa, Unknown
  Obtained from environmental sample
  misc_feature (1)..(285): Xaa is any amino acid
DYSKNYEDVYVTIVFQATAENTYAVTVKEGTAAKSAYAEGDTVVITAHIAPPGKVFDKWTAATAGVSFEDGGEAVTTFIMPPNAVTVEAVYKSVSYRIYFVATGGTVTSYYGETGAGGKLDSLPTPTRTGYIFTGWYTLDVGGALLNANWPFDKSCDIYAHWVSESYRVVWKADGGLPAPTQTSVKHTGEITEPEALAKTGYDFGGWFADSVFATAVKFPIENVAEDMTLYAKWTRKSYTVLWNNDGLPAVTAHFHGDTIKTARSAGTKAGHSFDGWCLDYTLTA

SEQ ID NO: 97668 - protein, 212 aa, Unknown
  Obtained from environmental sample
  DOMAIN (37)...(126): His Kinase A (phosphoacceptor) domain
  misc_feature (1)..(212): Xaa is any amino acid
MPVVQDRQITGSVILIEDITERRNREAMLRRMESLASLTTLAAGVAHEIKNPLGALSIHVQLIQKAINAQEKLCSAVQSTKPTENECEPYKYFRQVDKYINVVNEEIDRLNRIIVDFLFAVRPMNVDPRRGSINEFIKELADFVSFELKEARIECVLNLAENLDAVDFDAALMKQAFLNLIKNAAAAMSGGGTLTISTEDAEGEIRITVADT

SEQ ID NO: 97669 - protein, 276 aa, Unknown
  Obtained from environmental sample
  DOMAIN (91)...(241): Thiamine pyrophosphate enzyme, central domain
  misc_feature (1)..(276): Xaa is any amino acid
KIPLRQLGDQEFNITDCVRTMTKFSEMIVNPNDIAYLLEKALYLAAHGRPGPVWLDVPLNVQGAVIETDALCHYDPSENGEEVPAQIAASRIDEIINKVKASRRPVVFAGSGVRTSGAHAEFIELIDKLQIPVVTAWNAHDVIWDDHPLYCGRPGTAGDRGGNFVAQKSDLLLVLGCRLSIRQVSYNWENFAPGAFKIMVDIDPGELLKPTLSIDMPICADVKDVIKSMNSRLKGKLDNHKKWVACGKEVNRKFPVCLDRYYEKASPVNPYVFLKE

SEQ ID NO: 97670 - protein, 186 aa, Unknown
  Obtained from environmental sample
  DOMAIN (1)...(78): Methyltransferase domain
  misc_feature (1)..(186): Xaa is any amino acid
FEQPCQYWGIEPFEEAANVAKTKIDKVLIGFYDEVANEIPDNYFDLVIANDVIEHMEQPWHFLKSIKTKMTAKASLVLSIPNVRYYDNLKKLLLHKDWKYEDSGILDITHLRFFTKKSIIRMLNENGYQIEKIQGINPIRVRKKHLLFYLLAKFIFGADIKFLQFGVKVINHNPLIFVKPKEEGTE

SEQ ID NO: 97671 - protein, 287 aa, Unknown
  Obtained from environmental sample
  misc_feature (1)..(287): Xaa is any amino acid
MNNVPQEVLDLETSAGPAEKVGEPFTVGTGFSSPSVWGVNCAGLSYAFSYNNATFVLLDQFRPVSGLYWGGQSGAIRAQLPWISNVLYNRPDGTHAFVFSHKALIHENHRDALFGRTPLANAKHQDTFIRALTGSGVGYLWAGHDHLHSRSIYTTTDGNRATSVHQIVTASSSSKFYTPVVPPPDDRDNIPAFGLRRQTMLTQELYTIGYYICTVDGPTVTVEYFSSQPVSTGGDIATTPDPLTFTKKETFGYNLGGKSYIIAQGAPYTVVRDDGAEILGGTNTFER

SEQ ID NO: 97672 - protein, 80 aa, Unknown
  Obtained from environmental sample
  misc_feature (1)..(80): Xaa is any amino acid
LLFAPHAGVISYLRKAGDWVDTGEPLFEVIDPLTDRVSIVCAGTSGVLFAVERLRYAQAGFWLAKVAGREALRHGRLLND

SEQ ID NO: 97673 - protein, 180 aa, Unknown
  Obtained from environmental sample
  DOMAIN (29)...(180): ABC transporter
  misc_feature (1)..(180): Xaa is any amino acid
MYKLEVQDLHKRYGSHEVLKGVSLAAAAGDVISIIGSSGSGKSTFLRCINLLEQPHAGKILLNNEELKLVANKDGAMKAADPKQLQRMRSRLSMVFQHFNLWSHMTALENVMEAPVHVLGMSKKDAREKAEHYLAKVGVGHRKDAFPGHMSGGEQQRVAIARALAMGPEVMLFDEPTSAL

SEQ ID NO: 97674 - protein, 191 aa, Unknown
  Obtained from environmental sample
  misc_feature (1)..(191): Xaa is any amino acid
MKNLLIKNGLVVTENSETVCDILCEGEKIVQIGNSLPSDAETEIIDAAGKIVIPGGVDVHTHLNLDVGFTVASDDFYTGTVAAACGGTTSIIDHPGFGPAGCPLDHQIKKYHGLAAGKAVIDYGFHGVLQHVDGNVLEMMETLADEGITSFKLYLTYGFKLSDADAFRVLRRAKDCGALIAVHPENDGVIN

SEQ ID NO: 97675 - protein, 240 aa, Unknown
  Obtained from environmental sample
  DOMAIN (1)...(225): NAD synthase
  misc_feature (1)..(240): Xaa is any amino acid
IREYFEKNANDRDCHAVVGISGGKDSSTVAALCARALGADRVIGILMPQGEQWDIGFSHELVDHLRIKKCVVNIKDGVDAVYQSLKEGGLLLNRQATINTPARIRMSVLYAVSAIVGGRVANTCNLSEDWVGYSTKFGDSAGDFSPLSGLTVTEVKAVGRELGLPSKFIDKMPADGLSGLSDEDNLGFSYNVLDRYIREGICENKSVKEKIDNLHRNNLHKLNPMPGYELKLLNHYDNLS

SEQ ID NO: 97676 - protein, 189 aa, Unknown
  Obtained from environmental sample
  DOMAIN (10)...(189): haloacid dehalogenase-like hydrolase
  misc_feature (1)..(189): Xaa is any amino acid
MKAYNLPIKCAAILFDVDSTLYTNPEYARSQIDLPIEKLARMRGITFNQMNNEMNQYRDNWIKAHNGQGISHGNIFKAFGISINESVKWREELCQPEQYLSKDTRLRSALEQLGDCFALGVVTNNPVSIAQRTLKVLGVEDMFRALIGLDTCGVSKPHAELLTRAAVLCGSPLESCVSVGDRYDIDIAL

SEQ ID NO: 97677 - protein, 113 aa, Unknown
  Obtained from environmental sample
  misc_feature (1)..(113): Xaa is any amino acid
MDSVLTAMVEEKIGPGERNRLLIQTAKEQLHFDYALALRSPAVALFTALKALNNTQSGQDNSAEGQAACKAAVISALSPRYYLQVLQDLNITPLYCDVSYDFPCMSRELIENA

SEQ ID NO: 97678 - protein, 92 aa, Unknown
  Obtained from environmental sample
  misc_feature (1)..(92): Xaa is any amino acid
VETRDTPAKGGGVARWEELATKTLVDCQAILVAGIGENPMKVLQQNGIRILQMSGLISNGLDAVYFNLPIKPLCQGEYTQCEACRITNSGCK

SEQ ID NO: 97679 - protein, 55 aa, Unknown
  Obtained from environmental sample
  DOMAIN (2)...(55): Uncharacterised protein family (UPF0175)
  misc_feature (1)..(55): Xaa is any amino acid
MIVAGKLYEQGRISLGQAADVAGLTKRTFIELLGDYGVSIFNFPVSDLAKEAINV

SEQ ID NO: 97680 - protein, 257 aa, Unknown
  Obtained from environmental sample
  misc_feature (1)..(257): Xaa is any amino acid
MTTKKAFLADLESLASALRQRVEASVSGFDPSPEAREKRKARAAKDLGFFAREYFPHYVSGKPSVLHTYLFERLPKLLNERGRKLALAAPRGEAKSTICSQIFVIWCVVHGRVHYVPIIQDAYDQAAQMLEAVKVELEANPRLQMDFPKACGQGRVWNAGIAITANDIKLQALGSGKRLRGLRHGPYRPDLVILDDIENDQNVATPEQRVKLETWLNKAVLKLGPPDGSLTVLYIGTILHYDSVLARTLKKPTWESR

SEQ ID NO: 97681 - protein, 178 aa, Unknown
  Obtained from environmental sample
  misc_feature (1)..(178): Xaa is any amino acid
MSKKNKNRVNKAPVSMPPVQIVAGFDRDIFTKTFQGLLKPSDDTLAQQGSGKGLAIYDEIERDCHAYAVLQKRKMAVVSFPWEIDPASEDAADVAAADGIREMLESVSVDGLTLDLLDAILKGYAVSEVEWNPETWMPVRFHPRDQRRFLFDAESKPRLLTPDNKQEGIPLPERKFII

SEQ ID NO: 97682 - protein, 101 aa, Unknown
  Obtained from environmental sample
  DOMAIN (51)...(97): Aspartate carbamoyltransferase regulatory chain, metal binding domain
  misc_feature (1)..(101): Xaa is any amino acid
TSDRCGRKDIIKIDNTISINLDVLGLIDPNITVNIIENERITKKIKLQLPQKVENVLICKNPRCISSTEKYVKHVFLLENINLRTYRCEYCDEIISAGDFK

SEQ ID NO: 97683 - protein, 187 aa, Unknown
  Obtained from environmental sample
  DOMAIN (17)...(186): Orotidine 5'-phosphate decarboxylase / HUMPS family
  misc_feature (1)..(187): Xaa is any amino acid
MTIPAVDRLFEAVALKGHVCAGLDTSVDYIPDDERRKAQNDAEAVLAYNKALVDSTYDIAACYKVQIAYYEEMGTAGLCAYAKTLEYIRSKNCIVIADIKRGDIADTAMRYANAHYSGEFEADFVTLNPYMGMDSLEPWINKAKEKGKGAFVLMRTSNPGMKDFEYLEFTNGQRLYNAVGDKLSGLA

SEQ ID NO: 97684 - protein, 66 aa, Unknown
  Obtained from environmental sample
  misc_feature (1)..(66): Xaa is any amino acid
MSEKIIRLLRDSGAMLEGHFLLSSGRHSDKYFQCAKLLQYPEKAHAALEQSADLIIDDIKTGKING

SEQ ID NO: 97685 - protein, 158 aa, Unknown
  Obtained from environmental sample
  DOMAIN (1)...(141): Dihydroorotate dehydrogenase
  misc_feature (1)..(158): Xaa is any amino acid
AAVRRVCVSKPLIVKLSPNAPSIGTVALACIRAGADALSLVNSFKAMAIDVINKKPVFDFTTSGLSGPAIKPIALRMVWELYETLKESNMQVPIIGIGGISCANDALEFLMAGACAIQIGSSTFVNPYTMPDIIKGIIQYMQNNGIFELGKISIRNEK

SEQ ID NO: 97686 - protein, 217 aa, Unknown
  Obtained from environmental sample
  misc_feature (1)..(217): Xaa is any amino acid
MLAPSSIQGDALTKDKTPSLALRLGRVAFLNDCSSEVLARVLPLYLTAFLGQTPAFVGIIEGAAESAAILLKGVSGWLSDRAKSRKGFVLFGYALSVAGRALYLFSSLAWALGASRVLDRVGKGLRGAPRDAMVADAAKGRAGRDFGITRFLDTLGALTGILLILALGVGKGPLTESVFRVCVWIALPIGLSALALILFGVPRVTREGTVPKRLSWQ

SEQ ID NO: 97687 - protein, 95 aa, Unknown
  Obtained from environmental sample
  misc_feature (1)..(95): Xaa is any amino acid
MRTYHSLPALVIAVMLAGLITLSCASTGGGRKAADRTLPQYSQKGWKNVKIVGGGMIPGIIFNTTQKDLAYVRTDMGGAYRWNPENESWIPLTDL

SEQ ID NO: 97688 - protein, 191 aa, Unknown
  Obtained from environmental sample
  DOMAIN (43)...(187): YjeF-related protein N-terminus
  misc_feature (1)..(191): Xaa is any amino acid
MTETGLFKNNNNVLTAALIKRIDQSAINGSVDIGYSYMCAAGRHISGTAMAILEKTALKGGNTKTAVICGKGNNGGDGYAAARLLREAGVNVDCFSVCDTRELSGEASLAHKDYIELKNGVVRVLTSDEQLLDFSNYGLIIDAMLGIGVSGEPRGLYAYVIKAVNDSKAFVLAVDTPSGLDCDNGKCASVC

SEQ ID NO: 97689 - protein, 105 aa, Unknown
  Obtained from environmental sample
  misc_feature (1)..(105): Xaa is any amino acid
MRRFETNVLNQIRRRGDGVGGCPVIVACSGGGDSVALLVCLVGLRESLGVDIKAAHVDHGLRPESKEEANYVQELCKRLGLGLTTCSLDVAAHASSTDQGLEMAA

SEQ ID NO: 97690 - protein, 173 aa, Unknown
  Obtained from environmental sample
  misc_feature (1)..(173): Xaa is any amino acid
MYIHDLNVPWLEHGFVRNRFMLRDESEVERIIQAGIHEVLIDTLKGLDAVNAPTAKEADKVLMNNMISIATAPGSGPAFHYSESRWAESKQIHDDAVKVVGNVLKDIRFGKQVDVRRASSVVSHITDAILGNDGTLVSLCRIKQRDTYTFQHSVSISALMVTFCISIGGFSEG

SEQ ID NO: 97691 - protein, 245 aa, Unknown
  Obtained from environmental sample
  DOMAIN (1)...(245): UvrD/REP helicase
  misc_feature (1)..(245): Xaa is any amino acid
VLSPGRGTGKTRTLIRRFCHLVSTLGIAPKNILCVTFTNRAANEMKQRVRRALGDMDLGLVCTFHAFCVHLLRDEIHLLGYPRNFVILDTEDWKDILLKIFGDMGLTLRDATIRSVIDNVLEAKKMYASTYIEDILLLDNERIKARFAHASSRDEEIFLRYLYEQKKCFGCDFNDLINFATYILERFPEVRAKWQDRMQYVMVDEFQDVSAKQFQLARLLSGGHGNLFIVGDPDQTIYTWRGSHY

SEQ ID NO: 97692 - protein, 261 aa, Unknown
  Obtained from environmental sample
  DOMAIN (1)...(248): Aldo/keto reductase family
  misc_feature (1)..(261): Xaa is any amino acid
GLSLLAFGCMRFPVLPTATRPSGPEINEAAATALVEYAMAHGVNYYDTAWRYHAGMSEVMIGKALKRYPRESFFLANKMPGALDPTLEKAKEMFRTQLKRCQVDYFDYYLLHNLRSLTAYKRTYEEFGILDFLLEQKAAGRIRNLGWSFHGDKEVLEYILAGPTDWDFAMIQLNYHDLLHGYVPRPSLLKSVSAPASPQWVFEKMLKTTIPLMVMEPLLGGRLARMNKKALTVLQEERPQASAASWAFRYVAALPNVLTVL

SEQ ID NO: 97693 - protein, 84 aa, Unknown
  Obtained from environmental sample
  misc_feature (1)..(84): Xaa is any amino acid
MMEINGRWFYKAHGLKTLDLISAFFNNRLKGRTEMPLRIFAPPPDGVNNPEQGKDWEINYYTQMQNPPELRIRYAPAMPAPEEK

SEQ ID NO: 97694 - protein, 231 aa, Unknown
  Obtained from environmental sample
  DOMAIN (43)...(119): Ribosomal Proteins L2, RNA binding domain
  misc_feature (1)..(231): Xaa is any amino acid
MGIKTYKPVTPGMRAWQSLDYSELTRDVKPEKSLTEGRKERAGRDSNGRISVRHKGGGHKRRYRVIDFRRDKVGVSGRVAAIEYDPNRSSNIALVKYTDGEKRYIIAPKGLLVNARVISGSNVPIETGNALPLENIPLGFTVHNVELTLGKGGQIVRSAGAGALVAAKEGDYVTLKLPSGEMRMIFKKCYATIGTVGNEDHMNVQIGKAGRKRWMGVRPTVRGMSMNPVDH

SEQ ID NO: 97695 - protein, 278 aa, Unknown
  Obtained from environmental sample
  DOMAIN (3)...(68): HAMP domain
  misc_feature (1)..(278): Xaa is any amino acid
MFLLITVAIITVVIYLVVGGLLRRVNYLVTGIGKIAKGNLDAKIEGSYNDEFDIIKDAVNSMAADIKIHMKEKVQTERKLAESRISIMLSQIQPHFLYNALAVISRLCDKDPAEAKKATINFSNYLRANMNLLERTEPIPFENELNHTIGFLNLEKAMYGEALKVIFDIQTKNFKLPALTMQPIAENAIKHGIGKKEGGGTVTISTKETDNGYLIIISDDGAGFDSEKTADDGQQHIGVNNVRLRLSAQCGGSLEIESKLGAGTTATIIIPKQEAQAK

SEQ ID NO: 97696 - protein, 298 aa, Unknown
  Obtained from environmental sample
  DOMAIN (1)...(127): tRNA synthetase class II core domain (G, H, P, S and T)
  misc_feature (1)..(298): Xaa is any amino acid
GGGETEKQIYRFKDNGERDVALRFDLTVPFARFTAMHSAELTFPFKRYHIGKVWRGENTQRGRYREFMQCDFDIIGSDSVPADFEIILLIYSTMKNLGVDVTIHVNHRGLFNRFLSHIGQSEKSVEVLRTVDKLAKVGEDETLKSLTELAGEVNAKKIIEFINAKGSFSQVLDRLTELSGGSCPESERLASLRQYMLDSLGGDSSAEPFVLSPSITRGLDYYTGVVFETFLNDLPDIGSVCSGGRYDNLAGLYSKDKNSISGVGASIGLDRLIAGLESLNKLPAADTCDVAIACVEIE

SEQ ID NO: 97697 - protein, 109 aa, Unknown
  Obtained from environmental sample
  DOMAIN (26)...(59): Tetratricopeptide repeat
  misc_feature (1)..(109): Xaa is any amino acid
EYRIKGDYDRAIADYNQVILLDPNDADAYDRRGLAYMGKRDDDRAIADLTQAIRLNPNHADAYTKRGYAYAGKGDLDKAIADWEAVLRIDPNNAQAKQYLEKARQQRGR

SEQ ID NO: 97698 - protein, 266 aa, Unknown
  Obtained from environmental sample
  misc_feature (1)..(266): Xaa is any amino acid
ISETAEDTDTDQARRIERLEAEKTRIEKEIEAIHDGRMRVLPYPSALEQIREIISLADELTGDFRHVRDQFDQLNHELRKRLLDIEGSRGETLVSVFTNYDQIIESEAGKTFNAFWRLLTDPEQSAIFDQALESVISREFVKQLESKDSRFLKRMTSNLLEQSRIVHKVMHDLARSLKHFVQSREFLEQRRLNQIIKDAQRTAMAIKDEVKTTDVINNLTLTSSNIRSLSQWVLYDPAIQPLLHGMNDGDIPDIDLDSVAELVASP

SEQ ID NO: 97699 - protein, 70 aa, Unknown
  Obtained from environmental sample
  misc_feature (1)..(70): Xaa is any amino acid
MTERVSKLRQQSLETVPSLSIERALIVTEVYKEYEGKVSIPVLRALSFKALCEQKTVIIYDGELIVGEKG

SEQ ID NO: 97700 - protein, 207 aa, Unknown
  Obtained from environmental sample
  DOMAIN (139)...(205): His Kinase A (phosphoacceptor) domain
  misc_feature (1)..(207): Xaa is any amino acid
MPEATDPRQLMEAFAAFTAASEQLQARYESVQKQLGLLQNEFQTVLEAVPFDIWVLGENGEPRFTNKPDARPGAFMDGPPPWEPGAPNGIRRFRDLEDMDHFFEQESRPTEKGKIVILRDVTEQHLRAQQSSREDRLQAMGMMAAELAHEIRNPLGSLALFAGMLVEDLQDSPDSLELCRKIQDGTQRLNTLVSNILTFSRDLPPNP

SEQ ID NO: 97701 - protein, 147 aa, Unknown
  Obtained from environmental sample
  misc_feature (1)..(147): Xaa is any amino acid
VITQYRRALLQTLDALCILGALLMAQFCTILPDLFILADYKGASTFTLFFYLLFLYILDAYKLGEEDIRDTIIRLGTACVLGILSSAVASYALDHYRFDRATLLAIGSSSFIFCLIWRLFYHWNMDQLTHPLRVLFVGTDKAGKVRA

SEQ ID NO: 97702 - protein, 118 aa, Unknown
  Obtained from environmental sample
  misc_feature (1)..(118): Xaa is any amino acid
GFSTIDGYNNAYPLKYALAFREIIAPQLEFNAEHKKYYDSWAGRMYLYNNDVSYQPTRSRAAAPVTLRINMEAFRKLGGTYILSRAEIGNAEELGLKYIRKFSNNRSIYEIFVYKAVI

SEQ ID NO: 97703 - protein, 67 aa, Unknown
  Obtained from environmental sample
  DOMAIN (7)...(67): Bacterial DNA-binding protein
  misc_feature (1)..(67): Xaa is any amino acid
MKGIGNVTKKDLVNDISSRTGLPQVETKKIIECFLDSVARSLIEGNNIEIRGFGRFKIRNRNGYKAR

SEQ ID NO: 97704 - protein, 195 aa, Unknown
  Obtained from environmental sample
  DOMAIN (117)...(140): 4Fe-4S binding domain
  misc_feature (1)..(195): Xaa is any amino acid
MGFMYGISVAIKLNKNIIKKILSGPYLDYYEEYEAVNKKLGYIRKTLSEYINSLGYSSFKDVIPQNDDWRTPLPHKTIARLAGIGWIGKSALLINEKYGSAIRITSILTNIPLEVNVIKIDSKCNDCKICYNECPANAINGINWSIETDRDKLIDPKKCKLKVIERGKKFNIDVGSCGICIAVCPYTRKYINNME

SEQ ID NO: 97705 - protein, 254 aa, Unknown
  Obtained from environmental sample
  misc_feature (1)..(254): Xaa is any amino acid
VLRLIPAIYMKNFESITTTGSFTLSGYIKGAYNDKQMPNAGVSLAIDNAMFKYPNLPKSVNNINVKADAYYDGAVFDKTTLDVEKLHFEMAGNPFDAELRVKTPASDMQVAAKFLGKIDFNSLLDIIPLDDISLKGLLECDLALAGRMSALENKQYEDFDAKGMLKLSGIDFISPGLPLAVKIAGTRLDFTPRRVDLTDFDALIGNSDISLNGMLENFIPFVFKGGTVRGSLNLKSNNVDLNEFMNAKNAGKPK

SEQ ID NO: 97706 - protein, 274 aa, Unknown
  Obtained from environmental sample
  misc_feature (1)..(274): Xaa is any amino acid
LSGVVRNSAGESVVGAQLRVLRDGVLVDELTSTPQSGAYVFYLNAGTYTITAEKPGFAMFGRSVAVTGAVSQNITLKEGAVLVSGVITGSAWVNGGYVNAPITSSRVTFIETGVAKPDTFMVTGDAVFGKFSVSLPIDKTYKVTASAAGFAPGTEKQLNTSDAGDNLSMSYVDTLVALAAIKGRVTDLPDDLQADVTVYGAESRIVASVKSVGGVYEARNIPDGVFTVRAGAAGYFTRDYHQITVTRGRPGTAANYDFGMEEGNKSIRFKSDGG

SEQ ID NO: 97707 - protein, 239 aa, Unknown
  Obtained from environmental sample
  DOMAIN (51)...(173): Response regulator receiver domain
  misc_feature (1)..(239): Xaa is any amino acid
VEWGTEAYIPGVRFVSIPAQSLSIANVLNGKADDKGYIKSSGIIRFTFPRAQILVVDDISTNLKVVEGLLAPYRSEVDTCLNGLQAIELVKRNDYDIVFMDHMMPEMDGLEATAIIREIEMNNAEMGIRRKQIPIIALTANAVVGMREMFIENGFNDFLSKPIDISKLDEMLNRWIPKEKREEGTGNREQGTDNSEQITENGEQGTDAQDSTASSGVNEEGQQGGSPNNGYSNNIRGHA

SEQ ID NO: 97708 - protein, 251 aa, Unknown
  Obtained from environmental sample
  DOMAIN (2)...(251): Dihydrouridine synthase (Dus)
  misc_feature (1)..(251): Xaa is any amino acid
LALAPLHEVTDRAFRTVMREMGGLGMTVSEMVSSEALVRKAAKAEKMLEGDGGRPFAIQIVGARPEVMAEAAIIASDSGADIIDINMGCPASNVTGGLAGSALLRDIGLAESIAKAVIKAAKAPVSVKMRVGWDDSQKGRGEYLDFLKMFDAIGVSAVTIHPRTRAQQYSGVADWACIARAVDCGLGYPIIGNGDVLNAGDAERMAAETGCQGVMVGRGGMYNPFIFKQITDRAVAVAPKLRIGATIRFLK

SEQ ID NO: 97709 - protein, 93 aa, Unknown
  Obtained from environmental sample
  DOMAIN (3)...(83): Ribosomal protein S19
  misc_feature (1)..(93): Xaa is any amino acid
MSRSVKKGPFIEKTLYKKVLELNKSGERKMLKTYSRCSTIIPEMVGGTISVYNGKTWIPVYITENLVGHKLGEFAPTRIFRGHAGSDKKAQAK

SEQ ID NO: 97710 - protein, 67 aa, Unknown
  Obtained from environmental sample
  DOMAIN (1)...(62): Ribosomal protein S17
  misc_feature (1)..(67): Xaa is any amino acid
MDKTIVVSIETLTLHPLYKKYVKRVKKVKAHDEKQDAKIGDRVRVIECRPISKEKCWKLVEIIERAK

SEQ ID NO: 97711 - protein, 112 aa, Unknown
  Obtained from environmental sample
  misc_feature (1)..(112): Xaa is any amino acid
MTVEMTLRSIENDMAVINVQLPAQDAGRTAEAIKHLLTFAGQDVCWLNGEGERLLSVEEVFPDMSPAKVLRGLRGKEELTQAEFADRIGISQHHVSEMETGKRSINIDMAKR

SEQ ID NO: 97712 - protein, 283 aa, Unknown
  Obtained from environmental sample
  misc_feature (1)..(283): Xaa is any amino acid
DYYLCHAIGQSDDDFTKRYEKTGAFDYLLQQKEEGRIRRLGFSFHGAPERMAMLLPRQNWDFAQIQLNYLDWDLIQAGTLYAMLAERAIPCLVMEPVRGGSLHTLCEPAIDILRAANPQRSPASWAIRFAASLPNVLTVLSGMTTLEQVHDNVATLENFQALTQAERQILDQVCAAYLAAGAIDCTACRYCMDCPNGVDIPGVFAAYNRCATSLGLPVYVSIMHRTNKNAQAFLKSCEELPPASRADNCTACGQCLEHCPQQLDIPDKMRLIAGLYKELRGKP

SEQ ID NO: 97713 - protein, 198 aa, Unknown
  Obtained from environmental sample
  DOMAIN (32)...(198): FHIPEP family
  misc_feature (1)..(198): Xaa is any amino acid
MADAARVGGEGALSKSPLGNTKDLFIAIGVIIVVVMIIIPLPIVLLDTLMALNVILSLLVLLIVLYAQKPTEFSLFPTVLLVATVFSLALNISSTRLILSKGAKFDGKMIRAFSTFVVGTGGTQGLVIGFIIFIIIIAVQAIVITKGATRISEVAARFTLDSMPVKMMAIDTEYSSGSITEEEAQRRKAQVQRESDFY

SEQ ID NO: 97714 - protein, 253 aa, Unknown
  Obtained from environmental sample
  DOMAIN (12)...(64): Clp amino terminal domain
  misc_feature (1)..(253): Xaa is any amino acid
MSERTKRMLENATEEARTLGNEYLGTEHLLAAAFREENSAVQAYLSQAEINLEMFRALVKTSFNRKGQTEAGFSVGLKFSPGQSFGINLGPRIKPASYPVLTPALNEFSRDLTALARAGKLDPVVGRKKEIERALRILARRTKNNPVLVGEPGVGKTAIVEGLAQLFAGDAVPTALAGRRILSLDMGSIVAGTKYRGEFEERLKKIMKEITQSHNIILFIDEIHTIIGAGGAEGTVDASNMLKPGLSRGDLQC

SEQ ID NO: 97715 - protein, 200 aa, Unknown
  Obtained from environmental sample
  DOMAIN (2)...(168): ABC transporter
  misc_feature (1)..(200): Xaa is any amino acid
ETTLLLTIVGILELSTGTIEIDGIQLEKKTVNEIRKRTGLVFQNPDDQLFMPLIYDDVAFGCRNFGMSEDEIKIRVDKTLNQLNINHLRNRSSLRLSGGEKRLAAIATVLAMEPSILMFDEPTAFLDPKAKRSLIQTLKILNHTKIIATHDITFAANVCDRVIILKNGQIAADGNKDLLYDKELMTNCGLEAIEGRNVNL

SEQ ID NO: 97716 - protein, 43 aa, Unknown
  Obtained from environmental sample
  misc_feature (1)..(43): Xaa is any amino acid
VFGRVQEGMDVVDKILKVKTRTVGIHGDVPVDMVLITGAGRFE

SEQ ID NO: 97717 - protein, 238 aa, Unknown
  Obtained from environmental sample
  DOMAIN (145)...(218): PUA domain
  misc_feature (1)..(238): Xaa is any amino acid
IVNENDTVSVSELKFSDNDNLASLLLNAVEADVFVNLTSIGGVLDKNPLLHPQAVVMPCISNVRDLDLDALCGGKTSVGAGGMYTKLLAARRAAQLGVPTLILPGRDPGVILAAFSGAQAGTWVRPGSRISRRKYWLAYRVEPKGVVRIDDGAAKAVSSQGGSLLPGGVLAVEGEFKAGDPVRIVHGDQVVGVGLSNYDSLSLDRIKGLKRHEVAVILGDAHYPEVVHRDNLLRDAAV

SEQ ID NO: 97718 - protein, 279 aa, Unknown
  Obtained from environmental sample
  DOMAIN (1)...(132): GTP1/OBG
  misc_feature (1)..(279): Xaa is any amino acid
VPRGGPDGGDGGGGGGIYVRAAERLLSLYDFRLQRRYEAENGRPGMGSQRHGRKGEDLILELPVGTQIYMQTPAGESLFADLSEPGDPVLVARGGRGGKGNEHFKTSTLRAPRFAQPGEPGEEHTLRLELKILADAGIIGLPNAGKSTFISRISAARPKIANYPFTTLTPNLGVMIHERDPGKRLIAADIPGLVEGAHSGQGLGHQFLRHIERTRFLVHVLSIEDVGPDNPWAGFDLINEELELFDAALAERRQILVINKCDLRPPEEVRRLLEQAEQD

SEQ ID NO: 97719 - protein, 270 aa, Unknown
  Obtained from environmental sample
  DOMAIN (121)...(242): Protein of unknown function DUF115
  misc_feature (1)..(270): Xaa is any amino acid
VIFLGLGGGFAPQAALDNTDAQIVVIDFDKDGIQELLSSKDYSPLLNNGRFSLLTDFTFDEIKNFILADYNPALYGGIKVIPLRTRTEHDFEKFNKTAAVIQEAIEAASADFSVQAHFGLRWFSNIIRNIKNAAITSQIFYAKKVNEAAIVAAGPSLDGQITSLAEYKSKGVFIICSDTAMPVLLHNGIEPDAVVSIDCQHISHYHFFGCNIQNIPLILDIASPPLLSRFSTLPVFFSGGHPLALYISRYWRVLPLLDTSGGNVTYACLS

SEQ ID NO: 97720 - protein, 162 aa, Unknown
  Obtained from environmental sample
  misc_feature (1)..(162): Xaa is any amino acid
MPVSSENIEAILCCCGLGSVRYYGNDPIRALSSLLMKGFDAYAHTNDQRFVADAARYFPGRCFCTDFPAALPAADKADILLVDALLEDRPLAELAQILAVLRRQARNIVLLLSVTEVEGSRRNREWWDARCLEAGMRRHSRGLQVIDYHERNSDPEEFALFM

SEQ ID NO: 97721 - protein, 304 aa, Unknown
  Obtained from environmental sample
  DOMAIN (1)...(110): Toprim domain
  misc_feature (1)..(304): Xaa is any amino acid
LIVESPAKAKTIEKYLGREWRVVASVGHVRDLVPEDGSVDTEKNFAMKWAIMPGKEKHIKSILDEVKKSDAVYLATDPDREGEAISWHILDILHERKALKSKPVYRVVFHEITKKAIQAAIADPREIDGNLVDAYLVRRALDYLIGFKLSPVLWRKNLGRSAGRVQSVAVALVVDREREIEAFKPVEYWSLDALCLKLKTENGELRTGEFTAHLTQFNDKKIEKMTIESSDAISEILHGLLGKQVLSSQFSDLSSKIPAQVISVEKKKTSRRPAAPFTTSTLQQEAARKLHFLGKRTSSAAQKL

SEQ ID NO: 97722 - protein, 67 aa, Unknown
  Obtained from environmental sample
  misc_feature (1)..(67): Xaa is any amino acid
MPEQRIIVTIDDSGKISAETEGIKGEVCVDALQKLLGEVADLESISKTDEYYQQIEQSVLNTQSVGR

SEQ ID NO: 97723 - protein, 212 aa, Unknown
  Obtained from environmental sample
  DOMAIN (99)...(128): Helix-hairpin-helix motif
  misc_feature (1)..(212): Xaa is any amino acid
FRRLSAWRIEFSGADPSVSVVAEQYRHRPWAVLVSTILSLRTKDEVTVAATKRLLEQAPSPTELAAMKVDNAAALAYPAGFYRTKAANLKKIAAILLERYNGEVPSDMDTLLGLPGVGRKTANLVLIEAFDLPGICVDIHVHRITNRCGWVSTKKPEETEMTLRKILPPKYWKSINALLVLYGQNLCRPVSPFCSRCIIKSYCVRTGIQRSR

SEQ ID NO: 97724 - protein, 74 aa, Unknown
  Obtained from environmental sample
  misc_feature (1)..(74): Xaa is any amino acid
MPAYYIKGHPFINFGAQKNHLGLYGKIPEIFKDKLKDYKCTKGGIQFPYKNPIPYKLVIEIIKYKTKEIKYKEI

SEQ ID NO: 97725 - protein, 208 aa, Unknown
  Obtained from environmental sample
  misc_feature (1)..(208): Xaa is any amino acid
MIIFEFVLIMLAAVLLSNLINRYIPALSAPLVQIVLGVIISLIPFGAFGFEFELEPELFFVLFIAPLVFHASYTSDKKILWDMKRQILGAAVVLVFLTVIAVGYLTNFLIPAIPLAAAFALTGALGPTDDVAVDAVAKRVAVPRKIMGILSGESIINDASGIICFQFAVIAMTTGSFSFKQASFQFVLLGIGGLLAGIVMTLIKYLIM

SEQ ID NO: 97726 - protein, 255 aa, Unknown
  Obtained from environmental sample
  DOMAIN (18)...(255): tRNA synthetases class I (I, L, M and V)
  misc_feature (1)..(255): Xaa is any amino acid
VKAIELAKAYDPKTFEERIYSLWKEQGAFKPESASDNGGKPFVVVIPPPNVTGVLHLGHGLNNSLQDIVVRFHRMRGVPVLWVPGTDHAGIATQNVVERKLKDRGTSRRELGREKFLEETWKVKHEHHAIISKQLARIGASVDWDRERFTLDEGLARAVREVFVSLYERDLLYKGNYLVNWCTSCGTAIADDEVDHEDTPGKMYHLRYYFADAKGDAARNAIMNGEGAPDGAAPTGAYIELATTRPETLLGDTAV

SEQ ID NO: 97727 - protein, 280 aa, Unknown
  Obtained from environmental sample
  misc_feature (1)..(280): Xaa is any amino acid
VTRATEYTYDGSPKSGYTGTPTAAPYTGALLIEYAGESGPATDAGEYTIKISLPSDAPYVGVESYKFIIEKANPAYTAPTNLTATYGQTLANVAFPTDNWAWQEASTTQVGNAGPRTHKATFTPDDTHNYSEKKDIDVTITVARANPDVTFPTSATITYGQTLADAAFAGHSGTGTFAYTAGTTKPTVSQSGTAYEVKFTPTDTDNYNTLTQNVAITVSKASGLAATNPGKQMISKGDLSPNTFDLSTIVLNKTASDHGTLSYALGTLTDASGILATDFF

SEQ ID NO: 97728 - protein, 270 aa, Unknown
  Obtained from environmental sample
  DOMAIN (62)...(262): Stage II sporulation protein E (SpoIIE)
  misc_feature (1)..(270): Xaa is any amino acid
ARATAERQRIDTELDIAMRIQMSMLPAAFPPLRGGKNEFDLFARVYPAKEVGGDFYDLFFIDDDHFAMVIADVSGKGVPAALFMAIAKTIIKNRLQSGEDPEHAMEIINRDLCDNNIMDMFVTAWICVLEISSGLLVFVNAGHNPPLVMRHGNDFRFLVSPPDLVLAGMDDTRYHSRQFRLKPGDILFLYTDGITEAATAEATAETGSGDEFYGKDRLKAFLDANAGRPLREMIDLFRDDIAAFANGAEQSDDITMMALRMCGPDSGSSI

SEQ ID NO: 97729 - protein, 142 aa, Unknown
  Obtained from environmental sample
  misc_feature (1)..(142): Xaa is any amino acid
MKKIFLILITVAAVFYGSGCKQNRSAVIRNADGRLNVTVTIFPPFDFVRQIANDKVNLKMLLPPAAESHSFEPTPRDIITVHNSGVFIYLGGESDKWVDRILESMDTSQMKILRMMDAVETVEEEMLTAWRKKTKMKRIQAM

SEQ ID NO: 97730 - protein, 223 aa, Unknown
  Obtained from environmental sample
  DOMAIN (37)...(198): Mannitol dehydrogenase Rossmann domain
  misc_feature (1)..(223): Xaa is any amino acid
MRLNAQELAKKAQWEKAGIVLPDFDREAMVEATKKAPQWVHFGAGNIFRAFPAVLAQTLLEKGLMQTGIVVAEGYDGEILDKCFKPFDNLSLLVTLKSDGSIEKKIIASVASSFRLDRDIAALKDIFAGPSLQMASFTITEKGYGLVNRDGGLLPDIASDLQNRPDEAKSYLGRIACLCLERYRRGARPLALVSMDNCSHNGDKLFAAVEFFAKSWDRKKGSR
